United States Patent Application Publication US 2024/0084332 A1 - sequence listing, part 4

SEQ ID NO: 13213 - protein, 498 aa, unknown
  TnpB Polypeptide
MECVRRAVAVELERPPPELYAVEESYRRIVEEVAAYVAERGKLEKEKYKELYRRFRELYPLPAQLIQQAINQGVEIGRSFLALKKDGRVHKPSPEVRQVSIRFAKDSWSYKKAISSVAPVRLGLSLPGGRREVWIKPHRRFWLYWWKVLRKEAELASTLILKRRRGKWYAIFVFDLAPEREPPAEAVAFDVNENSVAVARVTLLSTVDAVAQWNRQYVDPAVYSIKTDFGRLAKRYEAVRNAKLEELKQKYPYAGKDDEEKIQNVADTREFRKFVRRLRERRRKEARVRQVAREMTESPAVIITEELGKNPQEEMIGLEKKKVEKRGLRHRIKQTPFKKLIRVVEDKAKETGSAVFYVSSFRNSKVCPIHFALLKNGGGWHTLHCPYGHVVDRDVAAVFNMLWKVTQAGTAKGVWWDLKDVKRRLEKGRGLVPKEAVRRRNQLVPWPVVYAIWTSLMAQKAGNKWPAVLARAAPMTPAQGADEGGTRAPPRGAGTPAL

SEQ ID NO: 13214 - protein, 225 aa, Hydrocoleum sp.
LARFLVDQIIIFSNQHLKKHAQLFPEYKEIYSEVQQINLQRLDQAWKRWLIPDKTGKRFGRPRFKKSGKLRSLSFSRVNHTKAAVKFDGKQIIISRFGAIPVIFHRQIPDGFVIKTATITKKADGYYVSFSLEDKSVPSLIPTDNIKTAVGIDVGLKEFLTTNNGESVPVPNFSRKSQSNLARKQRKIARKEVRSNNWKKAQNRIAKLHQHIARQREDFHAQYCS

SEQ ID NO: 13215 - protein, 120 aa, Moorea sp.
MRKAARRMIIRIQNLVNELHHKAARFLVDNFDVILLPTFETSQMSKKQHRKLRSKTVRNMLSFAHYRFKEFLKHKATEDGKVVVDVCEAYTSKTISWTGELVNIGGSKIIKSKIDGRSMD

SEQ ID NO: 13216 - protein, 251 aa, unknown
  TnpB Polypeptide
MTQVLTVSCKLKASQSQAAKLDATLEAFGQALNWVNQNTPEKVANAVKLQSLCYREIRARFGLSSNLAQQVCRRLAGARKVAQQKNRPVKAFKGGFATYDARIFSFREKDWTVSLTTVEGRERFELAIGRYQRERLAGSNPKSATLVKRKDGSYSIQICVETEPCPPQRTGRVLGVDLGRTDIAHTSEGDNWNGQQLNRVRDHYSKLRAVLQRKASKGTRSSRRRCRELLQRLSGKERRFQAWVNQGAPHR

SEQ ID NO: 13217 - protein, 559 aa, Methylobacterium sp.
MTVTSTTPFGGIKTEVVIRKYGLLQPTNWAEDCESEMRLMDDLWNKLVYINDEYISKYISLMCQEKNFSEAKSQYDNSVAASAAVSDIASSKRRLAIIQKDVARRMADALRALETSRREEVKVARQESGLWWGNYNALVRSFERARSAAIRGGQTMHRRSGGGDGRITNTLQGGAAVEALFDGSLSQIMVRPISARAWLSEIRGERRRLQRTFLSATVFVRDGERRTVTWPMIMHRPIPANCRVKEVIITRRRHGNSWRWAASFICTQQADRAVPEPTGAKRIAIDVGWRRVPDGLRVATVVISGQSPSFIVLPASMLESFSLIDELRSRLQASNRLGIEMLQSANLGSFAQPFQDLLRDFQSISEKRPVDLAKFCESDFFLLQARENVGMDLWAWRKGHKRLTEWLRNHHRKTVGHRNHFYQNKIIEALDQASEVIVNDVKVGEIAARRTSRSESPFVPNRVGHYRRIAAPSELIRALKLQAEKRKIAFNKLEAESPVRCPTCGSLSRKTRADALPQVCANCDSSFDQDVVACESLLSPAPTARTTRSVKARSAAATT

SEQ ID NO: 13218 - protein, 412 aa, unknown
  TnpB Polypeptide
MISQKIRLKLTKGQERLAWWYSKVSRNFWNLLVDIDKCNNKGEFDEILNKNGNKTYYSKFYDREVYKLNQSDYLKLAKLVVAKNYEKNKELWSWYYQPNQFFIYNFLSRELVRIRKQNKGRLNFRGISKVQPSFNVRCDISSDKKRPSRIYLKDSGKLQIPTIGDVRFGSIRADFNLSCKKQVANISFDGKYWYLSYTEDVENQVTELPDYTDGVGIDLGIKTLATVSDGTTVPNIKTFRRVRILNKRLKRLQRKVSRKYHINKCNKHNKTKNILKLERQIKLIHRSLRNIRINHIRKFVSELVKKQPQYIAIEDLNVKGMMKNKYLAKDIVNCSFYTIRRHLIRKATERCIAVRLVDRFYPSSRTCSNCGSYNKDLKLSQRVYHCSNCREKIDRDFNASLNIAKTDNYVLA

SEQ ID NO: 13219 - protein, 370 aa, unknown
  TnpB Polypeptide
MESFRMIVNESIRLGLEHNVTSKFMLQSLIYHRFSKEIYSAYVITAVFKASEILKRYRKAKRKNPDTKKPFMRKKMLVVDNQRYRITHSRLRLPVSPRQFVYIPLNHHVCEVLSRPGLKLGSITLNENKLCIPYSRGILRKDPCGYLGIDMNLENATCFDEHGNTTVVDMSHIVYTKMKYREVLSHFNRNDSRIQGKLKRKYGQKQKNRQDTYLHQRSKKITSSGRQIIMEKLSGIQKKYRRGNGQGPKLRFRLNSWARFKLQSMIDYKSIEANGFGVKFVQPHGTSARCAKCGKRLIPEERRKMWCISCRHIVDRDINASMNILARGLEMLGVMSARFEPDAVQGEAVKQFKDAEQIAPSLLARNNPSS

SEQ ID NO: 13220 - protein, 382 aa, Brasilonema sp.
MKTLKFKLYEHKRNRYLKRTINAAGVIYNHCIALHKRYYRIWGKHLNCAKLQSHIAKLRKRNPLWQSVGSQAVQDICQRIEKAYQLFFKHNKKGVRPPGFKKVKKYKSFTLKQAGYKFLGGNRVKIGSRVYQFWKSREIEGTVKTLTIKRTPLGELFMVVVVDNCVACKVNSTAGKIAGFDFGLKTFLTCSDGSRIDSPQFFKQSLNAIRKASKQHSKKLKGVSSGDATRTSNRERARLNLVRSYEDICNRRRDWFWKLAHELTDRFDVLCFETLNLKGMQRLWGRKISDLAFGEFLQILEWVAKKKHKQLVFVDQWYPSSKTCSSCGHILESLDLSVRVWRCPSCQSVNGRDDNAAKNIQMVGASTIGLGDVRRALPAVAV

SEQ ID NO: 13221 - protein, 310 aa, Microcystis sp.
MTGSVEPSVIDKLGFLSKNLYNCAVYLNRQGFFSHQPFLTMTELHHALKMSPDYQALPAKVSQLVLKQVEKTFKSYQKATEQYKKSPDKFTGEPKLPRYKDKEKGRNVLTYNYQAISKKALKQGLIKLSGTNLEFKTNLKEVLEVRIIPKLGAYCLEIVYEQPSSSSQEGERYAFIDLGLNNLAAVTSNIPEFQPTLVCGKALKSCNQKYNKTLAKLKSELPILQKTSKRIQGLTLKRNCQVDYYLHTASKYIIDKLLAHQINLLVIGHNQGWKQNINIGDRNNQSFVNIPHSRFIEQLIPILQSLTTEV

SEQ ID NO: 13222 - protein, 173 aa, Microcystis sp.
MDNKGVDKWDLSAYCWVLAHDFKFADELNSQARQASAERAWSSISRFFDNCKKKVAEKKGYPQFKKFSRAVEYKTTGWKLLNPKTIHFSDKKEIRTLKLKGTWDLGYFQQSDIKRVRLVRRADGYHCQFVLSCDVKEDVKPSGKCIGLDVGLASFYTDHEGNKVDNPKFLRKS

SEQ ID NO: 13223 - protein, 516 aa, Microcystis sp.
MLVVEAKLKNGTPEQYHRLDEAIRTSQFVRNSCVRYWMDNKGTTRNDLQKLCAVLANNKETPWVNKLNSQARQSAADRAWQSINRFYQNCHAKIPGKKGFPRFKKHSRSVEYKLTGYQLSDDRRKIKFTDGFKVGEFDLWCSQKTLVYYSEQQIKRVRVVRRADGYYCQFLIDVKRQEYHKPTGQITGIDLGLKEFYTDAQGNKVENPRYLRKSENRLKKAQRRLSKLFRQGKKQSKNYHKQRVKVAKLHLKVSRQRKDKAIKDALALVQSNDLVVYEALKVRNLVKNRKLAKSISDASWYQFTEWLNYFAKIYRIVCVVVPPHFTSQDCSVCGTRVQKTLSTRTHQCPNCKTILDRDHNAAINILKKGLQYLGNHLNASTSLGIDTERSRGIDTERSRGIDTERSRGIDTERSRGIDTERSRGIDTERSRGIDTERSRGIDTERSRGIDTERSRGIDTERSRSVNGTVGQTETDPNALGESDLWVFHGDIENLSCLVEQGISDSDRSRIPRHSVA

SEQ ID NO: 13224 - protein, 469 aa, unknown
  TnpB Polypeptide
MSQKTTIVSVKHSGAPVYLGIVSGEHSFSCNPYNIARWMCDGYRARFNQHRSNRCKYDANKELIPIGDRVINITDKQARERYSYLSALPAMVIQAAEKKESKEWFAAAKRKRVIGGKMPRFKSRKRDDLHFVCWERGTELRLSGRKTAVLVIRGKNPPGKRKHPDSGARWQLKVRIRVNQPIRHYTSVIINITKGTVVFVNPPEPTKVNPISRGNSIVGCDRGGVIPMATSDGVCYRPDAHKISHWEKRKKFHQKKMGKARCRAKNTGGKSAMYAVMRGNNYQHHKLQAAKYSGKVSAYKYGWLQEATTELIRQYGTIVIENLNVKSMTKNGGKRKKGMNRSFLSASPATIEKMLTYKALLNGNRLACIPPQYTSQRCHQCGHTHKDNRESQAVFLCTRCGYTGNADDNAAINIKQFYEFLLQGTDLPAHDSATDGGEVVKPTIPQGMIDQFYQGSFGDAADLQLFPRG

SEQ ID NO: 13225 - protein, 353 aa, unknown
  TnpB Polypeptide
MKKSVPTKTLKIRVKDKHSNQLQKMAVAVNYVWNYCNQLSNKAIQDRGQFLSAIDFQQYTKGANKELGLHSQTPQMVGREYAIRRNQFKKNKLKWRKSYGTKRSLGWIPINGQSIKWKNGQVYHNGSYYKVFDSYGLSGYEFKSSSFNEDARGRWYINITVQITPTKNTNTGMVGIDLGCKDTATTSDGEVLHGREYRKLEDKLAKAQRAKNKKQVRNIHAKIKNRRKDAIHKFTTGLVKSNGAIFVGNVSSKKLIKTRMAKSVNDAGWFMLKNILSYKCNYAGVFFEEVNESYTTQTCSGCGIKSGPKGISGLNERDWQCAGCGVQHERDINAAINILALGHGRLVGGIPCL

SEQ ID NO: 13226 - protein, 376 aa, unknown
  TnpB Polypeptide
MSYITLTLPFNVLGDDARILIATAKQFRLVTLKVFDEFLRDEKPPLSQFSMYKGYRKVGYEILPNRRYVDGAIDLVYGAIESVNELNRLYKEMGFNGEIKLEDIEWKNWLLFQCEGESQHMNVNIKIQEDLSFRVLAFDFDGDKSYIFIRPTIPKRYELILRNLWFYMQPYYARVVLKQFGNRKGVIFTHGEVQVSIDYDFYLDFMRRFDEPKGKNVAGVDVNLDRINLAIVSRDGKLRDYKTYWFREVKSRNMPRRRVLSLIGERVHELLKYAYHHGVSRIYFEDLSVLGKLKLIWIKNGKRFNENYNYAVQTFRSRVIEMIRLKAPIYGLKTSYVNPANTSKIGEIKAKKLGVDRHTASAYIIALRGLKLFNVV

SEQ ID NO: 13227 - protein, 402 aa, unknown
  TnpB Polypeptide
MFSEYNLVNKGIVVKLYPDESMRDKINQNINNARLTWNKLLEEYQETFELFKQQGYTKLQCNQKTFNTMLNMLKTQYPFLYESESSSLQQVYRDLITAFNRFFNNTSAYPRFKSKKNPKQSFRIQNNNNIKIQDNTIVLPKLGKVHYRTSTHYKRLLKESKINNVTIKKEHGHFYAVFNIETNVETMDYTYKSVGIDLGMRTLAILSNGLKITNLDTTHEEKMIKKYQKSLSRKKYNSNRYNKTLKKLGKWIQRKNNRIKDAYHKLSNYLVKTYDLICMETLDIREIFEETDYSKKLQNISWYKLVEMIKYKCEWYDKIFVQISQWYPSSKNCHVCGYYNKDLGDEKKWICPHCQTQHDRDINAAKNIEQKGFRLLSEKNKMNLRDWGDSTVILLSWESTCP

SEQ ID NO: 13228 - protein, 293 aa, Clostridioides sp.
MYPNKKQQELINKTFGCCRFVYNKYLAKKIEVYKNDKETFTYKQCSSDLTNLKKELKWLKEPDKFSLQNALKDLDNAYKKFFKEKAGFPKFKSKKTNRFSYKTNFTNGSQHIKLPKLGMVKIRDKQVPQGRILNATISKEPSGRYYVSLCCTDVDIEAFENTNNQIGLDLGIKEFCISSCGDFIENPKYLKKSLNKLAKLQRELSRKTIGSLNRNKARLKVARLQEHIANQRNDFLQKLSTKLIKENDIICIEDLQVKNMIKNRKLSRLISDVSWSEFIRQLNTRLIGMVDKL

SEQ ID NO: 13229 - protein, 506 aa, unknown
  TnpB Polypeptide
MKRSSKPTFVLALPLVVKPGDDRTLIGCMEAGRRLYNATLGEALRRHGLLKQSKAWQVTRDITDKKERSDEFKRLSKEAGFTSAAIITFARTCKNEAGWKDRLGSNVTQRIAEQVFSAMQQYAFGKRGRPRFKGANRPLHSLEATTNAANIIWKSETGCVVFGDITLAALLPTKEQDPYLHQALAHKTKYCRVLWRNVRGARSWFVQLMQEGLPPVKHEQACGEIVGLDIGPSTIAIVGHETASLVKFCSTVIQPWKESRRLLRAMDRSRRATNPQCFNANGTWKKGQKFTSSKRYKETQTQLAEAERKLAAERKRSHGELANEILGIGNVVQSETLSYIAFQKNYGKSVKVRAPGMFVERFRRKAESAGGKLTDLHTWSLKMSQYDHIAQTYVKKPLKQRWHVLGDGSGMVQRDIYSAFLARCVIDNKHHLPHLETMWAAQKPVLLRTGWLRHEPAKIEPSSKITVAAPSERVVRKRELAIGHGQDAVVARREPGDPDGFALRTP

SEQ ID NO: 13230 - protein, 372 aa, Alicyclobacillus sp.
MELTRTIRVRLEPTPEQASALARTVEANRQALDYVSRIAFERKIRNRVALHRAAYRTIRTRFGLRAQMACTVCRVVAGVYKSMKSNGNEDTPAEFKRAKPVFQWNKDYVLRNGVAHITTIDGRLRIPFRVEPPYRRYLQDGWTFGAAELVRKRHGWYLHVSVSKSVPDHADDFDAVIGVDQGMRFLVTASCGDQVMFIRGGRVKQTRLRYVRLRASLQRKGTRSAKRRLKAIGRRESRFMTDVNHQIAKAVVRFAQAQGQRPLIVLEDLTGSNLSVRFRLKDRYWRMSWAFRQLTDFIRYKAEEAGIAVMFIDPTGTSETCPKCGHCETANRSRKRHEFRCKKCGYRCNDDLAASRVIAQKGLECLRQSQSA

SEQ ID NO: 13231 - protein, 460 aa, Alicyclobacillus sp.
MPIRLWWNIGIGSCGSGLNTSRRLWRLKADEFSSWSQARSRTTWCKTWSKSLRRFARGCTGGVPLVTAPSALWRFSSVKIHRAYRYELAPNRMQRVMLAKHAGVARFAYNWGLARRIALHEEAGQSTNAIEQHRELNRLKKTDFPWMYEVSKCAPQEALRDLDRAFQHFFRGLNEGRKVGFPRFKKKGRDDSFRLTGSIRVLDNAVQLPRLGRIRLKEKPYVEGRILSATVKREADRWYVSLATETEIPDPVPPSGEPVGVDLGVSWFLTLSDGTKIKAPKPLRRYLRRLERLSKRHSRKKPGSRNRRKSALALARLHRKIRNIRQDFLHKVTTELAKTKRAIVMEDLHVRGMVQNRALARAISDMGFGEFRRMLTYKCAWYGSELIIAPRFYASSKTCSACGYVISELPLSVREWTCPACSTRHDRDINAAKNLLRIGTASSAGSDACGDPSGGAALGC

SEQ ID NO: 13232 - protein, 267 aa, Alicyclobacillus sp.
MVYVLRSGLAHITTFDGRLRIPYHVEPPYLRYLQDGWTFGAAELVQKRHRWYLHVSVSKTAPDPVGDFDAVIGIDQGMRFLITASCGNQVMFIRGGKVKQTRLRYVRLRASLQRKGTRSAKRRLKAIGRRESRFMADVNHQIAKAVIRFAQTQGQRPLIVLEDLTGSNLSVRFRLKDQYWRMSWSFRQLADFIRYKAEEAGIAVMLVDPAGTSETCPKCGHCEPANRSRKRHEFRCKRCGYRCNDDLAASRVIAQKGLECLRQSQSA

SEQ ID NO: 13233 - protein, 372 aa, Alicyclobacillus sp.
MELTRTVRVRLDPTPEQASALALTIEANRQALDYVSRIAFERRIRNAFDLQRIVYRTIRTRFGLRAQMACTVCRTVAAVYKSMKSNGNANALAKFKHAKPVFQWNKDYVLRSGLAYITTLDGRLRIPFRVEPPYQRYLQDGWTFGAAELVQKRHGWFLHVSVSKTVPDPVGDFDAVIGVDQGMRFLVTASCGNEVMFIRGGKVKQTRLRYVRLRASLQRKGTRSAKRRLKAIGRRESRFMTDVNHQIAKAVVRFAKAQGQRPLIVLEDLTGSNLSVRFRMKDQYWRMSWAFRQLADFIRYKAEEVGIAVMVIDPTGTSETCPKCGHCEAANRSRKRHEFRCKKCGYRCNDDLAASRVIAQKGLECLRQSQSA

SEQ ID NO: 13234 - protein, 416 aa, unknown
  TnpB Polypeptide
MKDKPYRTVRLRLRPLKKGQATQLYAVAGACRFVWNKYVERANRREFKSYTFFSLCKSFPQLRNHAECKWLQNYSSAIIRNTVCKRFAAAYQAFFDGVRDRPKFHSRYGRKSFDLYEGTFKRDGGDLYIQKIGWMKLKGADAYEGIGEVKKMTVKEELGKWYAYLVYELDADPQDYPTEHTILGVDVGVAIPVACSNGNDYPLPDRSRLEAKIKRYQRKVARQQKGSKRSKRTYQRIANARRKQKHIRHNWAHHVSKDLAKSRVVAFEDLNVAGMTKSAKGTPDKPGKHVKAKSGLNREILDKSWHQVALLTEYKACETVLVDPKHTSQTCSHCGCVGASNRKTQALYHCGECGLKINADLNASINIAKRALEKCPQTDRDQYRIEMASGSGASGRGRSVLTRDSSDPPTYVLGLT

SEQ ID NO: 13235 - protein, 524 aa, unknown
  TnpB Polypeptide
LKLKLAERIWISDRRKVERLKKLVYDLAHFRNLTLIFIREYHRKTGKWITSASVLYSLFADRMNRKSGEEKRRKVEEIKKNLDEGLKEWYLKILEQKRKIDNNWLVQQVLRQIESDFKSYFSSIKEYRKNPKKFCGEPKPPKPKKLQNLPRFTVEFNANVMRQNGRKLYLRLRVKGNRCFCIKLSRSFKVTSARLCYFLGSVYVDVIREEEFPDVKPLGNHIAAVDLNLDNFVVLVSTKPAVPSIIISGGAIKAFNQWFNKVKSKLQSEADRIRNEIEKFDEPPEELVKKERELRAKIRILCVHRKKWFDTHFHRLTKYLALFLYRTGHKTLIIGNGALNAKKGCNLGHKIAEKFVQIPYRSFIEKLRYKCQLLGIEVKEVSEENTSKINCLCDSPDARKMLSGQRIRRGLYLAFLKGKKVVLNADCNAAFNILRRGASLPNLTSILDPKVLMWKLCNPVKFKFFRFIELLQRNPRIPRGIGGSTAPEGQGIAPASLKSSENFIRHFLKQKGCAGLPATPLTPL

SEQ ID NO: 13236 - protein, 304 aa, Halorubrum sp.
MTTLRSELPDLKKWWDGLSDVYSKVLQTVVERLFDNLNSLSKLKENGYGVGKLNWKSPREFRSFTYSQSGFKLDKKGGQTVLSLSKIADIPIRLHRNIPDDASLKQVTVKKKPTGEWFATFGVQIDREPPEPTENPEKCVGIDVGILKYAHDTDGTAIESLDLSDERERLEREQRKLSRKQHGSNNYEKQRRRVAECHADLRRKRRDFLHKLSNYYAREYDLVAVEDLNVKRMMESPSNSRNTASAAWRTFFRMLEYKCKREGTQFVAVNPRGTTRECAACGVSTEKPLWVREHSCPACRFRDG

SEQ ID NO: 13237 - protein, 366 aa, Nanoarchaeota sp.
MQRTVSLVLEKNKDLSALIVLYNRVANIHIKYCLHHRTLSKKDLHHALYKEIREIYPGFPSALIQCARDHAVEMLKGNKMNSHTKKRLDSSIRFDPRTMKVFLDSGILQLTTHLGRKKYKIKVPDYFQKYFAWEVKSLNLGINKKHCLVKVVVEEKIPEQSRCSEVLGIDLGMRNFAALSDGQLIPSTEINRVKRKYAHLRKELQSKGTRSAKKKLQALAGRERRFMSGWNHSLTKYLASLPYGAFAVEDLKGIRKGRKGKVFNRKRSNWAYAQFQSYLQYKAEEQGKFVLLIDPRFTSQQCKNCLHIAKENRKGKTFHCQECKYISDADTNASKNISRRGAKIFFEQAVVNQPYISAYENKVVGV

SEQ ID NO: 13238 - protein, 431 aa, Lactobacillus sp.
MKPKSDEDDKRPHFAKLKYHFGIKLIAYPSSAQKKTIKQNSDAARFVYNEFVALGREGWNLRRLEKSLIQNQAGSRNPEWFDLALKSVAARLKVIGNQLYNPTRLKQRFKWLDKNKRIDSTMLYATLNFYHASWNMFRKVHSAGIPKFHKKSDSQRYSTLKTNNNIRIVDQNHLRIPKVGQIRVTKIPDWMMHRIDIEIGSATVKMDAVGRYSISLTLGSDQAFKEELPKTDSKVGIDVNVENLYTDSFGDVVENPRFYQKQQKQLQKAQRKLGKRASRAKKEHRPLRTAKNYQKQRKVVAALQRRVYNQRHNFLHYVSTALIKNHDLVVAEKLQGKNLLKNHALSQRIQDVGWGILFEDLAYKAKLYGKAFTKVDPKMTTQTCHTCGFVMGRGGTRKLTLKNRVWTCPHCQTKHMRDHNAAINILNKVTV

SEQ ID NO: 13239 - protein, 435 aa, Chloroflexi sp.
MKQIITAKLKLHTDTSQFAALRATQLAYRGALNYVSRYAFAHGKKSNQQWLQHETYAEVRAIYHLPAQMACNVPRQVGATYKTLWTKVKQNAVARKAGVTKKRYKGLDHPPRYVSPTLTYNYRRDYSLKEGQQVSILTLSGRVLVPYTGYNKHVALLHHGAHIGAAKLWYDKPHKQFYLLVMLELEIEPPPPERHQHVVGVDVGQRYLAVTARLDNGASFYSGKQVRAKADHYARLRKRLQHKGTRSATRRLVVLAGRERRLKQAVNHEISRRIVRDAPGSLIGLEDLTQIRERVRRKRGKQATKKQRKANRHASAWAFAQLHGYIAYKALLAGSMAVKVDAYHTSQACPRCGYASPDNRLHKGLLFVCQSCHYCLHADLIGARNIALRTLVSRQDWLTTGVLSVHPDGSDAEAKAARRARYAELRWSPGPSPQL

SEQ ID NO: 13240 - protein, 381 aa, unknown
  TnpB Polypeptide
MKKVQHAVKCKLIVTPNVVQELKATMREFSKACNLIAEIGFNQKLHRRFDLHHVTYNQVREQTNLPSQHAINAIAKVAEQFTRKRNKQHKFKQLSSVRYDARTLTFKRDFHEATLTICPKGRVSGELQMPAAMREKLRTWKIGSADLIHRHGQFYLHISINTDAPEVPKPTGSLGIDLGVKRVAVTSDNTFHTAKFIRHKKRCFQKTRSELQANGSRTSKRVLRRVSGRELRFVADSNHCISKKIVAHAKANNQRIVLEDLSGIRGRAKRFMTRHLHGWSFAQLRVFVEYKAKAAGVEVATVDPAYTSKGCSRCLHIGSRSSQSNFNCAHCGLRLNADINGARSVAVRYDLMATGGYFCTLEVSQPAQSVLTGETQAVSFT

SEQ ID NO: 13241 - protein, 461 aa, unknown
  TnpB Polypeptide
MSQKLTIVSVKYEGTPFFLGFDKQGNEMFTRHGERVMEYLADGWRFTYNLYRGAREKWAPVEEAEGKFTGEYENIGFLGSGPSELLPEAVPVFKDGEPVLRKDGTHATTQGCIPQAALKERYAFLRNMPTPVGNSAFIRLWENSDWSTNLKLRKTMRAKGLKASAAGMKKRKDGLTFKVQPVNLNKMVRVIKSKHAEITISGLLDKRHSSKGSKWSLRIKVRTHQPLVIPKPGATVMVNWTERTLAIAGVPKPLKRADNPRPIVGLDRGVTRTLASSEGVWYDIPKPTKEAEKQYRDGQRKIEVKVKGSKNYKKLRARLNKSVAVMARRRDYWTSVVSTELVRNFDTIVLEDLDVKKMTEKKKGKSSKTLNRHILESSWGDLRNKLEYKAALVGGTVGSVNPAYTSQACNKCHHVTKENRKSQSKFACVKCGHTDNADMNAAKNIRDSFLGNLVLPDRVSN

SEQ ID NO: 13242 - protein, 166 aa, Salmonella sp.
MKRAYKYRFYPTTEQAELLAQTFGCVRFVYNSILRWRTDAYYERKEKIGYLQANARLTALKKEPEFAWLNDVSCVPLQQSLRHQQTAFANFFAGRAAYPAFKSKRHKQAAEFTASAFKYRDGKLYMAKNKIPLDVRSESSAAVRAVYRHHFQRCRRAVLCFVPLRI

SEQ ID NO: 13243 - protein, 431 aa, Palaeococcus sp.
MKRTVTVKLQPSKEQEKTLKELVLISSKVWNRVNYLRRQEFFEGKPIDFLKTEKVAYEEFKAEIGSATVQQICRKNAEAWRSFFALIRTKRSGELPKWFKPKPPNYIKEGGLILLRNDQYKIEGNKFILKGLGKFKRLEVQFKGRIHLKGKQGRLEITYDPIKRKWYAHISYTVEETLWGEEWVELPREPLGNLSAGIDLGVNNLMAVYVENGESFLVNGRPLKSIAFYWRRRIADHQSKLNKSGSKKSRKLSRMHQKAKLQAKHYINAAVRQTVERLYQMCVSRIVVGYPKGIARNSDKGKKQNYLLSHVWRFNTVIKRLKEVAEEYGIRVFVVDEAFTSKTCPVCGKPHDGARFVRGLFKCPATGLVFNADLVGAFNILKKAVKTITPNLPGLSASRGNWGKTLPEGLKTRFSLGLNETPRTFSHSARG

SEQ ID NO: 13244 - protein, 442 aa, unknown
  TnpB Polypeptide
MQIISSYGVELRKQNIPIRQTLEIYRSAVSYLIGIYVQVWEELAEIPDAKRRFNAAEHLVHTTKKNHACFDFDIRFPKMPSYLRRSAIQHALGTVSSYKTRLDLWEKTDGKSGKPRLVYENHAMPVFYRDVMYREGAEGKDEAYLKLYDGHDWKWFCVRLEHTDMEYLRKYWSGKKASAPTLEKRHRKYFLRFSYTEEVTLTKTPVKEQIICSVDLGINTDAVCTIMRADGTVLGRKFIDHPSEKDRMYRTLGRIRRFQREHGSAQTQGRWAYTKRLNTELGKKIAGAIVRYAEENHADVIVFEYLEMQGKISGKKKQKLHLWRKRDIQKCCEHQAHRKGMRVSRICAWNTSRLAYDGSGAVTRDWENHSLCTFQTGKRYNCDLSASYNIGARYFIRELLKPLPATERSLLEAKVPSVKRRTSCVYADLRKLHTEMEFLKAA

SEQ ID NO: 13245 - protein, 320 aa, unknown
  TnpB Polypeptide
MPTGEQQRQMRRFAGSCRFVYNEALALQKARYERCEKKLGYADLCKLLTDWRNGPETPWLKDAPTHPLQQTLKNLERTYANFFAKRAGFPRFKKKGQSDSFRYPDPKQIKLDQTNNRVFLPKLGWLRYRNSRDVRGEVKNVTVSLRASKRFVRIQTKRKVEQPVPQSSSAIGIDMGVARFATMSDGSYLAPLNSFKKHEARLRRYQRAMSRKISFSNNWKKAKAKIQRIHSCIGNARCDYLHKATTTISQNHAMVCIEDLQVRDMSKSAAAGRTWSPGKTVRAKSGLNKAILRSKLVRIPSPTGLQAGVGRWMAHRRAAV

SEQ ID NO: 13246 - protein, 508 aa, Oceanobacillus sp.
MAKSETPTYILELELDVNPSQKAWLARRLKNAKAIYNACLGKALKGLKAVLADKNYRIAVKEISRLNKIAEAKRNRFEKASLKELKAYTKWLEKFYDYSEYSLHDFVKSVYKHYHFTSAEAQKLATRAFQAVERVHYRKANKVMFKGREVTISIEGKSDTSALKRVGDSVQFGKEHVFPMIVKKKDTYAEEALLDRTKYVRLLAREIRGKTRYFIQLVQDGYPPVKLERKVSYDKKKRVGLDKGVSTFAIVSEDKVQLRELAPECQFDYRKLRIIQRAMDRSKRATNPDNFQSNGTVKKGNIDKNGKREPLKWHFSKRYGKLKNKWKELHRSVAMKRKQSHEKLANEILALGSDIRVEDMQIQGLTKRAKKTKRNQKNGKIIRKKRYGKTVANHAPAMLVDIIDRKLGYQRCRIKKVNTQKVKASQYNHVTDRYTKKALSARWNEDINGERIQRDLYSAFLIMNTTENMEKVDQALCEKHWEQFVKLHHVAIEEIKMSNNLLLRWYIG

SEQ ID NO: 13247 - protein, 229 aa, unknown
  TnpB Polypeptide
MYALKLELRLNNSERTRMARHAGYARFCYNLARSLYLGVIDIKVSRTQKIALIKKTFTNFIKKQPEYQWTKTLSSCVYQNTFIAFNNALERFFKGRGGFPNFKRKKCGDSFTVDSSNRPIFLRAGNRIKIPTLGTFRLKEAIRYNCCSQTFTISRTADKWYVCFTIKADKIPPLYHSVSEITGIDLGVSTFATLSDGTVYQLPDSIKKAKIKLGKLQYRNRNVRIQVST

SEQ ID NO: 13248 - protein, 437 aa, unknown
  TnpB Polypeptide
MFLLNTVHLSKNVVYYNRKEVKLMYLCIKQQLKHLTKQQYLDLRELCRIAKNLYNVGVYNVRQYYFKEKEYLNYNKNYVLCKDNENYKLLNSNMAQQILKEVDGCFKSFFGLLRLAKKGKYDYRLIKLPKYLPKDEFMTLIIGFVRLNGNELIIPYSNSFRKNHEPIKITLPPILEDKKIKEIRIIPKFKARFFEIQYTYEVEEIQSNLDTNKALAIDLGLNNLATCVTSEGKSFIIDGRKLKSINQWYNKQNSKFQSIKDKQGIKGTTKKQALITIRRNNQVNDYINKTCRYIINYCLNNKIGNLVIGYNETLQKNINLGKVNNQNFVNIPVGNIKEKLEYLCKLYGINFVKQEESYTSKASFFDGDEIPKYNEDNPQEYRFSGKRIKRGLYQTKTGKLINADVNGALNILKKSNVVDLSVLYSSGEVDTPMRIRA

SEQ ID NO: 13249 - protein, 437 aa, unknown; identical to SEQ ID NO: 13248
  TnpB Polypeptide

SEQ ID NO: 13250 - protein, 548 aa, Actinoplanes sp.
LRSLAAPFVVAPPAGVRIRTRLRPTIEEAAVLTLVGTFLGGLYRADLAARIRLGDVSAKNTERTSRKRELTAATTSRWAGSITRAAEDQYQLAMRALKADVTSLAQALRVLDARIAAPVGGRAGRIPGYASQRERTTKQQRRQVLTARLNAALQRLTAGRPAIVAGGRRLAKTRHQLTTAGLTTAQWRSRWDAARMFMTADGETGAPHGNYTINVTSDGTVSIALPAQLRNLANAPRGRYVLTTRIAFTHRATQWSDRVTGDQSVRYDISLDAARDRWYLDASWTTPAHAACPDVPATVVDGGRMLGIDLNADHLAAHVTDTHGNPVGAPITIPLDLSGPASQRDGRLRAAISHALHLARRHGCPAIAIENLGFVDARATGRETLGRGGRGKRFRRTIAAIPTARFRDRLAGMAHTAGIAVIAVDPAYTSRWGGKHWKPALTAKTPTATRHHAAAVVIARRAHGHKARRRPGVTRTRPEDRARETTGQAAPQAAGAREQLGLFETARTTLVDKTCPAPTRPRHSRASKTAREAPDPGRNQHGQFWPTR

SEQ ID NO: 13251 - protein, 388 aa, unknown
  TnpB Polypeptide
MQQKIQTELKPSAIPHPLGVGKGRQEKNMRQQIAITGKIIGLTKIKEAMLQNEYDRFNQICRQIQECRNNDIEPQYSWFKNKDIYCSTVTNAFYIIKKQFCDLSEQPLYLRNDVSRIEKKETKFAKYWLKIPTKQRRQFWVAIKVAKEKEELLGYKFCDSKIVKRKNGWFAHITIEKEIIIKTDYKDILGIDLGIRRVASVVQLSNGVTSFYGKELRETRGHYFHLRKNLGIKKANKTIKKIADTEKRKVNDQLHKISRNIVNQALRTDSLIVLGDLKGISGKSNRGRKFNRKLNSMPFNKLSNFITYKANWAGIRVIKVNEAYTSKTCHKCKELGIRNRGLFKCECGYQDNSDRNGAINIAERGLGEASKSGAIVALPITFGGTYGK

SEQ ID NO: 13252 - protein, 404 aa, unknown
  TnpB Polypeptide
MLVRGIVFYLESDLPSEVKFLLEDFRLAVNNAIRAGLQARVTSRNALVKIAYKDFRQEHPRMYSQHLVSAFEVACGVLKNHRKRFRKGVASRIPYVKRQLMKAENQAYKLNRKSGVIDLPIRAGCHVGLRLIVSQYHRKYLDDMSLSLGSLTVLPNRVIVAFRKDAPKPFVPESALSLDTNERSLDGVFVEGDVAKAVKAEFPDVAVIQQRHHDRRKRLQKKKAHDRRTSRNLCRREGAREHHRVEYKLHQVANSVLKFAEERRSAIVLEDLKGFKSKRSKELNQRLSMWPRRKLHQIIEYKAQWRCIPVVKVDPRNSSRTCPICGRMQYSRMGAEFACECGWRLDRHINASINLLQTAISKGMAGGLRFNPGAFQHDVMMTLYEPATAARSEPNGTSGIFEVT

SEQ ID NO: 13253 - protein, 344 aa, Blautia sp.
  misc_feature (2)..(2): Xaa can be any naturally occurring amino acid
  misc_feature (144)..(144): Xaa can be any naturally occurring amino acid
LXSISRSYEKNKKGESYCKTNNVIKKEKLLLKRNHRLTNIRKNYLNQTISEIVDRKPRFICIEDLNVSGMMRNRHLSKAVQEQRFFWFRKQLEYKCSDKGIQLIVADRFYPSSKLCSCCGNIKKDLKLSDRVYRCACGNMIDRXDGVGIDLGIKDLAICSDGTKYKNINKSQKVKKLEKQKRRLQRSISRSYEKNKKGESYCKTNNVIKKEKLLLKRDHRLTNIRKNYLNQTISEIINRKPRFICIEDLNVSGMMKNRHLSKAVQEQGFFGFRKQLEYKCSDKGIQLIVADRFYPSSKLCSCCGNIKKDLKLSDRVYRCECGNMIDRDFQASINLKTYGEKFAS

SEQ ID NO: 13254 - protein, 366 aa, unknown
  TnpB Polypeptide
LKAYKYRIYPNKEQKIQIEKTFGCCRFVYNQTLAYRKDAYEKEKKSISRTGCNNYCNRELKKGYEWLKEVDKFALTNAIYNMDAAYRNFFREHAGYPKFKSRHDNHKTYTTNFTNGNIAVDFVRGKIKLPKLKEVKAKVHREFNGKIKSATVSQVPSGKYFVSVLVETEHVEMPHRNKNTGLDLGIKDLCVTSDGEKYENPKTIKRYEKKLAKLQRKLAHKEKWSNNYYKQKKKIALCHEKIRNARKDYLHRVSHEIISENQVIVSENLQIKNMVKNHHLAKSIMDVSWYELTRQLEYKAAWNGRQYVKIDTFYASSQICSGCGYQNAGTKNLSVREWGCPVCGANHDRDINAARNILAEGLRQIA

SEQ ID NO: 13255 - protein, 557 aa, unknown
  TnpB Polypeptide
MSRSQHHRRCTAIAISQQPVAGGDTPAVPGDQAGKPELRPRRREIVADRALMLEELGADDGADGVQAQILRPGRTAAVAVEAGERLTAARFQRTTQHVAFRHRTSISAQTSASLTGLAFIDSCRCRFVRCALCLATCGRDRASPRAEHAQLDRASVGCGDSSVRRTYVFRLRPTARQHRSLAACVDSHRELYNAALQERRDAWVHSKTHIFYGDQSAQLTGIRAVRPDVAVWSFSSQQATLRRLNRAFAEFFRRVKTAKPGVKPGYPRFKGAGRFDSVEWPKDGDGARWMPETGRVRLQGIGQVKVDQHRPVVGRVKTIQIKRQGRRWMLVLCCDDVPLNPLPATGRQAGIDVGVVSFVTTSDGAYVDNPRWGRKAADQLTVAQQRLTRAKPRSKNRQRRREAVAARHRKMANQRKDFHHKQTRKLVESYDLLVIEDLQIANMMRRAKPVADVENPGQFVPNRARAKSGLNRSIGDAGWGAFVSILRAKAEEAGRVLIEVDPRHTSDGCEKCGYAAPENRVTQAEFKCQRCTHRAPADEHAARNILRAGLALHAQVA

SEQ ID NO: 13256 - protein, 407 aa, Streptosporangium sp.
LSVVVGRFEGVSRYRLQPTPAQERALLEHCGHARYVWNLAVEQHAHWKPGRASAPGFAEQCRQLTQARAEHEWLRGGSVIVQQQALKDFAQAMANFFGRTHRRPTWRRRGRGEGFRIVAVTAGDVRRLSRTVGEVRVAKVGWVRFRWSRAVPDGVKSYRITCDRAGRWHVAFAVIPEPIPAPGTGEVVGVDRGVAVSVALSTGELLNAPTLRQTEKARLRRLQRKLARAKRGSNRRGKVKAAIATLKARETDRRRDWVEKISTRLARRFDVIAVENLKIAGMTRSARGTVEAPGGNVRQKAGLNRGILAAGWGRLVERLEHKAPGRVVKVNPAYTSQRCSACGIVERTSRESQADFRCRSCGYAGNADVNAARNIRHAAGHAVSARGGPPLGGPANREPQRDLLLVG

SEQ ID NO: 13257 - protein, 368 aa, Streptosporangium sp.
MAQIVKRSYRYRFHPSPEQACELARTFGCVRLVYNKALEERTRAYMLEGRRVSYVESSAALTAWKRSGDVDFLSEVSSVPLQQALRHLQTAFSNFFAKRARYPTFKSRKRSRASAEYTRSAFRFRDGRLTLAKMDAPLNIVWSRPLPEGAEPSTVTVSRDAAGRWFVSLLVEETTTPLTPVERSVGVDAGITALATLSTGEKIVNPKHGRADRRKLAKAQRALARREKGSNNRAKARLRVARVYARIADRRRDHLHKVTTRLVRENQVIAVEDLTVRNMVKNRSLARAVSDTSWREMRSMLEYKAAWYGRTLVVVDRWFPSSKLCSACGALQDRMPLTVREWECACGVVHDRDVNAAKNILAAGLAER

SEQ ID NO: 13258 - protein, 401 aa, Chloroflexus sp.
MRVILTHKIELRPTKQQELLLREAVGVARFAYNWALDEWKKQYCAGLTPNEAALRRQLNAIKREQFPWMLRVPKSIPQQAIKNLGAAFKNFFERRAGYPTHKKKGRDDSARFDNGPGTFRCDGKCIRLPVIGWIRMREALRFTGKPLSATVSRVADRWYVAIPVEIDLPDPVCDNQAAVGVDLGVTTAATLSSGEKLAGPKALQANLERLRRLSRRHSRKVNGSKNQYKSALKLARLHARIANIRRDWLHKTTTRLVRTYGVIGIEDLNVRGMLGNRTLARHIADIGMYEFKRQLQYKAALYGVEVVEADRWFASSKTCSVCGAVTEQMPLGMRDWVCPACGTDHDRDVNAAKNLQRMALSRASCARRNACGEAGTGHGDTTMVNPASVKQESDLSCWGMV

SEQ ID NO: 13259 - protein, 415 aa, Brasilonema sp.
VLGGEEQMRTAYQYKLRPTKQQARDIDKWLSMLCAQYNYLLADRFNWYEQNRCPVNACPLICYLPELRDNPDYYGQKRTLPELKKTHPHYKEVYSDVLQDVVGRVKKTFERFLSGDSNGKRSGRPRFKSRERYRTFSYPRIKENCIVGGKITLPKLGAIKLILHRSIPAGFKVKTVSVTKKADGYYVTLSLEDLTVPTVKPDINPDSITGIDMGLKEFLTTSEGEPVAIPQHYRKAQKRLRVIQKRVSRRKKGSNRKRKAVKQLGKQHKKVADKRKDFHFKTAKQLLSKYDVVVHEDLNVKGLSRTRLAKSMHDAGWSSFLSILSNKAENAGLLVIAVNPKNTSQDCSSCGVKVPKKLHERWHSCQCGCSLDRDHNAAINIRNRALGHRVLKAQLMSDGIPGVAEKPTLYCTQSV

SEQ ID NO: 13260 - protein, 395 aa, unknown
  TnpB Polypeptide
LKADSLLNSLLTGKDFKKPKKIKDLKIRETYVHNLIKRYVRKHKGRNPVSRKAGSFEIDSSMYRYEQEEGQNVLSIQGLKRGKRIKLKVTDDRIFKGNLRIVIKSKERIEIHKCVKAKINKISEEEKTIGIDKGYSCLIATSEGTFYGEKLNSFLSEETERLNKINRKRNKLRSLVKKNLEKGHIRKAKRIIKYNLGNRKYRRKKETSRARLESYINNEAGKFIKKEKPSDVVLENLNFINWREKLPKKIKRQLSRWVKGYIQERLEYKFSLNDIKSAVVNPAYTSQICSKCGCFGLRTYDRFYCPYCDRVVHADYNAGKNVLARRDDKEITLYTPYKKVKEILLARCSTVVGSPYGMTGSTRTPDTVISQSESELQKNLSIDLYSLSEDLNRFF

SEQ ID NO: 13261 - protein, 398 aa, Streptomyces sp.
VPTYEKRAFKYRFYPTDAQAAELSRTFGCVRKVYNLALAARTEAWVLRAERVNYNATSAMLTAWKKTEELAYLNDVSSVPLQQALRHLQTAFTNFFAKRAKYPRFKSLKKSRKSAEYTSSAFRFRDGKLTLAKMTEPLAVVWSRPLPEGAQPSTVTVSQDAAGRWYVSLLVEDPAVQPLPAVGTAVGVDVGLDHLLTLSTGEKIANPRYERRDRARLAKAQRELSRKAEGDGTNRGKARKKVARIHARIADRRSDTLHKLTTRLVRENQTIVIEDLTVRNMLRNGKLARAISDAAWSEFRGQLEYKARWYGREVIAVDRWFPSSKLCSSCGVMRDKMPLNVRTWTCACGTTHDRDVNAAQNLLAAGLAVSACGAGVRPQRRSPGGQSATKQENPWREL

SEQ ID NO: 13262 - protein, 458 aa, unknown
  TnpB Polypeptide
MKQIITAKLKLMPTPEQHRALRAVQLAYRDGLNAVSQYAFTHGKTSSVTTLHKGMYAELRARYRLPSQLACSVERQVAATYKGLWTKLLNNREHLRLKITKKRFKGLDKPPKYSSPTVQYTYERDYTFQCEQQVNIKTLNGRISLPYQGYFKHLLLIQQGGHIAHIGDAKLWYDHSKKQFYLLVSLAITLPDPACDDLTEVVGVDVGVRYLAVTSTAAGEATFYPGKRVRHKANHYARLRKRLQKKGTRGAKRRMRRIGQRERRLKMQANHQIATQIIQELPHALIGLEELTSIRDRTRRRKRKRKKNGKGYERVSPKARKSNRVYSQWSFAELHALISYKAALSGSLAVKVDADYTSKGCPKCGHIADENRPNKGLLFTCQNPKCRYILHADLVGARNITMRTLLVRQDWARTGCLSIIPDASDREAKAVRLRRYAELRWSSGVSRKASLRSLSGSH

SEQ ID NO: 13263 - protein, 418 aa, Halococcus sp.
MEVKRTVPVKLDVPDERRDDLHTTIEQFNDAANYTIQNGRNDDGYLILNKSKIHDRVYYDLRDQTDLPSNLCVRAYSKAVEAMKSTVADWKKGNSRPLPRFNEPSAVYDKRTLTIYDRSATLSTVNGRVEVEYVIGDYQRSYLDDDEYERRMGTLHYREDEDAFYLHIVVMKEVEQREGVRVLGVDLNLKNVAVTSTGTFYDGGRLLWGQNHHFRVRRSLQDKDTRSAKQTLQQVSGRENRFVLDRLHTLSRRLVDEARNYNCAFIAVERLTNIRDRLDNGNDCIKRQMHNWAFRELREMLAYKAAEHGIRVEDVNPAFTSQTCSRCGHQSSTNRDSSTGWFSCNECGTEYDGDYNAAKNIGMRLVTLPSGKRPDGLGNGQLALKSGTLNGSGDYTAHDDVSADQESTDKPTTSVVGR

SEQ ID NO: 13264 - protein, 433 aa, Halococcus sp.
MKRVNTFRVVPRSDADAECLRRVLDASASLWNQLNYERRQNFTDPDIDKSVWDTEDYRKQYVGVLGSATAQQVIRKNDQAWRSFFKLKESGEANGLPGYWGNEDEGRDLRSYIRNDMYRLRWATGNSEQSILEISIGKDLKDEFNIGHRERLRLEVQGEPKWTGEQCQLELFYDERSDQFRAIQPVSDCSRQDTPLADETAALDVGANNIVACSTSTGQQFLYEGRDLFARFRETTERIAEYQALAKADEGRYSTQRIRQLYRKRTARRDHAMDALARDLMERLHDEGVSTVVVGDLTGVLETHWSVEANAKTHNFWAFRAFLNRLAYTAEEYGMEVEARSEAWTSQECPDCGEYDETVRHSDTLTCPCGFDGHADLTASATFLNRHTDREVGSMARPVRFKWDAHTWAESPHSRPNEVRTHQQKTFVGVSAE

SEQ ID NO: 13265 - protein, 300 aa, Halococcus sp.
VVCCDWLKSSRRRDHHLSKIGDIPIELHREIPDDGRLKQVAVKQEPTGEWFATFGVEVDREPPTKPDEPERCVGVDVGILKFAHDTDGFALGSLDLADERNRLDRERRKLSRKEHGSAKWERQRRTVAERYADLKRKRRDFLHRVSAYYAREYDLVAIEDLSIGGMLESSSNSRNTASAAWGEFQRMLEYKCEREGTHFVAVEPAGTTKECARCGVTTDKPLWVREHSCPACGFTADRDANAAVNILSRGLADVGVVHSEVTPSETATATGTDVSTVPASRVTEQGSPALNEASAQARAE

SEQ ID NO: 13266 - protein, 425 aa, Halococcus sp.
MQRVNTFDVVPQTDADEELLRRLLDASASLWNEVNYERRRNREDPDGDVFDTSEYRGRYGDVLGASTVQQIERKNAEAWRSYFALKKKGEYARPPGFWGNRDEGRELRTYIRNTSYSIQWGERSRLDILVGSNLKEEYGLGAQERLRLEIRGKPKWSGKQGRLELYHDESSGRFRAIQPVRDCSPQGSPLADETAALDIGANNLVACTTTTGKQYLYEGRDLFGRFAETTERIAEYQSLLDEDRYSSNRIRRLYRKRTKRRNHAQDALVRDLIERLHGEGVSKVYVGALTDVLETSWSITANQKTHNFWAFRQFVKRLACVCEEFGMELEADGEEWTSQECPHCGERDETVRHKDTLTCPCGFDGHADLTASRTFLHRQLDDSQVGLMAQPVRLKWNDHEWSESPYSCSNEVRANPQVAFVAESA

SEQ ID NO: 13267 - protein, 442 aa, unknown
  TnpB Polypeptide
MPGLGSFVGLGDPRCYGGGVSRVQVVVGRCDVVRLHPTPGQDELLRFVGDQCARLVNMENYRRRQLFFEGGKIDTGVKTARELAKRLPEYQEVKEVLGSRNFDETMRKVQESWKSFAELLEERKQGRLPPWLNPRPPGYRKHNGERLPIIIVRADNYRIDAGRKVIRLGYWDVDIPFTGKLRWLTKPGAKRGRMEIIYDPIKKRWYAHISVRAVLERRHSGHGFMGIDLGREVLVAAVASDGTALLYKGGVLKSDYFYFERRIAVVDRALSDAGMEEARRSALQEERRRLFEKRKKRRDQAHANAAAHLRSEAVKRNVGVVFIGYPWYISQDKPGRGNVNMWSQRKLMLRLATTLENAGIPAFAVSEDGTSRRCAYHKVEVLRKPRGLVTCPHGHVMHSDVNAALNIMLRGLTALGIGAEPPTKIRVLSFLVTPSRVKPINP

SEQ ID NO: 13268 - protein, 456 aa, unknown
  TnpB Polypeptide
LVAGSLHRAAISESVKIISSYGVELRKQNIPVRQTLEIYRSAVYYLTEIYEQVWEELAEIPDAKRRFNAAEHLVHTTKKNPARFDFDLRFPKMPSYLRRAAIQHALGSVSSYETRMDLWEKSGEQAGKPRLAYENHAMPVFYRDVMYREGKEGKDEAYLKLYDGHDWKWFCVRLNHTDMEYLRRNWSGKKASAPTLEKRHHKYFLRFSYTEEVTLTKTPVKEQIICSVDLGINTDAVCTIMRADGTVLGRKFINHPSEKDRMYRTLGRIRRFQREHSSAQSRGRWAYTKRLNIELGRKIAGAIVKNAEENHADVIVFEYLEMQGKISGKKKQKLHLWRKRDIQKRCEHQAHRKGMRVSRVCAWNTSRLAYDGSGSVSRDPKNHSLCVFQTGKRYNCDLSASYNIGARYFIRELLKPLPVTERSLLEAKVPSVKRRTSCVYADLKELHLQMEILKAA

SEQ ID NO: 13269 - protein, 462 aa, unknown
  TnpB Polypeptide
MVRRVSNSYKKMYIKYVFDNIVELYSERDDAIQMSHPWGSRGEKRTIAVEYQPSESILACLTDMRDALRMALVYAYVMAREDNSRVPSPIALRRGFREWFYSRYGYARHHINPVCRNAVALLRSYKRRHKRLEIPEVKRLAVRIDAELFKIEQEQGNDGSVSAKITLQPFRYGYITFTPRHKRWEEYSKGRASELLITDRRLFITFVTSGGKKKPLGSRFVASDLNFNTIDSTAASKEGETVKLRQVKTEPIGRIARIQNDFSRRRRRIQLHVKNPQKRDKKLKETRGRQRDRIKDALQKLSTEQVRENPGASFVFERLTGIRENDNAKSKRLRTYLNRWPYRMYQSMVEYKPPFRTMYVSPGGTSSRCPVCGGRMKHPAWAVSRCEKCGADYGRNRLSSLAILLRGMRLCGQPFAVSADASWRLMRDEYLYAPAAPDGWGAGWTEEAANAPNENVYAKVHV

SEQ ID NO: 13270 - protein, 397 aa, unknown
  TnpB Polypeptide
MHRAYEYRIYPNASQRKLIEQTFNGCRLVYNLALEVKQRAWKEHQVNRSVFELNNELPALKDLCPWLKEINAHSLQASIANMGKAYENMYKKRAGYPKFKNKHSEQSFLCPDGARHIDFENNRLTIPKMKGIKVVIDREFEGKIKTVAVSRTKTGKYFVSILVNPGIKQPEKQPITPETTVGIDVGIKDFAILSTGEKLPNPRHLKSSLQRLKVLSRRVSRKKKGSTNRKKAVKRLAIQHEKVANQRNDYLHKSTTHIVRDSQGTMFCVEDLSVKNMVKNHKLAQAISDVGWGEFFRQLKYKCDWYGKTYIEIGRFEASTKTCSCCKAVNQTLTLADREWVCASCNTIHDRDINAAENIKQFGLLKHNKEKQTRRGSPGEPVESSAIAGALKQEVLP

SEQ ID NO: 13271 - protein, 372 aa, unknown
  TnpB Polypeptide
MSTAIKTYKFQLYKNKKNKHLHRCIDTAASVWNYGIAMHRRYYRLFHKHIPLNTLQKHITKVKRTLHPEWKTLNSQAIQDVIERIERSYQAFFVHVKQKRHDRKSPPSFKKQERYSSFTLKQNGYAFRSENRISIMGREYKYSPSRPIEGTIKTLTVKRNLVGEIFLFVTVKQQRNEVYTRTGNAVGIDFGLKHFLTLDSGEVIDSPEWYKTSLRKLRQAHREVSRCEKGSRNRRRALMHLERVYEKIRNQRRDWFFKTANRLAGEYAFICVENLDIEQMKRSWGRKISDLAVSEFYSILEWEAGKVGSTFVKIDKWYPSSKTCHVCGAINHGLSLNQRTWTCDTCHTELDRDINAAINIKREGLAQIGDSL

SEQ ID NO: 13272 - protein, 372 aa, unknown
  TnpB Polypeptide
MRTVIKTYKFKLYKSKKNKHLNHSIDIGASIWNYCIAMHRRYYRLYKKHLSANKLMKHITKIKKTLHPEWKDLGSQAIQDVVQRVERSYKAFFEHRKQKRHGKKSPPSFKKRSRYTSFTLKQSGYAFGPGNKVTIMGRDYKYSKSRPIDGTIKTLTVKRNLMGEIFLFVVVKQECNEVYSRTGNAVGMDFGLKHFLTLDNEEKIDSPEWYKSSLKELRAAHKAVSRCQKGSRNRQRALLHLERVYEKVSNQRRDWFFKMAYHLAGEYAFICIEDLNIDAMKKHWGRKVSDLAVSEFYSILDWVASNTGSTVIKVDKWYPSSKTCHVCGTVNPNLKLDQRTWVCDTCHSKLDRDVNAAINIKREGLATMSIAL

SEQ ID NO: 13273 - protein, 224 aa, unknown
  TnpB Polypeptide
MGVCGREFYPTDKGIRFPKLGELRLRWSRPLPSPPSSVTIVRECSGKYYASFVVEVEEAKLPWTLREVGLDLGLESLAVTSGGGKIASPKFLRSALRTIRRLQRNLSQKAKGSSNRQKARLLVARAQEKVAHQRLDLLQKLSTQYIRENQTVVLENLNVSGMLKNRRLAKSISDSGWRMFRTLLEYKASRYGREVVVVCRWEPTSKRCSSCRHLDGKKSLAIRR

SEQ ID NO: 13274 - protein, 414 aa, unknown
  TnpB Polypeptide
MRRVEQHMIEKSHPQFRAIDEMAFASKNLWNLANYHVRQSFIFQKHYLNNTATFHLLKETDAYKALPSKVANQVLLQLHRAWTAFFEAMEVYREHPKKFLGRPKLPNYLPKTQGRNLLVFELGCIWKAELRGRELAVTQLGRIGETKQQPASVQQVRIVPKADHFVLEVIYDVKEQLAQGLDPDLFVALDPGVSVLAALTSNKPNFVPQLVSGKPVKSVNQLYNKQREHEQKQLAKCKDPQYTSHRLDRITTKRNRRVMHYLHTASRRIVELLVEEGIGVLVLGKNLFWKTSVELGKKHNQEFVHIPHAKFLAMLTYKAEAQGIRVIVTEESYTSKASFLDLDPLPTYDPTRGAEQEDKPRFSGRRDGRWYRVKGRAPIHSDVNGSFNIGRKVFPTAFGPGIEATAVRPRRLAV

SEQ ID NO: 13275 - protein, 338 aa, unknown
  TnpB Polypeptide
MNKVEMKSKCAPEQAFADLGQAFANYWRMKKEGTQPKLKHPRKDGEEAGFPRFKSKKRDTLSFYLANDKFSADGHTLHVPRLGDVNMTEEVRFQGKIMSATISYRAGWWFVSIAVEVEHETPAHPGGTVGIDLGLKTLATFSDGTVVENQKHFRHGLGRIQGLSKGLSRKVVGSQNWWKNTRKLAKAHYRVACRRQDTLHKMTTRVAQTYALIGLEDLNTKGMLANHCLARAVSDASFFEVKRQLLYKSEHYGGFVQLVDRWFPSSKTCHACGWVKEDLTLADRAWTCEQCGTIHDRDLNAAIMVETEAVRLITDVPVVASSGHKFACGVGSSGSDDE

SEQ ID NO: 13276 - protein, 445 aa, Lachnospiraceae sp.
MVVNLQYIPLEHLRVLEQCRFIGVIKIKTTRVEQHRIKKNNKFFSIIDELCWKSKNMYNYGNYIIRQEFIQTSKEKEEGLRENANWIKYNELFNLCKDSDPYRELGSNVGQATLRKLDKAWNGFFKSIKDYGKNPSKYCGRPKIPKYIDKDKGRYECGLDNHKFKIKNRYIFFCWKPLKVMNDTFMTKIAEDKKLIQLRFVPKNGEYIMEVVYEIDVPDIEDNSDRIASIDLGIDNLMTITTNCGIKPFIINGKPLKSVNQYYNKMIADKQSELKKRYNRDYSNEMRRFTIKRNHKIDDYIQKSTKIVVDFCKENNIDTLVCGYNPGWKQESNMSKKVNQKFVGIPYLSIVQRLAYKCEAEGIIFKTTDESYTSGTSFIDGEQPVKGNYDKSRRVHRGLFVTKEGEKINADVNGSYQIMKKVFPNVFDNGIVGAGSHPLVVNIPL

SEQ ID NO: 13277 - protein, 398 aa, unknown
  TnpB Polypeptide
MSRYRLLPTPAQEAVLRGHCSHARFVWNLAVEQHGHWRPGRAGAPGYLEQCRQLTQARAEHRWLAAGSQMVQQQALRDFAQAMAAFFDPTNPAGRPSWRKVRRNEGFRIVGRRGRQWDVRRLSRKTGEVWVPKAGWVRFRWSRTVPLGTKSYRVTLDRAGRWHVAFAVIPEPVSAPGNGQTVGIDRGMAVSAALSTGELLRIPGLTARERSRMRRLERKLARARRGSNRRGRVRLAIARLKARETDRRKDWAEKASTDIARRFDLIRVENLQIKNMTRSARGTPQNPGRNVGQKIGLNREILRSGWGLLVRRLEQKAPGRVEKIRPAFTSQRCSACGQVDPKSRESQADFRCTACGYACNADVNAARNIAAGHAVTARGGGGITRPVNREPHLLLQSA

SEQ ID NO: 13278 - protein, 395 aa, unknown
  TnpB Polypeptide
VLTATKIRIYPTALQEATLAKAFGCARWLWNNSLVETQKVYKETGKGLGQYALNARLPALKQEHEWLADTHSQVLQSVSLNISRAFVNFFERRAKYPNFKSKHGKQSIQYPQSVKIGDGEIHLPKIGKVQAVIHREIVGSIRTVTISKTPTGKYFASVLTETGTVAPPVSFEGKVLGIDVGLTHLAVTSDGSKFDNPRHVQRAAKNLKRKQQKLSRKVKGSNTRNKARMLVARAHEKTANARKDYLHKLSRRLVNENQVIAVEDLHVKGMMKNRCLAKAIGDVGWGMLTGFIEYKAAREGKGFIHVNRFFPSSKACSSCMHVQSAMPLNIRSWRCDKCGTLHDRDINAAQNIRAEAQRMIAAGIAAPANGGTVSHVRGRKSSVRARAVEVGSHSG

SEQ ID NO: 13279 - protein, 446 aa, Natronococcus sp.
MKRTNEFEVVPQTDADEELLCRMLDASAALWNEINYERRTNFEDPDGDVWEIDEYRGRYGGVLGASTVQQIERKNRESWKSFFALREKGEATGKPGFWGSGDDRELRTYIRNTSYSVEWGEYSRLEILVGQDLKEKYGLGYRERLRLEVRGDPNWKEYEKQGRLELYYDEYSDQFRAFQPVTISDDHSRLAQPLAAESAALDIGANNIVACTTTTGEQYLYEGRDLFERFRETTQRIAELQSKLEDGQRSSKRIDRLYRRRTWRRDHAMDALARDLIERLYDEGVLTVYVGDLTDVLETNWSVRTNAKLHNFWAFRRFVKRLADTAEEYGITVEVRTEAWTSQECPNCGSTEDTTRHQDTLTCTCGFEGHADLVASKTFLRQHETVARPMARPVCLKWDSHNWLETPYSHRPNEEHTNPQVASVVVRDGEPSRDDERVMLSRTNSA

SEQ ID NO: 13280 - protein, 435 aa, Natronococcus sp.
MVVEEAFQYAAEPEDTITAESAWKAIQTCRKVYNHALSQEYQSAPEYDKPSYTAMQNKLPEWKRKWPEWGDVYSKCLQMAVRRIKHSETILDKLKQRGFDVGELKWKSPREYRSITYNQSGFDVDSNTGRTNHATVDFSKIGTFHLNFHRPLPDDATVKEIILKKQKTGDWTVSIMVEYDADHPDKPAVEDIEVEDTVGIDLGITKFIHDSGGRAFKPLDEEADRERIDKRHQAVSRKEHESNNWNKARQRLARAYERLSNKRKAYREALANAYTKRYDAVFLEDLNVGSMMRQNGNSRNIAAMSWYVALQTFQRFGEKNGCHVVLVPPEGTTKQCVQCGVESEKPLWVREHSCPSCGFETDRDMNAALEVQRRGLLELGVVEDSDDIGRELAESTPVETGTAAGDTSFEVVSASTVVDTGSPTFKERAAVAASE

SEQ ID NO: 13281 - protein, 237 aa, Natronococcus sp.
MSIYPHRSIPDNADVKQVTIKQEKTGEWYATFGIETENETPEKPELDEVDREDMVGIDVGILKYAHDTDSTMVGSLALEDEYERLEREQRALSRKEQGSQNWHEQRRRVTRIYARIVQKRRDFLHKLSAYYAREYDLVAVEDLDVHGMMQLPSNSRNRASASWRTFIDSLEYTCDREGTHFVKVEPEDTTQDRSVLSVALRLRRSRECASIPVRRAGSRLIVTRTPRTTCYNEGFRS

SEQ ID NO: 13282 - protein, 374 aa, unknown
  TnpB Polypeptide
MKDMKTYKFKLYHQKKTKHLDHQLLIACNVYNHCIALCRRYYKLYKKSLHKYKLSKHLTKLKNNIAKYNFWNEIPAHAIQNITERIHRAYKLWWSNLKRKKKGAPPKFRRLRKYKSFSYDMVGQNLIKGNKIKIAGKEYKFSKSREIEGKIKLLTIKRDSCGDYFVYLVCDTKETKTETRLGESIGFDFGFKGKMLVAESPKDDISAPNFFFKQKIAVARANRKLSLKRPRSNNRRKAKLELARLHRKIANQRRDYHWKLARKLCMKYSILCFEDLNMRWMQKNHGKKVMDYGFAEFLSILEYVAPQFGTQIVRVDKFYPSSQICNGCGYQNTEIKDLRIRQWNCPSCGKHHDRDRNAAANIHSEGLRLVSETA

SEQ ID NO: 13283 - protein, 428 aa, Halobacteriales sp.
MTGTATKTLEATLAPPTAHKERRLQRTVATYRRALEDAFESGCDTQTAVNDVVTPYNLTSYAKDALKSYVPKLRDTYNASELTDDHPIRFTNRGWALDHSPERTHEFCWNVPQAGRGTSFWIPLRINPEQRDLWTDLLNGDVSVGEFRLHRHHTSWRLHVTVEYEIPEPETPDDPTPVGFDIGEGNLLVGCAVEQGKPVDPILVDGGRARHLRKEMHTTLTRLQERDAEQWRIDKRFDYYQNALTDIVEKASRKAVEYTRGFEDPVIVMEDLSYIRESLDYGKWMNRRLHAWAFARLQKRIEDKARDAGIPVEYINAAYTSQACHACGHIGHRDGDDFRCQNNGCWVTEYHADLNAAANIADRVDPWGESLLWKSAGNDSPRDGSACDCTTEHREASRKSRQTTLSAYGSETSESATDLVGSPAVHGG

SEQ ID NO: 13284 - protein, 359 aa, unknown
  TnpB Polypeptide
MLVQKTIKAKIFGLTTTKEAMLQQEYDCWQSFLRGNQEVPLYSATKQQAGRLLRSLGRHFERSRMYPMVLRNDCIRVEKAKDTIWSKWWFKVPVANLHGGLWCPVQIPDNQASLLDEGAIRECKLIRKGDHWSVHIVIQKDVPEAFLNPSQPILAVDLGEVRPATAVLLKDGRMTAHVMATREVRGVRMHYNWLRQKLGEKKCLDTIRKIGRTERRQVDARLHKLSKDIVQLAKDNDAVIVMGDLTGIRERTKNKGRKFRAKIARMPSFRMAQFIEYKANWAGVSVFSINEAYTSRACHVCGSPGRRPHQGLFLCDNCGSQYNADLNGAINIGRRFLDQVFGNSGALDTPPNFGDVRPC

SEQ ID NO: 13285 - protein, 452 aa, Deinococcus sp.
MGKQVKADAGVFGVRRLLLHLPKPDLRLLDYLGVQAKRLYNTGTFVARQLFFKRGKIVSRFDLLYADGVRDSIHLRAMPSTTAQQTLLSVSEAWSSFRELRNVWFKEGCPPDRNPRPPAYLERDVFKLAFPNSGGGKPKIVDVDGKRMLRFPLGQLNAVWFGVRELLIPAPSDFDLSRVREYTFVPQNGAWYLELSYRKPKPTGVNVDRTLTLACDLGTSANLVAAVGTDESNLLIDARQLKAMNQGYNRLVARRKAGKSQEYWDTYLDRLTRKRNDQMRDGINKAARLVLNHCLERGVGTVVVGWNPGIKNRIDLGSRENQKFVQMPLARLKDRIRQLCEEYGLVFTVQEESYTSVSSHLDGDTPPVYGQKPDGWTPSGRRMKRGLYRTARSEKINADLNGAANILQKWQVARNPAEISLQPDRRGRPCLTTAKRVRIWALPGNKSASASR

SEQ ID NO: 13286 - protein, 441 aa, unknown
  TnpB Polypeptide
MENHIAIIRNAKCWGIYFTEEFLDDYKRTISINNKVTSRLRRGLTSGEIEEIVAWDIISPNGNKKNVKKKDGTYNHGGRSYYTAADYVKLLDTEGIFEGALKGRQSFKRMILYYCMERFRGYKTRNNGKKMPNIGIKENKSLYYKESNLITVDTENNKLTVKTLFDEHDLTYKYNLKMEHIKPKGKAVKITTGGNFCMKQRAFVGQVKFNKPTIYEPTSVLSFDLNKKASDWIVFNDGEKIVRQGIIEELCKEIKQLNTLLDPDKKKPVAERKIRTRKRSKVRRQVQEKHKKQSSLINPIADYICQKAVAKNGLLCIDSVKTGQSNGTFGQDKLIPALVTKCENMGIPFYEVPCAYTSRRCMNCGSIEKKNRKSTSEFECIDCGHKCDAQKNGADNIAYHGDRMYNAGVPYGNWAGKKKATGDKGPRKHSVDDLVKIYSQQ

SEQ ID NO: 13287 - protein, 316 aa, unknown
  TnpB Polypeptide
MKSITKSIYKHLFVLYNILTEGGENMKLTLRYNITKIDKKQKEIIEEIMWHATKVYNMVLYELREEKRKIDVNKSINIIQTEIYKEERKGTNIMSIDIGINNIVACTNKENSKSMLVSGREAKSKNKYIQEKIRKLQQINKKAKENREKEKVKNTKRIEKMWKYRKNYMNTYMHKVSKMVIEYAKENKCVEIVIGDLKRIKEGMKGNKSFVQMPLKELVRKIEYKAKLEGIKVNKIGEEYTSGVSAIDKEEIKKENYNKKRRISRGIYISKEGKKINADINGSLNILRKYIKKSSPNQEIAMDNGREQRPLKKRVA

SEQ ID NO: 13288 - protein, 454 aa, unknown
  TnpB Polypeptide
MDYSIRKVELNHVNPGLKRAVKDTLEIYRAAVKRLCEIAMAEWDCLEGLSQTECLTQMEFLMHSTKKHQAVYPDFDRDFYKFPSYYRRSAINAAVGQVSSYLTRKQQYEEKRKDAISNGRRFREKAPTLNFDTNYCPSMYNRQMYLMEGNEVWLKLHIRHTWDWVKVSVPNRDVKCLNCALNEGGTLASPKLLIQNKKLYLQFPVHFPGTSFPENEISTQVILGVDLGINRGAVCSVVSASGTIQERYFDPFTSERDRMNHMLNRLRKISAQSGAGQSLSVFYTKLDGRKESYARQLARWIVDRARGAKVYGIAMEHLGRMKGRGSKKDRIHHWCKRRIFSLVKGMALRYGIRVFCINPRNTSALAFDGSGKVTRDASHFSLCTFASGKRYDCDLNASYNIAARYFLRTYQKSMPETEWSQCMAEVPALVKRTDCTLSTLWKLDAVLHPVKAVA

SEQ ID NO: 13289 - protein, 268 aa, Escherichia sp.
  misc_feature (5)..(5): Xaa can be any naturally occurring amino acid
  misc_feature (228)..(228): Xaa can be any naturally occurring amino acid
MHSAXWLVEWKNATETQWLKDSPSQPLQQSLKDLERAYKNFFQNRAAFPRFKKRGQNDAFRYPQGVKLDQENSRIFLPKLGWMRYRNSRQVTGVVKNVTVSQSCGKWYISIQTESEVSTPVHPSASMVGLDAGVAKLATLSDGTVFEPVNSFQKNQKKLARLQRQLSRRVKFSNNWQKQKRKIQRLHSRIANIRRDYLHKVTTTVSKNHAMIVIEDLKVSNMSKSAAXQLAEAETQNTATAFPYRKYPQGLPSQSHNDRQQKPRNDSH

SEQ ID NO: 13290 - protein, 454 aa, Natronobacterium sp.
MSAVTKTLELHLAEPNTHKERKLCETRKAYQQALQAAFDADCTTKSATNDVVVEYDLSGYAKNALKQYVPQLCGDSYDADELHDDHPVKFTNDGIQLDHKPQNTIEWYAKIPHHEDYHLWIPAHANPDQREWLEAVYADDAEMGESRLLERDGSWYLHVTATRNVEDQSVASADERTPPDESGEPCLAGLDRTPIGVDIGEASLVTVCHRDESGSPVRPRLWADDGKTVRRLRKTYFTAKRRLQKRGSERIVESYGDALWGQIDDVFHRVTREVVEYAESVENPVLVLEDLTYIRENMDYGEYMNRRLHGWGFAKLHAQIRYKAAEKGIPVETVNPRKTSKACHACGEHGYRPRQATFRCSNDGCWVGEYQADVNGAINIADRYRSGESHRRSDRSSRQKAGDDDSATDGASLTGPQDSQAVNESRSDSFAHQKSSISGDDAETQQKTPGTYAS

SEQ ID NO: 13291 - protein, 268 aa, unknown
  TnpB Polypeptide
MYINNQNYSIFEDGIAFPLWIESKSRKTKIPAKITSEIYNTLLENKDSLGLLRVCRKNNKYMAFITYEKKETPVVSGDVIMGVDLGIKCPAVCRVSNNKTKFVGNGRMIKHKKRQFATKRKQLGKLKKPQAIKRIGHKENDWMNDQDHKISREVVNFALENNVSIIKLEQLANIRATTRTSRKNNKSLHNWSFYRLQNYIIYKAQLVGIQVEIVNPAYTSQKCPSCGANNKAKDRLYKCSCGYKQHRDIVGAINIMQAPALNGKSSAA

SEQ ID NO: 13292 - protein, 226 aa, unknown
  TnpB Polypeptide
MDAEGTVLGREFLSLPREYDSLSHAISHIKHAQKLCAGRTPRLWAQAKGINDDIAVKTAQFIVDMAVRYDVDCIVMERLDLTGKKRGSKKMRLHLWKAQYVQSMVVEKAHRNLIRVARVCVWNTSRLAFDGSGRVSRGKEADLPSYSLCRFASGKQYNCDLNASYNIGARYFIRERLKTLPATVGQAVAAKVPELVHRSTNTLSTLIRLIAELQGLTPAADGVTAG

SEQ ID NO: 13293 - protein, 475 aa, Acidilobales sp.
VSAEGSDPLQSFREFVEKRKKNNKRTVRLRLLPEKHEEKILFDIGLTAVRLWNELNYEKRQLFFKDDLTPEKRIEINRRYYHKYKKVLGVNAGQIINKNEEAWESFFELLKMKKQGRLPPHIRKISPPGYWKDRIIGEKKIHMLIRNDRYYLEPVNEGEGRLVLKDFKLSIRYVGRIRWEGRQGRLEIIYEAGRWFVYIPIEVGVKPSKSNLKGYVKPSYKDKKDRIFNPKSIKQRDPIGDKKAFIDIGLNNLFAVVVSDGSALLVKGGVIKSEYYWWKREISTYQAVRDLLKNTGISTWKDYHEKYLYVIYKRSERLRHLYRTAIRFLAETLWSRGVEKIYVGYPIMLSQYNGNEYNTNIWWYRKIILWMIDVFIEYGIDVEIVSEDYTSQKCSICGEIHRDGRIYRGLYICRKTEKKINADINASLNIARRAGYKITITRKIESYLITHNGIKSLIPHQRANTRDPEIRNLAL

SEQ ID NO: 13294 - protein, 396 aa, unknown
  TnpB Polypeptide
MILVERHIIKDNRFEDICLKSGLLYNYVLYLVRQGIFNKEYLKEYDLSTKLGRENQFDFRQLPTALSQQVVGQVFKSVNLWMKQKKDFDKNPGKYNNNRPHLPKYKKGKKQNMVVFTTSSCRIKDDGCIHFAKNVIKPIKTNISKEELKQVRIIPQPTCYVIEVVYERREQDLNICKSNVLSIDLGIDNLCSCISNVGIKPFIINGRIIKSVNQWCNKMKAKFQSFIMSIGKSRKLSWINNYRNNWICDHLHKISRYIVDLCVKNNIGSIVIGYNKGWKNNINIGSVNNQKFVGIPFHNLIDKLSYKSKLLGIDVITHEESHTSKIDHLAFEKMRHQDTYLGKRKKRGLFQSSIGKLLNADINGAIGIGRKVFGDPFVIEVVDRGFAFNPFRISIL

SEQ ID NO: 13295 - protein, 418 aa, Blautia sp.
MLLSKKTSIKVSREYANLIGHMCYAASKLWNVCNYERQHYKETGMEQYPDWYYQKKAHKENLWYKHLPSQTAQEVCKLLDKAWKSFYALKRSGGIETPRPPRFKQESIPITYMQMGIVHERDTDRVRLSLPKALKKYMEETYQIHENFLYLENKIFRGMDQIKQLRIYPPEKGNCKIIVVYEIPDQEELPQNGHELSIDLGLHNLMTCYDSENGKTFILGRKYLELERYFHKEIAGVQDQWYGQQSEKGVKHPVTSKHIRKLYKRKQDSVTDYLHKITRYVAEYCREQGIICVVTGDIRNIRREKDLGHRTNQKFHSLPYNRIYIMLEYKLKRYGIRFVKQEESYTSQCSPLSPEVGKRYAEPSNRKERGSYRDGNRVYNADAVGAYNILRKYHSVSGVKKELSVTGLKTPEIIKVAV

SEQ ID NO: 13296 - protein, 373 aa, unknown
  TnpB Polypeptide
MNTITRAHKIRLNPTPEQEIYFRRAAGIKRFVYNWGLARWKKMKAQGVAAYGMMAAKKDFNAIKRTAYPWVLDVAKDVAEGAFADLGSALKHYFDWKHGKRTGQKVGFPTFKSKKNTRQSFHLNNDKFRVDGHTIVIPKLGPVNMTEPLRFKGKIMGAVVSKVADWWFVSITVQIERPKPRRFPKQSTGVDVGITALATLSDGRAFENQKPLRRQIRKLRMLSRAVSRRTKGSHRWWRAKRRLTRFHYRVDNQRADAHYKASHAIASTYAIIGVEDLHVAGLVKNRRLSLALSDVGLGAFLRQISYKSDAYGGRTVKVGRFYASSKTCYTCGQINQQLALADCTWTCGHCGTNHQRDWNAAQNIEHEALRLIA

SEQ ID NO: 13297 - protein, 379 aa, unknown
  TnpB Polypeptide
MVQKSIRVRLYPTEEQESLIDKTFGCCRFVHNQTLADCIQSYEQTQHFPSKNARITNLVPLKETNEFLKEVDSTALQQSIRDLNCSLNNFFKNRSHFGFPKFKTKHTAKQTYRVPYNSSNAKVLDNRHIKLPKLGRVKTKRFDMPKVYKIFNFTIEKTATGKYYASICIETEVQPLPRTGNQVGFDLGLKDLLIGSDGTRHERPKFAYAFKDKLAKEQRKLSKMRTKLERANLNLDECKNYQKQKRKVAKLHEHVVNCAKDFNHKLSRKLVKEYDLIVMEDLNVDGMKRNHYLAYSISDVRWSQLLSFIRYKCLWYGKEFRQVDRFYASSKICSCCGTYHKDIVNSLKVREWVCPDCGTHHDRDVNAATNILNQALSVA

SEQ ID NO: 13298 - protein, 616 aa, Rhodococcus sp.
  misc_feature (616)..(616): Xaa can be any naturally occurring amino acid
LSGPFSGRCGRHSNNDGVSTTPRQFAFTTRAHVAVDDATGEPIGLDDVDTRVRWLLDLITAAGGQLVSRLWQPATFDVLAAGRDRHDRRLPAQGHVAAARLGWNPHYPDGIYVPSRVSRVVAAQVMATLRTLAYRDTAITALSERFDPATGRIAPPTAAADCAPLGFARGVRRQLVAHARRTGGALAGRLRITDVQGPPQVAAMAQLSAADRQLAQITATDRELVFTVKLPTCPAPAGRAQWRNVRLTATIPGHLHGRAITDWHLPTLVLDRKGLLWRCAATELVPDCDLGSATVAVGVDWSPSTLGAAAITTENPDGLSSDYRGFTYDDRGLGTKLARLQTEGQMLHRKAARLTQLAATAPPEVRARLEEKIAVLNEHRTSVGVKRGRINRELGFHFARQVTDYAEAAGAQVIAVEDLTTLETRGHGRVNNNRAAQSARRKAVTALAHTAASVGVAVVSVPARGSSAQCPGCDAPLARPGGYHTAWCPRCGVGGNRDHVAGVNLAKRALLGRGKAIRRRGQLPAIRVAEHAPVRRSRDKTSPTPPRPRHRRVRRSQPTATPRVGVTPKQHVPAPQASVWDTVKPAPPHGDAGSRDTRSISDIRHASGREYEIYVX

SEQ ID NO: 13299 - protein, 364 aa, Acidaminococcus sp.
MLYGKASRVRFVSRHEDFSIEGKSSRSALVFRKDTRTVRFGKGHEFRIRYPRSAKAKAYADEALENRVKYCRVLCRTIRGRRRWFVQAVLEGVPPARHAAGPDRPVGLDEGVSTLAVSSGPCVRLFELAPEAEPEEREIRRIRRAMDRSRRSTNPDEYAPDGTILKKKHHWAKSRRYRRLQGRLRETYRRLAALRRQSHERLANKVLSMGTDIRVEDMHIQALAKRAASSHRNRHGRLTSKRRYGGTIAVRAPAMLIGILDRKLHYIGLEAIRLDSRNLKASQYDHTAGTYAKKALSDRIVTVGGETVQRDLYSAFLLEHAAPDGRTINRKQCITDFGTFAAACQAEIEAIRQSGSRHMQWYVT

SEQ ID NO: 13300 - protein, 406 aa, unknown
  TnpB Polypeptide
MTKVRTHRIRLETNNRQSTLLFKTAGCSRLAYNTMLAYHKELYDADKENNKFNAPLLKRYWNAKKKEFNFINDVVSQHAVIDSAYDGIKNAYTRFFTKLSGYPKFKRKRDSDYSFSLSNTEVKLDYVNNKIRLSKKHGWIKLREAFRFNESDVIGNITISRGGNDWYVSIAYSFESPTAEKQGIVGIDLGISNMAITSDGEVFGNLRITKSNAVKLKRLNQELARRTKGGKNWYKTVYKLRKHYKRISDVRSDYTHKLTSYLANEYHTVCIEDLNVKGMVKNRHLSKAIADVNFGELRRQLEYKCNNVVVVPRFFTSSKICSKCGYIYNPTDFDNVKWNLGIREWTCPHCNILHDRDINAAINILNKGKEMINSSASSAVSKNETTAKSKAAGGEVDFCVVTKQKI

SEQ ID NO: 13301 - protein, 450 aa, Natronococcus sp.
MLDLHGWSASKLWNVANYHSREVWEETGEIPDDSDLKNELKTHPKYKGLHSQSSQRVLEELAEAFNSWYGKRNNDSRANPPGYRKKNYYDDNGNRVHEEHPRSTVTWKQKGIRHDPKHNRVRLSKGANHKDHPRDWDYILVEYETQPDVTVENIQQVRAVYDTAKGRWELHLVCKHEVETVENIQQVRAVYDTAKGRWELHLVCKHEVETPDAPGTETAGIDLGICNFAAVSYSTEEADLYPGNRLKQDSYYFPKEIAKCDDSGGSEATRLHHKWSERRTHFFHSLAKHIVEKCIERGVGRINIGKLNGVREDENGESKNWGKHGNLDLHGWAFNRFTKMLTYKAKVEGIEVVEVSERDTSKTCCVCGRIDDTQRVERGLYVCEECDTAFNADVNGAENIRLNINDESNSESSTSLDRDRSTGWLAQPGVYLYDLSRGFQPRTEVVDCKP

SEQ ID NO: 13302 - protein, 336 aa, Lachnospiraceae sp.
MLADKVEHYKTTGEMLMTTPAQYKKLDEYKYLKEVDSLALSNVQLHLQTAYKNFFRDKKTGFPKFKSAKYSRKTYTTNNQKGTIFITDNGIKLPKIGIVKAKIHRKPESDWVIKSTTISQDSDGKFYASVLFEYAGTINKVSVSDNAIGFDYKSDGLYTDSFGNTCGSPKYYRKAQKKLTKLQRQLSRKEKNSNNHNKARLKVARLQKHTSNQRLDFLHKKSTEIANQYDVVCVENLDMKNMSNRSFGNGKATLDNGYGMFLTMLDYKLTDRGKYFVKVDKWYPSSQICYACGKQHKEMKNLSMRKFVCECGYSTDRDTNAALNIRREGLRLLQIA

SEQ ID NO: 13303 - protein, 462 aa, Clostridium sp.
VEMIIKTIKQHSYKLDSETFKELSFIANQYKNVRNYVYSRYSGIKSILLLAKNRDIRDEWVKFGFAEQWKLPARYWKLALSEAIGNIKSKWSNIKLKVKIQIKKNLNLSNGDKHYINYILKANELYYKVLNNIEFDILKIFQDKKLNYKYLNSLIKRYTRRYKGKIPYSYRGTTFSVDTGLYSYKDGCINITSTKKGKRLPIKLTDKNVYDRTMIVKLFKEKVEIHCPLKIKARKNNNSENVIGIDKGYKYLFAVSSGKFYGEKLNEFLSIETERLNRVNSNRNRLWALCNSYLEKGNAKKAQNILENNLGKVKYNYNKSKYDSRIKSYINYSLNQLIKEEKPTEIVMEQLDFVNWNNRYPKVVKRKLSRWIKGYIRQRLEYKCNLYSIAYTYINPAYTSKICNVCGSFGERIGDVFTCPKCKEIHADINASKNILNRKYDKDIDLYTNFKKVKEILENRLK

SEQ ID NO: 13304 - protein, 305 aa, Anaerolineae sp.
LERSSDQNCEGEDGSPLWTKDTPSLVLPLPTEYQDCDIRKAELIWRADHYELCITIDTGILIPSLLENSNAVGVDLGEINIAAAVTEEGEGLVISGRYLRSINRLRNKRMASYQSLIDRCKDGSKRKRKLLKNKRKASTKYERQQRDILHKASRQLINFCQEQGVSQIAVGDVKDIQVEVDLGRKCNQKISQWPHGQFVKYLGYKARWLGIKTDQISEDYSTKTCSECGHVLKNAPRGRVYCCPGCDARLSRDGNGGANICSRFLYGEYSKVQLNHLTYLHPLKRSRACDTSQSCSSSMMRTPCL

SEQ ID NO: 13305 - protein, 445 aa, unknown
  TnpB Polypeptide
MLITRGYRTELDLNNKQITLCKKHAGCARYTYNWGLARKQEVYRKTGRNMSAMELHKELNALKQTDYPWMYEVSKSAPQEALRDLDAAFRHFFRRCKLKRAGKWKGKKLGFPKFKTKRKGLGSFQLTGSITIYEDTVDLPRLGNLRLKERGYLPTSGVHILSATVCEEAGRWFVSIRVEEEVSDPVPASGDPIGIDLGIKTLAQCSDGIAVENPRALRSVLKRLKRLHRRLSRRKKGGKNRDEARIRLTRMYAHIANIRRDALHKGTSRLTRARLSQEARADRLNQIASALPEPKAKVKLRKGRRSPKMGSPPLAEKVARQVKQKQVKHILQQTTETDAPMRPRIVVLEDLNVEAMKRNHKLALSISDVGLGEFRRQMTYKTAWQGEALHIADRYYPSTKRCSNPACGAVKKEMDLSERVYVCEFCGLVMDRDKNASLNLAALVT

SEQ ID NO: 13306 - protein, 414 aa, Nocardia sp.
VLRYNFRLYPTSGQQAALARAFGCARVVFNDALTARKHAYEAGRHMTDKELSKALTLAKKRPDRAWLNDVSSVVLQQALADLNAAYRNFFASLAGKRKGTCVSAPRYRSRRNNRQSIRFTRNARFLITAGGKLRLPKIGDVRVAWSRQLPSAPSSVTVVKDASGRYFASFVVEMVTTPLPTSSSEVGIDLGLIRFAVLSNGNVIDNPRTLRNCERRISRVQRALARKQRGSKNRAKARVRMAKLHAKVADARRDFAHKQSTAIIRENQAVYVEDLCVKGLARTRLAKSVNDAGWSIFIRMLESKAARFGRHFSRINRWYPSTQLCSTCGARNGAKLLSVRSWMCTCGAAHDRDLNAAKNILAAGQAERLNACGERISPTVMAAPPDEAGTRREGRVTLVGISGLRAGEEANTSR

SEQ ID NO: 13307 - protein, 255 aa, unknown
  TnpB Polypeptide
VKVTAHRKTAGRVKTIQIRREGRHWYLVMSCDDVPATPLPATGTPVGVDVGITSFATTSDGTHVHNPRWTRNSAAKLAAAQQKLARAKRGSYNRKRAKEIVGNRHRKVANQRRDFQHKTARDIVRDYDLVVVEDLEIRNMLRRAKPVADPTNPGQYLPNGSAAKSGLNRSISDAAWGQFVSILCAKAEDAGRAFFEVDPRHTSDRCERCGHAAKDNRVTQALFRCRSCSYETDADEHASRNILRAGLARHTATAA

SEQ ID NO: 13308 - protein, 328 aa, Desulfotomaculum sp.
VQAVVETYFECCERTRKLHEQGNTHWRYPHRRKRFFTVIWKEAAIIHKGRILRLSNGWGKEPLIVKLPKRLTNTAILQAQLVWHRNQYWLHVTVEKPALLKVQGDVCAAIDPGEVHALTITDGDDALVISGRLLRSLNRLRNKVLRQLQRAISRTSSGSRKRKKLLAKKYRFLNWIERRIEHILHSISAQAVRWCLERNVKTVYTGNPEGVRERDCGRHHNQRMGQWAFGKLRDLLEYKLKRHGIELVAVDERGTSGTCPVCGEYTGQTGRVYRCGNASCGFTGIHRDVVGASGILDKAVNGNFTKGRKLPGKVEYLRPQVLAPKRAA

SEQ ID NO: 13309 - protein, 425 aa, unknown
  TnpB Polypeptide
MTNITLVAESKLYLKDNISLYDYFDDYSKLFNFLVRRCVHHLNRKLKGETESRYRTNLMREFNITNRMAKAIMRTAKNQLKLLKESARYQYSNLYKRRRSLYKKIARLKAILSSSSASSKQRKLAKLSLFWTQMRLNKVNQLISNGLKLHLTFGTKALLKTNKQKFLAKRDNQVVYIGDKNETCGNQQFQISFNSKYNRFEYKLRLDNQWVSDINKYIYGSFVLKNKEAKACILDTLSVKKSNPLTYRIIKRDDDLYLQIMYRRETADITRSSYGVLGVDFNKGFISVSEIDSSGKLTSLTRYNYLHQGKATKTKTSMLDLVSRLVSQAVSVGKDIVIEDLVSLDSNKKQNKTTSRNYNRMINSLKFGLFKRCLLSKATKEGVLVHTVNPYNTSKIAKASYTDRMKLNVHDAASYVIARRFYQYD

SEQ ID NO: 13310 - protein, 426 aa, unknown
  TnpB Polypeptide
MLLTFMIKGIKVRIYPSKEQEIYISNLLGCCRLVYNETVAFYDKVYKETGKSPSKKEAYANFVRLKAENEFLREIHSKPLSEAFHFAINAYDNFFYAVKCGRDRHGKLKFDKPQMHKKRKHDSCLFPRQAFRYIRGNRISLVKKLSDIHFKCSREDEHYLNHHQKKIRSVTLRRKCSGIYTCSILVEDIRVEPLGEAEKGNIGIDVGIKNAVITSDGEVVGNQKIYESHFRRLAILDRRMNRCKVGSRRFDKARRRLAKCHEKIANVRDNFQHQISARLVKEHSGIFTENLDCNYMRKTLCAKRNFIDVSMRSLMDKIEYKCKWYGRIFTKVGRFFPSTRTCSKCGYVRPLIKLKEREWDCPNCGCHHDRDMNAAKNILLEGERMVGLGSPEPNARGHELVAERSADMDESRKKCSIAVNSVATEP

SEQ ID NO: 13311 - protein, 208 aa, unknown
  TnpB Polypeptide
VATYRRALSESFESGADTQTAVNDVVTPYTLTSYAKDALKNYVPKLRDTYSASELKDDHPVRFTNRGWRLDHSEERRHEFCWRVPQAGRGNAFWIPLRINPAQRELWDDLLDGDVTVGEFRLQEHRTNWVLHVTVEYEVAEPTEPDGPTYIGFDIGESKLLTAVPFGTMLQPNRTSTTAVVLDTSARRCSRRSVVSKSETRSGSVNVW

SEQ ID NO: 13312 - protein, 457 aa, unknown
  TnpB Polypeptide
MRNVLYDYNSKNSEQLEYLKNKYKDNHLWQTLKETAKNLKPHNIIEIIKRIKASYKTYFTNLEAYKQNPNLFTGMPKPPKPKKLSKVTNYSVELDKYNSLSFAKLEKENLIGINLSKSMVYIHVDKRQVEKLTEIDKLYSARLVYDNGNLYLQISYLKNVSLLTSHVSRKYASIDIGINNLMAVFIDDETTPSLLVDGTPFKSYNSKFNRLVSKLNESKSKEVLEWAETKSGSKYPIKYTEKGRKIGKFISFLYSKRNRFFHDQFHKVSKRIVEYLYLHGVTDLFISKNLAELKNNGECDLNKAVKQNFIQIPFIKLLQNIEYKAWEYGIQVHYVDERYTSKASCISDDVKSIQDNPGLTNAFNGKRVKRGLFLDTVINKVFNADVNGAVNHIKVATGKSFRWLKNKLFKLCNPIKIKSDYEFCRLIKSLWNSVSGKSASFIGAEASLSGNLCLCQA

SEQ ID NO: 13313 - protein, 407 aa, Nocardiopsis sp.
MARSTAKRAFKYRFYPTDAQAAELSRTFGCVRLVYNRALAHRTAAWFTEQRRINYNEASAALTAWKKDPDPAFLNEVSSVPLQQGLRHLQTAFRNFFDQRAEYPRFKSRKKSKASAEYSRSGFAYSDGQITLAKMAEPLDIVWSRPLPEGAQPSTVTVSRDRADRWHVSILCEDTITRLPASDQAVGVDTGLTSLVTLSTGEKVANPKHERRDRAKLAKAQRELSRKAKGSANRDKARTKAARVYARIADRRKDFLHELSTRLVRENQVVVIEDLTVRTMVKNRKLARAISDAAWTQFRSMLEYKAAWYGRELVTIDRFFPFSKLCSACGTLQETLALDVREWTCSCGVTHDRDVNAAINIRAAGLAASACGAGVRPQREPSRTGRSATKQEGHGATRDGAQAPNHR

SEQ ID NO: 13314 - protein, 408 aa, Alloactinosynnema sp.
LSVVVVRLIGMSRFRLQSTPAQERVLLEHCGHARFVWNLAVAQHAHWQPGRKAAPGYTEQCRQLTEARAANSWLAAGSVIVQQQALKDHAQANANFFRRTHRRPTWRRRGQREGFRIVAVEPGDVRRVSRKVGQVRVPKVGWVRFRWSRAVSEGVKSYRVTRDRAGRWHVAFPVVPEPIAAPRTDAVVGVDRGVVVSAALSTGELLSVPALRDSEKARLLRLQRKLARAQRGSIRRGKVKTAIAKLKARETDRRKDWVEKTSTRLAREFDVVAVEDLKITNMTRSAKGTRNTPGRGVRQKAGLNRGILANGWGRLVTRLEHKAPGRVVKVDPRYTSQRCSACGVVDRGARESQAVLRCRSCGFACNADVNAALNIRFAAGHAVTARGGPPLGRPANREPQHADHLLVR

SEQ ID NO: 13315 - protein, 412 aa, Okeania sp.
MDLENTKSKSSKSDKKTSRHAHTKKSIKMPPNSVKKIRIYPERDLHRLWKQWLAAYRRVYNWALEQLKAGFKGDLQKACRANDKFPDWVLELPGHQKQEACDEAFDAYRQARKNGGEAKFKSCRTKSQTIQFKVGNYKNGTWYPRKTKGLSFKATEPIPIESIYGTELVYQRGRWFACFPQFVEILPTGSNRVIALDPGNRTFLTGFDGENILEIGKGDIGRINRLCSHLDNLISRMSSSSKRQRYKMRKAADRMRAKIQAIVKDLHNKTTSLLVNSYKLIFLPTFETSNMVLKQARKINRKSVRNMLSWSHYKFAQHLIQASNRKGVLVVRCNESYTSKTCSNCGHVHYLLGGSKVFKCPECKAVIPRDINGARNIMIRALQATAFTVKGDAILCSENVDSTDLSRLNVAH

SEQ ID NO: 13316 - protein, 173 aa, Okeania sp.
VQKFNPLKTTRACIDLGLLHYAVTSDGEFIEVPKFFRKSQHRLSKLQVRLAKRPKHSKTWKILKGKIAKLHQLIARQRLDWQFKLADHLFSDVSVIFIEDLLLANLVRRCKAKLGENGQFLPNGQSAKSGLNKSLQDAAFGQFIQVLEYVAWKLGKRVVKVDPKGTSQHCCEG

SEQ ID NO: 13317 - protein, 514 aa, Synechococcales sp.
MPKPIVRTDKWKLNPDGESLLWLSLTVDEYRAFCKALSFVVVNRWDSISTAASRCAAIEKLIHQTSKNPEPFHRYFGKRFYKFPSYLRRAAIEFVCGQVSSYMTRYRAWQGGDRKRRDAKPPVFNPGSGCYPSLYKGQCIKFEKSLEEVAVKVWNGSDWVWTKIKVASKRIRHLDGQILSPALIVKGRQAHLSVPFRIKPPSWKGSTVCAVDVGINTLATIAIVGPDGTVTARKFIHPAADIDHRDKLGLRIRRKARLTKKLHKGFCKPLYRKAQNINKNIAHQVSREIVNFAIDNGADTIVFENLKGWKPKGGRKRSGLKQRFHSWLHRRLFDFTSMKFEEIGGSVVEVYARGTSSWAFDGSGKLKRSKKNYALATFQTGKQYNCDLSAAQNIGARFWAWKLKLTHRKDGRSLSGKSSGSESRMPITLSSLWDWEAAHGMRSIMSRSIHENEMPKSAEFDAALAERQSAIAAAEGTDMSSPPWAELLQSCQCGDRCSSENHRPIAQPIALALL

SEQ ID NO: 13318 - protein, 442 aa, unknown
  TnpB Polypeptide
MKPRKFTVVAQLHEKQNPDLIKYVDSCFATYGKVKRETFHILKHDENINKSTFNTYLQTKYGILKRTANSIISDAQGTLNALIELKQYEKSQLECKILALKTLIDKLELKVADNKTLLRLNDKTVSLVKHRNLKRKLVFKKNQLNNKKQRLKNLQYQIEHGIYKLCFGTKYLLKHDYNEFITRRDSQLSFVGSKDEKACNQLLQLAYNHQNNQFNIKLRKDIGGFKDQRGSYVNGEIHFNHHKQELISILKNHNSPLSYKIIRKNGRYYLYCTFEIQRDESSFVTRSSNGVIGLDFNKGFVTITETNQYGHMIDNDLIRYRFKKGNTTQTDLELIANKVKERALAKGKDIVIENLNFKDTKAKTVSKKGKKYNELLHSLAYGKFVAIIESICYRNYIWLRKVNPAWTSWIAQQKYCPKMKLNIHTGASFVIARRGQGYTDKV

SEQ ID NO: 13319 - protein, 495 aa, unknown
  TnpB Polypeptide
LVIKITYKEYYLHLVSNLSSLFRRMKAFEKYLHSTPIQPSKTERFFLNFCYRRPFIYKPKNGIMEAGKEVRTMQYKALKTRLNLPGNQRQFLRFLMRESRSLYNQALYNVRQHFFQTETYLSYEENYHLLKDSEHYRTLNSSQAQGVLWKVDEAMKAFFGSLKSKVKQKVRLPHYLKQDTYYPLFDRMVYKPKQDTYTLPRSNFIKRISHELEQCSKQLGKYTDELQEVDSLSLDIETPQCLQTKPIKEITIRPLYDGRHMEVIYVYLEETKKTTTNPKTETMGIDFGYHNLAFCSVTNNSHLLVDGNRLKSMNQHYHKQIAKMASLRPNQAVLTKRMIKLMDKRNHQMDYGIFKAAKLILDHALKHSVGLIVIGYNDRFKDERYSDVYNQWTRSIPIARLRDRILYLAEQAEIATKVVNEAYTSKASYLDGDEMSRGEFSGRRVKRGLYQCKGGRLINADQNAALNMIRKGNPDAVRIGAKGVNTPKRTYLFGV

SEQ ID NO: 13320 - protein, 386 aa, Lactobacillus sp.
VLKGIELRLYPNQTQQDQLWQMFGNDRFVWNQMLAMMNERYKNNKDLPFLSKFKLDYLLKPLKKEYPFLKNSDSSSLQVVNEFLNQSWKNFFNDKTGKVGKPRFHSRKYLKKSYTGKSLVQITGKRYLKMPKLGYIKTSKTSILKDAKIKRYTVVLEPTGKYYLSLQVEAKPADQFKQTGKQVGIDVGVADLAILSNGLKYPSFDGSYYEKKAINWQKKYSRRRHLAQMLCLQDKQRKALSPRSLDSFSNWQKAQRTKAVCQAKVAAQRQDYLHKLTTHLVKQYDVIVIEDLRVKNLQKNHHLAKSIANASWSMFRQMLEYKCEWYGKKLIAIDPKNTSRICSKCGYNSGEKPLDIREWSCPKCQTHHDRDINAAVNILNKAKPAL

SEQ ID NO: 13321 - protein, 449 aa, Lactobacillus sp.
MVKNGTVSRNDTQYEQLASEYLIPAAPLLDEAATQAHNLYNRALYDVRQAFFKRQYINSFTDLNTLFKKRYESKENMLYHKLGYVQSAQQTLREVMTIWQAWFKALKAYRKNPARFTGRPRMPRDLHKSQRHTFYVTNQNAQIVRKDEQDKGYLVIKKLGIKIKLASADIKKIGRVAFKPVANGYKVIVPYKTKQKIKYLPDNGKYLGIDPGIDNAFACVSNTGARPLLINGRGIKSVNQYYNKKRSELKRLQAKYHQLEKLISTKQGLKPVYQETKAMKRITAWRNDKIRQFAHKASKRIVDYALSCDANTIVIGKNKSWKRSFEMGKRNNQNFIGIPHQVMIDMIKYKANLAGITVIQTNESYTSQTSALDHEQPCWNNGNKSRKKQRKSPVNRRIKRGLFKADNGTLINADINGALQIIKKVFPNFSLDDGIVGAVLRPFKWSPTI

SEQ ID NO: 13322 - protein, 381 aa, Nitrospira sp.
MKRIQAYKFELMPDGQQQNHMRRFAGSCRFVFNRALALQKERYEQREKKLSYAGLCKLLTEWRNSQETAWLADAPVHPLQQSLKNLERAYANFFAQRAACPRFKKKGQSERFRYPDTRQIKLEQGNSRLFLPKLGWLRYRNSREVLGTVKNVTVSQLCGKWFVSIQTEREVEPPLPNGDAVGIDMGIARFATFSTGSYLPPLNSFTQHETRLRKAQRAMSRRTKFSNNWKKAKARIQRIHARIGNVRRDYLHKATTAISHNHALVIVEDLQVRNMSASAGGSLEAPGRHVRAKSGLNKHILDQGWFEFRRQLQYKLAWNAGRLLAVPPRNTSRTCPHCGHVSRHNRQTQTEFRCVECGFEGHADVVGAINVLRAGHAQLAC

SEQ ID NO: 13323 - protein, 468 aa, Nitrospira sp.
MKRIQAYKFELMPDGQQQNHMRRFAGSCRFVFNRALALQKERYEQREKKLSYAGLCKLLTEWRNSQETAWLADAPVHPLQQSLKNLERAYANFFAQRAACPRFKKKGQSERFRYPDTRQIKLEQGNSRLFLPKLGWLRYRNSREVLGTVKNVTVSQLCGKWFVSIQTEREVEPPLPNGDAVGIDMGIARFATFSTGSYLPPLNSFTQHETRLRKAQRAMSRRTKFSNNWKKAKARIQRIHARIGNVRRDYLHKATTAISHNHALVIVEDLQVRNMSASAGGSLEAPGRHVRAKSGLNKHILDQGWFEFRRQLQYKLAWNAGRLLAVPPRNTSRTCPHCGHVSRHNRQTQTEFRCVECGFEGHADVVGAINVLRAGHAQLACGEDISHATPAKVKRAASAKQEPTEATLAPFDHSPERRKNLRSSGRGGCQNPKSFAHMPDRILHPREIPCDKIARHILHNRITLPLDR

SEQ ID NO: 13324 - protein, 389 aa, Cohnella sp.
MIRCVKTAFQTSKADLERLFACNRISAEIWNRCLSIAKNYSVQHDGKWIGKTVLQAALKNQFPLHSQSVQAVCHKFLFARDSAKQAKNQGWVAKYPYKQKKHFNTKWVDQSFRIEGSALYLSLGIQNGKRQRPIKITVPNLPDAEIKEIELVYDRKLMVSMSYEDGKVAPVNAGNQVAGVDLGEIHSIAATTEENKSIIITGRKARSIHRLRNKKLAEIQKLMSNCKKGSRQWKKYNRAKKYMLGKSDRQLNDVIHKTTRQFVQWCTDNEVKEVVVGKVEGVQRHTKKKKRKTVNQKLSNWRFGKIQKQITYKLEEHGISVKMIDESYTSQQCPCCGRRKKTSTRNYTCPCGYEEHRDVHGSKGILSKYLHGDIRYLGKTKTIKYLRIA

SEQ ID NO: 13325 - protein, 408 aa, Geobacillus sp.
MCYTILIHDLVKGGSTMLRGQKVAFRASKADLERLRACNRESARVWNECLLLAKEHFLQHGRWISKSELQKQTKGRFHLHSQSIQAVCHQYLFARQSARAAIQKGHRHVRYPYKQKTFFNTKWAKDGFTIHENGKITLSMGIHGGKREKPIIVYVSQLPQGTIKEIECCYDHGWYLAITYDDGQEAKAYQPGHAVGVDLGEIHTIGAFCENGQALLITGRKVRSLHRLRNKKLAEIQRRQSKCQKGSRQWKKYERAKKCILSKSERQLRDALHKTTKQFVDWCRTQSVSDVYIGNVEGVERNTRKKKRASRKQAQKLSNWSFGKTKKYLAYKLAQHGIRLKEIDESYTSQTCPVCRKRKKVSGRIFACSCGYEEHRDIHGARNILSKALHQEILPWPAPTKLTYLRIA

SEQ ID NO: 13326 - protein, 295 aa, unknown
  TnpB Polypeptide
LARKIFKHLLDRNRKPKFSNISMHLDGKVVELNKKEGNGAKSFDYWLKVSTLEKGKPVYIPLKANTYAEKVEGEFLNYCQVVENDGEIEFRIIKQLKKREYIPATDEIAIDLGLRPLFATDKGGLFGRSFFDMLKTFDKKITKRMANLQKRKIKPRSDKKYRKYVDNLRDLLKNEINRLINIIIKIYKPKRIIIERLDFRSPELSKRMNRMIQNFGKRYIKEKLERLQQLYGIEIIEINPAYTSQECSCCGYIDKKNRKDTQEFECKVCGNKMNAQINGAKNISKRSSLGNLTKK

SEQ ID NO: 13327 - protein, 192 aa, Microcystis sp.
  misc_feature (192)..(192): Xaa can be any naturally occurring amino acid
MEKAYSFRFYPTPEQESLLRRTLGCVRLVYNKALHERTQAWYERQERVGYAQTSSMLTDWKKQEELDFLNEVSCVPLQQGLRHLQTAFTNFFAGRTKYPNFKKKHQGGSAEFTKSAFKFKDKQIYLAKCTEPLPIRWSRQIPESCEPSTVTVRLHPSGRWHISIRFDDPTIQPLPPTDKAIGIDLGISSLVX

SEQ ID NO: 13328 - protein, 381 aa, unknown
  TnpB Polypeptide
MRKTFKYRLYPSKLDTTKLKQALEGCREIYNRTLELKKTTFETEHKSLSLFDLNKELTTWIKNKPELKERVYSQVLQDCQTRVDLAYKAFFRRIKQGLKPGYPRFRGPDRYDSMTYKQYGFNLNMTDSTLYLSKIGRVPVVLHRPCLGTIKTCTIQRTRTNKWFVSFSVEIDRSEPLPKTGLIAGLDMGLKTFIMASDNFKVKRQRFFKADEDALASVQRRYSKFPKTERSPHKSRARRAVALVHERIRNRRDDFCHKTANSLVHRYDFMSVEDLNINSMLEEKKYSKSIADVAWAQLLERLSCKAEEAGKTVVAVNPRGTSQMCSQCGEIVHKDLSVRTHHCPHCGLSIDRDLNAALNILRLGQQSVEYRAYATMWREQG

SEQ ID NO: 13329 - protein, 230 aa, Okeania sp.
LVLTRGITSLVTTSDGEKKSNPKNLNKLHKKLRLAQKSLNRKTKGSNNYQKARLKVARIHAKIKDSRLDFTHKLTYVANPTAPLQLIRENQTIVVEDLAVKNMVKNHNPPPSPPGRGARGVGSDANWGELVRQLEYKAEWYGRELVKIARYFPSSKRCSNCGHVVEKLPLNIREWDCPECTAHHDRDINASINILRMGTRVGVRRKGTPTLEGCGTRSVSLWSDRKTRGE

SEQ ID NO: 13330 - protein, 392 aa, unknown
  TnpB Polypeptide
VQRAHKIELKPTCGQERYFRKACGTARFVYNWALAAWNSQYEAGGKPSGLDLKKQFNEIKYQEFPWIAEIHRDAHSQPFQNLQRGFSAFFRGTAKRPVFKRKGQKDSFYVANDKFRVDGRRIHLPVLGWVKMTEALRFQGKRQGAVVSRVADRWYVSISMDAELPETTPGTGSVGVDLGIKASITLSTGQVFRSPKPLKKQLRKLRRVQRQHSRKAKGSRNRVRSAKRIAKIHWRIANIHKDFLHKATTIILRENKAVVIEDLLVAGMVRNRKLARHVSEEAFGEMRRQLEYKAAAFGAVIHVVNRWFPSSKTCSNCGQVKPALKLSQRMFECDACGLVLDRDLNAARNLVQQLPAASREVMPVDCPESGASAPVGGTKQELCRAHRCAQER

SEQ ID NO: 13331 - protein, 336 aa, Halobacterium sp.
MKSTVAEWKKGNSRPLPSFDKPSAVYDKRTLTVKDEYATLSTVNGRVEADFVLGEYQRSYLEDDDYEKRMGTLHYRPDEEAFYLHVVIQKEVDQRDGERVLGVDLNLKNVAVTSTGRFFDGGELLWGQNHYFRVRRSLQNKGTRSAKQVLRRLSGRENRFVLNRLHTISRGIVEEALRHDCSYIAVEDLTHIRSRMDAHDDRLKRQMHNWAFRELQEQIEYKAAEYGIRVESVNPAFSSQTCSKCGHQSSTNRDSETGWFVCNECGYEVDGDYNAAKNVGLRLLALPPGKRPDGLGNGQLALKSGTLNVSDTSSVHSSLEFERESTDKPTASAVGC

SEQ ID NO: 13332 - protein, 386 aa, Cyanobacteria sp.
MTQTISVSCKLQVPVELRQEIDRTLQGFADACNQILQVAKRENCRNATKLHHLTYYTVRLTTGLKANHVCQAIRRVVGNMKAVKQVHKFRPSSISLDARVFTYRESDQHVGITLMSKKVWFPLSIGNYQLALLRGQTPTSATLVKRRSGDYYIQIAVELDTPPTGKTPKVIGVDLGRRDIATTSTNKAWNGSQLQATRDRYDRVRASLQSKRTRRARRLLKRLSGREARFQKNINHSISRQLVNEASTIGATLAFEDLTDIRKSLNAQPRNKTERRRTNNWAFYQLRAFVTYKAVLAGVPVVLIPPAYTSQTCSRCHHVTGEKGKSYRNGKVFKCGYCGLEADADWNAANNIATLGVAFVNQPESSVMSCVLEGQLSLLCSTFNQG

SEQ ID NO: 13333 - protein, 418 aa, unknown
  TnpB Polypeptide
LRATKCLTQQYSSGLERILGECLSITYNAIHYAQEHGIDNRKGMKGFYRSLKDTKLPSCYKVAAIWRACEVVASRKKSLNRGAKLRHPKPLRPVICMTSGFFITMKGRLFVPLRRDQYFDVQLNHHVTETLEGKKVRSLTITPGSLSLCYSEDVEAVPARTVYGVDRNEKNLTFGDRERVVQVDMAKAVKVRQTTREIISSFRRNDVRIRRRLARKYWTRANHRTNSLMHAATNLVIETASRNRAGIAVEDLTGINKMYQRGNGQRTDHRFRLNSWPHWRAKKMLEYKAAWNGVTLIKLTKSETYGSSSECSACREKLDSPEKGDAEHGRMLWCQACGRWIDRDVNAALNLSTRGLSRFASSRPKSQEEEGRSQQADFTSSESREKGLAGEAVKGNGTKTLILRVDASKLIRRREPRS

SEQ ID NO: 13334 - protein, 240 aa, unknown
  TnpB Polypeptide
VTVVKDAAGRYFASFVVQAAAEPLAPAGTVVGIDLGLTHFAVLSDGRKVASPRFLRRADKKLKRAQQVLSRKQEDSRNREKARVKVARAHARVADARRDFHHQLSTALIRDNQAIAVEDLAVKGLARTRLARSVHDAGWSEFTAMLEYKARLYGREFHRIGRFEPTSQVCSACGIKDGPKPLHVRVWTCAGCGMTHDRDVNAARNIARAAGLAVSACGAQVRPGPVPAQRREAGTLRGAA

SEQ ID NO: 13335 - protein, 370 aa, unknown
  TnpB Polypeptide
MEYSYKFRIYPNTSQAQQIHRTFGCCRFVWNHYLTMRKDLYEQDGKSMNYNACSKDMTQLKESLNWLREVDATALQSSLRDLDTAYQNFFRRVKKGEKPGYPKFKSKRNHWQSYKSKCVGTNIKVLKDAVQLPKLGVVKCRISKPVEGRILSATVSQTPSGKYFVSLCCTDVETDTLPNTGAAVGIDLGLKAFAVASDGTEYPNHQYLAKSQKKLARLQRQLSRKSKGSKRREKARIQAARLHEHIANQRQDMLHKLSTELVRQNDIICIEDLAPQNMMKNHKLARSISDASWGEFRRQLEYKAKWYGKVVVTVDRFFPSSQLCSGCGSQWSGTKDLAVREWICPVCGAVHDRDHNAAKNVLKEGLRLLA

SEQ ID NO: 13336 - protein, 481 aa, Rhodococcus sp.
MLERKLFVLTHIQGISSSHLKKNFSKQYGLTARQFNSIRMQLDGKVSSILEKRKQEIQELETKTAYLQKIIKMKTTKKEQLHQKLLRIPQASPIFLKQIKKYQNLKFYLHQKNRRLRNLQQKLEKLKSDEVNKKIRLCFGSKKLFHKQFHLEVNKYTDHRQWKEDWLAARGSQFLVIGSKDETFGNQTATYDFHNTLRLRVADHFILKYGKYISFPKLKFPYGQEMIDQAKVSYMGVTRTGKPQKYYTTITYRFLKQKKGWYVYATVERNTPKIGTSNLNGLIGVDLNAGFLSICEIDRFGNPIKSWRIDVPMNNRRTEQVKASLSDVIKQILVYAVLKQKDVVIEKLDFSKKKAKLREMGPKYARMLSGFAYSSFNLLIESKGKKEGVRIRKVNPAYTSQIGQMKFMARYGLSSHSSAACIIARRGYYFKTEKPKYDTVLSFPKKFDKQKSNFSNWRTITRHLKKQYTFQDKIEQLKADI

SEQ ID NO: 13337 - protein, 478 aa, unknown
  TnpB Polypeptide
MFVPSLGELSRVSWGPAPTPAGMPGEGVYPVEYKNRRTNVVRLLPNGAQERKLRKLADITAKLYNELNYERRQQFFSGKGVDFKGTWDKYYEKYKNMLGVNAQAVMQKNNEDWNSFFSLLKLKKQGKLPPFMNHVSPPGYWKDKETGRRKLIIVVRQDRYEVDEQRHVIILKDFSMEIKFVGRLRWCGKQGRLEIIYDESKGAWYAHIPVDVGVVETRTGKKTKHIVIGERKAIQIATPRGNRVASIDLGINNLASVVVDDGTWILYRGVRAKEDFFYMQRLISRIQSLRDSLKDKLLDDAIDELNREMRRLFGKLMRRLLHLYRNFAKHLIKLLHELGVSTIYLGYPFNIAQQKGNKFTVNMWSYRKLMEAIELKAQEYGMRVFEVVEYNTSKYCAFHGVEVKRKPRGVAHCPFGHKLHSDLNGALNIMKRAVGRVPLVVKKPLSFIVEHNGVAPVKGEVTPKTPRKPVQKGGKGPV

SEQ ID NO: 13338 - protein, 393 aa, unknown
  TnpB Polypeptide
LFKTDRIVSKFDVLYECGKNIHAKALPSTPAQQTLLSVSEAFKSFRELKSKFLRGELDFRPKAPTYRVSGGLFKVAYPNTGAQRPKLSGDGKTLTFSMGNQVNRWFDIKSFDLPMPENLDYSKVKEFTILPKNGAFYLEASYEVEKEAHTLNVDEALGIDLGTASNLMACVDTLGNSFLVDSKQAKAMNQLYNKRIAQRKKDKCQDYWDVVCGAITRKRNNQMRDLVNKSAKLVDYCTGKGLGTLVIGWNHGIKDECNMGRRENQKFVQMPLAKLKTRISQLCEKHGIRFVETEEANTSAASYLDGDSLPEHGKKPVGWKASGRRSPRGLYATANRNKVNADLNGAANILRKVAGNLGIDLSRLGRRCLTTVGRIRLWATPKFSTCPKESQRL

SEQ ID NO: 13339 - protein, 396 aa, Microbispora sp.
VAVRRSYKFLLRPTARQAAALAACLEDHRQLYNAALEHRRTAYRKAGVTVRYGDQSADLKHIRADDAEGQGRWSFSSQQATLRRLDKAFVAFFTRVREGRTPGFPRFKGRGWFDTLEWPKDGDGCRWDSQPEHPTATFVRLQGIGHVRVHQHRPVQGRVKTISVKREGSRWYVVLSCDDVPAQPLASTGAAVGVDMGVVSLVSTSDGELLDNPRHLEASAGRLAAAQQALARKKRGSKRRREAVARVAALHAKVRRQRVDGAHKAALTLVRSYDVIVHEDLRIVNMTRSASGTIEQPGRNVAAKSGLNRSILDAGWGVFLRVLARKAESAGRELIAVNPANTSRTCSRCGHCAKENRVTQAEFACTACGHTAHADVNAAINILRAGLALRDAAEAA

SEQ ID NO: 13340 - protein, 397 aa, Microbispora sp.
MLTGRRYLLAFTPEQETLAELIGDACRAVWNTALEQRRAYRQRGAFTGYVEQARQLAEAKKDFPWLAEAPSHTLQQTLRDLEKACKTHGTFKVRWRSKRKSPPSFRFPDPRHLAVERVSHRWGRVRLPKLGWVRFRWTRPLGGRLRNATVLKDGRRWYIAFCVEDGLVELAPNGKPPVGVDRGVKVAVVTSGGWMCDREFFTPGETIRLKRLQQQLARQRKESMRRAATRAKLARLNARIRNRRADFLAWTANRLTRDHGLVVVEDLKVKNMTASAKGTMERPGSRVRQKAGLNRAILAKGWGGLLTALEHKARYNGSRVVRVPAAYTSQRCSACGQVDAKSRESQAVFACTSCTYAGNADVNAAKNILAAGLAVTGRGDLAIGRSAKRQPPETRAA

SEQ ID NO: 13341 - protein, 407 aa, unknown
  TnpB Polypeptide
MEAGYSYRFYPTNEQAQMLARTFGCARFAYNWALRLRSDAYQNEGQTLSYGDTSKRLTALKKTEDHAWLNEVSSVPVQQALRHLDAAYRRFFRKKSRFPRFKSRRSKQSAEYTTSGYRVKDSGMKGQPLVYLAKMTGPLKVRWSRPLPSAPKTIHVSRDRAGRYFVSFQVADDPKPFARTKRSAGVDLGLKDIVVTVDDLGQMWKSGNPRHHRRDLAHLKRAQRGLARKQKGSANREKARRKVARLHARVRDRRQDFLHKLSTRLVRDYDRIAVEDLAVKNMVRNRSLAQAISDAGWGELLRQLRYKAEWYGKEVVVVDRFYPSSKRCSGCGWINAALALSDRRWTCEECGAEHDRDGNACMNILAAGHAAAASGDGVGRGSAAHLSVKEESTPPRGVECQVLGSRH

SEQ ID NO: 13342 - protein, 377 aa, unknown
  TnpB Polypeptide
MKKTYKYRLIGNKTVFGNAMNWLDLCRHLYNTGLEQRITAYRQNKGHISCYDQIKQLPELKVAFPEYWVVGSQVLQDVLERLDRSYKAFFRRAKSGSGKVGFPRFRGRNRYNSFTLKQAGWKLDGRYLSIRNVGRFKLRLSRLITGEIKVVTLRREASGKWYVCFSCDRVPEKRLPESDRIVGIDVGIKSFLVDSEGGKVENPNYFRQSERWLRRRQRVLFRRVKGSNGRHKARILVAKAHEKVKNQRNNFLHKVANSYIQNYGTLVFEGLAIKNMVRNHKLAKSISDSGWGAFYGLCDYKAAEAGRQIIRIPRFEPSSKTCSECGVINQELRLSDRQWVCKSCGTLHDRDYNAAKNIRRVGQTLQEKTYENAQSVS

SEQ ID NO: 13343 - protein, 386 aa, unknown
  TnpB Polypeptide
MFQRAYNIRLYPNRQQEVLLGKTFGCCRKVYNCMLETRQKSYEATGTQCRSKPSDFYGEFPFLKEVDSNALTAEVLTLNAAYKNYFERKADGVGLPQFKTKHKDKDSYTTYRTKNNIRVEGQKLRLPKVGFVTFRNYEDLDWSSRTIKHVTVTRAKSGKYYASLMVEEAVPKALPATDSETGVDLGLNEFCVTSDGEAVANPRFLREKEDRIAVLQRAFDKKEKGSKRRERLRIRIAREHEKIANRRKDFINKLSTRLLRENQTIVVEDLDVREVAEGDHAKSEHDTAWGMFLNKLQYKAEWYGRTIVRVGRWFPSSQLCHVCGYKNTMTRDLSVRSWTCPQCGTSHDRDFNAAINILTEGKRIIAAGTAVKSAGNYDTQREAATL

SEQ ID NO: 13344 - protein, 370 aa, Bacteroides sp.
MEYAYKFRIYPNAVQTQQIQKTIGCCRFVWNHYLAKRKEVYEQDNKTFNYYDCSRDMTDLKKSLEWLREVDATALQSSLRDLDMAFQSFFRRVKRGEKPGYPHFKSKRDHRQSYKSKCVGTNIKVLDKAVQLPKLGKMKCRISKEVRGRILSATISHNPSGKYFVALCCTDVECAPLPTTGAGVGLDMGIKAFAVTSEGMEYPNHKYLAKSEKKLARLQRQLSRKTKKSNRREKARLQVARLHEHIANQRKDMLHKLSTDLVRQNDVVCIENLASKNMVKNHRLAKPIADASWGEFHRQLIYKAEWYGKQVVTVDRFYPSSQLCSACGAQWPGTKDLDVRGWTCPECGTIHDRDINAAKNILNEGLRLLA

SEQ ID NO: 13345 - protein, 409 aa, Halosimplex sp.
MEVRRTVPVKLNVVGGDADLLRETIHQFLHAANYVVDAAYDGEWVETRKSALHEETYADVRDRTELHSNHVQSARDRAVDALKSVVAKWSKGESATLPTFTTPFCEYNQRNATFHNDHATLATVDGRVTVEYVFPDENRDTPHSEYLRSDEWETTGATLHYRNGSFYLHVRTKANVDVPNRPENGTVLGVDLGIENLAVTSTGQFWSADELNHWRQEYVERRQSLQKCGTRWAHENIQSVGRKEAGRFGQHLHCVANEIVEEAVETNCSHIAFENLTGIRERMTNLRRFHEWAFRRLYDYVSYKAEERGISVEQVSPNYTSQRCSTCGFTHEQNRPSQELFCCQDCGYENHADYNAAKNIGLKLLRDQTGSEGGAPVGVRLNTGMLNANGVVPVPDSVRAGVHGESPRL

SEQ ID NO: 13346 - protein, 418 aa, Halosimplex sp.
MEVRRTAPVKLVVPDERRDDLHESARQFLHCANRAAEFCWSDRSYTECVTANTSARTALYADLRDETDLTANLVQEAIRRAVQAVKGCVERWKQGKRVSQPEFTSWSMLYDKRSATFYRNKVSLSTVNGRVECDFELPSDSPTPYEEYVLSKEFEFRASTLQYDAVDDEFYFHITTRKYDSDGDGENAEVSEDAKHQTALGIDLGVNSLAVSSTGRFWQGDDYDHWCREFEKRRGKMQQRGTQAAHNALLRLGKREEAWRKQYIHTVANEIVTEAVEHGCNVIVFEDLTDIRERLPEAKWHHLWAFRRLYEYVSYKAPERGVSVEQVEPNYTSQRCSRTDCGFTHDGNRHGDHFECQMCGYEVNADYNATKNIGMRYALERQHRLRSSPTSGSGDAPVDVRVNGGTVNGESHQPIAGG

SEQ ID NO: 13347 - protein, 559 aa, Verrucomicrobia sp.
MPKPKTPTFTAEFELRTSSQDQRVLGSRFEAAVQLYNAILLESLHRLDRMRLDPAFDLAGAMPSGASGPQASATQKDRAKARRQAFDVLRVKYGFIEYELHKHPSLKGDCWLRGHLDSQVAQVVATRAFRAAEQHCFDQGGRPRVKDHGEIDSLEGKSNASGIRYRLQHILWKGEFAKLKLPLIVKQGDPVQAHALRLAEAGQVKFVRILFRTIWGQRRVYAQLVLAGQPWVKLTTAGEPKHRVAEGVIGAMDLGISHVAVVTQGQVESFPFCEGLDRKSAVSRRYLRRMERQRRAKNPQNYHPNGRVQEGQMVWDKSEGQKRVEAHLADLWRATAAQRTSLQNKLAHQVLSMANVLISEKVNKRDWAELFGRTVGHTAPAMFEDRVGILAKASGGDLELVSTYKTYLSSRCLCGRQKKKTLKNRKHTCGCQWVPNGAYVDRDQFSAFLAMFCQGGALDERRARTAWSEWGADSLLQSSSKKRKVAPGEPPATRRGQEARNRNSTGPRSGQRREDGPIRGRRALRASTPIEDLSNPGKSLPRCLKRQLGTPWKPLGSPR

SEQ ID NO: 13348 - protein, 230 aa, Paenibacillus sp.
MFCRINAVVSILAETEVQPLEETGSSVGIDVGLKDFAILSTGQIFGNPKWFRTLEEKRVKEQRILSRRQELAIKRKCKLDEAKNYQKQKRKVARIHEKIANARTDYLQKITTEIIKNHDVIGIEDLQVSKMLKNHKLAKAISEASWSQFRTILEYKAKWYGKQVVAVSKTFASSQLCSCCGYQNKDVKNLNLREWDCPSCGTHHDRDINAGQNLKNEAIRLLTVGTTGIA

SEQ ID NO: 13349 - protein, 293 aa, Streptomyces sp.
VGLHPARSGDPGPLPGVGHVTVNRHRPVVGKVKTVSVKREGKRWYVVLTAEQAVPGPMPATGSVTGIDMGIANFLADSHGGFVPSPCHGRQAAAELQAVQQALARCKPRTNRRRKAVQKVAGLHRKVRRRRLDHAHKTALDPVRAHDFIAHEDLKIRNIVKAPAPKPDPDRSGSFLPNGSAAKAGLNRSIADAGWGVFLAILHAKAESAGREVIAVDPHNTSRTCPNCGHVAAENRPTREKFNCGHTAHADTVGAVNVLRAGLVRATPGRASEQPPASAGEESVRPAWAAAKG

SEQ ID NO: 13350 - protein, 408 aa, Streptomyces sp.
MRLRYSFRVYPNGPQRSALARAFGCARVVFNDALRVREDARAAGMPFVTSGELSKRLTASKKTPERAWLAEVSSVILQQSLRDLETAYRNFFDGLKGKRPKMGPPRFKSRRDNRQAVRFTANAGWKIADGGKLRLPKIGDVRVKWSRALPSVPSTVTVVKDASGRYFASFVVETDPTADLNRMSDTEAVVGIDLGLTHFAILSDGTKIDSPKVLRRAEKKLKRAQQAMSRKAKGSKNRDKARVKVARAHAQVADQRREFHHQLSTRLIRDNQAVAVEDLAVKGLARTRMAKSVHDAGWSAFVTMLEYKAARYGRAFHRIGRFEPTSQVCSQCGVQDGPKPLHIREWTCGACGAVLDRDINAAINVAKAAGLAVSACGAQVRPGLLPAQRREAGTHRNGQTTVVGIQVL

SEQ ID NO: 13351 - protein, 219 aa, Bacillus sp.
MTKQNKAYKFRLYPTEDQAHLMRKTFGCVRFVYNRMLAERKEAYEKHKDDKDQLKKQKLPTPAKYKAEFEWLKEVDSLALANAQLNLQTAYKNFFRGQNDFPTFKSKKDRKSYTTNVVNGNIMLLNGHIKLPKLKMVRIKQHREIPQGHIIKSCTISMTPTGKYYVSILTEYEKEIVQKEVETIVGLDFAMDQLYVSSEDERANYPKFYREMLDQLANA

SEQ ID NO: 13352 - protein, 398 aa, unknown
  TnpB Polypeptide
MIIRKAFKFEIRPNGEQQRKINQFCGCSRFVFNKALDWQKQAYETDNKIKFSYTKLTNFLPQWKIEFPFLKDCHSQILQQSLKDLESAYRNFFAKRANFPKFKKKGLKDSFRYPQGVKIEQKNNRLYLPKIGWVRYCNSQMVLGEIKNVTISKKCGRFFVSIQTEFEQTIPQHKGSEIGIDMGVARFATLSNGDYFEPLNSFKKHQNSLRKAQQSLSRKVKFSQNWLKQKAKIGKIHHNISNARKDYLHKISTEICKNHAMIYVEDLQIANMSKSAKGTTEQHGKNVAQKSGLNRSILDQGWFEFRRQLDYKSAWLGGYLVAVNPKNTSRTCPCCGYIAKENRQTQANFKCVECGYSENADVVGAMNILRAGHAQLACEVNGTSRQQQEPTEVSRILF

SEQ ID NO: 13353 - protein, 413 aa, unknown
  TnpB Polypeptide
MDEAAEDTQLMRGFRMKFRPTLAQRRYLACAFGVARFVWNWALSTKREAYQQKRATIGWLDLSKRLTALRTEKPWLTQVDRQTQQQSLRDLDAAYKHFFAKRVRFPRFKSRSSPQSVRFILDGRSGKKFRAWAERRLVLPGLGACRLINSFATWPSMPKMLTASRDACGDYWISFAAQVDRLPMAPDHDIGVDVGITDLAVSSDGWKSGQKKVSKKKAAQLRRYQRQMSRRVSGSKRRGVAKRKAARLQRQIANIRKDFVHKVSHQIATTARSVVLETLNVQGMVANHHLARSLSNASMSELHRQIEYKVTQRGGTVIWVDRWAPTSKRCSNRICGAVIDTLPLSVRSWICPSCGSEHDRDVNAARNTLAIGLGRAEFTRGDWRVQERVTPYRCARLNRESTQSPVSGWTAYG

SEQ ID NO: 13354 - protein, 413 aa, unknown; identical to SEQ ID NO: 13353
  TnpB Polypeptide

SEQ ID NO: 13355 - protein, 463 aa, Acidimicrobiaceae sp.
VLDPTPAQERLLRSYAGAARRAHNWALDQVRQNLSTRSAERAAGISEDQLSGSLSWSAYSLSRLWNEVKETEAPWWREVSMHAFRSGIRDAAAGLANFSDSKLGIRAGKPVGFPRFKSRNRSTPSVSFVEINHQLSWLSPSRHAVRLMLPRSPSDPTIRRRRDQLAWIHTTTSTRRLYNLVASGRARIQKVTISYRGGRWQAAYSVRYLAGLPARRAIARSARLGGTVGVDVGLVHLATLDQSVPGLTDEAGHIANPRILENQLERPAKLNRASSRTKQGSKNRAKLRRRRARLLGRIATTRALYLHHLTNALVDRFDAVAIEDLNLTGMGNKKGHLGRSVADASLGELRRQLAYKCSERGATLVVVDRFYPSSKTCSQCADRGVEAVRAKLPLSSRVFECGRCAMSLDRDVNAARNIAREGARLLAERAKEHDVAGLRPETQNADLRSRQTGRAQSPPAAAA

SEQ ID NO: 13356 - protein, 338 aa, unknown
  TnpB Polypeptide
VTLRAYRFALDPTPARERAPRSHAAAARVAFNRGLARVKANLAQRAAEATYGLAGLVDTHRARILSATVQPHRGRWFASLSVAAGMDRPSPAQPGSVAGLDLGIKTLAVLPAGQRVPNPRQLDRALRKVRRSSRPVSRRQGPGRRTGPKPSGRWRRADAARNRVTGKVTDARADAQHKLTTGLAATYGTIVADDPNVAGMVRNKRLARRVGDASFGQIRRQLTHKTEWNGGTVIVADRWYASSKTCPGCRAVKTKLLVSERAYACVACGLVTGRDANAALNLAEYGRRHLAASGADRSTDVEPTVSPGPARRVAAKRQPGTRARGETGAVPTQDGTAA

SEQ ID NO: 13357 - protein, 282 aa, unknown
  TnpB Polypeptide
  misc_feature (270)..(276): Xaa can be any naturally occurring amino acid
MWRARGKSDKIQLSFKYRIYPTREEKLLRVMQVEAKVYNALLDIVNNARKEGRRMTPKDTQDMLKDLKIEGKELVYSKALQMVNNQLWYNINSLHELKKKGRRVGKLRYKKIMKIINYNQSGFRVVGDKLILSKIGEMKVLFHRPLEGEVKGVIIKRSATGWYAIFQVEVEKRPLERTGKVVGIDLGVEKLVTTTDGVVVENPRVFDEVEKRIKILQKTLSRKKKGSRNYEKVRKKLAKMHEHVKNLMNDYIHKVTSWLVEQYDEIYVEXXXXXXXLTLSSN

SEQ ID NO: 13358 - protein, 535 aa, unknown
  TnpB Polypeptide
MHNPTMVAATDKPCFVLELALRVDSTGRKRLARDFDFARQLVNATLGTALGRRTQMRQTPGWKAACVMPKGKERTVAFQKVTQSFGISSAYDFEKILQAHAKASGRAKQVNANVKQTLADNLWRSWSAWLFEGKGKPRFKGMSRGLHSIRGKDNKQGIIWKPEIQSVRYAGNLYRVHIPQRDTYAREAIRDGNDWRKAKYCAIVRKTIHEKLKYFVQITFEGNPPTKIIPATSDLAVGIDPSMTNMTLAFSNGVVEKMKTSPSVENRAKEIRRLQRAMDRSKRATNPDNFNANGTVKKGAQTWVYSKSYQRLRKAVADLQRRRANARKNEHGQLINWILQNAGEIWVEENSWKAMQRGWFGKSVGDGAPSDFVARLLSKADRAGSKAFKMNPRNIKPTQCDLLTGEFTKHALWERRVRLGESDLFIDRDAMAALNLLFHSPETELRDAEGLKHILETSKSHWLNAGVLVEVKAANRLSKRELRHILRNGMKPVSVERLHSKKFLNGVCDAGSKKVPHGSFCGSESLPLSETPSLL

SEQ ID NO: 13359 - protein, 502 aa, Scytonema sp.
MNTGGDNSVALRKQKGHFLINEAMVGVIETKHPGYVEATQKLFNSVVMFYVKVMGVDVEKCLSVSVSDLYQVYESLTITNKKRAEVPHPIPFKDVPKDFRRAAIKKAFGIVKSHDSNLKRWQQRIERANQAKTLKKKTRLKKKAGKPPTLPTSTNFPTQFYSSMFGQDTGDSIVVKLWTGSSWVKEKFLYKCRELPSGYQKSTMSLMISNGKLNICWVIQKLTPSQGKLDEQIQAYGKLRVLSIDLNLSDPIVVAKVLEGYEDTGVVEEITTLRLQGNNRLSHLRKRYLGLIAKAKKLTNTHTELGNSPPKRMCATLWERIKNLEKDLIEKISNTLVEFALKYQCQLIVFENLKSLKALKGKYSHRSNIKRSNWIAKKIQKRTEHKALARYSIYTTRINPAYTSITDAFLGGKCLRGSQVGSLNLYLWSERGLGKLVKTPEGKIYDSGDNAARNIALKYLASKFKKPVVLKHPGLVSGCVAWLPLPDAKGTVLIPSWCALSV

SEQ ID NO: 13360 - protein, 361 aa, Chloroflexi sp.
MKLIAQIRLNPTPEQHAALLATLAEANAACDAISLIAWQACEFRRIPLQKISYHQVKDSFQLGAQVLIRCIAKVADAYKLDRKVQRTFRPHGAIAFDDRNLSWYTDKGAVSIWTLEGRQHISYSLGEHQRKLLAHRKGESDLVYHKGVFYLLSVCDVPEPDEQQMDGVLGVDLGIVNLATDSDGESYSGQQIDRKREWYARRRAALQAVGTKSAKRRLRQLSGRQRQFQKDTNHRISKRLVAKAERTKRAIGVEELTHIRQRTRARGPVQRARHRNWAFAQVRQFISYKARRVGVPVAAVDPRNTSRTCSVCGHCEKANRRSQAEFCCVVCGHQAPADVNAAINISHRAACQTAYGVQPSG

SEQ ID NO: 13361 - protein, 402 aa, Escherichia sp.
VKRLQAFKFQLRPGGQQEREMRRFAGACRFVFNRALALQNENHEAGNKYIPYGKMASWLVEWKNVTETQWLKDAPSQPLQQSLKDLERAYKNFFRKRAAFPRFKKRGQNDAFRYPQGVKLDQENSRIFLPKLGWMRYRNSRQVTGVVKNVTVSQSCGKWYISIQTENEVSTPVHPSALMVGLDAGVAKLATLSDGTVFGPVNSFQKNQKTLARLQRQLSRKVKFSNNWQKQKRKIQRLHSCIANIRRDYLHKVTTTVSKNHAMIVIEDLKVSNMSKSAAGTVSQPGRNVRAKSGLNRSILDQGWYEMRRQLEYKQLWRGGQVLAVPPAYTSQRCACCGHTAKENRLSQSKFRCQACGYTANADVNGARNILAAGHAVLACGEMVQSGRPLKQEPTEMIQATA

SEQ ID NO: 13362 - protein, 379 aa, unknown
  TnpB Polypeptide
MIKSYKIRLYPTKEQEVLMWKHIGACRYIWNYMLAYQQEQYANGEKHLSAFDMIKLLTPLKKDGEHEWLCEVSNASLGVVCRDLDKAYERFFKEVSRFPKFKSRKHSKPSYPVRADDMYFKNGNAVHVAKVGMAKYKTDFGLPQGKGNKFTNPRISNVNGKWMLSFGMESENQAPVLTDISMGIDLGVKDLAIAEFNGMKITYRNINKTSKMKRLKKQRRHLERSISRKYEQNRRGNTFVKTNNIMRSEERLKKMYARMANIRTNYIHQTTHDLVSLLPKRVVMEDLNVIGMMKNRHLSKAIQEQCFAEFIRQMQYKCEWNGIEFVQVDRFYPSSKTCSCCGAIKHDLRLRDRVYVCAECGAEIDRDYNAAINLSRYVA

SEQ ID NO: 13363 - protein, 566 aa, unknown
  TnpB Polypeptide
MGIIDSRRKKDKKEGKTDDILSFTAKTLLPDQTFLPTKQSLHNALDAMGDTYGHIKRTLFKDSMRFQRPPITFKNDYLKRFGITARQFNAVRYDLDGNISSAVEVLKQRIDALEHRIKSVSRWLKKMNKKVSDTRKDATLARSDKAAFIKELRFQIHQKKRKYGALNTKLVALTADLAGGRIRICFGSKKLFHAQFNLFKNGYASHEEWQKDWHLARSSNVFSLGSKDENRGNQSCTLFPDKSLRIRVPNHLIKTYGKYLVLTGVSYSYGQEFIDRAHMAKSALTHRFVKKNDTWYLYTTIDVPVSAVLTEKPAEIGCIGVDVNEQEIAVAETDRFGNPVWSKTYPAPVKDKSTDVTLAVYGDLCAAIVERAIATGKPIGCEDLDFEKKKTTLKEQGVRYSRMLSSFAYTTFLTTLKRRAMRHGVAVFSVNPAYTSVIGMIKYMSRYGLTSHESAAVAIARRVQKYRESPALSGNASSLPARKRGEHVWKHLSRIKKNGVVRTPHNLYGARRSLQDFPGCAEYHKEYSSRTTAQSTRPPASTTGDGAGRDPHFANQGVWANQGGNP

SEQ ID NO: 13364 - protein, 524 aa, Bacillus sp.
MKLTRQLLLNVEKDARLPELDDLMRTFCSAVRYAFNRLLEKEVKKGDLIKIVNAMFGLNKRYAEDAVMQAEQLILSQEALLPYQIENIEIKIKKTEEKLEDYKTGKKKPKKAPLPLVLAGLEARLKKLRTRLEYLVSCQESGTIPKVIFGGRKNFYQRMKGKISKAEWKDLRSNQLYARGDKSKLGNLNIRIVYEENENAFYLDIANPLASDGSTRKAPRLRFPLYIPDKFFNEVIKVVMPDIAGYTPKKKVMYEYLPYSIEIRRKGGQYYVNMTYEFPTHGVEVKGKEPLETGLTAGIDLNIDRVTVSVVNQQGNLLQHKTFYCHEMEYVSSNRRNNIAGELAKEIIDYLLEENVGGIVLEDITLKQDHDTNKRTNRLLHSFAKKKLHGSLLSRALKNGFKIKKINPAYTSVIARYKYKDMYGMSIHEAASLVIARRGIGLDEKIPTYLLRYVKRIVKTYLETALRSLEELEELSEKQKTRQGTLKRYLSSIKQFKKHHSWKLWNVIHKTLKYNNQGFKLKEV

SEQ ID NO: 13365 - protein, 624 aa, unknown
  TnpB Polypeptide
MYYIGCRMNTSLSELLRNSQDCTLIRYANLLIITKYNLINLLQDKECFINCLCKRSVVLLLLAYKFPKIRNNLLFMYESLPKNNMMTFLDNLRSSNPENLNMLTIKLSKMLLLELISREKDYKPFWTPAYKALSEKLWLPTEIDSHVSDLNSLSTSLSTPVVHSPLLTIRKIKVQNRNSPRTSCPSFTSTAVNKWEKESIPPTMKAIKIKLKINQEKKNLFNQWFKSSNFSYNKAVSAIRTGHAINEFSLRDKFVTANTKKTNPEYQRMETQIKTLRQEKKQTKDTSIDEKIKVIQSELKEKKKEMKSTKNEGVYEWELETPKAVRSESIRDVCKAYKTLFTMLKQGNIKRFQVGFRRRTNPNQCMGIPKSMIENKNGHIIIGPSYFDTVDKAKISMGKKTMKHYKNIEINHDCRMVKKHNEYWLFVPVPIEPCTEKRSWSTYSGIDPGIRTFMTTFGTNGCNEYEHNESKIKNVDIKIKRMKACKKYVRKQSLWKQEQRKEHYIDEIHWKTIQNLLSCNDVLFYGDIKSHNIVRGNKNRTLNRDTNNLKFYKFKERLLFKASEQGKIVICTKEHYTTKTCSFCGTMNEPGASKVYHCSNCKRKVGRDVNAAKNILMKELIKHV

SEQ ID NO: 13366 - protein, 345 aa, Rhizobiales sp.
VGDKTFAGNRHFRLALDGRTCNVRVYGREVTLFLPQMTGNAGEVLRQAAALAAERKINLTFRLDGAKLHVTLDPDDLPDHPQRSRPIRAVPGRALGIDLNPNWIGLAVASNGGDVSRIEDTELLEYSLVKLDMAADASPELVRETLAAVCDRAISLARKHRCSTIVLEKGLGKLRSSGKSRSLNRLLNGWARTVFVQMLTRRARLAGIEVLEVWAGYSSTIGNLAFDAPDACASATEIARRGIARLAGIKDVLPALEEGCVSRLWKNGKVPVELGSWQDVHRTIKAAKIGYRRPHPDVPIGARGSDVHGTKMFCGHAVVRLGRCHRPGLVFRMAYVKPGAVLRNF

SEQ ID NO: 13367 - protein, 147 aa, unknown
  TnpB Polypeptide
MEKGSKNRDKQRIRVAKLHEKVANQRKDFLHKQSRQITNAYDCVCIEDLDMKAMSRCLNFGKSVSDNGWGMFVTFLQYKLEVSGKKLVKVDKFFASSQTCNVCGYKNTATKNLSTRAWDCPECGTHHDRDINAAINIRNEGMRIINA

SEQ ID NO: 13368 - protein, 410 aa, Moorea sp.
MRSAYQYRLRLTKKQVAKIDKWLDMLRCQYNYLLADRLNGYEQNRCSINSCPLTCNLPHLRNNPDYFSQKKTLPELKKSRPWYADIHSQVLQDCVKRVDLSFKRLLKGDCNGNRSGKPRFKSKNRYRSFTFPSLPKDPISGKSLTLPKFGKVKVIYHRPIPDGFKVKTATITRKADGYYVTLSIQDDSVPNIIPIDSVANPVGIDMGLKSFLAKSDGTEVPIPQYYRKAQKRLKKIQKAVSRSKKGSNNIKKAILKLGKAHKKVADTRKNFHFKTAIDLLDNHDLVAHEKLNIKGLAKTRMAKSVLDAGWGQFLSILSVKAKNAGLITKAVNPRNTSQNCSNCGKKVPKKLKDRIHSCPHCGYVEDRDINAAKNILKLAVGHPVRSKACRASEPLGGVGKKPTLNLIRSV

SEQ ID NO: 13369 - protein, 453 aa, Nitrospiraceae sp.
MRRKKQHKEAISAASCVQLSHRIALIPTVDQSRYFGMASGTARFTWNWALAEWNRQFDAGQKPTAASLKKEFNAIKYKEYPWLTDIHRDAHAEPFTNLAKAWVKFFRDLREGAPAHAPVFKKKGKCRDSFYVANDKFKVNGTEITLPIVGKVQMTEELRFKGKILGLTVSRSANKWFASIQVEMLEEQALRKRTGHNTEGVDLGITAAAALSTGEKLIAPKPLKSALRRLQIRSRRLSRKLESAKVSIGIKPGQKIPKGTKLPVSNNRRKASAVLSKTHYRLACIRSDFTHKLTNRLCRENQALGLEDLNVKGMLKNHRLARAISDVGMGEFSRQVKYKARLYGTKLVIADRWFPSSKMCSICNFVHSELKLSDRTWSCPNCGTTHDRDINAAKNLKRLATETALPAASNAVMRSTDTLQKVSGGKVTPVSHDPVCKKNQGRKKNVHFYAHSE

SEQ ID NO: 13370 - protein, 350 aa, unknown
  TnpB Polypeptide
MYDESIILGDKSLRPKGSSVRNELVANKQDWQYNRSARVLQQTVADLEKAWKNFWNPNMPNHKKPKFKSSKNYCPTFSTDRAKIVAGKLVLDKPQGISKSVWYGIRIREPVRFEGKLKLCTIVQKADGLYASLIIDTSQERAKPTTDETVGIDVNVKRFNYNDGRQIDIYPKKLERYYQRITHYQRMLARKRLENPRNFKTKRYTKVKAKLRRDYQKVNNLQKDILNKFTHRIISTYSEIHIEDLNVRGMMMSKKMGKNLHRSLFGELRTNLTYKCDWNHRKLVLVDRLYPSTQICSVCGYRKTKEGYGGKQTLSGDSIHHNHQKYYCYNCGAILDRDENAVENIKNYTE

SEQ ID NO: 13371 - protein, 378 aa, unknown
  TnpB Polypeptide
MYKAYKIRIYPNKQQEAQILLTFGQTRFVWNQMLAMQLERYKNGGKFVSYFGMTYLLKPLKKEYPWLTESPNQSLQQVCKDLSEAFKNLFEHRAVKPKYKSRKYPKQSYRCNKNITLVDGHHIKLPKLKTMYYRSGRKIKGKIKNITIRKSATNKYYASVLTEIEIKPLAKTKQEAGIDMGVKDLVITSDGKKYRTVRFDKLLADKKHYWEARLARRRLQAKKEIAWDKHNKVLEPRELSDFSNYMKAKLMVAKYNEKIANQRKDYLHKISTELVNQYDVIKIEDLKASNMMKNHTLARAIANQSWRELRLMLEYKCKWYGKKLVVVSPYKTSQICSNCGYDDGKHTLDVREWVCPNCGTKHDRDINAAKNILKAVTK

SEQ ID NO: 13372 - protein, 236 aa, Halomonas sp.
MKQTKTLKVRVKDKHASELNRMARSVKNYLNELSSRTIRENGLFLSAYDMHPYTKGAGKDLGLHSQTLQCVAAEYVVRRKQFKKTRLQWRKSRGVRRSLGWIPVNTGAAKWKNGQVFHNGNHFKVWDSYGLSKYKFRSGSFNEDSLGRWYFNVAVDVEVKPSTGQGAVGIDLGLKDVATCSDGSKMEEGRFYRDLELMKTGFRAALIKVEQRSAYYEALDTAHYTSDYDPFVDAAL

SEQ ID NO: 13373 - protein, 196 aa, Halomonas sp.
MKQTKTLKVRVKDKHASELNRMARSVKNYLNELSSRTIRENGLFLSAYDMHPYTKGAGKDLGLHSQTLQCVAAEYVVRRKQFKKTRLQWRKSRGVRRSLGWIPVNTGAAKWKNGQVFHNGNHFKVWDSYGLSKYKFRSGSFNEDSLGRWYFNVAVDVEVKPSTGQGAVGIDLGLKDVATCSDGSKMEEGRFYRDLE

SEQ ID NO: 13374 - protein, 413 aa, unknown
  TnpB Polypeptide
MRFFTYYDESVDFYTYSCFIDQELKKLKAKLGRLNFAKHRREEKLKSIAIPKRVCFGSRKLFQSKDTKDISYDDWKKDLYEHKYSKMLFSGRSDSHYGNYSVKYENQTLTIDLLQTYQLNGKQKNISKSMRKQVMIPNVSFKYGQKQIEDYFKKQYEITTDMSLSKKDRKYLPIAYQIELHTDERNRKYLIVCIILSLPKKTHVNYDTSIGVVSIDLNVDYIALTDIDQCGNLVYQKILHYDVYHKNKGSVLHEVSRVTEEVIQYCKKVKKCLVMEKLDLVRKKQQLKYQNKKSNFLISGFVYSKLYDYLNSKAYKNDIYIYRINPAYTSQIGKLKYMRLFGLSIHICAAYVIGRRGMGLKESIPKYLRPLLTEKERNKHQWSQYATLTKKLKTLKKHDFYKNLQGIDKLILS

SEQ ID NO: 13375 - protein, 376 aa, unknown
  TnpB Polypeptide
MIVSKKVRLLPTKDQEIKMWQSVGTARFIYNWILVKQEENYKNGGKFFSDNVLRKEITQLKKSQLNWLNEVSNNVVKQSVKDACNAYKTFFKKLSNKPKFKSRKRSRPSFYNDPIKLKVKNNTVLLEKIGWIKTSEQLPVGKYTNPRITYDNKYWYISVGIEIDCKNEDLTDTSLGIDLGLKDLAICSDGKVFKNINKTSKIKKLEKKLKQKQVQISRKYEVNKIKKGGRCQFIKTKNIEKLENITKLIHRKLLNIRNNYLHQVTTSIVKTKPYRIVIEDLNVSGMMKNKHLSDSVRKQCFRKFREYITYKAELNGIELVVADRFYPSSKLCHCCGSIKKDLKLSDRIYRCDCSYVADRDLNAALNLKDAKTYKIA

SEQ ID NO: 13376 - protein, 363 aa, unknown
  TnpB Polypeptide
MTLRTQKIALTPNNKQSTCMSQHCGYARVAFNFALSSFKVGLDQDEWRTHVDIKREFNAVKYDKFHWCSDLSQNASKNAIHNLGDAVTRWKKGQNKFPVYKNRSGKCSYQADNGEGTVEVHKKRINLPKIGWIRLREALRYSGEITKVVVSKHNDTWYASITVRCLDSNNYKHQPLVFDDKPPIGIDVGINTLATCSDGTTFENPRPLKRYERKLARANRRLSRRQKGSQNWQKAKRILTSVHARIGNIREDAHHQATIRIVRKASAIGIETLKITNMLRNRKLAKALSDSALGGFLTKLKYKAARRGIPITEAAQFFASSKTCSNCGHKKADLVLSQRTYSCSECGFEGDRDLNAAINLCPS

SEQ ID NO: 13377 - protein, 470 aa, Halobacteriales sp.
MAAQSEEKQTRTNTFHLVPREDWKRVCLIELLDSAAALVNIVTYHRRQAYFNPEQTRNDVWNAVTRTEIRNRFQPVLGRAVTDKLLGKCDETWDAFFAQLDDYYDGDREDRPGVPGYWKEDGNRVLKTVVRNDAYTIEWGKRSRIELALGSELKEKYGIPLNQRIRVPIRGNPQYEGHGGRLELVYDRDAESFTAHQPVTFLHDTTRATPSSDGDAVAAVDVGANNFVAVTSSDGRQRVFHARPLFRRFHDYTERIADLQSQLSDDDYSSRLIEQLYDKRRRHRNHAQDALVRHLADLFAEWGVGTVYVGKLDDVRETHWSAQVNEKTDLFWAHGRFRRRMRTVLAGERGIAVRERSEAGTSSRCSRCGEGDHVDRSGDIFRCGTCGFEGHSDVVGSENFLQDMIDDHVDIAGPMARPADSRENTTERAHREVARLEWDDHRWQHRGHSTKEEPANRSTREGNPASGVSA

SEQ ID NO: 13378 - protein, 730 aa, Planosporangium sp.
VQLRYNFRVYPTPRQQIELARAFGCARVVFNDGLRARREAHEAGLPYVSDAELSRQVITQAKQSPDRAWLCEVSAVVLQQALADLNVAYRNFFASVTGRRTGRKVAPPRLRSRKDNRQAIRFTANARFKVLDNGRLRLPKIGDLQVRWSRQLPAVASSVTIIKDAAGRYFASFVVATTDEQLPHSDSEVGIDLGLTHFAVLSDGTKVAAPKFLRRAARKLRRLQQDLSRKAKGSNNRKKAVVKVARAHAKVADTRRDWQHKLSTAIIRDNQAVYVEDLCVAGLGRTRLARSVHDAGWASFVGMLEYKAARYGRTFAKIDRFAPTSQTCSNCGRVDGPKPLNVPVVDLPVRGGPRPGRQRGDQRARGGTRREPKRLWSAGKTGTRAGTARGSRNPPGRYALFRAQRGRNPRPLGPGERQSGRQTVMAAGATRTFRRVVVPRSPPSSSYGMGRRARTSILFARVVRTNGDRSGRPATIRPNVRAHCHAPRAVATPISSQPSSVRARSKTRIPPVMVPTLPTSTQLALPSNHVVPSIRIFTGSVSSRTCLSAVHTYARRPALSFMPRSASRIIPPSRPAPAMTAKCSPLTFPRSSLRRGPWNPMLTAAGRSCGMPRLPASMLAVPAGTMATAASEPASASIHRCTVPSPPHTKMRSAPFSSALRAFLPAFRLFDTSYQRSSPTHSSVTRLRSSSRPPPNVLRRCATTATVPAPITHPPLRSNPSGSDIDGSTR

SEQ ID NO: 13379 - protein, 413 aa, Planosporangium sp.
  misc_feature (413)..(413): Xaa can be any naturally occurring amino acid
VQLRYNFRVYPTPRQQIELARAFGCARVVFNDGLRARREAHEAGLPYVSDAELSRQVITQAKQSPDRAWLCEVSAVVLQQALADLNVAYRNFFASVTGRRTGRKVAPPRLRSRKDNRQAIRFTANARFKVLDNGRLRLPKIGDLQVRWSRQLPAVASSVTIIKDAAGRYFASFVVATTDEQLPHSDSEVGIDLGLTHFAVLSDGTKVAAPKFLRRAARKLRRLQQDLSRKAKGSNNRKKAVVKVARAHAKVADTRRDWQHKLSTAIIRDNQAVYVEDLCVAGLGRTRLARSVHDAGWASFVGMLEYKAARYGRTFAKIDRFAPTSQTCSNCGRVDGPKPLNVPVVDLPVRGGPRPGRQRGDQRARGGTRREPKRLWSAGKTGTRAGTARGSRNPPGRYALFRAQRGRNPRPLX

SEQ ID NO: 13380 - protein, 362 aa, unknown
  TnpB Polypeptide
MTFRRVYRFKLEPSQKQTHKLYQLSGARRFVYNWALARRKEHFETTGETLRYAAQNLELTQLKKEEERLWLQEADSQALQESLRDVERAFCNFFSKRARFPKFKSRHKGHFAFRIPQRVKVENGKVYCPKIGWMKIRQSQAIEGQTKSATFKRDACGDWFVSLTVEFEREVQAVTESERPVGVDFGLKDLVTLSNEEAIVAPQFFRRLVKKLAKAQRKMSRAQRGSARRLKARLKVAKVHRKIANCRADFVHKVSSGLVKRFDHIGIEDLPVAALAKTKLRGHAKSWHDAACGECVRQLDYKAVWNSVRLVKVNRFFPSSKLCGACGTINKSLTLSERVWNCEAVQLCIEIETPRRTSCANL

SEQ ID NO: 13381 - protein, 727 aa, Enterococcus sp.
  misc_feature (3)..(526): Xaa can be any naturally occurring amino acid
VGXXXXXXXXXXXXXXXXXXXXXXXXXXXXXXXXXXXXXXXXXXXXXXXXXXXXXXXXXXXXXXXXXXXXXXXXXXXXXXXXXXXXXXXXXXXXXXXXXXXXXXXXXXXXXXXXXXXXXXXXXXXXXXXXXXXXXXXXXXXXXXXXXXXXXXXXXXXXXXXXXXXXXXXXXXXXXXXXXXXXXXXXXXXXXXXXXXXXXXXXXXXXXXXXXXXXXXXXXXXXXXXXXXXXXXXXXXXXXXXXXXXXXXXXXXXXXXXXXXXXXXXXXXXXXXXXXXXXXXXXXXXXXXXXXXXXXXXXXXXXXXXXXXXXXXXXXXXXXXXXXXXXXXXXXXXXXXXXXXXXXXXXXXXXXXXXXXXXXXXXXXXXXXXXXXXXXXXXXXXXXXXXXXXXXXXXXXXXXXXXXXXXXXXXXXXXXXXXXXXXXXXXXXXXXXXXXXXXXXXXXXXXXXXXXXXXXXXXXXXXXXXXXXXXXXXXXXXXXXXXXXXXXXXXXXXXXXXXXXXXXXXXXXXXXXXXXXXXXXXXXXXXTIGIDLGIMDFAILSDGQKIDNNKFTSKMEKKLKREQRKLSRRALLAKNKGTNLFEAKNYQKQKRKVARLHEKVMNQRTDFLNKLSTEMIKNHDIICIEDLNTKGMLRNHKLAKSISDVSWSKFVTKLQYKADWYGRKIIKVDKWFPSSQICSECGHKDGKKSLEIREWTCPVCHTHHDRDINASINILTEGLRLHSMGLA

SEQ ID NO: 13382 - protein, 367 aa, unknown
  TnpB Polypeptide
MQRTIKIRLKEDIDLVETIKEYNEVVNFCLSSGKINNTYNKNDIHKLTYYEIRGNSDLQSSMVCCARDQASDMLKREKLRTLPFKKEFSGIRYNQRTFSWNGKELSISTINGRRKYSINIPEYFNKYLRQKYEFKSLTIFYKDIYIFIQITLNIPDVEKLKVKDVLGIDRGIINPIVTSNNKFFNSKEIRRVKGKYSWLKSKLQSKGTPSAKRHLKRLSQKEKRFVTNENHRLAKKVVEMPYEVFSLEKLSIKRKKSNGKRFNKKLGTWSYFEFQKILEYKAEELGKQVVYVNPTNTSRCCSVCGNIEKSNRQGSTFKCKKCGFEINPDINASRNIAELGKAFFSRLSVKQPIVTNLKGSVTSHLTC

SEQ ID NO: 13383 - protein, 432 aa, unknown
  TnpB Polypeptide
VLLAYKYRIYPTKADKILLAKHFGCCRFLYNHFLSYRKDEYEKGNKVSYIVTQRELTRMKALEQYSWLNEVSSQSLQMAIRQLDGAYQKFFKNQGGYPNFKSKHESTQSCSFPQNVRLDGNRVYLPKFVKNGIKTNVHRELPEGASIKQATITKKNNKYYIAISFDDNMPTPKPVVAKSSIGLDVGINSLVATSKDVKIENPRYTNKYARLLKLASRHLSRKQHSRKKGDNTPKSKRYLKQQAKVAKIHEKIANSRSDYIHKTTNEITNQYDVICMEDLNVKGMIKNRKLSKHIADVSWDELRRQLEYKCERKGKTLIKVDRWLPSSQTCSSCLSLTGKKPLNVRKFTCPVCGTKHDRDINAAKNIEHFGLLTFFCVATLATLKRGALGHNHNLSAGTVDYTRGEPSSGDGDSILIVAPSSYGSVKREAPAS

SEQ ID NO: 13384 - protein, 427 aa, unknown
  TnpB Polypeptide
LLIEINAGYKYRLYPTLEQRRLLNHCFFVANQAYNVCLDYQKTTWDRNKDLDKKDRVYPKASEVDDVVRKALKDRDISAKSVILQQERIHASRALMDAITSDKGFPRFKNSRLSNQSFSWNNQGYSIKDTGNPKFKILRLMKQDFKVRFHRDLPEGYKLNSITISRKANKYYVSFGITYQSNVDLISSGDLDIKRAVGIDVNVDSLAYSTGTLLATNSRMFSAPKYSSAFKRLQRKNSRRLELARKEKRKVSKKFYKTLARLNKVQDKVSNSKTDLLHKIAKETINKFDAIVVEDLKVKDIAKSEGNAKKARNRVIQDASFYRLLGLLEYKSMRNGKLFIKINPQYTSMTCSHCDFIHFKLGDKRIFKCPRCNTKIHRDYNAAINILSLGLASLGLGISLQTINVKPFELVRITELQSGSLALNSYN

SEQ ID NO: 13385 - protein, 328 aa, unknown
  TnpB Polypeptide
MALFCYTIYICYYEKGGDALIEGIKLQLYPNNKQKAIFSKMFENSRFLWNIMLDMTKERYSNNPKLKLLNSFALNNLLPFLKKEYPFLKDSDSSSLQVDNENLVKAWRSAFTNPKYFSKPRFKSKNFPKKSYTGKSRLTILKKRYIKIPKVGVIKCSDTNQIEGEIKRYTVSFSRGKYYLSLQVEVPDRLPLPKTGKSVGIALSGAELAVLSNGTVLENFKNTYHMQGRCEDKEENRHRDYLHKLTTKLVRDYDLIVMEDFKNITTGDRQLTNPSWYLFKAMLTYKCSWAGKKLILIAPLHSNQARLEGAYALNELAKRILKRGSLLN

SEQ ID NO: 13386 - protein, 401 aa, unknown
  TnpB Polypeptide
VWYNIYVDRTIRVRLRASPEQADALYETVKQFTQSFNNVCCVGWEKSETNSYNLHRFTYHSCKAELPNLVSDLHIQAIRKASESLKSANALIKKGRKVSCPQSLHCAPRYNLHTYKVYWDKGIISMSTTNGRMKIPFKLPEYAQYAVGCPTATADLIRKKGRFYLHIVVNLPDVEFTPNGKAVGVDLGVTRPAVTSDNRFHGNRHMAEVSKRNLRLKRSLQSKGTKSAKRHLRSLAGRELRFRQDCDHVISTSILNGIEPGTTIVVENLTNIRTRCKASRGEAKRRLHSWSFARLKGFLEYKAEAIGCQVVAIDPRKTSQRCNRCGYTYRGNRRSQSEFLCRKCGFQLNADLQASRNIRDKYLVGWSISPSDALPSTSVSSRASRRVRSGRDKLAALAVSG

SEQ ID NO: 13387 - protein, 435 aa, Thermococcus sp.
MKRSVTVKLQPSKEQAKILSELADLGAKVWNRVNYLRRHQYFQEQIVDFNGTEKTVYEEFKKEIGSATVQQICRKNAEAWRSFFSLLRKKRNGELPSWLKPKPPNYLKEDGRRKPLIVLRNDQYRIEGNRLTLKGLGKFKKLEVQFKGRIHLKGKQGRLEITYDPVKRKWYAHISLTVEEKLEGGEWVKVPKEPLGNLSAGIDLGVNNLMAVYVENGESFLVNGRPLKSIDFYWRKKIAEHQSKLNKSGAKTSRKLRRMHEKAKLQAKHYINTAVRQTIKKLYELGVSRIVVGYPKGIARNSDKGRRQNFLLSHVWRFNTVIRRLTEVAEEYGIVVEVVNEAFTSKTCPVCGKPHEGARFVRGLFKCPATGLVFNSDLVGAFNILKKAVRTITPNLGGLYAHGRGNWPEARPEGFEEPFSRVPLMRTPQTSPPLS

SEQ ID NO: 13388 - protein, 435 aa, Thermococcus sp.
MRRAVTVKLQPSKKQEKALFELAQATAIIWNKLNYQRLKQFKEFGKTDFSTTEKEAYYEFKNWIGGSTVQQLARKNAESWRSFFSLNRRKKNGELPEWSKPRPPKFVREEDGRKLFVIPLRNDQYRINGNVLELRRLGKFGILKIQFKGRIHLKGKQGRLEITYDKVKRRWYAHISVTVEEKFEGGEWVALPRRPKGSLSAGIDLGVNNLMAVYVENGESFLVNGRPLKSIDFYWRRKIAEYQSKLNKSGAKTSRKLKRMHERAKLQAKHYINTAVRQTVRRLYEIGVSKIVVGYPKSIARNSDKGKKQNFLLSHVWRFNYVIKRLKEVSEEYGISVVVVNEAFTSQSCPLCGQHHPNARFVRGLFKCRREGVVMNADLVGAFNILRKVKAITPSLEGLKAFKVRGNWPKTGPEGSKTQFVLGLNETPQTSLPLG

SEQ ID NO: 13389 - protein, 414 aa, unknown
  TnpB Polypeptide
MESSHARSGVLGWRLLRFFRKAMQSQDPTQPHVLSVTRTLRLKVKTEAHAWLNAAAYEVNQVWNWAAQVSEKAARPCTGERKWLTGFDLNNLSAGASEHFDKIGADTIQRVNGEYAEKRRITKRYRLSWRRSRSPRRSLGWLPFKAASLKLKGRAVRFCGKTFRVFESEHLEGIRWKQGCFAQDAVGDWWLCLPIAVQVEESVAPFEKVGIDLGLKEAAVASDGSRCERNRFYRDIEQKIAQAQRRGHPRQAKFLHRRAANRRKDALHKFSRQVVSQYQKIAVGDVSSTQLVKTRMAKSVLDAGWGMLKGYLQYKSQQAGRTFQIVNERKTSCTCSHCDSLTGPRGVNGLHVRRWTCTACGVSHDREVNGARNILRRAEWPASVSRNESSSLRVPPSRASRSRKAGIEPIRTMA

SEQ ID NO: 13390 - protein, 563 aa, unknown
  TnpB Polypeptide
MCNNHQRSSRISGVSDNLVIPVVLLVAPRTVVLDPVDVIIALLRAGRHIAGTQLRAVDAQVDLHQFLDRQVVSRQQGRIVFEARERGVSIALCPGLTAVTDRLGVWTDTARTQRFRLSTSQFFVVENTHFCLPIGVARGTCPSSPGLGFGLHSWSIWARRPKCFSLGRKCPTSFIQVFDKTERLCYTMIMKIAVQLKLCASPEQVAKLKETLEVANAACDYISELAWERKVFRQFPLHRLAYKVTREKFTLAAQMVVRAIAKVSNGYKLDKDTRRTFKTHGAIAYDDRILSWKLDQSEVSIWTTQGRVRVNFVCGPRQRELLSGERGETDLCLVRGTFYLFVACEVETPEPIDVNGVLGVDLGIVNLAADSDGELYSGEQVEKSRQHYAHIRQTCQSKDTKSATRKLKRLSGRQARFQKNTNHVISKRVVQKAQDTARTIALEDLSGITRRTTARVQRKQRAKHVNWSFYQLRQFITYKAQLAGIGVILVDPAFTSQTCPICGCVDKRNRPSQGKFLCVQCSFSGCADTVGAVNIASRAAVSQPIVSALFGPGTSPSPLGLGN

SEQ ID NO: 13391 - protein, 553 aa, unknown
  TnpB Polypeptide
MSQKTRQIKSSKSDTTKVPISTYQTRLAQLPEKTSAALDDCADLLSQVERKLFAHNQKRGSLSGKVLNQIKSLFLSMFGILARHFNSINFILQGKIDSYRSNLDRYINENQERIDITQKTIEKLCKKEIEPNKRAKHLYKIHQKKRRLARLEKRLEQMKQDKANKRVRICFGSKKLFQAQFDLKANGYKNLEEWKLDWKKARSNQFFLVGSKDEMAGNQLCTARREDGKLTLRLRLPDALVSKHGKYIEIKGVQFEYGQDIIEAALGDNEARKVLKGLKRVETKLYGQAISYRFLRDDKGWRVFVSTARAVVPIKTLKDIGTIGIDLNANHIALVETDRFGNVIDTQTVPLNTYGKSKGQSEAIIGDAVKIIVERSENTLKPIVIEDLEFSKKRSILRENGSSRYARMLSSFVFSKFREFLESRASRNGVRVYKVNPAFTSVIGRVKYATQYGLTVHHAAALVIARRLCRFSERAPSSCRNEVLIPNNKGGHVTFSLPVRNRGKHVWSFWRRVSRKLKSVVYVAQVRAAEVTDRSSHPQGLVIGIGGQLSLEL

SEQ ID NO: 13392 - protein, 380 aa, Leptolyngbya sp.
MFNLTYSYKLQPTAKQIELIEQNLLVCKSVWNHALYIRKLWYNSRSCKINQCPLHSEYIVEPFLYPRYHTQSADLTKAKKTNKFLKSGNAQAMQQTLRKLDKAFNDMKSQNKGFPRYKKEARSFNLLGKILVESNYIVMPLLKSIKFRKSREIPDGFVIKQVQILKKASGYYANLLTELDVNVVEPIPHGHALGIDVGIQSMIATSDGWILPRPKFLERALRKIKLLQRKLRNKMAGSNKWNSLQHRVALLHEAVANKRKDYHFQLAHKLCDGVGMIFVEDINFKSWSKGLFCQQSLDMGLGQFFDILEYVCSKTDTYFAKVDKNYTSQICPNCGVHTGKKALNVRVHSCPECDYTVDRDVAAAEVVKSRGLTAVGLPVV

SEQ ID NO: 13393 - protein, 453 aa, Acidimicrobiaceae sp.
VTTPVLERTSTSTESVSTRAYVYAIDPSAEQANHLRSHIGGSRYAYNTLLGLVKDNWDGNRAKKDAGIEVAQANWVDTSHFGLLNLWAEHRDELAPWWAENGSSTYNDATQRLAKAIGNWRKGRAKFPTFKSKGQGGSVRFMGPAVRLVDSHHARISRIGEVKTYESTRKLFRHLERGTGRIVAATVTQRCGKWQVSFTVEVTRQVPATRAPGKIVGVDVGIMTLYTGATADGVHVLDVDNPRHFVRAQKKLARAQRIAARRQGPGPGKVPSKRWRKANGRVQKVHAGVANARKNLIHETTSMLAKSYDVIVIENLNIKGMVKNPSLAKHIADAGWGEFGRQLEYKTAWYGSTLVRVDTFYPSSKTCSQCQTVKATLSLEMRMFHCEACGLVIDRDLNAAINLARKGLPGTSSGTGRGGEVSPAQQKLAATAHPDEASTDPSRDVDGVGDASA

SEQ ID NO: 13394 - protein, 540 aa, unknown
  TnpB Polypeptide
MRASCAATGTSSRQAAPSPCHWVPLRGVTPSACAPTGSASAGWSISPPRPRRNQRPAASGRIWNYASVFVPGRVGSGLSVAADVLGCMPRRRDPLSPEVVHRTARMGLRVTRGQRRRLVGLLVSAGDVWACVLELNAWRRARQDRPLVSYQELCRELACAGPGCFGELDTVGARSVLRRYCDAWFAAAKRRKEGDRTARFPRRRRALVPIRWYYGTFTLAGRRLRIPVARGRPPLWVRLDRDLPYPEEQVRSVTLLYDAGRLWVDVTAEVPVACYPAGLEPDPGQVAGIDLGIIHPYAVAGPDGQGLLVSGRAIRAEHRMHLADRKARMRAVARRAPKPGQKGSRRWRHYRRRQRLAEARHRRRVRQAQHEAAKTVIGWAVARRVGTLAVGDPRGVLRLKAGRQHNQRTRDWRIGHLITVLKDKAEAAGIALQLVDERGTSSTCPACASRVPKPAGRVLACPFCLFTGHRDLSAAANIAARHGGGITPASLVAGVTHRRAGAHLPGVAPSRRDPRRRAHHRGARGSPGRHRPAHASPNPG

SEQ ID NO: 13395 - protein, 407 aa, Richelia sp.
MQLVEKHIIKRQHKFWQACDYLALQSKHLYNAANYIQRQYFFETSKYYNSIDIYHQTSNLEAYRYLPTKISKQIVRRVAQAWKSWFAARLDWFKHPEKYLGKPKMPGYKHKERGRNIVIYPKDAISKPALNKCLIKLSGTSISLPTKAKNVDQVRIVPKLNHYVIEVVYTVNEPVKSTGKYVAGVDIGLNNLMAITSNHPGIRPLLINGRPLKSINQFFNKRVAASQSAEAWKQIKDDYSKRDRRIDNYLHTVSRRVIDWCLVSDIGQLIIGKNDGWKQNINIGKKKNQEFTLIPHAKLIHLLTYKAQLHGIQVITTEESYTSKASALDGDELPVYKAKSEVKPVFSGKRVKRGLYKTSTGRIINADTNGSINIARKVIPNAFEGIEALPFVPVVLGLWTKITNVFV

SEQ ID NO: 13396 - protein, 368 aa, Butyrivibrio sp.
MNKAIKYRLYPTKKQTEYFLKCFGCCRFVYNQALNWRMAAYKADRTSLNYNDTAFGLTALKRQFVWLKEADSIALQQALRNLDSAYDSFFKKNGGFPKFKSAKHSRKSYMTINQNGTVSVSDNAVKLPKVGTVKAKIHRKPLPDWKLKSATVSMDSDGKFYVSCLFEFDKLIYIVPTSGKAIGLDYKSDGLYMDSNGNVGSNHKYYRESYVKLAKEQRKLKNKTIGSNNYRKQQLKINRIHKHIANQRLDNLHKLSTKITNSYDVVCVESLNMRSLSNKGFGNGKATMDNGYGMFLNMLEYKLADRGKHFVKVDKWFPSTQLCSCCGCRMRLALNERIYKCSCGLTIDRDHNAAINIRNEGLRILQSA

SEQ ID NO: 13397 - protein, 398 aa, Streptomyces sp.
MVVCAVAALRSEVVKLVVQVKLLPTTVQASALEATLIACNRAATHASAVAFAKGLMDRNGLQKEVYTDLKAIFGLSAQPAVRAVKKAVDAYAALQANLRAGNLGPLTSKRHRKAISTPIVFRPKAAQPFDDRCLSWQYDARTVSIWTVDGRMRGIRFACSPDQLKKLVQYRKGESDLVQRDGKWYLIATCDLPHPEVCEPAGWIGVDRGIVNLATTSDGINYQGRGLSRYRRWQARKRAELQARRTRSATRRLARRARKEKRHAAHVNHCISKEIVSVAQRTGRGIAVEQLDGIRERVRLRRDQRDTLSSWPFHQLGQHLAYKARKAGVAFFEVDAAYTSQRCPRCGHTERANRPDRDRFRCRRCGLAGPSDVVAGVNVRNRARSAWAFVTMPVPPPA

SEQ ID NO: 13398 - protein, 382 aa, Pyrobaculum sp.
MKVYRTLVVRRKIEETPPEKLVKFLEVQQKFREWATQWYKSGFKVPAPEESPLKYFAVELKYGMRLIPTNGLKNGVWRVPLPFDAQLRENNERDQSRGVLVDLSRGDIRIRKWGGGTIEIRLRKSEIKWITQRLREGAWLKLAYAWIGHTRQTNLVAFNLALVFARETEQYHPIRIMAIDLNALHNGVSWGVVDGERVIRRDTERPDLVRVGKLQKEISRLDSLCAERGGDYCEKAREAKSRLWRLLRRFEDEAAKRLVELAIKQKAAIVVDAPEDESVRELMEGNYTPNRKIYLNIGRLRRRIRELAEWYGVPYREERLYSTVCPRCESRMEELPNRKVKCQRCGFKAPRDKIPLLWAVRRFSELIQPPSFSPSPLLIPVS

SEQ ID NO: 13399 - protein, 181 aa, Methanohalophilus sp.
MRKRLQSKGTLSAKRMLKHIAGKEKRLMRDVNHTISKEIVKFAVEKGVSVIGLEDLTGIRETTLSNTPKKRRHNHSSWAFRQLQTFIEYKAREAGIITHYVDPSYTSQTCIRCNHISKNNRNRLSFRCEKCGYENNADLIGAMNIEHKTRDYRYILESQGVLVSHPDECLIDIQAPPVREG

SEQ ID NO: 13400 - protein, 317 aa, unknown
  TnpB Polypeptide
  misc_feature (10)..(13): Xaa can be any naturally occurring amino acid
  misc_feature (246)..(249): Xaa can be any naturally occurring amino acid
LPTGTARRKXXXXNQTIRNANAATKVTQFKRLSLETNNQNWTLHKVGDTYSIGFGLLRGVKKRVPMEVHAASHAILLDAVLTDKAKKGSLKLWQSKRGIWYAVLSVTMDVPDTREAARFVGIDRGQRHIAVGATPEGLPQFWSYKHIRHVRRHYGRLRKKLQAAGKHKTVKRIEQHESRIVRHINHCISKDVVQWAAKHDCGIRLEDLSGIRKASQRKTTKRDAGHNRDFWPFYDLETKIVYKAIXXXXNRFLPRIPRKRAASVVRSAGAIRRRSLVRAVATEGTLITMRRGISVRCLVAHAISRLRSEMAGCMNQS

SEQ ID NO: 13401 - protein, 378 aa, Lactobacillus sp.
MVLKGIKLRIYPNAAQQLKIKLNFGYNRFVCNQMLAMMIQRYENNPEAPFLNAFALNNLLPALKMEYIWLKEAESTSLQSTNHDLVEAYKRFFKAHKGFPKFKSRKFLKQSYQSKMNIRLIDKYHLKLPKLGIVRYKCGRKITGKIKSATIRLSATKKFYAILLIDTDINQLNKTNQPVGIDLGVSDLMITSDGKKYPTVRFDKLLADRKHYWERKLARRRRQAEKEIAWDRHNQVVEPRTLADFKNYQKAKIMVAKYSEKIANQRNNYLHQLTKQLVTNYDVIKIEDLKAKNLMKNHSLARAIANQAWRKLRLQLEYKCIWYGKELKVVNPYKTSQLCSNCGYDDGKHPLEIREWTCPQCQTHHDRDINAARNILQA

SEQ ID NO: 13402 - protein, 402 aa, unknown
  TnpB Polypeptide
VKRLQAFKFQLRPGGQQECEMRRFAGACRFVFNRALALQNENHEAGNKYIPYGKMASWLVEWKNATETQWLKDSPSQPLQQSLKDLERAYKNFFRKRAAFPRFKKRGQNDAFRYPQGVKLDQENSRIFLPKLGWMRYRNSRQVTGVVKNVTVSQSCGKWYISIQTESEVSTPVHPSASMIGLDAGVAKLATLSDGTVFEPVNSFQKNQKKLARLQRQLSRKVKFSNNWQKQKRKIQRLHSRIANIRRDYLHKVTTTVSKNHAMIVIEDLKVSNMSKSAAGTVSQPGPNVRAKSGLNRSILDQGWYEMRRQLAYKQLWRGGQVLAVPPAYTSQRCVCCGHTAKENRLSQSKFRCQVCGYTANADVNGARNILAAGHAVLACGEMVQSGRPLKQEPTEMIQATA

SEQ ID NO: 13403 - protein, 413 aa, unknown
  TnpB Polypeptide
MEHSHRYHAYPTQEVAVELEHHLDVHRQLYNHVRWDYENSPEDDKPSEYDQNNKLPEWKRKWPLFSELHSKAAQATVARFHQNLSNLRKKKQKGYNVGRLKRQAPTEYRSVTYNQSGFDLDEKRGRDRFAYVRFSKIGWVKIRYHRPIPDRATIKKVTFKKETTGDWFLSFGLETDDADLPEKPDEDSLDASNSVGIDLGILNYIHTSNGKTVDWLNLETEYERLRHEQRKLSRKQEGSNNYEKQRNQVAKVKRHIKRKMLDYQHKLTTWLAKEYDAVFVEDLNVKGMLEQSHNARNKQDVAWRQFITLLEYKADLYGCHVKQVEARGTTKKCASCGVETAKPIWVREHSCPACGFETDRDANAAMNILQRGFSELGLGWPEDTPVETVTATDTTHFESVSASHVVETGSLGA

SEQ ID NO: 13404 - protein, 402 aa, unknown
  TnpB Polypeptide
VKRLQAFKFQLRPGDQQECEMRRFAGACRFVFNRALALQNENHEAGNKYIPYGKMASWLVEWKNATETQWLKDSPSQPLQQSLKDLERAYKNFFRKRAAFPRFKKRGQNDAFRYPQGVKLDQENSRIFLPKLGWMRYRNSRQVTGVVKNVTVSQSCGKWYISIQTESEVSTPAHPSASMVGLDAGVAKLATLSDGTVFEPVNSFQKNQKTLARLQRQLSRKVKFSNNWQKQKRKIQRLHSRIANIRRDYLHKVTTAVSKNHAMIVIEDLKVSNMSKSAAGTVSQPGRNVRAKSGLNRSILDQGWYEMHRQLEYKQLWRGGQVLAVPPAYTSQRCACCGHTAKENRLSQSKFRCQVCGYTANADVNGARNILAAGHAVLACGEMVQSGRSLKQEPTEMIQATA

SEQ ID NO: 13405 - protein, 501 aa, unknown
  TnpB Polypeptide
MSKKFWIESISPKISKKLWIPSESHKGPPLHNSEHHEQFLHFWDHTSSSRAAKYFNTNDWEPAVLPTDRIIARKIRVYPNHQQKRVFKRLFDAHRFFYNKAVEILNKHFDGLKKKFITQNNCAFCKKLKSSNDSFTCSKHADKKINWTKGINASYLRKCIIPKHLTKKTLWQQEIPYDTKDLAIKDAITAYKSCTTNLNNGNIKDFTMWFKSRKNPRQIFWIDNRAINTENKKLRIFPTRIKKPIYVRKRQRNKLPPMTQTTDGQKCIKHDAKFLYDRGAYYFVFTINEEATEAIKPKYSIVSLDPGVRTFQTCYSPSGIAFKTSNKQQYILKSLNAKLEELRSERDKSTNPVQYRRRRKKCLKIERKKSNIAENIRNQLATYLTKNYGTIVIPKFSTSQLQQNPDLSSITKKTMTDMSHYKFRMKLADLCKRDGRDLQIVEEHYTSQTCGKCGAINKIGKDIVYKCNKCSYEMDRDMNGARNILLKTLTEAKVKENKESD

SEQ ID NO: 13406 - protein, 375 aa, unknown
  TnpB Polypeptide
MILAKKVRLYPTKEQEQKLWQSIGTARFIYNYTLAKQEENYRNAGKFISDGVIRKELTQLKKSELSWLNKVSNNVTKQAVKDACNGYKRFFEGLANKPKFKSRKKSKASFYNDPIKLKVKEKKVLIEKVGWIKTNEQIPVEVKYNNPRITYDNKYWYISVGVEVNKIQEELTDISLGVDLGLKDLAICSDGKVFKNINKTKEVKKLEKRLKHKQRQISRKYKLNKIMKGGSCQFIKTKNIEKLENTTKLIHRKLTNIRNNYLHQVTTSIVKTKPNRIVIEDLNVSGMMKNKHLSDSVRKQCFNKFKKYLTYKTELNGIELVVADRFYPSSKTCSKCGFIKRDLKLKDRIYRCPHCGAVIDRDYNASLNLSMYKLA

SEQ ID NO: 13407 - protein, 548 aa, unknown
  TnpB Polypeptide
MILSDSIYSKRFVSNNLTAQKYGELYAVATQIRDHKNTISQYVSKHLFDYLDVSIFDFLKEMRYKYSEIPSSFDKQCYEDVIVAYQNKFEAVKHKLTFENIRYVCCEVYKRDTKNHKKGDFKKVRNAKTSSSLTITLSYLARYGNEGIIDYINEQLPNADEKKQMFYKTILGEIDKFGFDRLYALALSRRERNYRKYAEHPIEFKSLTFRGRSRKKLIIDYNSRFGSVINAFISLSGLSRKSFDIPVKFNKDYHGSIHDYEKANPDYEYTVVFNERKKQVSVILTKKQDRYIPEAGNNIVGIDVNVKHNMFTFSNALTYDYDRELLKAFSEVSKRVDALKKQYGRDWSPSKRRQRKIDIISHKIHELEKQTIAVMCKELSEQGVNHIVMEDLNGQFGRSYIKDKVNDDLNYNRITKTLGISSLKDEVEHIARKYDIAVSTVQASYTSKMCPVCGCIEDENRPNQETFECIECGHSDNADINAAINIRNRVAVTVLQQKLLKQRDNKSFEPKRLKREKVKEVLLSFRRDLPKKASSECNKSMMNTFDYA

SEQ ID NO: 13408 - protein, 436 aa, unknown
  TnpB Polypeptide
MEQIITAKLRLHADAGQFAALRATQLAYRDALNHVSQHAFGDGKTSSAARLQKATYADIRARYGLPAQMACNVPRQVGATYAGLWTRAKAHAARVKAGATKKRFRGLDKPPTYSAPTVTYNEGRDYGFKRDGRVSVMTLDGRTVMPYSGYDKHTALIRDGARIGAAKLWYDKPKKRFYLLVSLAVERPDVTPTDLTGVVGVDVGQRYLAVTSDTRGKTAFHSGKEVRQKANHLARVKKRLQQKGTRGATRRLVAIGQRERRQQAAANHTITRRIIKANPTVLIGVEDLTHIRERTGPRKRGKRASRKQRKANRVQSKWSFAEMQSMLAYKATLAGGQAIWVDAHYTSQACPRCGYTARDNRPNKGLLFVCQACHYTLHADLVGAKNVALRTLLIRQDWMGTGVLSVRPDVSDDETKAARLTRYAELRWSPEASPAL

SEQ ID NO: 13409 - protein, 221 aa, Burkholderia sp.
MAGMITVYRYRVKSLNGLLNQRSGAVNYVWNFCNDTQKHALKWGKKWPTGFDLNVLTKLPNDRFGRRATDKLAKAQRARKHKRHIAKLHAKVTNARADFQHKLALDLVRRFDYIAVGNVSAAKLARTRMAKSVYDASWSSFRDKLRAHGATFEEVDESGSTQSCSACGSKDSTTRPKGIAGLRIREWTCSGCGVVHDRDTNAALKILRCGRASPGVGIARL

SEQ ID NO: 13410 - protein, 291 aa, unknown
  TnpB Polypeptide
MKRANTFDVVPQSDEDEELLRHLLDASAALWNELNYERREHYADPDGDVWEISEYRGRYGGVLGASTVQQIERKNREAWKSFFSLKKKGEATGTPGFWGNSEHGRELRTYIRNTSYSVELGEYSRLEILVGKDLKDEYGLGYRERLRLEVRGDPNWTEYEKQGRLELFYDEQAQTFRAFQPVTIDDSRLAQPLASEEAALDIGANNLAACTTTTGQQLLYEGRALFKRFRETTREIARLQSLLRDGRYSSHRIRRMYDRRTKRRDHAQDALIRDLIECLYDEGVSTVYVGG

SEQ ID NO: 13411 - protein, 438 aa, unknown
  TnpB Polypeptide
MSYKQCRDIAASLNNVELLDSWMRVCALGKAQNKLLISRDVIFGGKKNFIARCQNKISKEEYKKNRISGLLIYGETSHYHGNRKFRIQDDLKSILFKPNRKTHIYLKLPELKKNYEKILKKLCRHADIDDMPLTFKLDQKYVYITFDENKLFDDKIEHKVKKNRVLAIDMNPNYIGWSIVDWKNERDFEVIKTGCYSFKKLNDKQFALKLTKKQREELSRKERLELVSKAKVKNVYFNSKRKHEIIEVAKDLMNAAKNYHCEMIVCEDLNIKSQDRSKGKNLNRLCNSFFIRNTFVNNLNKRCNIDGMKFFKVIPQYSSFIGNFLYRRLNLPDPILASIEIGRRGYEFNVQYVEKTKEKSKNIIQPNLKKFDDLIAKSLEEFSIKESFKDLISLYYVFKKDSKMMYRVPFRNNSKWSKFKNMKSQLSRLDFSLSSLCF

SEQ ID NO: 13412 - protein, 376 aa, unknown
  TnpB Polypeptide
MQIVHARKMRIYPNNTQKQTINQTLGHCRYVYNKMLERNQKVYKRRGEHLNYYAMQNLLPQMKQYLPWLKEADSQALKYACRQVSASYDRFFKKQGGYPKFHNKHGRQSYTTTNNTVIAVESRRVKLPCLGWIKSSDKRNWNDNLHVCYATISREPDGKYYVSVTYKTEISDSTFVPDTSRFLGLDYKSDGLYMDSNGDPAEMPHYYRKAQKLLKRRQRQLAKKKGSRKGEPKSNRFLKTQKRVAKLYRHTANQRKDFLQKRSTEIANRYDGVCIEDLNLRAMANKDFGNGKATNDNGYGMFTAMLSYKLRERGKPLVQVDKWYPSSQLCSCCGHRQKMPLNVRTYRCPDCGTVIDRDVNAAVNIRNEGIRILKSA

SEQ ID NO: 13413 - protein, 399 aa, unknown
  TnpB Polypeptide
MPHQLSLGPFFSAYKTLLNQFLAEIWDQIQWTAKAIRGKTQKRLLPTIPTYAFKKELRQRYLTQWTYAKHWVDSALKTAFAILKSWKKNYLRGNRKRHCPVVKRAFVRVKQTLMKLEGEQFRISIKPREFVYIDLSQRYFKLEGKLGEPILTPTKIHLPFQMSAPVHGSADPIGWDSNKFSLDGFSPNQGWLKLDLHPLHTLHMTYENKRRRINQLYAHNKRKGKALYQKYRKKERHRVQNYLYHLINYLTALSATHGFEALDKQHMNRHAKKRWNRELNHTDWRTIVTLLKNKAPVREVTPYYTSKICARCGYLHQDLRGEHIFECPKCGLRIDRQLNAAINIYLKMRGVSHKIAWFDRVICGGFPLIGAETSTADELARRLDELMKPQVYVSVPINT

SEQ ID NO: 13414 - protein, 448 aa, unknown
  TnpB Polypeptide
LKNISSDSKKVYFFRIRTDLLTLNYSADVFVLLSPFAKFFTPKLNSKKVHLLEIVREWGVLAMAEKQVQNQNSSQNRTTQYTVIKVRLHPTAEQAELIEKTFGCCRYLWNRMLADVQEFYAATDIHYIPTPARYKKEAPFLTEVDSQPLCTVHQNLRRAFLDFFRNPGAFRYPQFKTKKARKDAFTVYCRPYRTGPSIYLTRDGIKMPKLGNVKATLYRRPLHWWSLRFVTVTKTRSGKYFCSLTYGCDVRRPQPIAPAPERTVGLHHSVASFYVDSEGRSPVLPQLAKSKEKLARMQQKLSRMQRGSKNYEEQLQKIRLLHEHIANQRRDFLHKESGRIANACDAVCVRDTDLTELAKKLKGSDVFGAGFGAFREYLQYKLERQGKPYIVVDRLLPVAKICHECGAVNETLPARRKTWQCPHCGALLNREANAARNLKQQGLAQLGA

SEQ ID NO: 13415 - protein, 510 aa, unknown
  TnpB Polypeptide
VPARDSDPLQAFRKEIEKRRKSKRRTNRVALFPNRYEEEVLFDIGLACARLWNELNYEKRQAFFNGELSPEKRDEINRRYYHKYKGVLGVNAGQVVNKNDEAWNAFFKQLDLRKQRRLPPHIRKLSTPGYWKDRETGEKRIHILIRNDRYRVEPISEDEGYIVLEDFDLRIRYVGRIRWEGKQGRLEIIYVNGRWFALVPIEVGVEPPKSNKRGYVKPIYDDEEERKKKKQRITNPKSIKQRDPIGDKEAFIDMGLNNLFAVTISDGSAMLIKGGTIKSEYYWWKREIATYQSIRDVLRRLGVSTWIYYHEKYLDAMYKRDERLRHLYITAIRFLADELHRRGVRKLYIGYPIMLSQDNGNEYNTNIWWFRKIVLWIVDIFMEYGIEVKLVPEYYTSRGCSICGNKHKNGRIYRGLYECKKTGKKINADINAALNIARRLGYMIRIARKIESYLVTHNGVKPLNPLQRANTRDPSIETPPLKGGKGSYLYIGVREDTTQPSPVFEFLCLP

SEQ ID NO: 13416 - protein, 416 aa, unknown
  TnpB Polypeptide
METKTIHKGYKFRLYPNEEQKTFIHKSIGSCRFVYNYFLNEKTKYYTEHKLDVKKGLSFVETEHLLVGLKNEENFVWLNEINSQSLQFSLRNLDSAYSRFFKKIADFPTFKKKHNGGSFTIPQHFKVVEEGEKNSYIKIPKLKQALKFRRHREIKGQILYCTISKTSTDKYYITLTVKEEHEFEENKNQSAVGLDVGIKSFCMTSDNIEILNDKNIKRKERRRKIKQRKVAKAQKGGNNRRKLVKKLARKHEKETNVRKNFLHQASNYIVENQDIIIVEDLNVKGMVKNHKLAKALSHQSFGEFFRQLKYKSEWDNKIFYQINRWYPSSQICNSCGYQNTNLKLSDRTWTCNCGKEIDRDLNASQNIRDLGLSDLGIILDKSTVGTTESYASGRTKITDFLKRESVSSNEGRSPSL

SEQ ID NO: 13417 - protein, 374 aa, Oscillatoria sp.
MKTLKFKLYQSKRNKHLKRSINAAGVIYNHCIALHKRYYRMWGKHLNCARLQAHIAKLRRRKVFWQTVGSQAVQDICQRIEKAYQLFFKHHKKGVRPPGFKKVRRYKSFTLKQAGYKFLGGNRIKIGNRVYQYWNSREVEGTVKTLTIKRTPLGELFMVVVIDGVEGLDAKVETSRIAGFDFGLKTFLTCSDGSKIESPQFLKQSLNAIKKASRNHSKKQKGSANREKARLNLVLRYEDVVNRRSDWFWKLAHQLTDKFDVLCFETLNLKGMQRLWGRKISDIALGEFLRILKWVALKKGKPIVFIDRWYPSSKTCSHCGHILESLDLSIREWRCPRCQSVNGRDENAAKNICAVGASTAKLGDVRQAVPAIAV

SEQ ID NO: 13418 - protein, 477 aa, Escherichia sp.
  misc_feature (365)..(410): Xaa can be any naturally occurring amino acid
VKRLQAFKFQLRPGGQQECEMRRFAGACRFVFNRALALQNENHEAGNKYIPYGKMASWLVEWKNATGTQWLKDSPSQPLQQSLKDLERAYKNFFQKRAAFPRFKKRGQNDAFRYPQGVKLDQENSRIFLPKLGWMRYRNSRQVTGVVKNVTVSQSCGKWYISIQTESEVSTPVHPSASMVGLDAGVAKLATLSDGTVFEPVNSFQKKQKTLARLQRQLSRKVKFSNNWQKQKRKIQRLHSRIANIRRDYLHKVTTTVSKKHAMIVIEDLKVSNMSKSAAGTVSQPGRNVRAKSGLNRSVLDQGWYEMRRQLEYKQLWRGGQVLAVPPAYTSQRCTCCGHTAKENRLSQSQFRCQVCGYTANADVXXXXXXXXXXXXXXXXXXXXXXXXXXXXXXXXXXXXXXXXXXXXXXCCGHTAKENRLSQSQFRCQVCGYTANADVNGARNILAAGHAVLACGGMVQSGRPLKQEPTEMIQATA

SEQ ID NO: 13419 - protein, 446 aa, Tepidiphilus sp.
MQLTHKIALRPTPDQSDYFKRACGTARRVWNWALAEWNRQYSAGLKPNAMALKKQFNAIKYSDPQWLDEHGQPWLKTIHRDAHAQPFAHLQRAWSRFFADLKAGRKAYQPTFKKKGRCRDSFYVANDQFRLHGQKIRLPLVGWVEMAESLRFDGKILGATVSRTADRWFVAIQVEVHDNQFYRRRTAQEVTGVDLGLKAAATLSNGQTIQAPKPLKAALRRLKIRNRRLSRKVEAAKVAAGFAPKAKLPKGTRLPVSNNRRKSAEALAKLHARIANIRADFTHKLTTRLCRENQAVVVEDLHVKGMMANDKLARAISDIGFGMFRSQIEYKAKRYGTRLVIADRWYPSSRLCSVCGWKNEALTLSDREWSCPQCGTVHDRDLNAALNLKRLATETALPVASPSGNGGTAAEDVSAVVGKVTPVRHEVGPQGASGQEENRAHSCALS

SEQ ID NO: 13420 - protein, 363 aa, Nostoc sp.
MYVSSAQQTCNNVAEAFKSFQELTKLWKRGEIQDKPSLPRYRKTGLFTVTYPKRWLKLTEEGIRIPLGNQVKAWFGIDAIYLPMPSNLKWEDIKELRILPRNRCFYAEFVYPVEDVKSQLDTSRVLGIDRGIDNWLTCVSNVGTSFIIDGRHLKSLNQWYNKLVSKLKENKGQGFWSKQLAAITEKRNRRMKDAVNKAARIVINYCLSNSIGRIVFGWNERQKHSANMGRKVNQKFVQIPTAKLKERISQLGQQYGIDFVETEEANTSAASFVDGDSLPKHGEKPSWWKSSGKRIKRGLFRTANNWYINADCNGAANCIAKVAATLGINLSGVSRGALTTPLRVRLWTLKNPPTFCLNERSEI

SEQ ID NO: 13421 - protein, 455 aa, Methanocaldococcus sp.
MPKKKNKLPTEIVLTYKVKHNYDLKNLPDDFIKTSQKAVDIIWNNINWKEKTVKHRYKIGKKKYKYYTTTRLIPEIPKDKDFKRELRNRLLKGWEFASHYVDGAIKVAYSAIESWKSNYLNGKRGRNKPIFKRPFVRVKTTLMKYDKEKGVIRITIKPRKEYLILNIKNEWFFDRVEDFNIGEVILKDNEALITFKKPLDLSDRKVVIGVDSNLKSLDLYHPIEGWIRIDLSELHRIKRVYDVIIDKLKSIYKKAPKRIGKLLKKYWNRRRNRVEDFINKLTSQLPKLFPDAIFIFEDLDKFNMYKNSDFNRDLNRTNWRKIAKKLEYKSVVLYVNPHYTSKTCPVCGSKMKSQEGQVVKCDKCGVFDRQFVGCFNIFKRGVELTKKLLGGVGVPVAGVESDDLLSNEPRGELRPMKPNPNVEAKLPVREIFDFPLMVYTVDLNGKVLKSIIVHE

SEQ ID NO: 13422 - protein, 460 aa, unknown
  TnpB Polypeptide
LHEENSDGGSAVALQSLIEQACNFYLKNGCFPDTYEEMQPVPVLKVGILPYAGDDGGEHGQAYRFRIDLKGRCCYFAFRAPDQAGEWDPTWTEPVTQLFLPDPVLEHLQAGESLAPTLRETALPDGTRYAVLDFIVEVPVSPFPDPQQVRRILGWDWGVRTLVTATVMDLSGNRLSPPLFLDTGGFDGRQAHTRRHIDGLKKKVAKLEARRDQFSVGDPKREPSERKLVVLRQEIAQCWRKYEARNNDLAHLAANILILLATVWGAELITGESLKSLKSEGRGRGVKGRWVHWRNNSQIRGALWRTLRYKCHLSGLCLVWQHPRGTTHTCPKCGLPAHTYASPALDAKELDAGPWLRCFACGWNGARDYAAAINIALLGVASLLQEMAYKEQQKPRKRPTMKTKSLNSDSYSGSGLALRLPPTSPRGRLIHSGKRYVNGWIKSVTLHSALPPDIMLRLCG

SEQ ID NO: 13423 - protein, 253 aa, Roseiflexus sp.
MQRAHWYAAINVEIEPPEHKHPRESVGIDVGIKTLAVLSDGVQYENQVLLRSRLRKLKRLNRELSRRQEGSGRWNRTRKKLVKLHRRIANKRLDYTHKMTTRIARTYRIIGVEDLNVPGMLRNRRLALSIADARFGETQRQLRYKSEWYGGILVEVDRFFPSSRLCPMCGGIKSDLTLRDRMFICACGYTADRDVNAAQNIEREALRLMNRGRSGFTDSLNGRGQDIRPLEAIPDEASKWPKKGGLPDLLWFR

SEQ ID NO: 13424 - protein, 399 aa, Acidimicrobiaceae sp.
MAQHGSLCRTFRYRLHPTKLQTQSLLLQQRYQCELYNAALEERIGAWAWERRSVSYFDQCRTLTGLKDFRPEVVASGITLCRGTFRRLDRAYGAFYRRVKSGESPGFPRFKSASRFDALRWEDTPGWKLNTQLRRLYLKGIGEIKANYHRPLMGVAKAITVKREGTKWWLYVSCVNVPAMPLARACSEIGIDLGVVNQIATSDGELKKGQHFGSQTQKNLARAQRQLSTKQRGSLRRRLQVEEVARLHCKIKNQRRDAAHKLSRQLVNDYDLIALEDLKITNMVRAPKGRPDPEQPGAYLPNGANQKARLNHSIHDSGWGQLVSLLSYKAASAGRTVVSVNPYYTSQTCAECLHVDAGNRISQEDFRCLSCGHYDFADINAARNILRAGRALQASACDG

SEQ ID NO: 13425 - protein, 422 aa, unknown
  TnpB Polypeptide
MYVIIGSDKIKLERSVFMATVLKGIKLRLYPNKEQEHDLRQMCGNDRFLWNLLNGLVQSRYENNKHLYNGDNSKEAKEKRKHVMLSAYDMNYLLPLLKLEFPFLAYSDYSALQVLTSTLHIAYSNFFKNPSHFGLPRFKKLGVCKISYTGKSTIKVLAKRYLQLPKIGCIKTSKTGVLKGVNIKRYTIEYDSTNRWYISFQVEAQVSEFAKTNKTVGLDLGLTDMVIGSDGFKSGRFLVSDLEDEIKSKQKVYSKRKHYADVKIAMDKNMKVINPRTLLDFMNVEKARVTKVKSQKRLANKRKDFLHKLSTNLVKAYDVIVIEDLNSKNMMKNRKLAKAIGNASWYEFRTMLEYKCKWYGKQLIVVSPHYTSQKCSNCHHNSGKKTLDIREWTCDNCGIHHDRDVNAAKNILAKGLKNIQIV

SEQ ID NO: 13426 - protein, 388 aa, Aeromonas sp.
VKRATKVRIYPTDEQAAFLNAQFGAVRFAYNKALQLKRHMYQRHGVSLSPKRDLKPLLAVAKRSRKYGWLKEYDSQALQQAVINLDKAFANFFNPKLKAQMPTFKSKRGRQSSYHPNGKVLAEAIQLPKMTPIKAVIHRDIVGVVSSITVSRGPTGKYYASILCEDGCEAPTKPTFITNVTGCDMGLSHYLIQSSGKKIANPRHLLNASRNLRRKQKALARKKWGSANRSKARRQLAALHERVANARADFQHKLSRTLIGDSQAIIVETLKSANMMKNHKLARAIGDAGWHGFIMKLEYKATAAGVHLVKVDQWFASSKTCHCCGHKLTELKLSERSWQCPSCLVINDRDLNAALNIRQKGILELKAAGLVVSAHGGQRKSVTATVAA

SEQ ID NO: 13427 - protein, 375 aa, unknown
  TnpB Polypeptide
MNKAYKYRIYPDLEQEILINKTFGCVRFVYNKMLANRKEIYEQFKDDKEVLKQQKYLLPADFKKEFEWLKEVDSLALANAQQNLQTAYKNFFRDKSIGFPKFKSKHHDRKSYTTNNQSGTIRLINGQTIRLPKLKDVRIKLHRQLPQEAVIKSATISKTPTGKYYISILVEYESSIEPVTPVLKTVLGLDYSSRSLFVDSQANNADYPKFYRKAEEKLKKAQRKLSKRQKGGKNRDKQRRKVAKLHEKVANQRKDFLHKLSRQITDACTAVAIEDINMRGMAQSLNLAKSTNDNGFGMLKTYLAYKLAEQGKQLVVIDKWFPSSKKCRFCNNENKELTLSDRTWTCSYCGAELDRDVNAAINIKNEGCRILDIAK

SEQ ID NO: 13428 - protein, 523 aa, unknown
  TnpB Polypeptide
MNEDRIFGSYLFKNYANKGKLEKINQVLTEYRKTAKDIAIYLWDIFFRFGKLPHRKKINIKHIPSYLSERYKYVCAWQVYNVLSSYIANIQYQFANIVFGSSLNKEDKLILLALNNVKGWLVYDKDEIEIYDRKGKDVEKKTVKVSEFHKKLARKIFKHLLGKNKRPGFNNISMHLDGKVVDISKKKENKAVEFDYWIKIATLEKGKPIYIPLKANTYAEELEGEFLNYCQVVEDDDGNIEFRIIKQLKKKEYIPLIDEIAIDLGLNPLFATNKGDLFGRNFLDVLKSFDEKITKRMASLQKRNIKPRDDKKYRQYVDKLRDYLKNEINRLLNVIVKIYKPKRIIVEKLYFRSPELSKRLNRLIQRFGKKYIKQKLERLQQLYGIEIVEINPAYTSQECSSCGYVDERNRKNTQEFECKACKNKINAQINGAKNILKRSSLGNLHLTKKQVLKILIERYLERLKGCKSPPLDILKGNPYFKDYLRAVSTHFGAKEQANALQNSEKCQGTLESILNPCQGLTSS

SEQ ID NO: 13429 - protein, 290 aa, unknown
  TnpB Polypeptide
VSHYNNRFGILIRHFRIFSNSRRQVFQSLNLKNRIKMSYSTICINGNIAILNGYLKLPKAGQVRLKQHRAVPKEYKLKSVTVSQTPGGKYYASILFEYENQVQEKEMRRFLGLDFSMHELYRDSNGNEPAYPKYYRNAEEKLAREQRRLSKMQKGSNNRSRQRIKVAKLHEKVSSQRKDFLHKLSRQTADAYDCVCIESLDMKAMSQMLNFGKSVSDNGWGMFTGFLKYKLEEQGKNACEGGQIFRQQSDLFRLWLQERRDKKSCGQRVGLSAVWNPSRQRCKCGCQYQK

SEQ ID NO: 13430 - protein, 542 aa, unknown
  TnpB Polypeptide
MSRLLTVLRLLANFEISILGVYSISRCTWLRSPLNCCNSQSHFAQVAAMSSYKRSSTVFVMTLRRYFVTRTKCIFKSEIVPPEYLRMIGLSGYDGSMLTAYCYKLNPSPRQSQTMSDWLDRLRGLYNFALRERIEAYEQVKAPAMGDFCRLDNQGECCPLTCSVSKSASHAYPWKVDKEGNHKRRSAFEMQCASLPDMKESRPWYKRVNAQATQQTLRQLDTAFKNFFEHGRGYPAFKRRSHFRSFSYPPGVAKLNGNRAYVPSIGWLRFFNSRPIPEGYTVRTVTLRRKADGWYMSVRLENKAVPAIPTLQPSEVKTVLGVDVGVRKLAALSTGEMIANPRFAQQVERRKRIRQRRSSRKVKGSKNRRKAYQRLARLDQTVAQRRTDYQWKVANKLNRQAQCLIFEDLNIKGMVKRCKPKQDETGNFIGNGQAAKSGLNKAILDAAWGELKQKSMAVAAKSGHLVWSTNPYQSSQECSDCHFVSPTNRAGEKFLCESCGKLDDADTNASTNLRLRGMVELGISLDAVAGVLGKLGKSTPLE

SEQ ID NO: 13431 - protein, 410 aa, Symploca sp.
VKRQAVKVRLYPTLQQKQILAQHFGCARWWWNYGLSQCIETYKTTGKSLSQSGLNSMLPALKKNQETEWLKDCHSQVLQSVSLNLSRAYQNFFEGRAKYPRFKSYRHRQSIQYPQKVKQVDNCLKFPGFVGIVKAKIHRPLDGTIKTVTVSKCPSGKYYASVLMEYDGDNPTSSTEGKVIGIDLGIKDFAITYDGDKTSKYTNPKHLYKYQKRLAVKQRIAARKQKGSNRKNKANKITARVYERVSNVRQDYLHKLSRKIVDNHQVVVVENLNVKGMVSNHKLAASISDTSWGTFVNFLSYKLEKEGKVLIEIDRWFPSSKLCSNCHYQIEELPLEVRTWTCPSCGTHHDRDGNAAQNIRAEGIRLLSSSGTGEANASGEDVRPTRGRKSKMRQSSVKLEANTHPLGECG

SEQ ID NO: 13432 - protein, 478 aa, Limnoraphis sp.
MKYTYQYRLYPETQQTVTLNRWLRVCRYWYNRMLGERFDWWEQNRCPVNACLLICHLPVLKEQPNFYNQKKQLPVLKQDLVKVDWSGELIDFTEVYSSVLQDVCKRVQKSFDRFIAGDKNGKRSGKPRFKNAARYRTLNFPDADDSWLKFCTINGKWLFVKIPKIGFIKLKTHRAMPSRSILKQLSITKKADGWYCSLSLEDKSVPKFTPDNIEATWENSIGIDAVLDRDFYLATSDGEKLPSLKPLRRNQDKLTAVSQRKNKRNQGSKARRKLAKKEARVHQSIARSRKDFQYKTAYKLVHTGKKFFFCEKLDLKGLTRRNPSKVDQNGTFISNGQSSKSGLNKSWLDAAFGQFFDVLGQVAAKANATVVEVKPNYTSQLLSYRDEFVFTDRNIREYFDLELKLIVDRDVNASINIKRVGLDVFPTIKRRRGKPVIVESITKSTSKEVLSALFEYQKPTLKAQARLVGTSLFKLTTC

SEQ ID NO: 13433 - protein, 315 aa, Streptomyces sp.
MSVDVPQGRDLNIVRVHRRWGMASIPKVGRVRFRWTKDLPVGRQAGAENRITGARLVKDTLGWHIAFRVQTLEVRPDPHQGPDVGIDVGITVPLALSDGETHEHGEWLSEQEKSKLLRREQRAAQRKQHRKPGERTSRRLHHTYDHIAGLRAKAKRRALDWQHQTTTVIARTYGTVVVEALTITNMVKSAKGTVGEPGKNVAQKSGLNRSISGEAWGRTVTMLTYKTARHGGTLHQVPAPHTSRRGSACGFTTPGSRESQAVFVCKNPDCGWSGNADHNAARNVLHLYRMGLALIPAAGRAVVRRAKRDKPTAAR

SEQ ID NO: 13434 - protein, 335 aa, Methanoculleus sp.
LCTGFARCTFVRNHCLDNNAFRDSLLPELKKQHPELKEAQSHVLQKVIHRIVSSLRALRAMKAKGRKVGKLRKKWVHSMEFDSTGFKLTGNRLRLSKIGELPIELSRPVPGRIKQIVIKHTPAHKWFVAIISETPDTPEPTTGTRAVGIDLNLENSSTDTDGVVFEHPHNVRKSAKRLRRAQRKLSRAVKGSRNRRKQRVTVARIHERIENRRDDFLHTWSRYYVDRYHLIALEHLNIRPMVESLDAKLRGRSKSFLDAAMGRRAGAGEAGGFESRGTRQESSYATKLRMLVSMSTLLIRPTRPRTVSSAGTAKRRISRSEPIPARSAGIPFREI

SEQ ID NO: 13435 - protein, 566 aa, unknown
  TnpB Polypeptide
MLCHGIIYAESESHFMPKARKKKSSAFESSPVKSVFLFGNPNKGKLNLLWQMEHKYVELINFNIDVLTDVPDIHVQLIKNDRKDSYVRQLQKQLRPKDINSAFCQNAFDASFTKLSNRLDAVRLEMLRTIDSVFCQSKVLFGLCLDGANKDEMIACLNKVVNAVRNKKDTAFYQNCIAQLQNMSADEFDAQMVEFHDLYDMVSVQFKIPHVKSEAIPFDSRLMKIEPSTDTVMPYVITLSDPFVKGNRISIPINTSRHSLHKIQANRMAATVTVKPEGTKVRIGWSYAKSFRKPDTAVCMGVDTGIKDSFFLSDGRSIGSMKEVIDYYHREVEPAFAQLSSLRNKKRSISYYVRHHKNLPLDVRRSLIQKMDRLEHMIRTADAPYRKKRTYYNMLNHEIKQDVKTYMSCITHDTLTVLELLDIREFEKSRKLNGDLSAFARGRLQQKLMSELNWYGYDYVEVPPDFTSQTCPICSYRNAENRSKVNSKLFECGCCGYEDDADHVGAVNIRNRAKDKELLKLCKDAKNHKDMQSRLIRLLDDRHLEWQMKQLTTPILQETGNVVSVL

SEQ ID NO: 13436 - protein, 310 aa, Sulfobacillus sp.
VCSAVASTYASAESNKRMKLAVFSHSKLVYSYNRDYTVQVNEHTVSIGTLDKRIKVPFLVGENYLPYLHSQDWRFGSAELVPTRTGYSLHVTVKYEIVEPRLTECDAIIGVDRGMNFLAVATNQDDKAMFFKGRSIKDKKARFVRQRKDLQRQGNRSAKRKLKNLAGRENRFMTNVNHQVANQIIAFAKASGNNPCIVLENLTNMNLNTTVRLRNRYWRFSWAFAQLESFIRYKAVAAGISVLSVSSHYTSQKCPKCGHTEKANRDKKKHRFDCRKCHYKLNDDLVGARNIRDRGREIRHENEIASACHW

SEQ ID NO: 13437 - protein, 437 aa, unknown
  TnpB Polypeptide
VLEVHRTHRAKILNYSQIADSLNRHGWAASKLWNVANYHSRTVWEETGKIPDHEELKSELKTHSKYNGLHSQSSQRVLEELAEAFNSWYSSNGDRNNPPGYRKENYYDDEGRRVHEEHPRSTVTWKQNGIRHDTKNNCVRLSKGANHKEYPRAREYILVEYETRPGVAVENLQQVRAVYDNATERWELHLVCKNEVETPEAPGTETAGIDLGICNFAAVAYSTEEADLYPGNQLKQDGYYFPKEIAKCDDSGGERATRLHRKWSERRTHFFHSLAKHIVQRCVEKGVGRINVGDLEGIREDENGDAKNWGRHGNLDLHGWAFNRFTRILEYKAKVEGVEIVEVSERDTSKTCSVCGREGDGQRVERGLYVCGSCDAAFNADVNGAENIRLNANESNSESAPDSGGDRSTGWLAQPGVYLHDLSSGFQPQAQVVDSKP

SEQ ID NO: 13438 - protein, 402 aa, Escherichia sp.
VKRLQAFKFQLRPGGQQEREMRRFAGACRFVFNRALARQNENHEVGNKYIPYGKMASWLVEWKNATETQWLKDSPSQPLQQSLKDLERAYKNFFRKRAAFPRFKKRGQNDAFRYPQGVKLDQENSRIFLPKLGWMRYRNSRQVTGVVKNVTVSQSCGTWYISIQTESEVSTPAHPSASMVGLDAGVAKLTTLSDGTVFEPVNSFQKNQKTLARLQRQLSRKVKFSNNWQKQKRKIQRLHSCIANIRRDYLHKVTTAVSKNHAMIVIEDLKVSNMSKSAAGTVSQPGRHVRAKSGLNRSILDQGWYEMHRQLEYKQLWRGGQVLAVPPAYTSQRCAYCGHTAKENRLSQSKFRCQVCGYTANADVNGARNILAAGHAVLACGEMVQSGRPLKQEPTEMIQATA

SEQ ID NO: 13439 - protein, 403 aa, Trebonia sp.
MRTAYKCRAYPDPEQASVLNRTFGCVRVVWNRTLAWRQDRYRTEQASTSYAQASAYLTALKATDDLGWLTEVSSVPLQQALRHQQAAFAGFFAGRARCPRYKSRGGRQCAEYTRSGFRYRDGQLFLAKMSTPLAFAWSWPHIDPASIEPSTVTVSRDPCGRWYVSFAVEVPEPAPLPAAGAVVGVDLGITDFAVTSDGHKIANPRRLARRERSLARYQRRLARCQQGSANRAKARAKVARAHRKVRASRADFLHRTSARLVRDHDLLVIEDLAVKNMVRNRPLAKAISDCGWGEFRRQLEYKAARAGRRLIVTGRFFPSSKTCSACGHQLTELPLSTRTWHCPSCGTRHDRDVNAAKNILAAGLAVTACGADVRHPGTSRVRSAVKQEPRPVRAGIPVPQDGE

SEQ ID NO: 13440 - protein, 181 aa, unknown
  TnpB Polypeptide
VEFADQFSNPVIVFEDMSGIREQMQYESYMNRRLHKLPFHNFETFVSDKATWRWIPTDTVDAYTNSQTCSCCGERGSRQGRRFRCPNEECDVVQDHADRNASGMVNIAWREKAELADNNTNSRTHKTHLQVRLVRLSGACKPPTLIPLACRAGSARARLKKFEKPRARWSEAVYTSNQSAN

SEQ ID NO: 13441 - protein, 311 aa, unknown
  TnpB Polypeptide
  misc_feature (54)..(60): Xaa can be any naturally occurring amino acid
MASNPACFVRVKNLSRSRQQLSGSLLSSRDQGCSQEAHSHLRECILKVAQQLTXXXXXXXTVTWKQNGIKHDIMNNRVRLSKGANHKEHSKVWEYIIIEYETRPGVTVENLQQVRAVYDSTKQRWELHLVCKDEIKTPTAPGNETTGIDLGISNFAAVVYSTEDADLYPGNRLKQDRCYFPQEIANCDDSGGDRVSRLHHKWAERRTHLSHSLAKHTVRRRVEKEVGRINVGDLEGVREDENSSSKNWGKHENLDLHGWAFDRFKKSLTYKAKVEGIEIVEVSERDASKTCCVCGREDKSQRVERGLSVRL

SEQ ID NO: 13442 - protein, 402 aa, Escherichia sp.
VKRLQAFKFQLRPGGQQECEMRRFAGACRFVFNRALALQNENHEAGNKYIPYGKMASWLVEWKNATETQWLKDSPSQPLQQSLKDLERAYKNFFRKRAAFPRFKKRGQNDAFRYPQGVKLDQENSRIFLPTLGWMRYRNSRQVTGVVKNVTVSQSCGKWYISIQTESEVSTPVHPSASMVGLDAGVAKLATLSDGTVFEPVNSFQKNQKKLARLQRQLSRKVKFSNNWQKQKRKIQRLHSCIANIRRDYLHKVTTAVSKNHAMIVIEDLKVSNMSKSAAGTVSQPGRNVRAKSGLNRSILDQGWYEMRRQLAYKQLWRGGQVLAVPPAYTSQRCAYCGHTAKENRLSQSKFRCQVCGYTANADVNGARNILAAGHAVLACGEMVQSGRPLKQEPTEMIQATA

SEQ ID NO: 13443 - protein, 372 aa, unknown
  TnpB Polypeptide
MSYNKAYKFRIYPNEEQKVLLAKTFGCVRLVYNYYLDCKIKAYEKDKKSLSYNDCAKDLVSLKKDRDFLKEVDSISLQQSLRHLDTAYQNFFRDKKIGFPKFKSKKNHHFSYSTVCVNNNIKLEDGYLILPKIKSVKIKQHRTIPKDYTLKSVTISKTPTDKYFVSILYEYDVEIKAVEPITSIGLDFSMHELFVSSEGETADYPRYYKQSFEKLAKEQRILSHRQKGSNRYYQQKSKVAKLHEKIANQRKDFLHKISRQITNVYDVVCIEDLNMKGMSQSFNFGKSVADNGWGMFSTFLAYKLAEQGKKLVKVDKWYPSSKTCHVCGTVYQDLQLSERKWTCSCCNTTHDRDKNASINIKRKGLEMLNISA

SEQ ID NO: 13444 - protein, 451 aa, Eubacterium sp.
MSAGYAITTYKIQLNYKHLDWFKQTQCLFDAVLAFYYELLEKQPKALSLSNQNLLRHLELQTIKQRDGTPPETPLPFEKIPLYFRRAAINAAISMYRSYMGKLKAWQEGPIKSRKPSPPKCLHMSMLYYKGMYKDFDEKSILLKLNTGKTWAWVKHRYTGRPFPENAELMSPTIVIKKKKVMLHIPVKEIVEDSRTAKERVKQNEKFVAVALTGSDNLAVCTTIEADGRATAPYFIKGGKELAHRRKLLLGYTKRGSAGKDTPRLMTQPVGNDALGVCPRGLSSYGQAEAGIVPQGHQPGRLNTKYYEKITRLTDHYAHEVSRKIVDYAIKQGAKLIVLPELKESFYQAKKPYLGKTPYDFIGRRIARYVQYKAWQQGLVAMTSKPYYASTRCYHCDAPIAKHNTEYQNPSANFYGGKNFVCKEGHRGSTALNSARNLGKGFYERFYAGAA

SEQ ID NO: 13445 - protein, 397 aa, Oscillatoriales sp.
MIVLEFKLKGSSQQYRIVDEMIRTAQFVRNKALSYWIDNQAVKLSDLYKQCAIMAKEFEWARKLNSMARQASAERAIFAIQRFFANCKAKKPGKKGYPQFKKYTRSVEYKTSGWKLSTDKRCLTFTDGFAAGTFRLLGSRDLHFYAPTEIKRVRVVRRADGYGAQFCINVERTEEIVPTGKAIGIDVGLNHFYTDSNGEAVPNPRHLRKSEKALKRLQKRVSRKKKGSGNRKKAINKLGRKHLKVSRQRKDFAIKTALCVVKSSDFVAYEDLDVRNMVKNHKLAKSISDAAWSQFAQWLQYFGKVYGKTVIAVAPQYTSQDCSSCGNRVQKSLSVRTHVCSCGAVLHRDHNAAKNILAKGLRQAGIMLNTAGHAEINAWGQADLYSLVATSTGKSTG

SEQ ID NO: 13446 - protein, 400 aa, unknown
  TnpB Polypeptide
MSRYRLLPTPAQEAVLRGHCVHARYVWNLAVEQHQHWRPGRAGAPGYLEQCRQLTQARAEHPWLASGSQTVQQQALRDFAQAMTAFFDPGNPAGRPTWRKAGRDEGFRIVGRGRQWDLRRLSRKTGEVWVPKAGWVRFRWSRAVPESAKSFRVTMDRAERWHVAFAAIPAPVPGPGNGEVVGIDRGVAVSAALSTGDLLTVPGLTARERTRLRRLERKLAHARRGSNRRGQVKYAIAQLRARETDRRKDWAEKTSTDLARRFDLIRVEDLKISNMTRSARATVARPGRNVRAKAGLNREILRSGWGLLLRRLEDKAPGRVERINPAFTSQRCSACGHVDANSRESQAWFACTACGYAGHADVNAALNIAAGHAVTARGGDGAARPVNREPHLLASLTGRE

SEQ ID NO: 13447 - protein, 392 aa, Hydrococcus sp.
MAQLSLTLKLPFYRLNQVKALEFERLTALNTQVANELLTIDKKERSKLTSAAFHHVEISSNWINQTIRNTNARTKVKRFKRMWLETNNQSYEIAKRGNFYTVSFNLIRGKKGRIPLSVHPASHIEMLDKIIAKEAKLGSLKLCKSKKGIWYALISVSMEVPDAGEVKGWIGVDRGQNNLAVAALRGRFGKFWKGGRVKALRRQFQRTRRQLQSSKQLKEVKRLEQRERRIMTQINHVISKELVQFASDFGMGLRFEDLSGCRSTMFQRKKVKSDASQNRDSWAFYQLEQLTRYKAIKAGVPVESVPAPYTSKSDHRNGVLGTRNGDWFKGVDGYRCNADWNAAQNIGQWLGFSCPLDLQKAISVMDLVDVEGRVNDSPLTRKASMTVDLSPS

SEQ ID NO: 13448 - protein, 235 aa, unknown
  TnpB Polypeptide
MVPCIFKTYRYGISSQELERKEGIGPCVGKETPPYFLRFSYTEEVTLTKTPVKEQIICSVDLGINTDAVCTIMRADGTVLGRRFIDHPSEKDRMYRTLGRIRRFQREHGSAQTQGRWAYTKRLNTELGKKTAGAIVRYAEENHADVIVFEYLEMQGKISGKKKQKLHLWRKRDIQRRCEHQAHRKEMRISRICAWNTSRLAYDGSGAVTRDRENHSSVLSRQENDIIVTCQHPII

SEQ ID NO: 13449 - protein, 357 aa, unknown
  TnpB Polypeptide
MRQAWFGSETLPNINDLVAAVKHEDCFKSRHNTKTAKQTIRKVLTDWSNFKAALRAYKADPTAFRKKPKPPYYKKAMAQVIFYKETILGGQSGKDLNVIVPTNHCFAVPSTRKFKQVVITPKTFGFVIDVQYEVPDVERNEGKGVCNIDIGLNNLATITSDQLERPILVNGRIVKSINQWFNKHPNKKNSRKRYWRLENYFHHVSKLIVAKCLKFSIGTIIIGKNDGWKCEMNLGKKANQNFQYVPFWNLMQKIKYKAELAGLEVIFTEEAYTSKASFLDRDPLPKYEQDVAPPTFSGKRIGRGRYKTSDGRVINADVNGSANIGRKVIRDEDVILRLDRSVAATPVRVNPLKFFSV

SEQ ID NO: 13450 - protein, 360 aa, unknown
  TnpB Polypeptide
MKQTISLKLEPTSEQYQSLLRTMEAFNRGCQYVADVAYEKRIANKVRIQPIVYSELRTRFGLSSQMAVRAISKAIEAYKRDKRIHCRFDLHGAMVYDARIMSFKGLTHVSLLTLTGRERIPIRFGAYQAARMDRIQGQADLVLRNGVFYLLVIIDLPTPPPIEPEGFLGVDLGIVEIATDSEGNSYSGEAIKAVRRRVKRIRGLLQSKGTKSAKKHLRQIAKKQSRYVRNTNHIISKKIVETASRSAKALALENLKGIRDRSNGFSREMRWLMGNWAFNQLAQFIRYKAEMAGIPVVFVDPRDTSRTCSVCGYVDKANRKSQAHFKCLQCGFEINADYNAAKNIEARAAQSTSLLLQPSG

SEQ ID NO: 13451 - protein, 360 aa, unknown; identical to SEQ ID NO: 13450
  TnpB Polypeptide

SEQ ID NO: 13452 - protein, 391 aa, unknown
  TnpB Polypeptide
MLIKRSIPITLDKSDDLLETIEEFNRYQKSISEECFNGGKSRNALSLHKEVYHSVKSSLRSQMKCSAIRVVAGAYQSAKSNKRPAQRPFIFRRQSSLFLIGKRGRDASFSSCGRMSISTIYGRKKIGFNIPDVFRDDFNNSVTRDSLTVGMDGKGSVCITLNVPDPKGIVPVGIDLGIRNAIVASTKKETLVISGNELSAKRNRIRKTRARIQAKKSSKKELGKGTRSVRRVLKSLSKKQSNSTKTFCRQAASRLCKWAPKHSVLVFEDLKIKRSSKKEHIRKGTRRKLNSFCYNLMIQSVTNRAERDGLAIAFVDPSYTSQICNQCGVLGDRNGSRFNCPSCSNHDCSDRNASLNVLSRFSVLRGGAHQSICAEARGNPTGKLVPLGASS

SEQ ID NO: 13453 - protein, 450 aa, Streptomyces sp.
MSRFRMYPTPAQEEQMLLHCAHARYVWNLAVEQHSHWRKGRKAAPSFAEQCRQLTEARAASQWLRAGNQTVQAQALKDFAKAKSARFTSGFGEPTWRKKFRHQGFRVIGDDRVPEFNDDGTVKLNAKTGRQVLGRSVVVQKLNRRWAQVKMPGCGWVRFRLSAKGKGARLPSAKTFRVTLKNGQWHIAFAVVPDPIDAPGTGEAIGIDRGVTVTAALSDGRTLSCPQLTTRERAQIRKHQRRAARAKQGSPEKTAEYAKAARLKAREADRRKDWCEKTSTMLARTYDLVRFEKLNIKNMTRSAKGTVEQPGRNVAQKSGLNRATLARGWGLLRQRTEHKAPGRVEDVPAPYTSLRCSACGWIDKNSRKSQAEFECSSCGFTCNADTNASINVAAGQGGIPRPRRTAGAGGTTPRKGSSVREPQLKRVGISSFQEGEDVNDRQVRSRLPAP

SEQ ID NO: 13454 - protein, 372 aa, unknown
  TnpB Polypeptide
MKLTLKIKLIPSDEQHRILLDTIKEANTACNQISDVAWRNKTFNQFKLHHLCYNDIREQFNLSAQVVVRCISKVADAYKLDRKKQRIFREYGSISYDSRVLSYSDTYVSIWTVSKRQKMPFVCHNTNYLPYIKGEADLVFKKGKFYLFQTVEVPEEDMEDVEEFIGCDFGITDIVCTSEGKSYSSQSLTQYREKQRKIRSSIQSKGTKGRTHECKRGCAKLLKRLKGKERTTATIINHTISKQIVMEAKAKGVGIAIEDLKNIREEMNAQWRNKTFRRRSNNWNFYQLRSFLEYKCKRAGVKIVVVPHAYTSQTCCKCHCIGTRSNKSFKCGYCGSDMDADVNAAKNIALLGAVVNQPEKSGMWSCNLHITA

SEQ ID NO: 13455 - protein, 449 aa, Mycobacterium sp.
  misc_feature (391)..(403): Xaa can be any naturally occurring amino acid
MAKFEIPEGWMVQAFRFTLDPTAEQARALARHFGARRKAYNWTVATLKADIDAWQATGIQTAKPSLRVLRKRWNTVKNDVCVNIETGVVWWPECSKEAYADGIDGAVDAYWNWQNSRSGKRDGKRMGFPRFKKKGRDPDRVTFTTGAMRVEPDRRHLTLPVIGTVRTHENTRRVERLIAKGRSRVLAITVRRNGTRIDASVRVLVQRPQQPKVTDPGSRVGVDVGVRRLATVATADGAVLERVPNPRPLDAALNELRHVCRARSRCTKGSRRYRERTTEISRLHRRVNDVRTHHLHCLTTHLAKTHGRIVVEGLDAAGMLRQQGLSGARARRRGLSDAALGTPRRHLSYKTGWYGSQLVVADRWFPSLSVEPTVRPGLARLVAVKRGREAXXXXXXXXXXXXXGRRPLVPVVKRGADRKTRPGRAGGREARKGSSRKAAEQPRDGVQVA

SEQ ID NO: 13456 - protein, 411 aa, Moorea sp.
MEFKAVIKKFQKLAVNEAIRTARFVRNKVLRYWMDNRGTGKKELYRYNTQLRDEFEFVKNLNSHACQASVENVERAIKRFYDNCKKKVPGKKGYPRFKKHSRSVEYKQSGWKLSPDKKSIKFTDKKGIGQVKLKGTWDLWSFDQKLIKRVRIIKKADGYYVQFCVKIDNSEQLEATGFTVGLDVGLKEFYTDSDGHSESNPRFYRKGEKRLKFYQRRVSRKKKGKAVGHASRTSNRKKAINRLGRQHLKISRQREEHAKRLARCVIRSNDLVAYEDLRVKNLVKNHCLAKSINDAGWYKFREWLEYFGQKLGRITVAVNPAYTSQNCSNCGEMVKKSLSTRTHVCKCGCRLDSPKATLRERDHNAARNILTRALGTVGHTGTCQNAWGDLSSTLPDSGLVEQDGSMIQESP

SEQ ID NO: 13457 - protein, 436 aa, Clostridium sp.
MSKNLYNYANYQIRQIFIITSKLAKDEKVNQEQLDYLKDINVKVDKFNELRKTNFEKARAKAPKENKEFKKKLKTIKYFDKDNKYPCYDFIEFLVKDGIDYKSLMAQVSQQTLKLLDKNWISFFEAIKKWSKNNIGFSGRPKLPKYLKKDGKTIVIFTNQNCKQSNNCIKMPTCFNQYELNTNIQGKLQQVRILPRNKYFILEVVYTMPKPQLKEDNNKYISIDIGLDNLAAITNNCSVTPIIISGRKLKSINKYYNKQVSHYREIAKRMNNLEWTNKMNRLTIKRNNMITDLIHKASKSVIDYALSCGTNTIIIGNNKDWKKESLMSKKVNQSFVGIPHQLFIEKIQYKAENLGLKVIITEESYTSGTSFLDNEEPIKENYNKSRRVKRGLFVSNTGRKINSDINGSLQIMKKVFPNVIDHGIEDFGLNPIRVGI

SEQ ID NO: 13458 - protein, 387 aa, unknown
  TnpB Polypeptide
  misc_feature (134)..(134): Xaa can be any naturally occurring amino acid
MIKSIKVMLLPNNKQRSKMFHYANTARFAYNWAIARERENYELGNKFISDNDLRKEFTQLKKCEGYEWLNSVSNNVTKQAIKDACSAYKRFFKGESNYPKFKSKKKSKPSFYQDNMKIRFSETHVKVEGFSNSXKKNKQKLNWIKLAEKNRIPVDAKYTNPRITFDGLNWWISVGIEIEDSTDFPTNDGIGIDLGIQDLAICSDMKNPYKNINKISEVKRLKKKQRRLQRQISRKYLKNKKGGSYCKTSNIIKSEKKLLKVTRRLTNIRHNHLHQVTSEIVSRKPMFIVLEDLNVSGMMKNKHLAKAIQEQCLYEFYRQIQYKSFWNNIKFIVADRYFPSSKLCSVCGNIKKDLKLSDRIYICKCGNIIDRDYQAALNLKAYGENVI

SEQ ID NO: 13459 - protein, 397 aa, Hydrococcus sp.
MFRVVKVRLYPTESQQIRLAQWFGCCRWFWNYSLDLTTKTYQQTGKGLSRVQIQSMLPALKKEYEWLAEPYSQCLQFVALTLSQAFLNFFEKRAKYPNFKSKRSKQSISFPQNVQIIDKGLKLPKLGVVEAKLSKLYPGEVKTVTISKNPSEKYYASILFEIEGEEPSPSTDGKAIGLDLGLTHFCITSDGSQYNNPKHLYKHQRNLARKQKKLSRKNLGSRSRHKAVKLVATIHEKIFNTRRDFLHKLSSKIVNENQVIVVEDLAVLNMVRNHKLAKAISDCSWGTFTTFLKYKCERNGKVFVKVDRFFPSSKTCSNCYHQVTEMPLDVRSWQCPKCGTNHDRDVNAATNIKDEGLRLLALGHSATASGGRVRPSKGFAFVRQHPMNEESHATPSG

SEQ ID NO: 13460 - protein, 440 aa, unknown
  TnpB Polypeptide
MSSSLQSGVRFQALPVPDMRTVLSQWIGCQRVVYNGKVSEEKVFASQRRLLLASGEIDVKTPLDRCYSQFKDDALTPWLSEVPSQILRNGADRWMDAKQRQLKKLGCAPRIRNRSNFNSVLISSELFRFIDDVDADGVVTKRLQLGTEKNPVGFLDFNAHRDYGLPKQITVRRTGRHWWLSFSYEHAAPEGFVPRDDSELAYELNALDDIDLKAATVGIDRNVKDNCVATSDGRFFALSPTQRERLKRKELGANRLQKRMARQVKGSKNRAKTRNRLASKHEYRSNVARDFSHQTSRSLVTDQANDARAPLMLVLEALKIANMVRRPKAKQDPTTGKWVKNRAAQKAGLNKAILQSCWGNIATQIKYKGHRNSALVLSVPAAYSSQECSSVGTFTQTIAMNGSSSVNAAAMKHTLIPTPARSLPPQASRQCVTRRWSQSP

SEQ ID NO: 13461 - protein, 441 aa, unknown
  TnpB Polypeptide
MTSEPAAAATNPSSRKEKAHAKKQAGFTTRVLHLRVKDKHGAFLLNQAREVNFVWNFCQDHALQVLRREHVFCSAYDLHPYIKGAGAGEEGLSLHSQTLQAVTEEYVTRRKQFKKAKLNWRVSNPKSPKYSLGWIPFKASAISRNKRNGGQVRYCGKDISLWDSYGLSRCELGSGNFSQDSRGRWYLNVTVTTMEWPKSLDPEKVSAEAIGIDLGLKDLLCTSEGIKVEAQQFYRDMEPKLAVAQRAKNKQRVKSIHAKIANRRKDALHKLSTALVSKHQAIFVGDVNASSLAKTNMAKSVLDAGWSTFRTMLQYKCDSAGVWFREVNESFTTQDCSCCGARCGPKGQAELNVRHWTCKVCDTRHDRDTNAATNIKVRGQAWLEAEFEKGYSTAAEVNPVETAVNKDSQHKISKKSVAAGVGHGPLDVGIPLLPAQAAAVG

SEQ ID NO: 13462 - protein, 313 aa, unknown
  TnpB Polypeptide
MYRSGMFIRTGMYQAALKVFIRNTWDWVLVDLRKSDADYILRHCKNYKECAPTLQKRGKKWYLDFAFQTSVKLPDVSIKDTRILAVDLGLNSACTCSIMTPEGAVLGREFLSLPGEYDSLEHAVSHIKHAQKLCARKTPGLWKQAKGINDDIAVKTARFIVDTAIKYDVDCIVMEYLDLAGKKRGSKKQRLHLWRAKYVQTMVTDKAHRNMIRTARVCAWNTSRLAFDGSGRVMRGKEADLPSYSLCRFPTGKQYNCDLNASYNIGSRYYIRELLKTLPATAGQAVTAKVPELAHRSKCTLSSLIKLNAALAA

SEQ ID NO: 13463 - protein, 450 aa, Thalassobaculum sp.
LKFIDSPAYLIKDFNHLEDSPSLFQTYKYKLKPTCRQYNALDRVLEQQRLLYNAALQERIQSYRYGQALAAKRGATRPDPKLDDWKQITKLDQFKSLTQIRADDPSGIGEVPTALSRHTIERADLAFQGFFRRLKLRSGKAGFPRFKPMSRWSSFGFQEFSGIRLKESALLFRGMPGKLEVHLHRPIPEDAEIKAATLTKAVDGWWVCFRLKLADTEPREDDQRPVVGIDVGTHHFAALSTGSVLENPRIGRRAARRQRVLSRALSRCRRGSKRRQKARERLARHQAKTANQRRTWLHQTSARLAREHQLIVVEDLTVRNMTRSAAGTVEEPGTMVRQKTGLNREILDVAMSTFVNMLVYKAERAGGRVVKVDPRYTSQDCSMCGYREKKSLSDRVHRCGECGYVDDRDVNAARNILVKGLREAGGVVIPVGLKSTVVHWPEKAQMEISN

SEQ ID NO: 13464 - protein, 307 aa, Microcystis sp.
VKVSRTVLKPSQDGDISGLGQPNTEQEIALAKSFRFCRWFWNYSLNLCQETYQTTGKGLTRNYIQGLLPSLNKEYEWLTDAYSQCLQVVALNLSPAYQNFFEKRARLPRFKSKHGKQSISYLANVKFEGDYLKLPKIGSVYCVHHREFAGTIKTVTISKNPDGKYYASVLVDPSAPLRVNVEGSRDVDEGLDPLETSKDGKAIGIDLGLTHFCITSNGSKYDNPRHLAKHQRNLKRKQQRLSCKKKGSNNRQKARGKVAKVHSKISRCREDFLHKLSRKIVNENQVIAVENLNVKGMVRNHNLAKAK

SEQ ID NO: 13465 - protein, 371 aa, unknown
  TnpB Polypeptide
MILAKKVRLCPSELQEEKLWQSVGTARFIYNWTLNRQEENYKGGGKFIPDSVLRKEITQLKKTDLSWLNEVSNNVAKQAVKDACDSYKRFFKGLSGKPRFKSRKRSKKSFYHDNVKLKVKDNKLVKIEKIGWIKTNEQLSIGAKYSNPRISYDNKYWYLSVGIEQEEIQEELTDASLGIDLGLKNLAICSDGTVYKNINKTCTVKKIEKKLKRLQRQISRKYEKNKKGKEYVKTKNIIKLEKQIQQTHRRLANIRNNYLHQTTTSIVKTKPYRVVIEDLAVSNMMKNKHLSDAIRKQGFYEFRRQLEYKCNFRGIKLVVADRFYPSSKICSQCGEIKKDLKLSDRVYKCNCGLVIDRDLNASINLSKYKLA

SEQ ID NO: 13466 - protein, 317 aa, Scytonema sp.
  misc_feature (317)..(317): Xaa can be any naturally occurring amino acid
MEQVLTLVCKLNPTPLQSEKLEVVLHAFAEACNYTNQVIKPEITSKLTIQGIVYEDLRAKFGLPANLAVRACARVGANRLTAKKKDKPVKAFKPTSADYDARIFAFREKDWTVSLTTLSGREHIKINAGNYQRGKLAGRKPTSAQLCKHRDGQYYIHIQLKDEVRDPQPTKKVIGVDFGRRDIAASSDGDSWSGEQLTKTRDRYSLTRASLQRKASTRTRSSRRRCRQVLARLSGRERRFQAWVNHNISKTIIQQAKNQQALVAIEDLTGIRARTNQKPRNKTERRRSNSWAFYQLRMFLEYKGLRDGVEVVAVPPX

SEQ ID NO: 13467 - protein, 496 aa, Scytonema sp.
  misc_feature (317)..(495): Xaa can be any naturally occurring amino acid
MEQVLTLVCKLNPTPLQSEKLEVVLHAFAEACNYTNQVIKPEITSKLTIQGIVYEDLRAKFGLPANLAVRACARVGANRLTAKKKDKPVKAFKPTSADYDARIFAFREKDWTVSLTTLSGREHIKINAGNYQRGKLAGRKPTSAQLCKHRDGQYYIHIQLKDEVRDPQPTKKVIGVDFGRRDIAASSDGDSWSGEQLTKTRDRYSLTRASLQRKASTRTRSSRRRCRQVLARLSGRERRFQAWVNHNISKTIIQQAKNQQALVAIEDLTGIRARTNQKPRNKTERRRSNSWAFYQLRMFLEYKGLRDGVEVVAVPPXXXXXXXXXXXXXXXXXXXXXXXXXXXXXXXXXXXXXXXXXXXXXXXXXXXXXXXXXXXXXXXXXXXXXXXXXXXXXXXXXXXXXXXXXXXXXXXXXXXXXXXXXXXXXXXXXXXXXXXXXXXXXXXXXXXXXXXXXXXXXXXXXXXXXXXXXXXXXXXXXXXXXXXXXXXXXXXXXXXR

SEQ ID NO: 13468 - protein, 533 aa, Lachnospiraceae sp.
MTDAEYTKLLKKYHKLSERHVLVVETDMPYPDVLKVAALSDKIRKAGNELVGLMRKNYDQLFRTKRYRKLLSLYGRTDDETRRKDLARQLKEMQEAYHVTWEFCRKAMIPIGKKYDIGSIFALTKAEDVWCGIEKCLYGNGKTIHFSKYGELPCMRAKQANRGIPISVKDDRLQFNLGKIVFGIKIKDRFQQEEVQAVLSYLAGPEVRDRRAVDTLLEEAYCIDTYRPCYVTLVPKMIRGRYRVYLHLVVEGRAKPKYDKNGNYRHKYEKGTIGADIGTQTVAYTSDTEVGLKNLAERGNSIQTSERKERLLYRAMDRSRRATNPQNYNPDGTIKKGCKTWEYSNHYRKLKARHSELCRINAINRQLAINEDVNHLRSLGDTFVTEPKNAGRLMRRAKETTKNNSGRFNRKKRFGKSVRNRCPGGFQAAAENKFKTTGGTYIEVPNSYRASQYDHTADDYIKKDLSDRMYCLQDGTEVQRDWYSSYILYNYDKKTRCIDKDKCNEEFERLYEKEKALIAWIRANEIKVLNSGI

SEQ ID NO: 13469 - protein, 300 aa, Cenarchaeum sp.
VDVTNHGDKERQFELHVTIREHVPDRVCTGIHAGIDMGGKHTLIVGKSDGSIAMLTLREKDTLRNIARIQKKMARCKLHSHKWRNLHAQLQSVYKKMENKQKDKLRKFAKKLFAQCDKIIMEGMNLRTMTTKGKGQKNKNRPMRQSKCGEARALLTQQALQHNTEYMEIDQKYTSQHCCMCGSTNTWRKGSKFRCHNCGVAYHADVNAAFNILFTFYAVQWSKRAQAVYTLQDKAGMVLRGKIHLATLTPPSVVGDVMAGTGRPKVGLVCPLANNGHLYGAPLNGGSPSTFVETQTGISR

SEQ ID NO: 13470 - protein, 403 aa, Lachnospiraceae sp.
VERDLLEPELLPADGRQGPHRDDQALYRDTGGEMKAHRAYKFRLYPDRQQEALFHKTFGCCRFLYNRMLADKKEMYEKTGKMVRLTPAGYKKEYPWLKEVDSLALANVQLHLEAAYRKFFTEEKAGHPKFKSKHRSRMSYTTNVVNGNIRIEGGRLRLPKAGAVKIRCHREVPAGHVLKSATVSMDRSGKYYASLLYEYPASESQTAGKDSRDMEVLGIDFAMQGMAVFSDGSRAEYPMYYRKAQERLAREQRKLSHCKKGSRNYDRQRKVLARCHEKVRNQRRDYLHKLSRGIADRYDAAAVEDIDMKAMSRCLKFGKSVMDDSYGAFRDMLAYKLEEQGKELVKVDRFFPSSKMCSRCGNVKKELGLDERTYHCGCGNCMDRDVNAAVNIREEGRRILKTA

SEQ ID NO: 13471 - protein, 368 aa, unknown
  TnpB Polypeptide
VFIIKYITYKLRVYPNKKQKTLLAKTFGSCRFVYNYYLTLKIEKYKTFRETLSYYACCNDLTNLKQTYKWLKEIDSTALQSSIKDLERAYRNFFRGGGFPKFKSKKVHKYSYRSVCSYNNIRYKNKHVKIPKIGWLKTKQNPNIQGKILNATILQTPDGCYYVNLCCETEIKKSLKTDKNVGLDLGIKDFCITSNGDKYKNPKYLNKSFDKLAKLQRQLSRKTKGSNNYNKTRIKIAKLHAHISNQRKDFTQKLSTKLISENDIICIEDLQIKNMIKNHRFARNIIDVSWSRFIRELEYKASWHERIIVKIDKFYPSSQLCNCCGYQYSPAKDLTIRFWKCPNCGNEHDRDVNAAKNILKEGLRVLSL

SEQ ID NO: 13472 - protein, 433 aa, Halorubrum sp.
MGDVIRTVKVKLDVPDERCDDLHQTKDQFLHCANTTADWAWRHPTDYCVTSKQKAETALYDRLRNETELTANLVQKGIRRAIEATKSGVARLKNDETTSQPHFDAWSVVYDKRSATFHRDHVSLSTVHGRVECQYVIPDDPEETPIGEYLLNTDYEFRMSTLQYDRSTESFYLHARMRGTTEGHEQSTAASSDAKHRTVLGVDLNVDCSLAVTSTGAFIGNADEMNHRRREFEKARGSMQQTGTRSAHLSIQSMDDREHRWMRDELHRASNQILDEAREHECTHIAFENLTDIRERMAGAKRFHAWAFRRLYEYVEYKAEILDIVVEQVSPAYTSQRCSKCGFTHETNRRSKHQFVCQKCGYELNADYNASKNIARKLLKRLRSGQKSSSGGAPCQCALKSGTLNLNGEFIASVNSTTEGESTDKPTTSVVGH

SEQ ID NO: 13473 - protein, 338 aa, Bacilli sp.
MLLSGVITMKIHRAYQFRLYPNKEQEMLIYKTFGCTRFVYNYCLDLKRKNKYLTKFDLIKELPKLKKEYPFLREVDSMSLQNTITDLMVGFDKHIKGQGGYPRFKKKGVKESFRTSYITSSYKKRVYENIKVDLKRRVIDLPKLKEVKIRGYRALNKLPGRILNATVKEVGTRFYVSVCLEEELELPERVNNQAIGIDIGVKNLVVTSNKEYYGNPKYLAKYERKIKHLQQELSRKIKGSKNYIKCKKKIAEVYRKLQNARKKMVEAIVSKITKHHDIIIAENLQVKKMLENKNNHKNLRKEISNATFSEIIRILKYKSLWLNKIFIQVSPYYPSSQI

SEQ ID NO: 13474 - protein, 535 aa, unknown
  TnpB Polypeptide
VDGERQKEGKHAEKTNERPRRRGRQKSLHRALRGVQPEHGKRDRDDRPRLRGVREAPIRLHRGIEERGLEMSADVPGTRRLSYKYRIYPTEAQKEAIQANIDACRYIYNRLLRMRIGSYQATKPTLKVHVLAPGADPESERPEWLRGEDGEWVYEEVPNPDYDPEAKPLTKFDCSKLVSTIKSQTVSEDGRFFLKEADSTALIYANNNLDAAYQAFFRRVKQGGKPGFPRFKSRRNPMRAYKTAGAVLSRRDGEGWEKLKSLSEAEGKWTHVYLPKVGFVRAKIHRMPQGEQVSCAVRAEADGTYFAVVNVKNAPMPEAAAPVAGPVGITFGVSHWVVDSDGEVRDLPDTSDLERRLTREKRRLSRRKGARKGETKSANFEKQRLKVARLEAKIRRRREYAVHGLTSELSKTREAVASREMASKDMMERDSRTTENIPRKARRSINKGIAEGSFAEVNRQLAYKCAWRGTAFALVPATTATAQTCSACGHVEKAVADDLRPRWRCPECGTVHDRKGNGAQNVPEEGMRLLAEAKE

SEQ ID NO: 13475 - protein, 554 aa, Streptomyces sp.
MGGVRVLAAPFMVTGLAGVAVRDRLKHLAPEDEQVLRAIGEHQGALASRDLKIRCADGLIHGAGTWAARKRELTKVSSSRIAGAITKTSNDQWALARRCQAAHIRSLEDGIRALKYRLSLPIGAKGTKRAAGGYRSKGEWFRKSRRLADLETRRAAAVADWRTGRLRVVRGGKRLLSTRHHLAEAGLTEERWRERWEAERWSLTANGESGKRFGNETIRVTPTGQVSIRLPATLAHLANTKHGRYTLASTVAFAHRRVEWADRIQANRAVAYRFHLDTTRGRWYLTASWQRPIVRTVPWESARAAGVIGVDTNADHFAAYHLDQHGNPVGEPHRFAYDLSGTTQHRDAQIRHALTRLLHWAKQTGATAIGIEDLDFSTEKTREKHGRRKRFRQLISGIPTGRLKARLVSMAAEQGLAIIAVDPAYTSKWGGQHWQKPLTTHRRKMSRHDAAGIAIGRRALGHPIRRRTAPPPHDRSDHVGHRTAQAAPGAREREGTRPPATDHAPRDVPPHGTRKRQPSAPKTVRDAPRAQQWAQDPLLCSGQERSKDTCMSPT

SEQ ID NO: 13476 - protein, 402 aa, Escherichia sp.
VKRLQAFKFQLRPGGQQECEMRRFAGACRFVFNRALARQNENHEAGNKYIPYGKMASWLVEWKNATETQWLKDSPSQPLQQSLKGLERAYKNFFRKRAAFPRFKKRGQNDAFRYPQGVKLDQENSRIFLPKLGWMRYRNSRQVTGVVKNVTVSQSCGKWYISIQTESEVSTPVHPSASMIGLDAGVAKLATLSDGTVFGPVNSFQKNQKTLARLQRQLSRRVKFSNNWQKQKRKIQRLHSRIANIRRDYLHKVTTTVSKNHAMIVIEDLKVSNMSKSAAGTVSQPGRNVRAKSGLNRSILDQGWYEMRRQLEYKQLWRGGQVLAVPPAYTSQRCACCGHTAKENRLSQSKFRCQVCGYTANADVNGARNILAAGHAVLACGEMVQSGRSLKQEPTEMIQATA

SEQ ID NO: 13477 - protein, 470 aa, unknown
  TnpB Polypeptide
VQVHQAYRFELDPNDRVRAALASHCGASRFAYNWGLALVKSRLEGRDAIRQAALRELLCDTEVERLARSVEVPWNLPALRREWNRSKTDVAPWWRENSKEAYSSGLDALARALEGFSKAKKGERAGTIGFPRAKKRWSQWKCRFTTGAIHVVDDRHVQLPRIGVVRSKEPATKLRQLLDEGRARILSATISEEAGRWFVSFTCEVERSELPAASPDAVVGVDLGVKHLAVLSTGQVVENPKALSRYGRRMARLNRELDRRQKGSKRRARTKAKLARCHRNVVNTRRDALHKLTTELAATCGTVVVEDLNVAGMTAKPKPVPDGAGGYAPNGRRRKAGLNRVVLDVSPSEVRRQLAYKLEWKGGRLIVADRFFPSSKICSRCGAVKAKLALSERTYRCDCGLVIDRDFNAALNLAAHGRRVVAGSGPETQNARGGGHPRPRPKPSMKREDGTGEPGRTVTVSSQEETASPW

SEQ ID NO: 13478 - protein, 470 aa, unknown; identical to SEQ ID NO: 13477
  TnpB Polypeptide

SEQ ID NO: 13479 - protein, 473 aa, unknown
  TnpB Polypeptide
MFPMQKDVQVCVVGKVFRPNRLKVLALNGAFSEYFRLVRWYLRFNSKSKSVLHENCYEKAKERFNLNTALIQTARDKAVEVLKGFEETKKEDSVLRLKKISIRFDKRCYSFSKTTNVLTPYWLTLSLNRRERVSLPIVFGEKQKERIEEAFRGGWEFATVEMVKRDGCWYAHFVLEKTVEVPDEPESVIAVDRGERNLAVAVVITKSNPDKPMKGHFWRGGEIKRIRGIYGHVRRRLQEKRLPKKVKQLGRKEKRKVNQQLHITANQIIQYAKQLPKPVIVMENLNGIRRSFKKSKKLNKRFHSLPFRKLQATIEYKALLEGIEVRYLTKKETGGTSKTCHRCGHVAQVKDRIFRCPRCGMEYDRDLNACVNIAHRAMSSMGWGSREPPEPAYEETGVKPALNAGSPQASAVGSSLLSALRCEEFARPLDDVPASRQQLPTGYGLLDYPTAILSHLQELPGGVYPGFHLHRQG

SEQ ID NO: 13480 - protein, 340 aa, unknown
  TnpB Polypeptide
LLIIQKSILIIINSNLIVRHLIIWLNVLKSDYFFLKNSESTSLQSTCDIFKDSMIRFFKHQNQFPRFKSRKNPLQSIRLKNNNNSIRFEHNKLKLPRFGLVKYKDNRKILGDILSVTIKYENNRWFAVLNCKNVPITPLPKTGDNVGIDLGLKDLMIFSNGEKRKPITRLTKIEHQIARLNRNLSRKVKGSKNFIKNVKKLHKLYNKVFDIRNNEYQKLSTKIIENFDLIGLENLSVQNMIKNKRLSHSISQISWSKLIDMIKYKAQWYSKKCIQISKVFPSSKLCSECGYKKEDLTLTIREWTCPECRTKHDRDINASINILNEAIRMNNECTAGHVGI

SEQ ID NO: 13481 - protein, 381 aa, unknown
  TnpB Polypeptide
MLKTFAYRLYPSKPQARLLERTLETCRRWYNQCLAERRDAYQQRGETVSKFAQLAKVKEQKASNPYATGIHSHVLQVVVADLDKAFQAFFRRVKAGETPGYPRFKGRRRFDSFGFKEYGNGFKVDGRRLKLSGIGRVAVRWHRPIEGRIKTLRISKKAGKWFASFSCVVDEPTPLPATGKDVGIDVGLASLITTSEGQKEPHPGWYRTAERKLRVLQRRVARRKKGSTNRRKAVQALQRQHERIANTRKDYLKKLAHRLITQYDRIALEDLRITNMVRNRHLAKSILDAGWGYLIQHLTSKAAEAGRVVCLVDARYTSKTCSQCGHVFESLSLSDRWIDCGCGLSMDRDHNAAVNILKRAGQVRWGISSPVGGLPQEAAGF

SEQ ID NO: 13482 - protein, 364 aa, unknown
  TnpB Polypeptide
MVNQKLDTILTFKVTISNEFSYILDDLYSKSKICINKMLEDRTRSSSKYYKEIPCILSKFLISKYQKNKKLKFVKNLVLPICGDKGKQIKIVKNGIRIPALFKKSILPIIFPKPIIGFIRQVEFFKRNKKWFMSYSYNTPILLQEDTQNFIGIDRNSVGNVATIADIKTGKVKKIGPNTASITKNFRNRRAKLQKKNTKCALIKIRRRQSNRIKDINHKVSRTIVDYAKLHCSALVLENLGKISKKGKAKRYIQRSQWSFYQLETFIKYKAALLGVPIFYVNPAYTSQICSRCGKINIPNGKQYKCFCGHFDHRDANAAFNISANAWVLYKQTIGDRVPIVGYIDVPPTQRVEKAIQLESLGTA

SEQ ID NO: 13483 - protein, 277 aa, unknown
  TnpB Polypeptide
MLRNTPAGYKKEYPWLKEVDSLALANAQLHLESAFRKFFREPSCGFPRYKSRKHSRNSYTTNAVNGNILLQDTHLKLPKMSAIKIKLHRQIPSDWQLKSVTISREPSGKYFASLLFCCENQTVEKRAAERFLGIDFAMQGMCVFSTGERAGYPMFYRKAEKKLAREQRKLSHCEKGSRNYQKQKKKVALYHEKIKNQRKDFQHKLSRELAERYDAVCVEDLNLQGMSGGLHLGKGVQDNGYGQFLSMLGYKLEERGKHLIKVDRLFCIEQDLQCMWT

SEQ ID NO: 13484 - protein, 530 aa, unknown
  TnpB Polypeptide
MAGKKAEKGDVRYLGVHARLVFPDPRDEGAVLDLMRRFSSATRYAYQRLLEGKDRKELKRADGPLCTLFRLNTRYADGAMDKAKAVLDSALELGNDPRKVVFGGRGLFEQLKRKHLSGKDRERLRQEWKEKRQGLLYTRGDKSKKGGNPHFKLQVEGGALWLLVQLGAEEGKEEGERRKFARALVKTSHPQLKALLKRVYAGLPYNAELTLKEGKVYAHLSWSEALPPPVHTKENGVLGMDVNSDPYHLALAVVSPDGNLKRHLTLPLEEVDRAPNKGAKELLLWKVAHQVVATAEEHKVALATERLKHLRKSKRGDGTGRRFRRKEHRFAYRVLLEKIHSLAQKRGVEVVEVDPQDTSTIGMLKYAPQLHLSKDVAAALVIGRRALGFAEKLPKGYEALLRNKSFFAYTEGFYQNRFQELKKLKEVEGNPYLKRGLSREMGKACRALSLLSAFQGSPGSRRKVTDGRNFPGANLWRVLREALFLPLLGREVPRDLSPLKPILLGSWERWQKRLGPHPGGGSARRNVRFG

SEQ ID NO: 13485 - protein, 391 aa, Crenarchaeota sp.
VLAFRAVAQTHQASNQLLSLLDDFRRIVNVCIEIGIEKNVSSLEALSLATYHRLSKNVLGYYRLGAISTASRILKNYRRAKRKNSRTRFPHARRLMLTTCYGFKIQDEFLRLPVEPYRYTYIRLNSHTLKVLSGMKARSVTLTRYSFTISYAKEVVQANPEGYIGIDRNLDNVTIASTDQAVRKFDLSRATVIKSTYRLVKSRCRRNDSRIRQVVYDKYGERQRNRIQPILHNVSKKIVEEATTRRYGIVMERLSHMRSLYRRGNWRSKSYRAKMNSWSYGELRRQIEYKARWEGVRVVYVPAKDTTKRCSICGYKTLESAKRQLWCPRCRTIMDRDENAARNIAARGLRFGPNGPPVEAMVEEREPAEGTLILKVDGGKSTQQPAVDRTT

SEQ ID NO: 13486 - protein, 485 aa, Actinobacteria sp.
VKKFQPQPGFVVQAYRFALDPNASQEAALRSHCGAARAAHNWAVAWVTASWWQRRAEETYGIAEAELTEWRPWSLPSLRKAFNAAKHADPRFSGWWEENSKEAYSTGLANASAAFDNYAKSRQGKRRGKRVGAPRFKSKRKERLACRFTTGIIRVDADGRHVTLPRLGTLRTHEPTGGLLARVQAGTARILSATVRHERGRWFASFQVEVKRELVRVARPDVTAGIDLGVKNLAVVADSTGEIRTVANPRHYDRACKQLRRASRTVSRRQGPDRRTGQKASKRWEKANAARNKVHHRVASLREDALHKLTTSVAAEYGTIVVEDLNVAGMLRNRRLARRIADAGFGEIRRQLTYKTRQRHATRTVVADRWYPSSKTCSGCGAVKAKLPLHVRTYECDTCGLVIDRDDNAALNLAALAAACSTGTGVAGDRDTPKRVPKPRGADQKPRVPRARRKASAGRAGGATLSQQRREEARDRTQTEALTLW

SEQ ID NO: 13487 - protein, 343 aa, unknown
  TnpB Polypeptide
MRLVERHLIKSTKQSYKELDKLSFLSKNLYNSATYICRQAFFSGKVVPSFNQLYHQLKNGIDYKSLPAKVSQLVIKQVARSFKSFFAAMAAYQQDKSKFLGKPRLPNYKHKINGRNLICYNYQAISKKLLKQGYINPSLTNIKIKTKQASICEVRIIPKNGCYLVEVVYKRDCINNLDSVSDKRVAGIDIGISNLATVTSNLDDFRPFIVCGKAIKSTNQYFNKYKATLQSLLPPGKYKSRRIDRLTIKRNNKVDYYLHTASRYIVNRLVTHQITDLIIGKNDNWKQSVNLGAKTNQSFTSIPHAKFIEQLIYKCKLVGIKVHTVKQRGLGGFPHERLLNPKG

SEQ ID NO: 13488 - protein, 355 aa, unknown
  TnpB Polypeptide
VIRSVPVSLNLATGSKKRALQSLIGEVRSSINLFCKSLWRTPGKLDSETLNRFSGGSLSYRHRSNALKVALETISTTKNNARALGVKPAIPVSKNAVTFSSLVCKIEPGKHSFDYVIKISGLKSGEPIVIPFKSHKRLNYWLSKPGASFKQGAIIDLSKNRAILWVNIPQEEGTQSGQTLGVDIGKLKMLATSAGEFLGTEFKKVCDNVRRKKPGSKSNKRSQATRECYINKTCKQLPWPLIGTLKIENLKNLKRGKKRGRGKSFRKAMAPWTYRKVSTRLTQLAQENRVCLELINPKNTSRTCPQCGLVAKENRVGEMFKCVCCNYTADADYVGALNISLAPPENSRQRMVAGS

SEQ ID NO: 13489 - protein, 290 aa, unknown
  TnpB Polypeptide
  misc_feature (181)..(272): Xaa can be any naturally occurring amino acid
MATRRQTFRLYPSKAQEKALLEARRLHCYLYNACVSHRETEYKLHRRTVTYLEQQNLLPEFKQVWVEFAQLNSQTLQATVKRVDWAYQRFFQGLSRKPRFKSIRRYSGWTYPAKSGWKVNSTGKHGTVTLNDLGITLKMRGQAKDWGVPTTLTIVYKPSKRQWFASFTVEVAIPEPKFGSXXXXXXXXXXXXXXXXXXXXXXXXXXXXXXXXXXXXXXXXXXXXXXXXXXXXXXXXXXXXXXXXXXXXXXXXXXXXXXXXXXXXXXXXXXXXRDWQHKVTQRLAVVMTSG

SEQ ID NO: 13490 - protein, 492 aa, unknown
  TnpB Polypeptide
MAELVSEVRDISAYATYVVRNDDALGGELAHVAAAHPTVAGSRAGVTMPDFLASGRTGKSRKERLVRYNVVTAYRSYQERVKAANDDSDKYVSQGWKRTASTTAPAYGEDYVNLGAVDKCYADIENNPFLDGEIVLKMVIQGRWYRLIFNFDNKRFTEGRVTLPLIKVQGGQPVFIFTVVTDNPVVQFSGDYTIGVDVGINDYATVVVRDVKTGRIVHETTLSQRVHSLWNSVRASERQVRALRRKAATLLRDRQARMSALDEVKFHREAASRKKRELAILAAQEIADLSHLWGNAVVAVEYLGWIRNTMQNGRWNRGALIQWLTHYAQQNGGWVVAVNSSNTSQQCHVCGEPVTHPTHKLSVCPEHGVMDRDINAAANIAARAVPRVAKARATRAKNRKLRPQQTLKTPPARASLKYPGRDRTKGKPTPKRKNHRRTAREVILPVRPARAQAYSLEASVLADRGACVALGTNEAALKRGNMAYKCRLCDLI

SEQ ID NO: 13491 - protein, 416 aa, unknown
  TnpB Polypeptide
VGEEVEGRLFQFIDLVTILSHVHKIYVSIRGMSTTKSKTAQRRESIVNAIPQRTLVLSLDITPEQYEIFDGLADSYNRMWGSLVSWCNNNHSINRTRMQKDNYARLRAEYPELPSQFVCIAMRDAAGAVRSWNSNHPKRQWNLKASRKKKTINYDLRVMSLRGNLLSLSATRGEKRQRILLPDIPDWFDRRYPERSLNAAKLVLNPDGHSASIMLIYRLPQSTLVEQGDVLGVDLGQHSLATDSRGGEIPYSHMQGVKRRYAHNRKTLQEKGTRSAHRRLKAMRHREERFIRDTNHRASKQLANTPNVSVIAFEDLTYIRRQARKGTKTGRARRNMLNQWPFSQLQEFTAYKAARNGIRTVTVNPAYTSQKCNHCGYVDARNRDRARFDCLRCGHSDNADHNAALNIRDRAIQNLG

SEQ ID NO: 13492 - protein, 396 aa, unknown
  TnpB Polypeptide
MRFRLQPTPGQEAVLLEPCSHARFVRNLAIEQHEHWRPGRATAPGYVEQSRQLTDARKAFGWLAAGSQTVQQQALRDFAQAMANFFARTRRRPTWRKAGVDEGFRIVGQRGNHWDVRRLSRKTGQVRIPKVGWARFRWSRHVPGEAKSFRVRRDRAGRWHVCFAVIPPPIHGPGTGEVVGVDRGVAVSAALSTGELSSVPGLRESEARRLLRLQRRLARAKRGSNRRNRIKTAIGRIRARQTDRRKDWVEQISTRLARRFDVIRVEDLKIKSMVRSARGTIAAPGRNVRAKAGLNRSIHAAGWGRSVTRLEHKAPGRVEKIDPASTSQICHACGHRAAENSESQAVFRCRACGHADHVDVNAAKNIAVGRTVTARGALQPLGGAANREPQPVLSSA

SEQ ID NO: 13493 - protein, 423 aa, unknown
  TnpB Polypeptide
MKLTKTLKFKLESLTEHEKYILSQTQSQFRKSVNFYLHQVGRKSSTNVTDYKDEHERARDIFQLNSALIQQSKRFAINQYKSYKNNKYNKKFPHFTSFVDVRYDNRTITFKKENEESSELEISLATTQTRVDATLQGGEYCFEEFQAGDFQDARLFRQEGEYYLNIHVQREPEIQDAKESEFYIGVDLGVNNLATIAVQNRKGEVVKTKFFDGSYVNEKKRRFNAKRREYMRKGLWSKLQETRGKEKRFIKDVNHKISKYIKDLCEKYENSTVVMENLDDIRENMNATKSLNRKLHNWSFAQLQKFIIYKTHEAGSSYRRVPPFNTSQVCGSCFNSISRNRENKVVGTCETCKKEVLNVDLNAAVNIIQRLWYYITRDAYEDTASQTELREFSSDQGSYDGKVDTAAVDSKNQLVSSLSLSLP

SEQ ID NO: 13494 - protein, 397 aa, unknown
  TnpB Polypeptide
MKTGYSIRTWRMRLFCPEPLWLDKTEEYFKNVVEFYYGLLREHEELFSSSLFDIQRSLELLTVTGRDGRQPQHPLPMGKVPVYLRRAAINKAAAAVKSTLASTHPESFPDAIESSVTFFKGMYSDLTDQTINLKLWNGQKWVWTECQLKGRPFPMECQLMSPTLVKDGRRYMLNIPVKQENCDARTAKERMTEGTRICSIRFTNTDVFVVCCIMDEQGKQLAVHWCRGGDEYRHRCKGFTERIQKSRQNTDHDNCPQPNRKYYMHLKNLSDHYAHQISREILNFSKEHQAGILVLPAYDSDFSKMAMLKSGNFSPLHLSTRIRNNLQYKAWADGILVLEVRTDGLKDKCAICGAKVRRKGSEFLCENGHQGNRFLNDARNLGRKCQESFRRNKSVNK

SEQ ID NO: 13495 - protein, 366 aa, unknown
  TnpB Polypeptide
LDVFLMQLIAGIRLLPNREQDAALHDAMATINAACALISAEAWRTRTFARFDLHHLMYYRVRESLSLGASATQGAIAKVANAYKLDRARRRRFRPDGAVTYTERMLSFDLPNRTVSIWTKQGRMTIPFACDEQAVERLSGKRGEAKLIWRSGKWLLHIPCEVACDAVRDPAGFLGVDLGLVNIAADSDGEEYSGSLVLGLRRRHRRLRRKLQRKGTRSAKRLLRKRSRKEGRFARDVNHVISKRIVAKAKDTGRGIALENLEGIRERVTARRSQRATLHSWSFHQLRGFIEYKAMRSGVAVVTVDPRNTSRTCPECEHVDALNRKERGAFLCVGCGFAGPADTIAAINIGRRAAFDRPNVPAGGSS

SEQ ID NO: 13496 - protein, 382 aa, unknown
  TnpB Polypeptide
MRTYKYQMREHPQNMRLGNMLDDLGDVHNHFLALEKRYYRIYGKYAGRYRLQPHLTKLLQCTKRHWAWIPRDTLDAVIIRLHLAWEKFFDFLKKGKRGRRVGPPKFKKRGKYRSAKFPYAYKLENGRIRISFRVWNPSSQKFNTYQKIYFSFHQHRQWKGDVRYIQIGRDAVGTYWLYVITDNTSHKVLSATGESVGIDFGMETYLTLNTGEKIQHPQPLKSKLNELRKLTKAVSRKVKGSNNWWRAVRELARLYRKIANQRRDWHYKRATDLCRRFDTIVTETLNLDAMKRLWGRKVSDLAFYQFVEILKFKCLKHNREFVQVGQWTPTTKPCSDCGHHNENLSLNDRQWTCPACGSHHDRDINAAINILRAALGPSVEQM

SEQ ID NO: 13497 - protein, 273 aa, unknown
  TnpB Polypeptide
VVVFQSAGHAAAVAQGVCRVFRRVKAGQTPGYPRFKGTARFDSVEWPKDGDGARWRPDTRRVYLQGIGQVKVRVPRAVQGRVKTIQIKRQGRYWMLVLSCDEVPASPLPATGRVAKCETVAARHRKIANQRKDFHHKTARHLVQSYDVVVVEDLAIANMVRRAKPVGDPDNPGQFLANGARAKSGLNRRISDAGWGRFVSILRAKAEDAGRTLIEVDPRHTSDGCEICGHAARENRVTQAVFTCQRCGHSAHADEHAARNILRAGLAHHAHAA

SEQ ID NO: 13498 - protein, 625 aa, unknown
  TnpB Polypeptide
MTNDQFLNIIEKRLANGLSILNIGDDKYKERLTLALEIHRLVPHCPLVRLRYVYRLVHLKLVGGVPDKARTHAFIQFYELLEVAMGDHLWPDPKIPNNKHDDIRMKMQEANAFITAALNGEKLTDTQHYIVVSAATDEIKESIKAADVERKRKEIEAKREAVRQANEQRSADRKEAVKIKNGGHKPAAKKKMIVGVPPEIDLEPKPFCVSHKTRLMLNDRQKSYIDQCFGIARFTYNWCLKRWEELRAQGEKPFASEISMQFNEIAKEDFPFTYSVTHFAKATGQKAFEAAVNGFFNGKGFPKRKHRGLGLGSLKYVVGTRKQPILMDFNPDIPDSKPSAKRQYLLIPTFGYVKMAEKLRFKGQASSVTIRREADGHYYASFNVHISQKEWMRTHKITGFTYNRPTGIDLGVESLATLSNGIKIESRPEDEKLNKRKKELQKAISHQRGCHPDRTTKKQRNNQWSLAKINAKIRHQREDYINKVTTALSSFYSNICIEDLNVNNMIQDGRAPGNIKDATFYRFRLLMEQKMTLISHHLHIAEKFLPTTRTCSVCGCIGEKIPLEVRTFHCKECGTTIDRDVNAAINLAKLIGMDEPNPNPADKGAITAVLQANGIMVHQAEGISR

SEQ ID NO: 13499 - protein, 362 aa, Tolypothrix sp.
MLLSIKTKLKLSKSQETVMSKHAGIARFTYNWGLATWKELYSYGLKPNKYILKKFFNNHVKPEFTWIKEKGICQKITQYAFDNLGDAFSNFFSGQGGYPNFKKKGHHDSFTIDAGGKPIPVGGRSIKLPTIGWVKTYEGLPHTTCKSITISRTADSWFIAFAYEQNHEPTVKQHDVVGVDLGVNELATLSTGVVFPNPKHYKTHLDKLRRLSRNFARKSKGSNNRQSCKIQLAKHHAKVANLRNNTIHQITTYLCKNHAYIVVEDLDISGMLANHKLAQVIADCGFHEFKRQLEYKAKKFGCEIIIASRWFPSSKTCSNCGHIQDMPLKERTYNCSSCGYSIDRDLNAAINLSQCVARVPPR

SEQ ID NO: 13500 - protein, 365 aa, unknown
  TnpB Polypeptide
VEKSYKYRIYPNEKQKEIIAKTFGCCRFVYNKYLAEKIELYKTEKKNITYVQCSKAMTKLKAELEWLTEVDSTALQSSLKDLDNAYKKFFKEHAGFPNFKSKKTHKYSYNSKYRNGTIKYLGGYIQLPKLGLVKTKNKLVPQGRIVNATVSQEPSGKYYVSLCCVDVDIQPLPITNNVVGIDLGLKEFCITSDGEVVNNPKYLKNSLNKLAKLQKELSRKSKDGSNRNKARIKVARLHEKISNQRKDFLQKLSTVIIRENDVICLEDLQIKNMVKNHKLAQAINDVSWSEFVRELEYKARWYGRMVIKVDKFFPSSQTCSVCGYKNTETKDLKVREWDCPVCHTHHDRDVNAAINILNEGLKQLA

SEQ ID NO: 13501 - protein, 472 aa, Actinomadura sp.
MARTVKRAFKHRFHPTDEQAAELARTFGCARLVYNRALEERTRAWYTEQRRMTYVDTSAALTAWKKTDELAFLNEVSSVPLQQALRHLQAAFAAFFDKRAKYPRFKARKKSKASAEYTRSAFKWRDGELTLAKMDGPLAIVWSRPLPEGAEPSTVTVSRDAAGRWFVSILCEDTITRLDPSDKAIGLDAGVTSLVTLSTGEKVANPRHERRDRERLARAQKNLARKQKGSANREKARIKVARVHARITDRRRDFLHKLSTRLVHENQVVVIEDLNVRNMVKNHSLARAISDAAWRELRAMLEYKADWYGRELVVIDRWFPSSKTCSQCGTIAEKMPLGVREWACGGCGARHDRDVNAARNIVAAGLAVSACGAGVRPQRESSRTGRSATKQETHGATRGLPPPLDGGRRSTEHPAGDGDLTGLDPGAPLVRVDRLVFVVRQPVGSSSNGITSTVGPSSGARSRVSPCQRNCR

SEQ ID NO: 13502 - protein, 402 aa, Streptomyces sp.
MIRAHKFLLRPTVRQEQALREILRDHCALYNGALQERRDAYRHTSKTTVRYGDQSAQLREIRAFDPERQGRWSCSSQQATLRRLDKAFQAFFRRAKAGQTPGYPRFKGVGHFDTVTFPRDGDGCRWDSTPQDPHTRVRLQGVGHVRVHQHRTVRGQIKTISVKREASRWYVVLSCDEVPTQPLPATGAVVGIDMGVTHFLTTSDGKHVPNPRFLEAAAEELAEAQRQLATFPKRTKRRTKAHRAAARKVAQIHAKIRRQRLDHAHKAALTLVRDHDTIAHERLNTAGMTRSPKPKPDPDRQNVFLPNQRAAKAGLNRSILDAGWGVFLAILANKAESAGRTVIAVDPRNTSRTCPSCGHVAKENRTTQAKFQCTACGMTANADHVGALNVLDRAGLALCDAA

SEQ ID NO: 13503 - protein, 663 aa, Streptomyces sp.
VELGAGEVQQIAAACARGLRGVDTVTGEQLSEVALVERAGWLTGLVEALAAGVVREHWNQADLARLASGVDQSGAGLPSQSWMALRRLGWAVAVPVGVYVPDRVVRIAQEQAGRVLRSAWWRAEITAALLATWPADPARRGEAEWQALRAALPDGGMVASSVLLARTRQITDFHTRHHRMPAGLTECEPPPGGGSQIVLAAVDKQLATLERCPENPFRHGVLTVRLPTRPDPASRADWHPVRIRFRLPPHVPAHAVLCAPTLRVRQGRLLLDVPYALAVPKPERAGHQTAVAFDWGLNTLLTGGTLRLTGEIQPRVLTDGHPLSFRAAGVLAKSDRLRLIGEHIGARIDRLRILIASRQERGMRPSPWLAGKLAVLESERERVARRRTRLNAALARAAARFMVDHAIAAGASVIYLEDLRDMEACGKGRSLNTRLSQTVRGAIVTHVRHIAAALGIAVVIVPPRETSKCCPRCLTAFRHHKAPNNRAAGWAWATCPNEACGYSTGRDNAAWQRIGARGLTHQHKTSLDRTRETFVIRTVVEALDQASRVQHQTRDRTKSGPTNRRPVPGKRRRVPAPPGAPPGGKRPAGRNPTHPTHSSQERTRQQGPTTIGTPDRPHRPDGARLGAGFHRHAHTTPVRRRPWPSHPPKRSRTPGITQETQAD

SEQ ID NO: 13504 - protein, 364 aa, unknown
  TnpB Polypeptide
MNVVYRFRIYPNKIQQELFAKTFGCVRFVYNRMLSEKKECYEKTGKNLKVTPAKYKAEFPWLKEVDSLALANAQMNLQTAYNNFFRSPKIGFPKFKSKKSNRKSYTTNCVNGNISVENGYIKLPKVGFVKLKQHRQVLFDYKLKSVTVIQTPSGKYYASILFEYENQVQEKEMRRFLGLDFSMHELYRDSNGNEPAYPKYYRNAEEKLAREQRRLSKMQKGSNNRSRQRIKVAKLHEKVSSQRKDFLHKLSRQTADAYDCVCIESLDMKAMSQMLNFGKSVSDNGWGMFTGFLKYKLEEQGKKLVKVDKFFASSQICSVCGYRNAETKNLAVREWDCPQCGTHHDRDVNAAVNIRNEGMRLVVA

SEQ ID NO: 13505 - protein, 667 aa, unknown
  TnpB Polypeptide
MEKAKEKPPEFFKSTKTSLKSVLKHPEINTKLLNDAVVKSNKIVIHTLQFLKLYLLDYYENHSHTLPVISKELINNSMKVVCGEKTEKRGKPPKKETVEMKDKLTIFYNHHYLPLTQNDPIDYAGLNTTLDYLKEDVITMYENNIQLHYVEYVERFVNVVWKKKMIVDKIRKLGKTQKEREIRVRNLCTELRKIKKDLLNVDGKPYQSSPHYHKWITEKKHHILPSRTKFEKNSVMYDLKCKTMEYFPCMIFMMKQVENDGESVNNVFPLRSEIAPKYIRLDTTTLVNLLLRKEHGSKGFFKTKGELKKNEDKIWKFFFRTERKMFHKTGFSFHHMVSTDGIGLSILFLREDLVGKKLPMMKKGISKELYIDELEDYSSLRDKTIVGIDPGKDDLVYCVDDASKDANVFRYSQDQRRKETKMKKYNNIILGMKTNKIEGKTIIEYETELSHFNRKSLQITKYKEYLQEKNRINHILFVFYRKELFRKLKFGKYINIKRNEQKMICNFRKMYGNPEDVVICIGDWEQRKQMKYKEPTLGKGVRTLFRKNNYKVYLVDEFRTSCKCSKCDGGVCEKFMVRKNPKPKPKKNQKKEIKYDEMRLVHGLLRCKSGCGSWNRDRNGSSNIYKIARNAINNIERPSYLCRETSNQSASTSAYNQTLCGYEKTQL

SEQ ID NO: 13506 - protein, 399 aa, unknown
  TnpB Polypeptide
MKSYKFKLFPTEEQKEKLELSLDICRRTYNHLLSELSNGFNKNELSNYLLDLKVCYPEMKQVYSKVLQVENDKLFSNLSGLSASKKNGNRIGRLRFKGKGWKKTFCYNQSGFKVLKGNKKNNQLHLAKIGDIKLILHRKIEGEIKQIIIKREVDNWYAIIQTDAVIKLECGNKEIGIDMSPSKFGVTSDGEIINMPKEIDISLQKLKKAHTNLSRKKKGSKNGLKAKKLLQKRYWRLNNQKDNFYHQTSYKLIKECKVIGIEDLSIKGMMMGCYNNKNFQKSGWYTFITKYLTYKAESANCQIWACDRFEPTTQRCSCCEKINPTKLELKDRIFNCPFCGLVLDRDVNASCNINKYCRQGTCLCGVDSSTLEKEQESVLKQEKISMNLIHREAHSDIWR

SEQ ID NO: 13507 - protein, 437 aa, Lachnospiraceae sp.
MILNIVYFPWLPEGGVQTFDFSFKEPPLMGTICQRVEKHMIRQRHKYYKMLHELCHLSKNLYNHANYEIRQAFIKEGKWLRYEEIDRILKADKEYPDYAAMPTAQSAQQTLRILDRNWKSWFASLRDWREHKDKYRGKPRMPGYLKKDGAFQLTLTSQNCRLKKGTLCFPRVFGGFTVTPAFTKREDFRSFQQARLIPHKNRIVIELVYNIEVPDKKEDKGRCLGIDIGVNNLAACCNNAGLPAFAINGRPLKSINQYYNKKISHYREVCKRMNKADYSRRMDTLTEKRNRKIEDYMHKASRRVVDFCSENDISRIVIGRNDGWKQRSALSHKQNQHFVQIPFTRFIEMIRYKAEEKGIAVILTEESYTSGTSFIDNEEPVREYYNRARRVCRGMFISENGTKINADLNGAYQIMKKAFPVQWDRGCALHPAVVNVV

SEQ ID NO: 13508 - protein, 434 aa, Kribbella sp.
MARFKIPDGWVVQAEADLTPVLGWSLPALRRVWNARKDSAAPWWKENSKEAYNSGLDSLARSLESWWKSRGGRRAGRPVGFPRFHTKRARASVRFTTGPIRLEPDRHHVTLPRLGRIRTHESTRKLALRIENATARVLSATVAKDSDGRWHVSFQTLVQRTTTRPAHAGIRHAVVGVDVGVKDLLVVATPDGAEVERVPAPRSLARAQVRRALQRKASRQQAPYDPQSKHKRLPSKRWRRTQALIGKAHARAASIRRDTVQKATTRLAQQHLTITVETLNVSGMRTAGGARKRGLNRALADAALAQVRRMLAYKTIWYGSRLVEADRWYPSSKTCSGCGSRKPRLLLAERSYVCEHCGLVIDRDLNAAINLARLGETHTVSERSPAGSGPVAGRGAMQETESAPAGDAAGRETSTPPQHPLDQTGTASPQGEAA

SEQ ID NO: 13509 - protein, 379 aa, unknown
  TnpB Polypeptide
MQITLPLDGDLVETIRAYNQAVQVCINYGWEQHTCNKNKIHAATYYPLREQFPALQSSLVQCARDQASDILKRENFKHSKPAKKPLSAIRCNLRTFTPFLESREISISTLAGRKRYALKIPSYFEQYLAGQVTALFLGVSRQGRLIACLSVELPIVPVKEVETFVGVDRGIARVAVLSNNLFVASKHINAVKWQYQQLRRSLQAKGTRRAKRKLKELSGRERRFMACENRRIAKVIAGQADCIVIENLKGIKTNSKKERKISKKIRRRFGNWAYFQLEQFLIQSAEQSGQTILYVSPKWTSQRCSRCGSIAKGNRKSQSEFSCKACGFQLNADLNAARNLSELGSAGHGRVLVNHPNVAVVPRGVTVKDLSKLVASPLL

SEQ ID NO: 13510 - protein, 427 aa, Escherichia sp.
MHQENTMLPRRISVSLFIDQSIIWPVKRLQAFKFQLRPGGQQEREMRRFAGACRFVFNRALALQNENHEAGNKYIPYGKMASWLVEWKNATETQWLKDSPSQPLQQSLKGLERAYKNFFQKRAAFPRFKKRGQNDAFRYPQGVKLDQENSRIFLPKLGWMRYRNSRHVTGVVKNVTVSQSCGKWYISIQTESEVSTPVHPSASMVGLDAGVAKLATLSDGTVFEPVNSFQKNQKTPARLQRQLSRKVKFSNNWQKQKRKIQRLHSCIANIRRDYLHKVTTTVSKNHAMIVIEDLKVSNMSKSAAGTVSQPGRNVRAKSGLNRSILDQGWYEMRRQLEYKQLWSGGQVLAVPPAYTSQRCACCGHTAKENRLSQSKFRCQVCGYTANADVNGARNILAAGHAVLACGGMVQSGRPLKQEPTEMIQATA

SEQ ID NO: 13511 - protein, 420 aa, unknown
  TnpB Polypeptide
LKTQFIVVSYPVRGEQPVVVEALKVRVVPEGSHDRLLEFLKLYRDAVQLVVNELWDLDGKLSRKKLHDMFYGKLRVFGFRAHHVSEIYKRAREVVEATKKNKGSKPVLKKLTARISTYDYKANFNAKTLRLAVLNEQWVELKLKWYNYLNKYLDGSWRLGELQVSCRNGKIVVYLTFNKEVQLKEPKAIMGVDVNFSNATYTIVDSDGNLVSMGVIPFRGLGRALHLKKLAEKLQERYPRSWRFLKRVRRTRARWLRRARNILTDSSHYITKRLVEIAKEYSAVIAFEDLEKLKERANGGKLFWELQLWCYRRIQSYIHYKAVAEGIKVVYVDPRGTSKTSPNGKPLKFINYRFAKLGDTVTTRDVVASWNLALRGLKQMRGSRVTWSPDSPRGEAMTPRAKRGNPGAERYLRVFTVNYK

SEQ ID NO: 13512 - protein, 424 aa, unknown
  TnpB Polypeptide
VNVTRYINLLTNIKYRGGYHMRLSRQVRLYPNKTMKRVLDSLCDYRRYCWNQAVACWNEQYESRSIGLPEDLLAKLRNKSELTTEEQELANQYPKPSNYNIRNELVANKEDWQYAFSSRVLQLAVKDVATAWELFFNNRNTAGRPTFKTRKEPKQGFKTDSARIQNGRLLLDKPIGYQGEWQTIRFKGLNVSDRKINLCAVTRVDGRYTATFTFEVEPTPLPHTGRKTAVDANVDHFDTTEGRTTLKPEVLNPLYERVRHYQRILARKRRRNPRATQSKGYQVTRTKLQRTYERIANIQKDLLHKFTTDLYRQFDTVVIEDLDVKRMQMSKRAKNLHRSMFGQFRQMMDYKSQKFGKTLIVADRYYPSTQRCSACGFVKTGDDKITLSGNLRHGTPHNKYICYQCGYKGDRDHNAVLNLLTLTE

SEQ ID NO: 13513 - protein, 411 aa, unknown
  TnpB Polypeptide
MIVQQVEKHVINKNHPYYAMFCEFTHQSKNLYNHANYLVRKEFVDTGKWLRYYELCKLLRQDSDFPDYTNMPTAQSAQQTLRLLEANWKSFFKSIKDWSKNKDKYSGRPKLPKYKPKDGQMVLVTTNQQVKQKGDLLTFPKAFRGFTIKPRCSTLDNFEKLNQVRIVPQNQIFCVEIVYSITIDDTSLQDNGRIMSIDLGLDNLATIVTNTGLKPIIVNGKGLKSHNQYYNKKMAHYQCIAKQMNGKNYTNRLHQLTRKRNFKIEDALHKISRFIVDTAVSNQITTVVIGNNQGWKQSISLGRKTNQSFVTIPHQKLIEKICYKAKLHGIRVIITEESYTSGTSFLDGELPTKDVYNKARRIHRGLFRSNQGVFINADVNAGYQIMKKVFPNEFSDGIEGAVFHPVRVNIV

SEQ ID NO: 13514 - protein, 395 aa, Acidobacteriaceae sp.
MQRLQAFKYELIPTGEQLRDMRRFAGSCRFVFNKALALQTANYEAGNKFIRYVGMANLLPAWKSEFPWLKESPSQALQHSLKNLDRAFTNFFEKRTYYPHFKKRGYGDSVRFPQGFKLDQTNDRVFLPKLGWVRYRNSREVLGVVKNVTVSNRSGKWFVSIQTERKVEQPVAHGDAVGIDMGVVRFATLSDGTVYPSINIFKRYAADLRKAQQAMSRKKKFSNNWKKARSRVQKLHVRIANARRDYLHKTSTTISNNHAMVVVEDLQVSSMSRSAAGSVEQPGRNIRAKSGLNRSILDQGWAEFRRQLEYKMLWVGGLLLAVPPQNTSSTCPRCGHVSKENRKSQAVFACVECGFNQNADLVGAINVLRAGHARLACEVNGNVGRQQQEPTERAA

SEQ ID NO: 13515 - protein, 463 aa, Cupriavidus sp.
MTIVTRTLYATSSCVSTLRAVCRATAFVRADLWRRYGALGNVGKSAADIRKEVTAGGWYASLAVDGTIRAETTKDAVNDILTYKAAACAKVRQAIAKRTSEEAERKRLYTLLKRDKWLEDKYLHRMMRKYFRHGVSSCDNQFIVRSDKHQSRVRDGHLVVTIHIARQYGPPIELTTNSNGKNVDLTGCNLRVIVKGDAVEIHYATAKAHGRPCGSGEIGVDKGYTEAFADSDGEHHGQTFGAVLSAFSDQVSKTGKARNRLHALEKANRKAGRIAKAERIRKCNLGRVKLQARRDRTQQRLRTIAYQCAHAIVDKAAVVGSEDLTSPIKGRSQWRHYNRRMSAWAKGVLAQALDEVCTQRGATHVVVNAAYTSQMDSFTGLLEGKREGDKFYRANGDVLQADTNAARNVRSRIHDREIAQYMPHLQVKQVLLARSSGATERQAASVGRRKPRQRSADKSNAQL

SEQ ID NO: 13516 - protein, 397 aa, unknown
  TnpB Polypeptide
VISVKIQRAHKIRLCPNNKQAGALARACGCARFAFNWGLAEWKRQYAAGQKPNSNKLKMQFNAIKRQDFPFVLEVTKCACEQSFADLGNAFRGFFRNLKVGRKPGYPRFKRKGIRDSFYIANDKLRLEGKFVRIPKLGLVRLREPLRFEGKILSAVVSRVADMWFISVQVEQEVVELKACGPVLGVDVGVKALAVVSDGRTFENPKALRRAEIRLRRLQKSVSRKKKGSQNRKKAILKLQRQHFRVVCVRQDALHKATTAITTGCSVLVTEDLHVAGMLKNRRLSKCLSDASLAEFQRQLKYKSGWQGISLVKADRFYPSSKTCSGCGSVKAELSLSTRTYVCESCGLKLGRDLNAAINLRNLAVGSTVSACRLGSSGSSFEKNETTDWAGILHKSA

SEQ ID NO: 13517 - protein, 390 aa, unknown
  TnpB Polypeptide
VAETAAASTPTVRTYRFKVRGECYPWLNAAAIEVNQVWNWANETSYKAARPFFGPPSFLSGFDLCNLSSGATEHFEHIGADTIQKVCCEFAIRRRQFQKAKLRWRVSRGSRRSLGWIPFKAASLRRNGHSLRFCGKSFRVFERPRFVEIKRFRDGSFSQDSVGDWWLNLPVEAQAETNPAPKPEVGVDLGLRDTAVTSDGERLEAGRSFRSLEPQISEAQRRGHKRKAKRLHRTAARRRADALHKFSRRLIDRYQFIVVGNVRSLPLIKTRLAKAVLDTGWGILRTQLQYKGQQAGRRVLVVDEWNTSRACSACRALTGPAGVNGLRVRLWVCAACGIAQDRDVNAAKNILAAGRCAPSVSGNEPSRRSARRSRAPRPREAGNTRSDAAA

SEQ ID NO: 13518 - protein, 399 aa, unknown
  TnpB Polypeptide
MYIAKKLKWRKTIMTTYTLELKLNTKKYSDQRYLENYFREVAKISNTVRRFAIRQITMLKRDKTYVDLLKQYVALEKGPEKEALSKQLSVIVKSYGLTQYDLQKSATKLRNHLKYVHSAVYQKISDSVWKGVEKVLYSTGKQIHYKKWDEFLSFEGKKNTTGIIYKDGKVYINASPKRQNRGLILEVILPKNQNSDHWYYETSALNDRTKYCRIVRKKFSTGWRYYVQLVQEGTPPLRHAVGIGRIGIDIGTSTVAAVSDTKCHLTELGEGIEVQDKKIRKMQRKLERSRRASNPDNYNEDGTIKKGKKTWNYSNRYKKIRNELSAMQRKRTDTLRQWQEAYADLLLEEGNEVYVEDMNSKDYRNGPKRRNRIRKGNTNERNDSENPSEHELRHSFLLY

SEQ ID NO: 13519 - protein, 330 aa, Escherichia sp.
MHQENTMLPRRISVSLFIDQSIIWPVKRLQAFKFQLRPGGQQEREMRRFAGACRFVFNRALALQNENHEAGNKYIPYGKMASWLVEWKNATETQWLKDSPSQPLQQSLKGLERAYKNIFQKRAAFPRFKKRGQNDAFRYPQGVKLDQENSRIFLPKLGWMRYRNSRQVTGVVKNVTVSQSCGKWYISIQTESEVSTPVHPSASMVGLDAGVAKLATLSDGTVFEPVNSFQKNQKTPARLQRQLSRRVKFSNNWQKQKRKIQRLHSCIANIRRDYLHKVTTTVSKNHAMIVIEDLKVSNMSKSAAGYGQPAGAQCPGKIRFKPFDTGSGLV

SEQ ID NO: 13520 - protein, 425 aa, Atopobium sp.
MIEAVKVALDPTPRQARMLLSHAGAARFAYNAGLAHVKGQLEAKERPDLSHYALRRWWNASKDVLAPWWAENSKEAYSYGLECLSRALRSFLDSKRGKRKGKAVGFPKFKSKASSTPKFAYTTGSFGLIDGDPKALRLPRIGRVHCMEDVARRVGGAHVTRMTVSCHAGRWFASLTVERADVTSSQPKGPAVGVDLGVSHLATLSDGTVVENPKHYQKSLRRLRKAQRGLSRRQKGSGRRARARHRVQRIQARVASQRRDSLEKLTTHLARSYSEISIEDLNVAGMVASHNLAQAVEDASFGEFRRELEYKCVRTGTTIHVIDRWYPSSKTCSGCGAVKAKLPLSVRTYRCEACGLVIDRDLNAAINIMVAGSAPETLNARGGDVRPEDPMVPRQTPAKREPGGRTSAARPGAGGGNPAMQAGTN

SEQ ID NO: 13521 - protein, 388 aa, Paenibacillus sp.
MNQRFSGLLRTYVLCYEKSPRRDEVRMIVHQAYKYRIYPNADQQQLIRRMFGCCRFVFNHFLAKWNSTYSETGKGLSYHSCATALPALKTEYEWLKEVDSIALQSSVRHVADSFGRFFGKQTDAPRFKSRKHPVQSYTTRSTNGNIAMEGSKLKLPKLGWMRFAHSRKLEGRILSATVRQQASGKFFVSLVAEVEKLPLPTIELHIGMDLGLTEYAVCSNGERIANPRVYRKHEEKLARANRRMARRTPGGANHKKAKRQVARIHEHIANTRHDFLHKLTTKLIRENQTISIEHLSVVNMIRNPKLSKSIADASWGEFVRQLTYKASWYGRTLRVADRFEPTSHHCHVCGTVHPEVKNLSIREWTCSTCGTAHDRDENAAHNIKSAAI

SEQ ID NO: 13522 - protein, 410 aa, unknown
  TnpB Polypeptide
MRIQRAFKTELDLNNVQRTKCAQHAGAARYAYNWGLARKIEIYRAKEKTPTAIDLHREINRLKKSNLAWMYESSKCAPQEALRNLDKAFDNFFRRVQLKKQGKLKGKVGFPKFKSKKRGLGGFRLTGTIRVFEKHLQLPRLGKLKLKERGYLPTSEVKVLSATVSEQAGRWFVSLQVEMDIPDSSLNDKPIAGVDLGIKAMATVSDGTVMANPRSLSRNLRKLKRLQQSVSRKVKGSANRRNSVKQLARAHQRVANIRRDALHQATTTLAKTKSVIVLEDLNVSGMLKNHKLARVIADVGMGEFRRQLEYKAAWCGSRIVIAHRFFPSSKMCSRCQSIKEELSLSERVFKCAGCGFECDRDLNAALNLARLAGSSPDTKNACGESVRPDSLQATLVEARTELQSASCIFA

SEQ ID NO: 13523 - protein, 429 aa, Gammaproteobacteria sp.
MQLTHKIALKPTKEQADYFQKAAGTSRFVWNWALAKWKEQYAAGQKPSAMALKKSFNAIKYKEFPWLMEMHRDSHAQPFAYLGKAWRRFFEEIKARKPANEPRFKKKNRSRDSFYVANDKFSVNEKMIKLPKIGHVTMTETLRFHGKILGATVSRTADKWFIAIQVDVPQHQANLKRMGYEIVGVDFGIKSVATLSTGECITTHAPLKSALRRLKIRGRAVSRKIEASKKRPKGTFITPSNNRKKSSLKLARLHAHIAHLRADFTHKLTTRLCRENQVIVIEDLHVAGMLKNVKLARAINDVGFGTIRRQLEYKALRYNTQLMVADRWYPSSKLCSVCHWKNGTLTLNERSWHCPHCNTLHDRDVNAAHNLKRLATETALLVASYVGNGNTALERVFNVVEKVTPVRYECGHKDASGQEENREHFCSHF

SEQ ID NO: 13524 - protein, 386 aa, unknown
  TnpB Polypeptide
MKTFKYRLCPTKSQRTQLQHMLDTCRWTYNKTLEVRRDAWQEHGVSLSLYDTNRLMAQWRAGDEWVSSGHAQAQQNAQLRVDLAFQAFFRRVKAGQEPGYPRFRCKERYDSFTYPQEKGNWRFLDDGRLRLSKIGAVKIKLHRPIEGRAKTLTIRRGSVSNWYACFSCETQVKLLPVSTKMVGIDLGLTTFATLSNGEKIERQRWIKRDAKDSARLQRKKERLTKGSPERKKAVCALQHAYQRQTNRRNDFAHQESRRLVNRYGLIVFEDLDIQGMQENGNRTINKGIADVAWAKFMQYTQYKAAEAGRACLLVNPRGTTQECSGCGTVVPKDLSVRVHDCPHCGLKMDRDLNASLNILARGLSSLGRASGPKSSLIYRGEQSPNS

SEQ ID NO: 13525 - protein, 425 aa, Haloarcula sp.
MTQEQTLVKTLDFQLNIQSDNESLLYDATVESRWAYNETIRLAKQGVDWDEIPDRVADHADLVKNTTQRVVAKALGAMENYHAYDDFGLPSHTKDGTYPLRANYEEGYNLTLRDDGTVEFRISAKPYKHVNGVLEGDDTHLDILRAALTGDGWTIGTAEALFHNGNPELHINVTNTKQTVREKQDSRTVIGLDVNEDNVALSALSAEGIEDTLVIDFPEIKFERHRYFTMRKRVQNAEKPSIHDTLEGQEERFVRDRLHKVSRHIVDWSRQFEKPCIVFEDLKEMRDSIDYGTRMNRRLHHLPFRALQYYTSYKAAFEGVPTAWIAPEYTSQRCPLCGHMERGNRNKKRFKCRSCGQQDHADRSASVNIAVKGIRKHQEWTVPALNSLPQVRTVRRQASGAVDAPTVTHDTVRGYQTDGVTGVSD

SEQ ID NO: 13526 - protein, 320 aa, Variovorax sp.
MMKNGENQAVKHIKTLRLRVKDKHAALLGRMAREVNQVWNFAAETGLKALCDRNQWLGGYDLQKLTSGFSKCDGVHVGSGTVDIVCAEYATRRRKFKKRRLNWRVSNRKSPKYSLGWVPFRGAQVKYKAGQIQFGGVMFNLWDSYGLGNYELRAGSFSEDSRGRWYFNVAVEVDVIASPGTAAVGIDLGLKTAITTSTGATFVGRLYRASEAKLAVAQRANKKRQVKTIHAKIKNQRKDGLHKFSTALVKENAAIFVGDVSSAKLVKTKMAKSTHDAGWAMVKMMLEYKAIQAGVIFKEVNEAYSTQACSQCGSIEGRQA

SEQ ID NO: 13527 - protein, 420 aa, Streptomyces sp.
MQLRYAFRLYPEPGQASALARAFGCARVVHNDAVRARRDAHAEHRPYPSLGLLSRALITGAKRRPERAWLAEVSSVVLQQSLRDVESAYRNFFASLKGERKGARVAEPRMKSRKDTRASIRFTANARWSITPGGRLSLPKIGAVKVAWSRALPTVPSSVTVIQDSAGRIFASFVIDTDPDADAARMPATDQTVGIDLGLTHFAVLSDGTKIDSPRFLRRAEKKLKKAQQDLSRKQKGSKNRAKARVKVARAHAQVADARREFLPQALNFGRAGETPSQLSTQLIRENQAIAVEDLAVNGLARTKLAKSVHDAGWGAFLAMLDYKARRYGRTLITIGRFEPTSQVCSACGHRDVPKPLHVREWTCPACGTVHHRDVNAARNVKTAAGLAVAACGAPVRPEPVLAQREETGSRGIPTGDRAA

SEQ ID NO: 13528 - protein, 391 aa, unknown
  TnpB Polypeptide
MIKSIKVRLNPNNKQLTKLFQYAGCARFAYNWAIARQQENYKQGNKFLPDNELRKEFTQLKKLQQYKWLNDTSNNVMKQAIKDACNTYKMFFKGHSKYPKFKSKKHSIPSFYQDNVKIRFTGTHVKVEGFSMSKKMNKQRLNWIKLCEKEKIPTDCKYLNPRFTYNGLYWYVSVGIEVDDNTTYPSNDGIGIDLGIKNLAVCSDKNVYHNINKTHKVGKLEKRKRRLQRSVSRRYEKNKKGGSYCKTSNIIKREKELLKVIKRLTNIRQNHLHQTTSDIIKRKPSFICMEDLNVKGMMKNKHLSKAIQQQSFYDFRKQITYKSEWNNIKLIIADRFFPSSKLCSCCGNIKKDLKLSDRLYKCKCGNIIDRDFQASLNLKLYGENVLKQSVI

SEQ ID NO: 13529 - protein, 409 aa, Lactobacillus sp.
MNDYQYHYGLKVRCYPSDKQKQIIEHNLNGSRFAYNEMVAIDRELYNLRKCKLYIKQVQNRIDYLIERKESTKYLFGLRSWLNEFNVGTDVTSMAIRNYKAAWNMFIKVHTTGIPKFHKKQHSGSFQLPNRYSSKITTPSLFNGNIKFIDNKHMNVSLIGHIRVSGSHKRIMVEHSNIRIGTLTVSKDAIGDYYISLQLASDSPFVQTGKSTGDSIGIDLNTENFLTTSNGDVVENPRYYRKNKKRLAKQQRILSRRHLRAKKEHRRLLDSKNYQKQRIIVAKLHNKVCNRRTNFLHETSTALIKNHDLVVAEELRSKNLLKNHALAMSISDVGWGTFLQMLEYKAEMYGKAFIKVDPKYTTQTCSNCGYVMRGEEKLTISDRTWSCPNCNQYHTRDHNAAQNILAKAM

SEQ ID NO: 13530 - protein, 409 aa, Lactobacillus sp.
MNDYQYHYGVKVRCYPSDKQKRIIEYNLNGSRFAYNEMVAIDRELYKLHKCKLYIKQVQDRIDYLTERKDSTKFLFGLRSWLNKFNVGTDVTSMAIRNYKAAWNMFMKVHTTGIPKFHKKQHSGSFQLPNRYSSKVTTPSLFNGNIRFLDNKRINISLIGRIRVSGSHKRLIVNHSDIRIGTVTVSKDAVENYYISLQLASDTPFVENYNKPGDSIGIDLNTENFLTTSHGDVIDNPRYYRKSKKRLAKLQRILSRRQLRAKKEHRRLLDSKNYQKQRVIIAQLHNKICNRRTNFLHETSTALIKNHDLVVAEELRSKNLLKNHALAMSISDVGWGTFLQMLEYKAEMYGNTFVAVDPKYTTQTCSNCGYVMKGKERLTLSDRTWTCPACAQHHIRDYNAAKNILAKAM

SEQ ID NO: 13531 - protein, 389 aa, Lactobacillus sp.
MVLKGIKLRIYPTEYQIHKMESNFGCVRKVWNLMLAMQKERYENNPDCEFVTRFDMNILLPLLKKEYPYLKEVESTSLQCVNKDLSEAFKKFFTEHTGYPKFKSRKYPRQSFRSTCVNHNIEQIDDSHIKLPKLGEMKFKCGKAIPEVIKSVTIRRSPAGKYNAVLTVEDENQVFNKTQAKVGLDMGVADLIITSDSRKYKTIRFDKILAKKKRFWERKLARRRLLAIKDRAKTKKFGLVEPKDLNDYKNVRKARIMVAKYSEKIANQRKDYLHKITTQLVKDYDVITIEDLKTKNLLKNHKLSRAIANQSWRMVRQMLEYKCEWYGKELIIVDPFKTSQFCAECGYDDGKHELKVRQWTCPNCKINNDRDINASKNILLKGLEQALVK

SEQ ID NO: 13532 - protein, 409 aa, Lactobacillus sp.
MNEYQYFYGVKVRCYPSDKQKRIIEHNLNGSRFAYNEMVAIDRELYKLRKCKLYIKQVQDRIDYLTERKESTKYLFGLRSWLNKFNVGTDVTSMAIRNYKAAWNLFTKVHTTGIPKFHKKQHSGSFQLPNRYPSKVTTPSLLNGNIRFLDNKHINISLIGRIRVSGSHKRLMVNHSDIRIGTVTVFKDAIGNYYISLQLASDSPFVQTRKSTGDSIGIDLNTENFLTTSNGDVVENPRYYRKNKKRLAKQQRILSRRQLRAKKEHRRLLNSKNYQKQRVIVAKLHDEVCNRRTNFLHETSTTLIKNHDLVVAEELRSKNLLKNHALAMSISDVGWRTFLQMLEYKAVMYDKVFIAVDPKYTTQTCSNCGDVMKGEERLTLSDRTWTCPNCNQYHIRDHNAAKNILAKAM

SEQ ID NO: 13533 - protein, 404 aa, Dialister sp.
  misc_feature (349)..(394): Xaa can be any naturally occurring amino acid
MRRVNKAYRYRLYPTADQKAMFAKTFGCARFIYNKMLGDRISYYRETGKKLHNTPAQYKSEFPWLREVDSLALANAQMNLDKAYNNFWKNRSYFGLPHFKSKRAGHNSYSTNNQKGSVRIEDGRIKLPRIGWVKIRLHRPLMETSTIKTVTISQTPSGKYYISILVEYENQVLPIIPKQFLGLDFTMHGLYAASDEEDGTYPEFLHKAEKKLVRAQRKLSRKQNGSRNWEKQRQRLAAIHEKTANKRKDFLHKKSRYLADKYDAIGIEDISVKTMGSRKKKGRFSFGKSVADNGWNIFVNMLAYKLAWQGKQLIKVDKWYPSSQLCHKCGHKNPKTKNLSVREWTCPVXXXXXXXXXXXXXXXXXXXXXXXXXXXXXXXXXXXXXXXXXXXXXXSQRSRKLPTL

SEQ ID NO: 13534 - protein, 386 aa, Streptosporangium sp.
MRAVRLRCRYRLYPDAVQREALARAFGCARVVFNDGLRARQAAREAGLPYVSDGELSKRVVTEAKQTPERSWLGEVSAVVLQQALADLNAAYRAFFASITGRRTGPKVAAPRFRSKKDRRQAIRFTRNARFSVTAGGRLRLPKIGEVPVRWSRTLPSEPSSVTVIQDAAGRYFASFVVETGDEPLPESAAEVGIDLGLTHFAVTSDGRKIDNPRFLRRAAKKLRKAQKALSRKVNGSANRNKAVAKVAKAHARVADARRDFAHKLSASIIRDNQAVYVENLSVKGLARTRLARSVHDAGWSAFTAMLEYKAARYRRTFARIDRWFPSSKLCSACGAIAETMPLSIRSWTCPCGVAHDRDVNAAINILAAGRADRLNACGGTVRPAA

SEQ ID NO: 13535 - protein, 403 aa, Streptosporangium sp.
VRTAYKVRAYPTPEQAATLSRTFGCVRVVWNRTLAWRHARYHGEGVTTNFTQANAHLTAMKATDELAWLNEVSSVPLQQAIRHQQVAFTNFFAGRAKYPRYKSRTGRQSAEYTRSAFRYRDGRLFLAKMDAPLAFVWSWPDIDPATIDPTTVTISCDPDGRWYASFAVDVDDPEQAPATGRVVGVDVGVKDFAVTSDGETIANPRHLTERERNLARYQRRMARKQRGSSNRAKAKAKVARAHRKVRASRADFLHRTSARLVRDHDVIVIEDLAVANMVRNRSLAKAISDCGWGAFRRMLEYKAAKHGRHLIVIDRWYPSSKTCSACGHLLAELSLGTRTWQCPSCGTRHDRDVNAAKNILAAGLAVSACGGDVRHSGSSRVRSPVKQELQPARAGVPVPQGGE

SEQ ID NO: 13536 - protein, 231 aa, Streptosporangium sp.
MMAVRLRYQYRLCPNAARRQALARAFGCARVVFNDGLRARTEAREAGLPYRRLRKAQQALSRKVKGSNNRKKAVVGVARAHARAADARRDLAHKLSAALIRDNQAVYVENLSVRGLARTRLAGSVHDAGWSAFVAMLEYKAARYGRTFARIDRWFPSSKLCSACGAVAGSMPLSVRSWTCPCGADHDRDVNAAINVLAAGRADRRNACGDPVRPPLAVARVGEAGSHRGAA

SEQ ID NO: 13537 - protein, 133 aa, Streptosporangium sp.
MLANRRLARAVADVGMAEARRQLTYKTTWSGGRLIVADRWFPSSKTCSGCGAVKAKLALSERTYACTECGLVADRDHNAALNLAALAADVAQSRGETLNARGGAVRPGVRAGRAPAKREPRKRGTLRRKPEAA

SEQ ID NO: 13538 - protein, 401 aa, Streptosporangium sp.
MMAVRLRYRYRLYPDAAQRQALARAFGCARVVFNDGLRLRQDAREAGLPYVSDGELSKRVITEAKKTLERAWLGEVSAVLLQQALADLNTAYRNFFASITGKRKGPKIAEPRFRSKKDNRQAVRFTKNARFTVTAGGRLRLPKIGDVPVRWSRSLPSEPSSVTVVKDAAGRYFASFVVETADERLPQAAAEVGIDLGLTHFAVTSDGRKIDNPRLLRRAAKKLRKAQQALSRKVRGSNNRKKAVVKVARAHARVADARRDFAHKLSAALIRDNQAIYVENLSVRGLARTKLAKSVHDVGWSQFTAMLEYKAARYGRTFAKIDRWFPSSKLCSACGALADKMPLNVRSWTCACGATHDRDVNAAINILAAGRADRRNACGDPVRPPLAVARVGEAGSHRGAA

SEQ ID NO: 13539 - protein, 439 aa, Streptosporangium sp.
MMAVRLRYRYRLSPDAARRQALAKAFGCARVVFDDGLRLRQEAREAGLPYVSDGELSKRVITEAKKTPERAWLGEVSAVLLQQALADLNTAYRNFFTSAAGKRKGPKVAPPRFRSRKDNRQAIRFTRNARFSITTGGRLRLPKIGDMPVRWSRTLPSEPSSVTVIKDAAGRYFASFVVETADEPLPETVAEVGIDLGLTHFAVTSDGSKVDNPRFLRRTERRLRKAQQALSRTVKGSDNRKKAIAKVARAHARVADARGDFAHKLSASIIRDNQAVYVENLSVRGLARTRLAKSVHDAGWSQFTAMLEYKAARYGRTFAKIDCWFPSSKLCSACGTLQDKMPLSVRSWTCPYGMVHDRDVNAAINILAAGRADRRNACGGTVRPPLAVARPGEAGTHSKPPAFSAAWQGRISVLQGGEDVKPSSSRPPGRAPRCSAGPG

SEQ ID NO: 13540 - protein, 240 aa, Streptosporangium sp.
VTVIKDAAGRYFASFVVETTSEPLPETAAEVGIDLGLMHFAVLSDGRTIGNPRFLRRAAKKLRKAHKALSRTAKGSANRKKAVVKVARAHARVADARRDHHHKPSTAIIRDDQAVYVEDLAVNGLARTRLAKSVHDAGWSAFVGMLEYKAARYGRTFAKIDRWFPSSKLCSACGAVAASMPLSVRSWTCPCGAAYDRDVNAAINILAAGRADRRNACGDPVRPPLAVARVDEAGSHRGAA

SEQ ID NO: 13541 - protein, 373 aa, Streptosporangium sp.
VKFVVQVRLFPTPAQEAALADTLLLCNEAAGLVSGIAWETKTFRNYDLRRHTYGRLKAMGLSAQPAQHVIKKVADAYTTVKAQARAKLRKPLTEPIAFRTDAAQPFDDRCLSWQVEERTVSIWTTGGRMKGVRFGCSDDQARALAAYRRGESDLIHRDGLWLLIATCDVPDVDVTEPDAFLGVDLGIANIATTSDGERHTGVHLNAVRRRNRRLRRRLQAKRTTSAKRLLKKRRRKESRFARDVNHVISKRIVTEAARTGRGIALEDLQGIRDRVRLRKPQRITLHSWAFHQLGAFIAYKARRSGVVVTHVDPAYTSQGCSACGHTDRRNRPDQETFSCTSCGFAEHADVNAARNIAARGEAGRAAVNQPNAA

SEQ ID NO: 13542 - protein, 245 aa, Streptosporangium sp.
MKGVRFGCSDDQARALAAYRRGESDLIHRDGLWLLIATCDVPDVDVTEPDAFLGVDLGIANIATTSDGERHTGVHLNAVRRRNRRLRRRLQAKRTTSAKRLLKKRRRKESRFARDVNHVISKSIVTEAARTGRGIALEDLQGIRDRVRLRKPQRITLHSWAFHQLGAFIAYKARRSGVVVTHVDPAYTSQGCSACGHTDRRNRPDQETFSCTSCGFAEHADVNAARNIAARGEAGRAAVNQPNAA

SEQ ID NO: 13543 - protein, 263 aa, Streptosporangium sp.
VTVRWSRSLPSDPSSVTVVKDAAGRCFASFVVETSHQPLPETDSEIGIGLGLTHFAITSDGRKVANPRILRRAAKKLRKAQKALSRKEKGSANRAKAELKVARAHAKVTDTRRDWAHKLSTSLIRDNQAVYVENLAVSGMVRTKLAKSVHDAGWSQFVGMLEYKAARYGRYLGKIDRWSPSSKLCSACGTIAGSMPLNVWSWTCPCGTTHDRGINAAINILAAGRAERLNDCGAQVRPGPVPAQRGEAVTHPKPTRQAGISVL

SEQ ID NO: 13544 - protein, 410 aa, Streptosporangium sp.
VLTGRRYRLDLTPVQAAFAEQVGGICRSVWNTALEQRREYRRRGAFIGHATQCAQLAEAKRDFPWLADAPSQVLQQTLKDLEQAVKAHGTWKVRWRSVRRWKPSFRFPDAKQIVMERISRRWGRVKLPKFGWVRLRWSRPLGGTLRSATVSRDGRHWFVSFLVEDGQATPEAHPGPAVGVDRGVVVAATTSDGDFHDRPFITSGEAQRYRRLQQQLARTRKGSNRRGTVVAKIGTVMRRVRSRRADFNAQLAATLTSRYGTVVLEDLRTRNMTMSAKGTVEQPASGGAQKSGLNRAILDKGWYGLELAVTSASRYTGTKIIKVPAAYTSQTCSACKAVDAASRESQARFACTSCGHREHADVNAAKNIKAAGHAVSGRGDLGATRSVKRQPPRPRARQHAAPAARGIPVL

SEQ ID NO: 13545 - protein, 315 aa, Streptosporangium sp.
MQQVKRAFKCRFYPADEQAAELSRTFGCVRLVYNKALEERTRAWYGEQRRISYVESSAALTHREPTTVTVSCDSAGRWFVSLLCEDTIIPAPATTAAVGIDAGITSLVTLSTGEKISNPRHERRDRARLAKAQRELSRKAKGSANREKARRKVARVHARIADRRRDFLHKLSTRLVREDQTVVIEDLTVRNLLKNGKLARAISDAAWTEPRSMPAYKCAWYGLDLVVIDRWSPGSKPCGNCGTVRGRLPLNVREWTCDCGAVHDRDVNAARNILTAGLAASACGDGVRPQRESSRTGRSSVKQEPQRATAGIPRL

SEQ ID NO: 13546 - protein, 375 aa, Streptosporangium sp.
VKVTQAYRYALDPTPGQAAALASHCGAARFAFNWGLALVKAALSQREAEESYGVPGEHLTQAPWSLYSLRRAWNAAKDRLAPWWADNSKEAYNSGLDNLARALKNWNSSRKGTRKGRAMGFPRFRSKHRAASSCRFTTGAIRVEADRHHVTLPRLGTIRTAESTRKLARHLQRGTGRILSATVRFEGGRWFVAFTCEIDHADRVPARPDAVVGVDLGVKDLAVLSTGEVIASPKHHRAALRRLRRLNKQLDRRIGPRSPDGARRQPSARWAKTRAALGKAHARVANQRRDGLHKLTSRLAATWGTVVVEDLNVSGMLANRCPGCSPTGVWPGRSPMSAWPKRGASSPTRPPGVAAGSSSPTGGFPPARLVRVAAR

SEQ ID NO: 13547 - protein, 384 aa, Streptosporangium sp.
VQLRYNFRLYPTAGQRLALAKAFGCARVVFNDGLRLRQQAHEQGLPYLSDGDLFKRMITQAKKTPERAWLGEVSAVVLQQALADLNTAFRNFFASVSGKRKGPKMAPPRFRSRKDTRQTVRFTRNARFAITTGGKLRLPKIGEVTLRWSRDLPSEPSSVTVTKDASGRYFASFVVETGDEPLPEATSQIGVDLGLTHFAVLSDGRKIDNPRFLRRAERRLKKAQKALSRKAKGSANRRKAVVKVAKAHAGVADARRDHHHKLSTAIIRDDQTVYVEDLAVNGLACTRLAKSVHDVGWSAFVDMLEYKAARYGRTFAKVGRFLPSSQTCSVCFVIDGPKPLSVREWTCGACQTTHDQDVNASRIVLAAGRAERRNACGGTVRPAA

SEQ ID NO: 13548 - protein, 385 aa, Streptococcus sp.
MLVGLKLRLYPNKEQEKQLRQYFGNSRFVWNTMLNLINERYKNNKESKFLNTYDLNNLLPCLKAEYPHLKESDSSSLQVDNDQLVKAWRNFFRNPKHFGKPNFKSRRYPKQAYTGKARLSILGHRSLKLPKLGAIKSSKTGRLTGLVKRYTVTLEPSGRYYLSLQMDCPEKERFTLTDKAVGIDLGVSDLAILSTGDKFAKFSSAYDESQVIEWQRKYSRRLHQAKVQVAMDKNKKVLIPRELEDFNGWQKAQKIKARYQEKIANKRKDYIHRITTQLVKDYDVIVIENLKAKNMMKNHHLAKSIANSAWYLFRSMLEYKCQWYGKQLIVVPAHYTSQECSHCYYNSGKKELSVREWNCPNCGTHHDRDINAARNILNRGLATLT

SEQ ID NO: 13549 - protein, 412 aa, Streptococcus sp.
MEVTRTLKARIVLDNHNDYSKLMDTMVAFRNGCNTVSEYIFNNDFPLNQLTIQKEIYQDIRSRHQLKSQMSISTIRTTVARYKTVQTQLRKQSVWDGYKKDNHGKSVRNYIRKDLTFLWKPIIFNRPQLDLVRNRDYTIKDDHSVTLNTIYGRVAGRLIFNGLEHYLQSEWQFGTAKIVKSGKHYYMHISVTTEIPEFQLETVRNVVGIDRGLRQIVTTYDNKGRTQFVNGAFIKQKRNHYKQLRASLQAKGTQSAKRRLRKLAERESRWMNDVNHCLSKTLVQQYGKHTLFVLEDLADVTFDTVSKRKKENRYEHHSWSFYDLEQKLAYKAIQNESQVITVSAQYTSQRCSKCGIIRKENRDRNNHSYHCHNCGYTSNDDRVAAMNIYELGKWFVSGVEKPQFEIIENEKW

SEQ ID NO: 13550 - protein, 369 aa, Streptococcus sp.
MTIKQKAYKFRLYPNKEQEIMFVKTFGSSRAIWNMMLADKITYYEETGKMLRNTPAQYKKDFPWLKEVDSLALANVQLNLQKAYKSFFQSGFGFPKFKKKRYRQSYKTNNQKGSIALENGAIKLPKIGWVKVKDHRRINGIIKSATISMTETGKYYVSILCESEVVPFPKTGSNVGIDLGISDFVILSTGEKIGNERFLKQLSKKLAKEQKILSRRALVSKKSGRKLSDSMNYQKQRIKVAKIHEKIANKRRDFLHKLSTEIIKNHDIICIEDLSSQNLMKNHKLAKAIGDVSWSEFVRMLEYKADWYGKTVSKISRWYPSSQLCSDCGFSSGKKPLHIREWTCDNCGCHHDRDINASINILKEGLRLA

SEQ ID NO: 13551 - protein, 550 aa, unknown
  TnpB Polypeptide
MICEWYSNDIIQLQKNVPFPEKYKKTKVSDNYKNVLEDVKTCKSKHLFNIEKYNEVNNLELTYKYKIKFNEEQHTILKLYFNECNIIYNLCVDIWKEYNDMTDNWMILKDVIYDIYYRDKNTIKESKKLIIERLKKNNDEYNLENKQNKEKIDKLKDVNKEKYKKELENYKKIKKDNIYTIIKKENKKPIKDKINIKKIKNPRKPNRNIVEKPAPDDTLKGEIKTFCSNLKSARTNNFNDNESYKLKHKDISKKQTIIVGGRAIKPKGIFSQKLKELDCYNYKKIIKKHNLGKECKLMYDKLFNSYYLYIVDEKEQINIKNRKEIVAIDEGEKIFASYYSINEIGNLGKDMRIKILGIQSNIKQYQKKLKNKKYKNRKKQIKQRIARCFKKIKGYVNEIHKKSAKYLCENYENIFLPTFETKPMISKNKIKLETERIKKINNKDKAKIEIRKLGKIIRLSGKVKFVLSMQSHYRFKEYLKALAKRYRTKVYNVDESYTSQMCTKCGQLSKEYDKKRVKQCSCGYKIDRDVNGSRNILLKCIKELKLSVKA

SEQ ID NO: 13552 - protein, 385 aa, unknown
  TnpB Polypeptide
MRTVTRCYKYRLYPTADQQNTLVQWAGCRRFVWNWALHCKQTQYQATGQRLNYQRLAAMLVDLKRQPKTAFLRNCHSQPLQQALMDLETAFTNFFAKRAKYPHFKARKITPHSLRFPQGVVVVNERTISVPKIGLMQAIIHRPLMGTAKGATIKQDATGAWWVVFVCHIDRPDVQPTADRPVGIDGGLESFTTLSTGEKTAPPKFYRRSQKKLAHAQRKLSRTQKGSKNRLKARKRVAKVHQKISNQRTDWLHKHALGMVQRFDVVCIEDLNIKGLVKTKLAKSFSDAALSTFMQMLIDKAEWHGRRVIKVGRFYASSKTCHRCQTKTALMLADRVCTCPTCGTTHDRDVNAAINILHEGLRLLAVGTTESQNAAGDGVNPAKRW

SEQ ID NO: 13553 - protein, 223 aa, unknown
  TnpB Polypeptide
VVCLLAVELPDAVELPKTGHVIGLDMGISALLTTSEGEKVENPNYYRLGQQRLRVLSRALARKQKGGKNRRKALKRVQRQHRHVGNQRSDYLHKLSTALVRSCDGVALEDLAIHNMVRNHHLSKSILDAGWAIFKQYLTYKAGSAGREIRFVNPAYTSKYCSNCGTAFQDFSLSTRWVKCACGLSLDRDHNAAINILVKAGWDAPLIAHVSHEAMRRIRSPQH

SEQ ID NO: 13554 - protein, 360 aa, Fibrisoma sp.
MKLTAKIKLLPTKRQAELLLTTIKEANSVCNALSDWAWEKKKFKQFELHRERYYPTKETCQLSSQVIIRCISKVADSYKLDKSRKRIFRLTGAVAYDSRILTYNTTKKRVSIWAIEGRQKIAYVGGKHNEALLAYQKGESDLLYTKGKFFLLATCEVPDDQTETPEDVLGVDLGITNLATDSDGQSFSGATIEATRQWYQKRRSVLQSVGTKSAKRRLKKLSGGQRNFQKNTNHVISKQLVTKAKGTHRAIALEDLTGIRERATVRKAQRTKHTNWSFGQLRQHITYKAIRYGVPVLVVNPRNTSRTCNKCGYCKKANRKSQSEFVCRLCGHSANADENAALNIRNLGLINRPMVASQLH

SEQ ID NO: 13555 - protein, 393 aa, Bacillus sp.
VSKLIFDSIGVTEQTIKNWHKKMILARRIRLRPTTEQEIILWKSVGTARWAYNWALTKQEENYKTGGKYIPDGILRKELTVLKKTDEFAWLYEVSNNITKQAIKDLCEAYKKFFKGLSDKPRFKSRRKSKSSFYNDNAKLKVEGKKVLIEKVGWVVVSESIPDEKYYNPRISHDGKYWYLSVGIEESKPIVELTNVSLGIDVGIKELAVCSDGTRKKNSNKTRTVRRTEKRLRRLQRQVSRKYEMNKEGNRFAKTSNILKIEKKIQHLHRRLTNIRLNHLHQSTSEIVKTKPYRIVMETLNIKGMMKNKHLSKAIAKQCLCKFKRQIQYKCEKYGIEFVEADRWFPSSKTCSSCGYIKNDLKLSDRVFKCECGHEIDRDFNAAINLSRYNLVI

SEQ ID NO: 13556 - protein, 488 aa, unknown
  TnpB Polypeptide
VDEWPYILIWKPISANIKNHTYIRKECSHMSYRVIQYQIAQDNLIYDYCDSNAQKAKLLYNAALFRIRQIFTGWDKDSRTDNEKEVFAEVDLLQQTYPSIKVKRVISYCHLEKLMRVTHNPDFFAGLPSQTAQAVVKHAVTDFSNWLKSLKAYKQDPSKFLGRPQMPHYQKRNIITFTITNQSATLYHAKCGSYLKLPRINGHMHLPNIEADSVLKEVKIKPYYGRYILCLTLESENFAADNTDMPNICAIDFGVSNFAAVVCNDGSSMLYKGGAVLSECQWFHKKRAKAVSIITKGHEHMHASSKYLSSLSRHHADFIKDQCHKISRSIINYCIEHHAGTLVLGENKRWKQDCDMGSQNNQNFVSMPISLLKQMIIYKASDAGIKIITQEESYTSQADITVMDYIPVYGVDDENAVFSGRRITRSFYRCSNGMVINADCNGAANIMRKAIPDAWNGITDFSFLASPEVSGFHELNPLGIPVKGIAAA

SEQ ID NO: 13557 - protein, 401 aa, unknown
  TnpB Polypeptide
VQLRYNYRLDPQPRHQAALGKAYGCARVVFNDALDAREAAHQAEKRYVTDRELSARLTAAKKTPQRAWLGEVSSVVLQQALADLNAAYRNYFASIKGTRKGPKVAKPRFRSRKDRRQAIRFTANARFKVLPNGKLRLPKIGDVPVRWSRPLPSEPSSVTVIKDAAGRYFASFVIETQPTPLPQTEHAVGIDLGLTHFAVLSDGRKIASPQFLRRAEKKLSRAQRNLSRKQKDSSNRTKARVKVARAHARVADARRDFHHQLSTALIRDNQAVAVEDLAVRALGRTRLAKSVHDAGWSSFVGMLEYKARLYGREFHRIGRFVPTSQTCSACGVKDAPKPLHVRAWRCPSCGVWLDRDINAAVNVARAAGLAVTACGAQVRPEPVPAQRSEAGTHPTSYRDAA

SEQ ID NO: 13558 - protein, 179 aa, Escherichia sp.
MKRAYKYRFYPTTEQAELLAQTFGCVRFVYNSILRWRTDAYYERKEKIGYLQANARLTALKKEPEYIWLNDVSCVPLQQSLRHQQAAFANFFAGRAAYPAFKSKRHKQVAEFTASAFKHRDGELASRRWMFAGVENYHLRRQPLPFPEIALAGTLFPACVSLNLYQCLLPLKRSALMWA

SEQ ID NO: 13559 - protein, 412 aa, unknown
  TnpB Polypeptide
MLVRGVAFQLTEELPSEARLLLSDFRLAANEAIRAGLTGRVSSRYAIAKLAYRTLREDHPMMYAQHVVSSIEVAASALKNHRRQMKGGKQGRVPFVKRLMMKAENQAYKLDRVEGIIDFPIGAGCHVKLRLVVSRYHRRYLDDPDLSLGSLTVLQNRVVVAFRKETPRPRDTTSVIALDTNESSIDGVFVRSDEEAGPITVRAQFMEAAAIQRRHHDRQKRLQKKKAHDRRVGRILCKREGKREHDRVSYRIHQVANAVVKFAEDRDSAVVLEDLDGMRPSWDKNLNRRLSLWPRRRLNHCIEYKAAWKGIPVMKVDPRYSSRKCPICGRINYSRMDTRDREFKCECGWHLDRHINASLNLLQTAISKGLEVAGGLRFNPGAFQHDVMMTLYEPAMAARSEPNGTSHVTAVT

SEQ ID NO: 13560 - protein, 514 aa, unknown
  TnpB Polypeptide
MRAQTSSYVVSTKVLLPESIVKRLEKSFRIANSAYNEALIFGLKRFEALKQNSDYQELLDARRLAFAKLAALKKAKKKDKGVAKQVKDYNNTLFELRKAYSLTEFGLSKHLTQQRRQPGSPYQQFNSGEIQVIATQVMKTLEKVLFYQIKSHKVRFRSKFDSDVSFSNRVNTTGTRLVPSDRKGIAYRLYIHKASTFVDIPVKAFNTYQQMSLSRSEKIKYVQIIRKTIRGKKVYYLQIVCQGFPPSKVTKGNGVVGIDPGISTVAFVSPNEVALVDLVPKNITQKEKLLKRLDRKIERSRQVNNPKCYKENGTIKKGARFKHPSNRQVRLRNRRLNAYRSLSEERTKLQGQLVNRLVSQTSSIKMEELNVKGLQKRSRDIRINPKTNRPYSKKRFGKAVFRAAPSTFKTALETKARQLGIAFEVISPKDVKPSQYNHITQTFEKKPLSTRMFDLSPEWTDVQRDLYSAFLIGHIENGHYQQEQLVQDFPDFYQQMKGFLQEPIETERLAWYLT

SEQ ID NO: 13561 - protein, 513 aa, unknown
  TnpB Polypeptide
MRAQTPSYVISIKLKLSESIENHLEKSFNIANSAYNEALSFGLKRFEALKQNSQYQNLLEARRTASMGIVALKKMKQKTSELSQQVKLYNRELSNLQKAYGLTEFGLSAHLSQRRKEGSAYQQLNAGELQVIAGQAMKTLEKVLFYKIKPHKVRFRSKFDLDVSFRNRVNTTGTRLETSDKQGMAYRLYIHKASTFIDIPVKAFNHCQQISLMCSEKIKYVQIIRKTIRGKKVYILQIVCQGFPPSKVTKGEGVVGIDPGVSTVAFASPTEVALVDLVPKNITRKEKLLKQLDQKIERSRRVNNPECYQQDGTVKKGARFKRPSKRQVRLRNRRLKAYRSLSEERKKLQGHLVNRIVSQASHIKVEELGVKGLQKRSRDIRINPKTNRPYSKKRFGKAIFRAAPSSFRVALETRASRLGIDVEVISPKDVKPSQYNHITQTFDKKPLSTRVYDLSDNYPGVQRDLYSAFLIVHIEKGHYQQEQLEQDFPVFYQQMKDFLQQPIETKRLAWYLN

SEQ ID NO: 13562 - protein, 443 aa, unknown
  TnpB Polypeptide
MQKRKFTVVTQLHENNNTDLIEYIDKTRGLYAKAMRETFHVLKRDENFNKSYYNTYLQNKYDITKRTANSILSDAQGRLNALTELKNYEKSQLIRKINHLENSIIQKLVEKRNANNIKLRQKLSVSLGQHRNLRRKIVAKKSKLNRLKQKLENLNYQIETGLFKLCFGTKHLFQSNYKQFVNQRDSQMSFIGSKTEIAGNQNFQLIYNPKNNQFDIKLRKDFGFKTAKGDDRYVYGKVYFRHHKNHIISILRQGNSPLSYKIIKKNNRFYLYCTFEIQVGEEDFVTHSSYGTIGLDFNKGFITLSETNQYGHLVQTQFLPYRFKDGHKTKTDLQAIANHVVILARTTGKDICIEDLNFKNKKAQTESKSGKKYNNMLHSLAYSQFMATVESCAYRNQVIVNKVNPAWTSWLAKQLYCPTMKLNVHTGASYVIARRGQGYNDSV

SEQ ID NO: 13563 - protein, 410 aa, unknown
  TnpB Polypeptide
MTPRIQTYIVKPSHQWYNEIDFLSYLSKNLYNSSLYYERQTYFNTNKFPHYFELNNTFTHSNQVDYRALPAKVSKQTQRAVDQAIRSYLKLKKNSERYNQARLPHYLHKTKGRFPVFYEKGALSFVKQGFIKLSKTSIEVPCKLDKSVVQQVRLVPCTGYYKIEIVYKKKINPRKRLGKPERFASIDLGINNLATVTSNVFSPIIINGRPLKSINQYSNKEIAKAQALLPKDVYTSKRIAFLYGKRYLKIQDYLHKAGKQLVNYLVSQTIDLLIIGKNQGWKQNTTLSNVTNQKFIQIPYNRFTQILEYLCEEQGIEVVYQEESYTSKASFLDNDEIPVYGELEETPLFSGTRICRGLYRTANGHLINADVNGSYNIMKKYLENNAAWDNQKWSDCVEVCSTPRVMSVLY

SEQ ID NO: 13564 - protein, 324 aa, unknown
  TnpB Polypeptide
MYEVSKCAPQEALRDLDRAFTNFWRRRKKNQVGFPKFKKKGRNDSFRLYGSIRVFEKAVQLPRLGRIRVKEKPQIKGQILSATVSRRADRWFVSFCTEEEKITSSLADGPRIGVDLGITSLATLSDATVFDKPRALTKRLRKLKRLSRQLSCEEKGSNNRRKAILRLARLHWRISNIRLDVIHKVTSYLAKNHSQIIIEDLCIRVIMKNKLISRAIADVELSELCRQLVYKTKWYGLKLIIAHRFFPSSKRCSQCGKIKERLSLSERIFICESCGLQLNRDLNAARNLVTASWTETENACYEAGGYSSSGQCSSMKQELNFSQT

SEQ ID NO: 13565 - protein, 195 aa, Lactobacillus sp.
MSFYRENGRYFVAIPYKIPKNLFNAKESTGRATGVDLNVGHFNYRDGDQRILPKKLEHTYEKIKHYQRILARKCEANGRKEAVKSNKYLKTKTKLQAAYEQAANIQNDLMHKFTTKLVNDYDSIVIEDLDVKKMMMSHVASKGMHRSMFGKFRQVLTYKCDWYGRKLILADRLYPSTQRCAVCGSVKKRWRKKLL

SEQ ID NO: 13566 - protein, 407 aa, Caulobacter sp.
MPKRSLPSGLVRSRSFSLHPTDGQAEKFEQFAGVARLVYNLALEQRTNFWRQYLRSTGTHISYVTQDKEVTQLRAEIDWVAAVPTDVTSAALRDLHLAFAAFMSGKKGYPAFRSKEKTVSFRVRGRETPIRALNAKWSEIRLPKIGWVKFRCTRMIEVAKSVTVSRSGDQWRLCIACETASKPSAPKAAIGIDRGVANTLALSTGELAQLPGEIPRLVERRKRAQKALSRKVRRSKRYARQRERVRALAGRIAAVRNDWLHRQTRKISTSFNHVALEALRVTAMTASAKGTVEQPGRNVAQKRGLNRAILEQAWGIFARQLEYKVEERGGLLVYVNPAYTSQTCSACGVVDARSRESQAVFRCVACGHGEHADVGAAKEILRRSTACLDVEGARRRPAEASTKGVAA

SEQ ID NO: 13567 - protein, 392 aa, unknown
  TnpB Polypeptide
MSYKPNLKSSLPKPEAICRRAFKYRLQPSKSQRTKLIQTLELCRWVYNETLAARKNAWEQENKALWLHDTHKLLPVWKKENAELAQVFSQVLQNVQERVDLAFKAFFRRVRAGEEAGYPRFKGFGRYDSFTYCQFGFKVLENRLFLSKIGAVKIIFHRPIEGRIKTLTIQRDAVGNWYACFICEVKPNVLPFNDLAVGIDVGLANFAKLSNGGKISNPRFFRRDEKELAKAQSKLSKEEKGTPEQSKRRKVVAHIHQRIAYRRKDFAHQKSRELVNNFGMLAFERLDKQNMLKNRRLAKSIADAAWNQFITYTQYKAADAGRVCVLVDPRNTSKRCSRCGTLVEKDLFVRVHQCPVCDLVIDRDQNAAINILGLGLQSLGLALEAPAVRHGE

SEQ ID NO: 13568 - protein, 380 aa, unknown
  TnpB Polypeptide
MILSGKQFTTVIIKLGKFQELDYTMRTFNKICQQIMDYGWKQKTWNKNKLHYGTYKMLREQYPKFSSAMLQTARDQASEILKRTIKSKRQLLNPIKQPYSGIRYDKRCLSIMFDKNIISINTTFGRIKLPFKLAKYYEQYNDWIYTNAQLIRRKDKNYYINIQMYQDLPPKQKECKVLGIDLGIKKIGVTSDNTFYNSNHLKNIKGNYQKLKRDLQRKGTKSAKRLLKKISGKENRFVRNVNHCISKKIVNTNNTVFALENLKNIRNNTKTYNKKLNRMIGNWSFAQLQSFIQYKSERQGKSVIHIKPDYTSQQCSKCGCIEKTNRAGNIFKCVECGFQLDADLNASRNIARIGRTDFLQGLVNNPNVGIVDGKAVEMLD

SEQ ID NO: 13569 - protein, 394 aa, Cyanobacteria sp.
MLNLTYNYKIIPTKEQIDKIEHNLAVCKSVWNYALAERKLWSNSRSCPVNACSIKSESIVPPFEYPTYHTQSANLTQAKKTNDFLKSGNAIAMQQTLRKLDRAFNDMKAKGCGFPRFKKRMKSFNLLAKKFEVNGNKIKLPLLKEVRFVKSREIPEGFKIKQVQIVKKASGYYANLALELEVDVPIPQPHGHAIGVDVGIQSMLATSDGLTVKRPVFLDNVLRKIQLLQRKLRNKKRGSNKYLKLQKRIALLHEKVANKRKDYHFKLAHQLCVDAGLIFVEDINFTAWSRGRFCKQSLDMGLGQFFTILEYVCSQSDTYFAKVNKDYTSQVCPHCGVNTGKKDLSQRLHVCPECGSEQDRDVAAAEVVMKRGLTAVGAPVVKQPSDDGLPGTTV

SEQ ID NO: 13570 - protein, 422 aa, Cyanobacteria sp.
MIVIEYKVKAKTTQYTAIDEAIRTTQFIRNKALRYWEDNHGATKYDLNKQCKLLAQEFEWAKKLNSQARQSAAERAWSAISRFFDNCKKKVAGKKGYPKYQKNNRSVEYKLTGWKLDPNTKKHITFTDGNGIGRVKLIGSRDIYFYSKEQIRRVRLVRRADGYYCQFCLNVDIKEEVEPTQQAIGLDVGLTDFYTDSKGHKQPNPRFFRKGEEELKRSQRRLSRKHKGSSNRRKARQRLAKKHLRISRQRQEHARRVARCVILSSDVVAYEELQVKNLVKNHNLAQSISDVGWYQFRVWLEYFAQKFGKVTVAVPPHYTSQECSNCGRIVTKSLSTRTHTCKCGCQLDRDENAAINILRKGLRTVGHTGTVGLDSKNAWEDDASTLVGHVLSKQASSQNQESHGKARSLAVGVSISPIAAAG

SEQ ID NO: 13571 - protein, 410 aa, Erysipelotrichaceae sp.
MDKKRNNNNLLTEIVKLNINQKQKAFLLVHMKLYIDTVNALVHDILLGKLHYNNLSTVMFKAPLPSAIKCQCIRDAKSIINKYKDTLHKYNEKVKDNNGIYYIIGKKKGKLIKKPRLPKLKLLVYYVNNQNYHINDNFINFPVLINNKSTRINLNAIIAERQYQLFKNKLGLLRITIKNGKLVACVQYELQEVKTFDNGNIMGIDIGLKCPAVSYDTNGKIRFFGNGRFNRYMRRKFFDKRKKLQRNKKYRAIKRIKNKESRIMKDINHKISRQIVNEAIARNVKIIKLENIKNIRKNITKRTTRTSRKNVKNKNYRKYQDICRKNNRFVNSWSFGQLQKFIKYKAIKAGIQVIYVNPVNTSKECPVCHAVNQSNDRKYRCNCGFHHHRDVVGAMNICVSTKIVGNRQSA

SEQ ID NO: 13572 - protein, 246 aa, Ruminococcus sp.
MANKAFKFRIYPNNEQKVLFVKTFGCVRLVYNYWLYKKINQYKEYKTTLNYNACAKEMAELKKMEKYSFLREVDSVSLQQSLRHLDTAFQNFYKQPKTGFPRFKSKKCKKNSYSTVCINGNIAISNGYLKLPKVGQVKVKQHRNIPDEYVLKSVTVSHTPSGKYYASILYEYENQVQEQELHDFLGLDFSMHELYKDSNGNEPAYPGYYRRAEKKLKREQRKLSLMQKGTKTVINNVSRLLKCMRK

SEQ ID NO: 13573 - protein, 331 aa, Oceanospirillales sp.
LKKVRVKDKHGSVLNDMARSINFVWNYINELSTRSIKERGQFLSAYDLHPYTKGAGKELGLHSQTLQCVAGEYVTRRKQFKKAKLNWRKSVGVRRSLGWIPVNTGQAKWKNGQVFHNGIYFSVWDSFGLDQYTFRSASFNEDARGRWYFNVVVSVEAETSEGTGSIGIDLGCKESATDSNVLLSGCTSPSKQPKAFFPSGSWMLLNPQEYQPNIIFGALMICPEQSSESECHPGHTVLALIEENRGHGCTDYIGQGVIQPVSSATQWRMESEGELVGVFRWQGETLKLTDSDGKEMYFVAMSEDNLDSKLNESCEASLNDHKAEKIKQSGI

SEQ ID NO: 13574 - protein, 414 aa, Thermoanaerobaculia sp.
LKRVDLAYQAFFRRVRTGGPVGFPRFRAWRDFPGWTYTQTGWRWTPRQDGKHGRLALANVGSIRVRGGARTLGRMKTCTILRRAGKWYASIVLECHPERRGGTEALGLDWGVAHFATLSDGSTIENPRLLERDLEKLAAAQQVLARKKRGSRRRAKAKLAVHRLHEKIRNRRAHFLHQVSADLVARASFLATEKLATKNLTRSAAGTVEEPGSNVAQKAGLNRAILDTAPARFLALLRYKAKEAGVPFVEVDTKTAKPSQTCPACGAVAKKELAERVHRCSCGAELPRDQAAALVCLGVALTGDARGAWPLASLRSAGGRLRSETTACGGQGRGAAAPGGEVGSPPPPVCLPQNHTMLPVSPSSSAGARPRGRRKARREAVLPTAGSLRNDAMLPLSPGDVANDEDDQLLVEDA

SEQ ID NO: 13575 - protein, 384 aa, Aquibacillus sp.
VYNKKKREVTVLLGHRAYKYRIYPNPNQAILINKTIGCSRFVFNHFLSKWNATYKKTGKGLTYNICSSQLPQLKKVLDWLKEVDSIAIQSTVRNLADSFARFFKKQTNAPRFKSKNNKVQSYTTKYTNDNIAIVGNRIKLPKLGLVKFAKSREVEGRILNVTVRRNPSGKYFVSILVETEIQALPKTNMSVGIDVGLKDFAILSSGTKYENPKFFRSLEKKLVKAQKKLARRKEGSSNWHKQRIKVARIHEKIINIRKDYLHKISYNIVKNHDIVGIEDLQVSNLLKNHKLSKAISEVSWSQFRTMLEYKVRWYGKQVVVVAKNYPSSQLCSCCGYQNKDVKNLELRKWDCPSCGTHHDRDLNASKNIKDEAIRLLTVGPTGVA

SEQ ID NO: 13576 - protein, 282 aa, Aquibacillus sp.
VTVLLGHRAYKFRIYPNRNQAILINKTIGCSRFVFNHFLAKWNATYKKTGKGFTYTICSSQLPQLKKELDWLKEVDSIALQSSVKNLSDSFARFFKKQTNAPRFKSKNNKVQSYTTKYTNDNIAIVGNKIQLPKLGLVKFAKSREVEGRILNVTIRRNPSGKYFVSILVETEIQALPKTNMSVGIDVGLKDFAIFSNGTIYDNPTFFRSLEKKLAKAQKTLARRKKGSSNWHKQRIKVARIHEKISNIRKDYLHKISYNIVKNHDIVGIEDLQVSNLLKIIS

SEQ ID NO: 13577 - protein, 278 aa, unknown
  TnpB Polypeptide
LCLPKIGDVPVRWSRDLPSAPSSVTVILDAAGRHHASFVVDTGDDAPLPPGDAEVGIDLGLTSFAVLSDGKVIDNPRYLRKAERRLKRAQQALSCKEKGSANRAKARTKVARAHTKVADARRDFAHPLSTTIIRENQAVYVEDLAVKGLARTRLAKSVHDAGWGMFTRMSEEKAARYGRTFVKVDRWFPSSQICSACGIQDGPKSLSVRSWTCPECGAVHDRDFNAAQEESPANRAGAAHRDDATERHRFARPGADPDRPRPDQRPVAGPGRRPQGTG

SEQ ID NO: 13578 - protein, 278 aa, unknown; identical to SEQ ID NO: 13577
  TnpB Polypeptide

SEQ ID NO: 13579 - protein, 465 aa, Lactobacillus sp.
MVKKKSNKFGYTRQYHISLSYQQIELYEKAIKIQNELYQFTLKYLYKTYGRKHIGRPLPFGQGINYLNNKIKAMFIKEKYDLKRWNAKKLGLSSHAADEFLKTIFTNFSQYRKRLEQAGRMTDVEKYNLRMNITKDKNGKHKNPKHRSWYRKGSMNFLRNNNSFRTITSQKLPNGNTKLVSPHHLNVADFGEIIVFENLKNINFEEIALTKIKRLPDNTFRLQITFTREKKRIFQNKVVGADWNMFKNEVFRTSENKVIAIPKKVIEKVGKIEFKKDKIKSLRDNEYNKHGKTDLWRRYHRKQAKLSAKKANILTETYRGLVHELVDDYDTIIIEKIDTFEMRKRNLSINKAQNTGKNKRLALIKPYELSKIVESLVNKQNKTLIKVDPYKTSQVEYGTKYESKHKLKEVNEDGKRIYASAYTGKEVDRDYNAALNIKEWGLHPEKHAKLRDYPKLKANNLVEII

SEQ ID NO: 13580 - protein, 398 aa, Kribbella sp.
MSRFRLNPTPTQTASLLQQCTHARYVWNLALEQWLVGKRKRVVAPRFTEQCRQLTEARAACSWLRAGSQTVQQQALRDFDQALRNLYGGTHRQPTWRKAGLHEGFRIVGAQARRIAKLSRKWAAVNVPKVGWIRFRVSRPVPEAKSYRITRDRSGRWHIAFATIPEAIPAPGTGGIVGIDRGVTVPAALSTGELLSFSKPSPTEQKRLKQLQRRLARCRRSSNRRQRVKTAIAKLHARTRDRRKDWVEKISTDLARRFDVIRVEQLRITHLTRRPRPKPDPERPGAYLPNRRRAKAALNRGILASGWGELVRRLKHKAPGRVDEVSPRHTSQTCSVCGHRAAENRKSQAIFRCVACGYQRNADVNAATNIAAGRAVSARRETHTTVSPKREPQLTTST

SEQ ID NO: 13581 - protein, 412 aa, unknown
  TnpB Polypeptide
VIKLLVLEYKVKAKKLQYLAIESAIKTTQFVRNKCLRYWMDAPREAKLNGYSLNKYSTELRNEFQFVANLNSMAVQASAERAWLSISRFYENCKKKVSGKKGYPQFQHDNRSVEYKTSGWKLNPVKRRITITDKKGIGELKLLGKWDIQTYPVKSIKRVRLIRRADGYYCQFCIDVEAADIQPSTGNEVGLDVGLESFYTDSNGHQEPNPKFLKKAEKAVKHSQRRIYKKKKGSSGRKKARAIFARKHLRISRQRNEHAKRMARNVCKSNDLVAYENLQVRNLLKNHCLAKSISDVSWSIFRQWIEYFAGKFGRLAVAVPPHYTSQKCSSCGVIVKKSLSTRTHVCSCGCSLHRDENAAINILNLVSDTLRDAKQARDGQSRSNANGLDASTLSGESLTEQVTRKKLESPYL

SEQ ID NO: 13582 - protein, 373 aa, unknown
  TnpB Polypeptide
MLVNKAYKFRIYPTKEQEILITKTFGCSRFVFNHFLAKWNETYQETGKGLTYNSCSAQLTQLKKELVWLKEVDSIALQSSLKNLADAYSRFFKKQNDKPRFKSKKNPVQSYTTKYTNGNIAIIGNKIKLPKLGFVRFAKSREVEGRILNATIRRNPTGKYFISILVETEVQELPKTNSAVGIDVGLKDFAILSDGTVYSNHKFFRRLEEKLVKEQRILSRRTKGSSNWNKQRIKVARIHEKIVNARNDYLHKISTEIVKNHDIIGVEDLQVSNMLKNHTLAKAISEVSWSQFRTMLEYKAKWYGKKIVKVSKTFASSQLCSCCGYKNKDVKNLNLREWECPSCGTHHDRDINASLNLRNEALRLTVGTTGIAY

SEQ ID NO: 13583 - protein, 439 aa, Halorubrum sp.
MADVQVKPTVTKLACMTDTQALIKTMDFQLDIQSDNESLLYDANLEARSVYNETIRLAKQGLDWDVIPERVAGNSNLVKNTTQRVVAKALGAMENYHEYDDFGQPSHTKDGTYPLCANYEEGYNLSLDDDGDITFRISAKPYQHIKGVLKGADSHLDILKTALESDEWKIGTAEALFHNDDPELHVNITNTERTVRGKHDSQTVVGVDVNEDNVALTALSENGIKDSLVIDFPEIKFERHRYFTMRKRIQNARKNSINDTLEGCEERFVRDRLHKVSCHIVEWSRQFEKPCIVFEDLKEMRDSIDYGTRMNRRLHHLPFRALQFYTSYKASFKEIPTTWINPEYTSQRCPMCRHTERANRNKKRFKCRSCGHQDHSDRGASVNIAVKGIKKLDWNVPALNSLPQVRKVRRQASGAVDAPTVTHPTVRDYQIDGRSGVLD

SEQ ID NO: 13584 - protein, 468 aa, Bifidobacterium sp.
LRVPHAARLPHVQEPAAKPDGRPPRGFGARYPRDPFGFPHGRVRVQEGPRPVVGAGLGSGRGRPRPGDERHARTGHQGRAPGQEDLLRRTLGCCRKVWNMGLDARTQAWTERRENLSYAGTCLLLTAWKKQDEYSYLSEVSAVALQQSLRHLQAAFRNFFNKTADYPRFKAKRDGGSATFASSAFTWKPESRELTLAKMAEPLPIRWPRTIPRRCAPSSVTVSLDPAGRWHVSILVEETVKSMPEDGGQVGIDMGLEHFAITSDGEKVDNPRYLKRALDKLERAQQNLSRKKKGSNNHEKARLKVARAYVKVRDCRDDFLHKLSTRIIRDNQTVVIEDLAVKGMSRRCAAKPDPDNPGRYLPNGQAAKSGLNRSIMDAGWCRFRLMLEYKAAWYGRELTVIDRWYPSSQVCHACGANMGRKGLDVRSWTCPACGMVHDRDVNAAKNILSAGLAVRACGDPRIAGATLR

SEQ ID NO: 13585 - protein, 413 aa, unknown
  TnpB Polypeptide
MDHEGRVDGLKLTIPAYVRGLHPEVEQLMRKFGNCRRRAYNMKKKDMDRLNIIRQLREEVGIPARYVSAAYDTIKALPSHVTFGGLELQRLREIGKITREEYHRRRNRLLVCRGEASQKGNLCLRVEEDGKLRVTVAEKQWVSLPLFVPEKCRPRLAEAPYYTVALKRRDDCSGYDVRITVPVEEPATVNEPNRVMSLDINSGHVDFAVVEKENLTPVAFGRFNCSTILDARKAEKRRRTHLLVNKVRNVAKHYGAEIVAGKLRTLHSKGRSRANRKTQGMNQYAMRQIMAYKLPMNGVRYRERSEAYTSKVGRKLSKPLGLDVHKAAAYAFSVKVIDYTSFTFLRSVHANDEDGIQSMRLNGGSEPTVLHQARVSLVHNEAGLLPAEATPQHKVGAEDTTMSLPTHILQVKV

SEQ ID NO: 13586 - protein, 385 aa, Microcoleus sp.
MLVFEFKAYGKKQQLDAIDEAIRTVQFIRNKALRFWMDNQKVDKYDLNKYSAVLAKEFSFCDDLNSMARQSSSERAWSAISRFYDNCKKKIPGKKGFPQFQKDNRSVEYKTTGWRLATDRKSLTFTDKKGIGKLKLKGTRDLHFYHRSQIKRVRLVKRADGYFVQFCVQVDRSQKIEVTGNAIGLDVGLKEFYTDSKGVAVENPRFLGKGEYRLKKAQRRVSKRVKGSHNRRKARVILGKRHLKISRQRKDFAVKLARCVIQSNDCVAYEDLRIKNMVKNHCLAKSINDASWYMFRTWMEYFGKVFGRITIAVPANGTSQECSSCRTVVKKSLSTRTHACQCGCTLDRDWNAARNILKEGIKYGGAHRNLDLRSERLWRIDRYRC

SEQ ID NO: 13587 - protein, 418 aa, unknown
  TnpB Polypeptide
MRLVYKYIYKGNKTDTERILHYCEVSKNLYNQALYTVKQSLKENKFLFYNNIEKLMKERKNLEGEINYRLMPKAQSAQQCLKVLDKSLKSYFKAVKDWAQHKDKYKGKPRLPQYKKGYNQIILTSQCCQIKENYIYLQKDLKIFIPQWDKYGKKLLKFNQIRINPLRNSKVIEIEIIYDTDIINANLDYDKCCSVDLGVDNLITIVSENEQPIIYNGKQIKSINQLFNKCIAKCKSKLDRCNKGKRRTSKKIQKLYEKRKNKMSDLMHKVSRHIIRYMLSKKIGTIVVGYNRGWKDCIRIGKRNNQTFVQIPYETLIGYLKYKCEMNGIRLIEIEESYTSKCDALVMEKIEKHEVYQGKRIKRGLYQSSVGKLINADVNGALNIMRKVFNNSAERIIDRGLLFNPMKLNDLWHLPQVA

SEQ ID NO: 13588 - protein, 415 aa, unknown
  TnpB Polypeptide
VECHPVDTVLWDDNSVVHLAHRIRLDPTATQAAYFVQACGVARFAYNWALAEWRRQHDAGENPSEVALRRQLNTVKNVQFPWMRSVTKNAPQQAIKNLGRAQANFFNDLARYRRGEISWKRVRVPTFRKKGRQDRFRADNGPEKRYHDAVHTDGKRVKLPVIGWVAMREEVRFAGRILSVTISRRADAWYASFTIEVHYEPDLRADTSLVGVDLGITVLATLSDGSDPVPAPKPLRRYLKKLVRLSHALSRKQRGSKNRAKAKIKLARLHRRISDIRADSLHKLTTYLTRYRTIVIEDLNVGGMLANRHLSRAIFDVGMFELRRQIEYKAAMAGSSVVVARRWFPSSKLCSTCGAKNESLTLAQRNWTCLSCGMSHDRDRNAALNLARYAESSAASACGAVGSGGDRKVVVKPAA

SEQ ID NO: 13589 - protein, 313 aa, Escherichia sp.
  misc_feature (242)..(304): Xaa can be any naturally occurring amino acid
VKRLQAFKFQLRPGGQQEREMRRFAGACRFVFNRALALQNENHEAGNKYIPYGKMASWLVEWKNATETQWLKDAPSQPLQQSLKELERAYKNFFRKRAAFPRFKKRGQNDAFRYPQGVKLDQENSRIFLPKLGWMRYLNSRQVTGVVKNVTVSQSCGKWYISIQTESEVSTPVHPSASMVGLDAGVAKLATLSDGTVFEPVNSFQKNQKKLARLQRQLSRKVKFSNNWQKQKRKIQRLHSCXXXXXXXXXXXXXXXXXXXXXXXXXXXXXXXXXXXXXXXXXXXXXXXXXXXXXXXXXXXXXXXPFDTGSGLV

SEQ ID NO: 13590 - protein, 475 aa, Bacillus sp.
MLFHFVPNIDLSKVMNSLRKVVKEMARKKAVKVLRKQKKREKMQRFTQKQNIGRTTLTAKEFRLLERMSHSSKALRNVGLYTMKQSYLNNNRMATVKEVDTAMQADMNYSGVQSNSVQAIRRALFTEVKSFFKAMEQWKKHPEKFTGRPKFPNYSRSTDKRIIEIYKVPKVDDNGHWIIPMNVAFRKKFGSIKIRMPKNLRHKKISYIEIVPKQKGRFFEVHYTYEMHVSQMKKPSTTTSNALSCDLGVDRLVSCVTNTGDAFLIDGKKLKSINQYFNKTIRNLQQKNMENGLSKRVVTNKIAALWHNREKQINGYISQAVGLLFKKVKEFDIDTIVVGYNAGWKQKSHMGKQNNQKFVQIPFHKLIAAIENKCIKEGIRFLKQEESYTSKASFLDKDPVPVWSKDDRTQYRFSGKRITRGLYQSKAGTCIHADINGALNTLKKSKIVELDENLKVKTPILLEVQKRKAVTSRIA

SEQ ID NO: 13591 - protein, 568 aa, Oscillatoriales sp.
LLRSVPRLNYRRDERLVGRRNTSPTIRLSYRKSIFGRVLILNILPKYGDGNTSARSNKIRTAPQNIFTIKLIHPFREFTLYCGKVEKKEVFMQLTYKYRLKPTKAQLATISTHLELCRRQYNYRLSERFRWWESTRTPVNACPLIASIVPVEEIYQNIPLTRVQTRDGRKKDESGNPLTRKGDVFSNIEGGYVQWQTIQLADLKNTKKLFSDYKTLNSQVLQDVINRVETSFSNFTTPDKNGNRRGKPRFKGFHYYKSFTYPQLDNLDIAKDEQNRICINLAKIGQIPMAFHRPIPTGLTVKTGTVIREADGWYISLTLEDKTVPVPVAEIQPTDENTLGIDLGITNYAYLSNGERIENPRFLRKSAEKLAKLQAKLASRVKGSKPWQVIKSKISRLHQFVARARLDFQFKTAHELFRKCDVLVAEDLSIKNLTRRAKTKTEIDNGNLVYLPNGQSAKSGLNKSMLDAAHGQFANVLKYVAWKLGKNLLFVEPKGTSQYCWNCLNKVPKELSERWHSCQCGESLDRDENSAKLIKKIGLSDQSGGGTPSLKKAFAKKEKEACGLTVLS

SEQ ID NO: 13592 - protein, 378 aa, Rhodococcus sp.
LTYRDTAIASLSARFDAATGHIAAPAGGEVSVPSGFARGVRRQLVACTRRSGEVTSDTARPEQLRITDIQPPPQVSAMARLAAADKQLAELTVTADTMVLTVKLPTEAVPAGDLSAAMTAVGVDWSPATLGAAAIVTDTGDGLVSDLRGYTYDDRGLGIKLARLQTEGQFLHRKAARLARLAENAPPQLRAELEGKIALLDENRVAVGVERGKINRELAFHFARQATDYAVAAAATVIAIEDLATLEPRGHGRVNNNRAARSARRKAADALTHTAARVGAAVVTVPARGSSSLCPGCNEELARPQGYHDAWCGSCQLGGNRDHVAGVNLAARGLLGRGKAVRTRTGSGDPHHRACAGAPVSGQVRPYSGEAAASPCPP

SEQ ID NO: 13593 - protein, 406 aa, Rhodococcus sp.
MRTAYKVRAYPDPEQATLLRRTFGCVRVVWNKTLADRQRRYTTERKSTSYKDTDAALSEWKKTEELAFLGEVSSVPLQQTLRHQHAAFQSFFKGVAKYPRFKNRHSRQSAHYTRSAFRIKPDGLWLAKTTAPLRVAWSWPDIDLATLDPTMVIVSREADGRWFVTFAVDTTDPAPLPETDESVGVDLGIKDFAVFSTGEKIGNPKHMARHERGLRRHQRRLARMQKGSNNRAKQHRKVARKHSRVRDARRDFLHKTSTDLVARFDTIAVEDLAPRNMVRNRSVAKSISECGWGEFRSMLEYKAERAGRRFVVIDRWYPSSKTCSVCGYLLAVLSLGTRRWTCPDCGTRHDRDVNAAKNILVAAGLAETRNACGGDVRRHGSSRPHSPVKQELPDVSPRIPVLRGGE

SEQ ID NO: 13594 - protein, 681 aa, unknown
  TnpB Polypeptide
MDDGNFKWTGLCYLVETFSLNSVDRRVNRRGTSPPPTPDSLLPQVRATSGRKMSVLDLQLVQQHFSVFVSLVNQVLDRVYSSAERLRSAGTALVDSHGQGYVVLRREAYLAYKDNEKIRSQCFERMYRNVLEQAARIILSDWIRRELMNSALSVLTADESALFRLQQNRYVPPELVRRVRKECCVVKDDGKSFYYSLSVLKQLRRALDEQLLAARGEPLGRRGQQRRRLQELLSDAHESESVRAVLIRCVGTWSQMGFPFTTPRMVAPVEDFSGSTENMPGQGYWYSADPERQDEMLFFVKLPEPVAGREHMLSPYKTRTASFRFLDWLPRAAKDDLRRAGNAEVQGHHLRARSLRVRAAKFSDMHGQLVNTVMLQHATYNLSLLKAKRNPDPERVRVLTEEVAKLRETRRCAPPRLVLRGDRLELQLPFQPPIKQAVDEILGPREYASRAGADRGLRENIAVSAEGGVDELISCAALMRKRELLRKQTRALSSDVRRKRNNWNRKRPGVSVPGHIMKRERHLSSLWMKVRRLDTEIARQVSSQLVWFCEEHAVKTLYMEDLKAYQPPAGNRTLSWNMSTNLWSKVLETTRYMRQSLGHPYGGIWTVNPAWTSRRCNMCGEKGIRVESADSTTEARGGEYFYCPSCNTHVHADINAARNLSQSSPVPGRTQLAYPTLSITQ

SEQ ID NO: 13595 - protein, 384 aa, unknown
  TnpB Polypeptide
MKKKKKKQHRRTYKYQIREHPQNMRLGNMLDDLCDVHNHFLKLENRYYRRFGKYAGRFRLQPHLTDMLERTHQHWAWIPRDTLDAVIIRLHLGFENFFDIPGFGRPKHKRRGKLRSAKFQSGYKLEAGRVRLSFKAWDEPSQSFKFNKRWFSFHHHRDWKGHVRYIQILRDSVGTYWLYVVTDDVSKEVLPATDESVGADFGMKDAYLTLSTGEKIHSPEFLKQSLSKLRSLMKSLSRKVKGSNNWWRCLRELVRLYRHVANQRKDWHWKLATDLCRRFDTIATEKLNLRGMKRLWGRKVSDLAFGQFVEILKFKCFKHNREFLQSGQWTPTTKPCSDCGYHNEELTLSDRQWRCPECGSHHDRDINAAINILRAARGPSVEQM

SEQ ID NO: 13596 - protein, 390 aa, Bacillus sp.
MLVNKAYRFRIYPTKKQEVLIAKTIGCCRFVYNFFVGKQKEQDAYWHICNEMVQNGQLLQNNWNGQFFNKYKSIKAIREMKAHYPFLKEVDSISLQKSVEIVNDAYSRYYKKQNDEPRFKSKKNPVQSYTTKHVNGNIAVLDKHLKLPKLGLVRFAKSREVHGRIINATIRRNPSGKFFISILAEVDVHPMPKTGSAVGVDVGLKDFATLSDGTVYENPKFFRKLEEKLARSQRILSRRKTDSSNWHKQRVKVAKIHEKITHARNDLLHKISTQLVKNHDIIGMEDLAVKNMLQNDHLAKTISEVSWAQFRTLVEYKAKWYGKQVVIVAKNFASSQLCSHCGHQHKDVKNLELREWTCPMCMHHHQRDINASINLRKEALRLTAGTAEIA

SEQ ID NO: 13597 - protein, 382 aa, unknown
  TnpB Polypeptide
MPVLSYKYRLYPTHAQVAGLTDMLGSFCELYNACLQQRIEAYQRRKKTLSFYDQSYELKEVRAVDERLASYSFSAEQRVIRRLDKAFKAFFGRVKNGKGGFPRFQAKSRWDSAEFRVGDGLTIRKSKKLGIVGIPGEIKVRWHRELPPDAKVLAAIISRSCGKWYICFAVETPDAYGPHPLGAVIGVDVGLTSLIATSDGDAEPTPKWVAKSAKKQRRLQRALARCKSGSKRRLKAKRNLARHSARTANQRRDFAHKLSRTLVNRYSHIAFEDLNITGLARGILAKSVLNAAWGQLISFTSYKAEGAGGVVVKVNPRGTSQECDCCGLVTPKTLSDRIHNCPGCGTVEDRDVHAAKVIKHRAFPWSRGPGAGLGASSQRVAA

SEQ ID NO: 13598 - protein, 280 aa, unknown
  TnpB Polypeptide
MELKEKYHLQSIFALSRAEDIWAAIETILYSNGRKLHFKKRGDLPEIRAKQSTRGLVIDSSQSGMIVKYGKVTIPCKYKAKDLWLWDEEKAILAYLAEPEIQDAHAVDQMSKGIITDTYRPCFVSLVCKKIRGRLRVYVHITVEGKAISKRRKDNTSRHYYGKGNVGCDIGTQTIAYTSNTEVGLENLAERGNSIQHVERQEALILRAMERSRRAMNPNNYNENGTVKKGHKQWIFSKRYQKLRQRHQELCRIVLSQNRQMQRNYKKEQIQRIRSIRMDE

SEQ ID NO: 13599 - protein, 479 aa, Paenibacillus sp.
MSEATLDYRTYQVWIKPGHRLFPYLLEACQQAKNLYNTANFFIRQVFTAKGPSAACQPLQQQVMAILSAHLDAMNARRRAKNRSRPFVLPTPEQPFLTYPFLDALFKVMEQPDYRSLPAQSSQGILKVVFQNWTSFFASLKTYRQHPERYTGNPKMPGYARSKVKGVIFSNQDCVIKEQKYLKLPRTKLQLNIGKLGCKRGKLMQVRVIPRHGQFVVELIFATPVDMPKPMPDAAPSERRMAIDLGVNNLATLVTTTGAQPMLVKGGIFKAINQYYNKMKAHYTSVLRQGKDPREGPHTSKRLERLYLRRHRRIKDGFHKVSHQLVRLAAEAQIGTIVIGLNTGWKQASGMGRRSNQTFCHLPHSQLIAMIQYKAAERGITVILAEEAYTSKASFLDHDPLPRFDEAVSCTFSGKRRHRGLYVSPQGMIHADVNGAANILRKVFPNVRAKRTDGIEGLDGNQSVNVSTPQVLSILRTSG

SEQ ID NO: 13600 - protein, 381 aa, unknown
  TnpB Polypeptide
VGGEGLVYEEKEMTIRQKSYKFRLYPNDEQKQLFAKTFGCSRAIWNMMLSDKIKHYEETKETLYNTPAQYKKEFPWLKEVDSLALANVQLNLQIAYKNFFRSGFGFPKFKKKNHSQSYKTNNQKGSIIIENGHIKLPKVGWVRVKAHRQISGIIKNATISMTPTGKYHVSILCETEIVPLPKTNTSVGIDTGLSDFAILSTGEKIVNGRFFNQLSKKLAKEQKILSRRALVAKKEGRKLSDSRNYQKQRMKVAKIHEKIANMRRDFLNKLSTNLIKNHDIICIEDLSSKNLMKNHKLAKAIGDVSWYDFARMLEYKANWYEKQISKISRWYPSSQICSDCGFSSVKKPLSVREWTCTNCGSHHDRDINASINILNEGLRLL

SEQ ID NO: 13601 - protein, 371 aa, unknown
  TnpB Polypeptide
MTIRQKSYKFRLYPNQEQKQLFAKTFGCSRAIWNMMLADKIKHYEETKETLHNTPAQYKNEFPWLREVDSLALANVQLNLQTAYKNFFRSGFGFPKFKKKSHRQSYKTNNINNNSSIVLENGFVKLPKVGWVRVKAHRKINGVIKSATISMKSTGKYYISILCEPEIAPLPKTNASVGVDLGISDFAILSTGEKIGNRRFFNQLSKKLAKEQKILSRRALATKKVGRKLSDSKNYQKQRIKVAKIHEKIANMRRDFLHKFSTNLVKNHDVICIEDLSSKNLMKNHKLAKAIGDVSWYEFVRMLEYKASWYGKQISKISRWYPSSQICSDCGFSSGKKPLSVREWTCTNCGSHHDRDINASVNILNEGLRLL

SEQ ID NO: 13602 - protein, 466 aa, unknown
  TnpB Polypeptide
VEKNYSVVKYNIKNKEMNEYLTRIAMLGNNLTNTVLYHHRQWYFYTQNVYYTEHPKENFKPYQYDAKLIDSLKECMYEYNQRKAKQNKKQTDFISFGLDAYFLHNYFKKIKQPDYTNDKLSAQVVQQITQKVSQTFKAFRQARKDYFKHPEKYKLCPQLPRYNKRGGVSSIYFTNQDTKIKGGVLKFPKTKLTLPFTYEPRGKYIRMEVVYNYGQFELQLIFEGEKNSAFRETNVVAAIDPGVNNLIAITTNKGQSLLVKDKIVKSINQYANKEISRITSAQTTTGGHKNIQMSKQLNKVYQKRYRRIEHLFYLLANHILDFCLENNVSKLALGKNKGWKQGYNKGKENNQNFIQIPYKSLYQKITDKLTKHGIEVIEQEESYTSQASALDLDHIPVYGDDVSVESFSGKRYGIHNRLYKTANGTTINADMNGALNILRKAFPRIEVELNYLQYLKNPQVLRNMQT

SEQ ID NO: 13603 - protein, 368 aa, unknown
  TnpB Polypeptide
MEIIKTYKYRLRLNKLQQQRIDAWINTCRAIYNLALETKIYAYRSNKKNLSAFDLMKQLTDLRHEFDWVTDVPINIEEDAIERMDKAYKSFFRGGGFPKFQKKLNYNSITLKHGVKKVCDGGFKLCKIGTVRIYKDRPIQGELRRATITRKNNKYYICILTKQEREIIPNANNNQVGIDMGLAFFASLSDGTQIENPRHTLKYAKRLRIAQRSLARKVKESNHWSKQKLLIGKLQEKIANVRADFLHKNSITIVSKFNFIAVENLNVKGMVRNGNLAKHISDASWSEFFRQLEYKSQWNGCEFVKIDPKYTSQTCNECGYTNKMSRVSQSKFVCTHCGIEANADVNAAKNILGRGMAFIRQREAVACA

SEQ ID NO: 13604 - protein, 546 aa, unknown
  TnpB Polypeptide
MGVNVAPEKTTEYKKALKAFHKVSDRHVLVLETEMSHSDKCHIFHYADLQRKAGNELVGIMRNRYEQLVRTKRYRKLLALYGKYTNAGDKKKAKQIADQMNAMQEQYDVTWNFCRKAMIPIGKKYGLASVTALTRAEDIWSGLEKCLFKDGKTIHFIKRGELPSIRAKQIKSCIILSTKQDSLWFKFNDISFSVLVKDAFERQEVEAVLSYLQEPEAIDRKAVHAYLTDGVISDTYRPCYASLVCKKTRVKLRVYVHLTIEGKAIPKQKKDGTARHSFGTGVVGCDIGTQTIAYTSDTEVGLRNLAERGNSIFKSERQERQLKRAMDRSRKANNPQNYNEDGTIKKGRKHWCNSKRYLKLQEKYRKLCRINAENRRYAIQEEINHLRTLGNIFVTEPKNAKALAKRIKKTEKNAKGKYKRKKRFGRSIQNRCPGYFQKQAERRFASSHSSYIEVPKDYRASQYDHTADAYIKKKLSDRMYQLADGTLVQRDWYSSYLLYCYDPATQQIDKKKCNLEFNKQYQKEMILIQDITKNKIKILNSGIKVS

SEQ ID NO: 13605 - protein, 515 aa, unknown
  TnpB Polypeptide
MVVKRVLPIRLSSKYRSKVRSFIYDVAQFQNLLRIFILEWDKKIYDIFRLFNSSLLYSLLADRVYSNKSEWQRKELEEVREIIEKDEELKSWVGKLKEQKKKVGEAGICSQMINQEVRNLKSWVRALKEYKVNPNKFRGRPGLPKPKKLRNLARFSVVVPCVIEGRKLFLKLRKGEKPLEVLLPEGFSYKVKEVRLVYDMDWIEAHVVYEKEISVCSVGVYQAGIDIGLDNLVSVVSDNPELRSFIVSGKEMKSYGRWFNKKRAEIQSHMDIILNRIKREKDIERKRVLEKHYEWLKKCLWNLYKARDRKLDNWVHQVTRRLADLLYETGHRIVYIGKDAIDKTGINLGRRVNEQYVGIPHRKFVNALTYKCQELGVEVVEVDERYTSKASPISDDVVKVQNRRVNGKEVQFSGKRVSRGLYKDLKLSKVFNADLVGALNILKVGAKLRRLLFDMKTLFVKLCNPVKFKLFDLIYKCNPESLFVRTEIGASKPAARQEALAPDGRVSVGLRGRWI

SEQ ID NO: 13606 - protein, 507 aa, unknown
  TnpB Polypeptide
MRGKMVVKRVLPIRISSKYRARVRSFIYDVAHFQNLLRIFILEWVRKTDDIFRLFNQSLLYSLLVNKIRSNKSEWQRKELEEVRSIIEGDEELKGWIEKLKAQKEKVWNAVVCLGIIIQEVNNLKSWIKALQEYKRNPEKFKGKPSLPKPWKLKNLVRFSVVVPHINEGRRLFLKLKIGEEPLKVLLPEGFSYKVKEVRLVYDMDWIEVHVVYEREICVSIIGVYQAGIDIGLDNLFSVVSDNPELRSFIISGKELKSYNRWWNKKVAEIRSHMDRILNMIKEERDEEKRKTLEKHYLWLRRYLWNLYKARERKLDTWIHQITRRLADLLYETGHRVVYIGKNAIDKNGISFSRVVNQNYVYIPHRKFVNRLKYKCEELGIHVVEVDERYTSKASPISDDVVEIQAKKVNGEEFQFSGKRVKRGLYKDLKLNKVFNADLVGGLNILKVGAKLRRLLLDLKTLFIKLCNPVKFGMWDWIYKSNPKSLFMQAGIGASKPVIGQEASAPV

SEQ ID NO: 13607 - protein, 502 aa, unknown
  TnpB Polypeptide
MVVKRVLPIRLSSKYRGKVRSFIYDVVQFQNLLRIFILEWDKRTNDIFKLFNSSLLYSLLADKIYSNKSEWQRKELEEVKSIIESNEELKGWIEKLKEQKKKVGNAQTCAYVINQEINNLRSWAKAVKEYKANPEKFRGRLGLPKPRKLKNLTRFTVVVPCVRDGRRLCLKLRNGEEPLKVLLPGEFDYKVKEVKLVYDMEWVEVHVVYEKEISVSYLEVYQAGIDLGLDNFISVVSDNPELRSFIISGKELKSYNRWWNKKRAQIRSHMDRILNMMKEEKDEEKRKILEKHYLQLKRYLWNLSKARDRKLSTWMHQVTRRLADVLYETGHMVVYIGKNAVDKDRINLGSKVNEQYGCIPHRKLVNMLKYKCQELGIQVIEVDERYTSKSSPISDDVVDIQCKKKHREEVYFSGKRVSRGLYKDLVLNKVFNADLVGAMNILKVGVKLHRLMMDMKILFIKLCNPVRFKMFDLIYKCNPESLLIDTGIGASKPAVWQEALAL

SEQ ID NO: 13608 - protein, 467 aa, Lachnospiraceae sp.
MYRTRQIRIRKGHKLWDYGKDLCMKSALLYNRANYLMRQYATAVRDLEKMKPLRENQIRVYRLVRDATRGTRYEVKGAWLTYGQLDYILKRTDDSAYRALPAQANQQILKRLGRDYRSFFEAQKVWKVHPERFTGRPKLPGYRKKGSPATAVLTNQICCVREERFLKFPGIKERLDLGSLPSDGGVKLKEVRIRPDHRDLVVEAVLELPDNSSVHGRLAGLPQEEILRKLAGSDGVIYRTAAIDMGVDNLCAVTGNFGGRSFLIKGGALKSENRYYNKKLAQLRSEAVKCSGLHSTERIGRLTDRRNRILKDLMHKASRKVADWASENRVDAVVLGHNVFQKQGITNGHVNNQNFVQIPFSVFAGMLKYKLEERGIAFLETEESYTSKADCLAGDVMPVYGKERETGDGERIRFSGKRIRRGLYRHADGTVSNADINGAANILRKVIPNETGWDRGVVDTPYAVRIA

SEQ ID NO: 13609 - protein, 387 aa, Lachnospiraceae sp.
MVKAIKVMLVPNNVQQTKMFQYAGASRFAYNWALAKEKENYEKGGKFILDTELRKEFTRLRNSDEYAWLLNVSNNVTKQAIKDACSAYKNFFKGLQRYPRFKSKKKSTPKFYQDNIKIQFSDTHVKFEGFSSSKKINKQKQNWVRLAEHGRIPTNAKYMNQRISFDGLNWWISVCVEFPDFKETLNDDGIGIDLGIKDLAVCSDGNTYKNINKSQTVKKLEKRKRRLQRSVSRKYEQNKEKGKYCKTNNIVKNEKLLLKVNHRLANIRKNYLNQTTSEIVNRKPRFICIEDLNVSGMMKNRHLSKAVQNQGFFEFRKQLECKCADNGIQLIVADRFYPSSKLCSCCGNIKKDLKLSDRVYRCGCGNVINRDFQASLNLKAYGKKFAS

SEQ ID NO: 13610 - protein, 388 aa, Lactobacillus sp.
MEKVVRGVKLRLYPNAKQRNQLSQMFGNDRFVWNQMLNMAKERYSNNPSSHFVNEYGMNYLLKALKNEYPFLKESDSTSFLVVNHNLAQAFKMLFKHRGGYPRFKSRHYLKKSFTGRSKMSVEAKRRVKMPKLGSIRTSKTGQLNNGKIKRYTISLEPTGKYYLSLQVEVPIIQSLPKTGKQVGIDVGVADLAITSDGQKYPKFNPLWLDKQATKWQAKYSRRKHQATISVRQWNHDKNHLTDMEVNDYQNWQRAQQIKARYQAKIANQRKDYLHKITTQLVKHYDVIVIEDLKAKNLQKNHHLAKSIANASWYQFRTMLEYKCAWYGKQLVVVKPNYTSQQCSKCGYQSGTKPLEIREWTCPNCGTHHDRDINAAVNILHKGLKAIG

SEQ ID NO: 13611 - protein, 382 aa, unknown
  TnpB Polypeptide
MANKSIKYRIYPTTEQSIMFAKTFGCCRKIYNLMLSDKIAYYKATGKSIQTTPAQYKDEYPYLREVDSFALCNVQLNLQAAYNNFFDKKRKVRSGFPKFKSAKRSRKSYTTNYKKGTVTILDKRYIKLPKVGKVRAVIHRIPNDDWVVKSATVSQESDGSYYISMLFEYNKVENTYITDKANAIGLDYKSDGLYMDSNGNVGTNHKYYRESQKKLAKEQRKLSRMKGSKKNEPKSNNYIKQLRKVNKTHRHIANQRNDNLHKLSTEIANQYDVVCVESLNMRSMSNKGFKNGKATMDNGYGMFLRMLEYKLSDRGKTLVKVDRFYPSSQICSCCGNKKKLELSERRYICTCGLEIDRDLNAAINIKNEGLRLLSQSGGSYPN

SEQ ID NO: 13612 - protein, 417 aa, unknown
  TnpB Polypeptide
MSDIEYIGNKIQLYPTDEQKDIIKRYFGIMRYIYNFAIEIESEYFKNTNKILSQFDINNLFTEFKNKPENSWLLEYDSTTMKIALWDAVNAFKMYLAKKCDYPKYKSKKSIAQSMAIRADRLTIGKSSVKISKKIGTILCGHIPKEYCIGKSSTYKDDPRYREYYNPRITFDGENYYLSFTMKKSDNMNFSNYDKMHNIIENSPYSDTIGIDLGCSKTNWIVDSNGIKIQLPNIDKESKKIKRLQTKLNRQYNINASRLKKCDGIRTKNMDKTICKINKYYRKKYNRKLNEVHNYVSHNIIALNPQAVVIEDLKVSDMLIKDTSRIPMSAKQAYNANILEHCLYKVQEIIVYKCQMHGIPIIRADKKYPSTNRCSSCGNIHNIGARKIYRCPVCGLVINRDDNAAKNLAIYPTLNFV

SEQ ID NO: 13613 - protein, 559 aa, unknown
  TnpB Polypeptide
LSTSPSGRARRSAPAGDPLRHLASLATPQSNKRDPEVSQPWRFRRKLSHLAHSIRSVMRYTTFRFALDLTPTQRQLLSRYAGASRFAYNQCLRLLADARTKHQRDPSVDVPWSGFDLINSFNAWKRSEAAGRVFVVARDGSTTKQVTGLAWRHEVSAQVFEEAAVDLGRALAAYSDGKVHKRNGGSVGFPKPKKKGRCRDSFRLRNRFRKDGHCQIRVGDSNPRSVTLPNIGIIRVHDTRRLRRMLRPPRHLDVTTGREFTEPRARIMFATIVRHADRWYVSLTVHAHDLHPQRRHPARRAGAEQGFVGVDRGLRQFVVTATADGSEISRWSAPRSLTGRLQRLRDRSRAVSRKQQGSANRIRASRQLSREYARITNQRRSFLHEVSGQLAKTHSRLVIEDLKVANLMVNRHLARAIVDAGWTDFARQLTYKAQWFGAELVVCDPWFPSTKACHACGVVRGRVGLEERIFRCGSCGLVVDRDRNAAANLAAWADRNYAPRTAKQAAGSPTPLEGLGLAAGRPMAEPVPRKGEPTFGPASEPKTSEKDGAGSPSKVIGAL

SEQ ID NO: 13614 - protein, 317 aa, unknown
  TnpB Polypeptide
MEELDTLNSSPLKKNPVKSITLRNNEYKTKNGIKASIRWEDNKLRLNKLGYIEVKHKRDIDGKIKEATILKENGKWFVCIVYELEKIQPLETFSGPSLYVGIDLGLTDFLTFSNGKVIHKPDLKKINRRIQYYQQKLARQKEGGSNWKKTLKKLHKWINKKNNVVNDYYHKISYNIVKHCEFIAMETLNIRGMVRQGSLSRSIHEIGWGKLIEMIRYKAEWYGRKFVQIDQWFSSSKKCNVCGEINHGLGRDEREWECPHCHSILQRDVNAAKNILDEALRATGSMVLCLVDFIPIGQGKFEYYYEWKGLDKTIGMA

SEQ ID NO: 13615 - protein, 292 aa, Kitasatospora sp.
VQLRYSFRLYPNGPQRAALARAFGCARVVYNDALRTREDARAAGEAFPKIGDLSKALITEAKKTTERAWLAEVSAVVLQQSLRDLDTAHRNFFDGLTGKRPRVGAPRFKSRKDNRQSVRFTANARWKITVGGDLSLPKIGDVRVKWSRPLPSGIKEPRQGPCQSSPHSRAGGRCAARVPPPALHPDHAREPSRGRGRPGGQDTRPHPDGQVRARCRLVGVRGHAGVQGREIRPHPGQDRSVRAHVPGVLGLRDQGRPQAPQRPRMDLPGVRGSPRPRRERRRQHQERRRTWR

SEQ ID NO: 13616 - protein, 411 aa, Kitasatospora sp.
LLTVQLRYSFRLYPNGPQRSALARAFGCARVAYNDALRTREDARASGLPFVPPAVLSKALTEAKKTEARSWLGEVSAVVLQQSLRDLDAAYRNFFDGLKGKRPRMGAPRFKSRKDNRQAIRFTANARWSITPGGDLSLPKIGDVRVKWSRRLPSVPSTVTAVKDASGRYFCSFVVETDPADDLTRMPETDAVVGIDLGLTHFAVLSDGRKIDSPKFLRRAEKKLKRAQQALSRKAKGSKNRDKARIKVARAHARVADARREFHHQLSTELIRDNQAVAVEDLAVKGLARTRLAKSVHDAGWSAFVTMLEYKAARYGRAFHRVGRFEPTSQVCSNCSVQDGPKPLHIREWTCGACGAVLDRDINAAVNVAKAAGLAVTACGAQVRPEHVPARRVEAGTHRDGQTTMVGIPAP

SEQ ID NO: 13617 - protein, 353 aa, Kitasatospora sp.
MTATHVKRAFKYRFYPTDAQTAELSRTFGYVRKVYNMALEARTAAWQRGERVNYNATSAMLTGCKKSEELAFLCEVSSVPLQQALRHLQGAFTNFFAKRAKYPRFKSRKKSGDSAEYTTSAFRWRDGQLTLAKMAEPLTIVWSRPIPRGARPSTVTVRRDAAGRWFVSILCKDLRIQPLPTVDGAVGIDVGITSLVTASRPIEGLTDPDGKVANPKCEREDRARLAKAQREHARKTKGSKNREKARVKVARVHARIAYRRRDFLHKLTFQAVLALRHYRRQCAAQHPRMGLRLRRTPRPGRERSTQYPGRRAGGCSLWRRYKTSTEHPGRAVVGEAGSSPTAAHTRAAAQPRG

SEQ ID NO: 13618 - protein, 404 aa, Kitasatospora sp.
MKIVVRVKLEPSPCQADALTATLRACNRAANHISEVAFAKGEIRRNGLQPLVYRHVKNAYELGAQATVRSVKKVCDAYATLKANLRAGNLGPKGSKRRNKAESRPIAFHPEAAQPFDDRMLSWNTDEKTVSIWTTAGRLKGIGFRCSSAALRMLTEHRRGESDLVHRDGQWYLYATCDIPAPPLAEPTDWIGVDLGIVNIATTSDGVVWAGRGLNRHRARMVALRAKLQRKGTKSAKRALKRQRRKESRRATEINHIISKTIVTAAERTSRGIALEDLTGIRERVKAKHDQRYLLHSWAFAQLGTFVEYKAQRAGVPVVRVNPAYTSRQCSACWHTHKKNRVDQATFACRACGMTMHADVNGSRNIRHRAAGAWQRGTVNCPTSTGRSAGQTRTPSRGDFSGTR

SEQ ID NO: 13619 - protein, 425 aa, Kitasatospora sp.
MIRAYKFLMRPTVGQQQALTEMLRDHCSLYNGALQERREAYRHVSKTTVRYGDQSAQLKEIRAFDPQRQGRWSFSSQQSTLRRLDKAFVAFFSRVKSGEKPGYPRFRGVNWFDTVEFPKDGDGCRWDSTPHDPVTHVRFQGVGHVKVNRHRPVVGKVKTLSVKREGRRWYVVLTAEQGEPEPLPATGSVVGIDMGIANFLADSDGGFVPNPRHGREAAAELQAAQQALARCKRRSNRRRKAVRKVADLHRKVRRQRLDHAHKTALGLVREHDLIAHEELKIRNMVKAPAPKPDPDRPGGFLPNGAGAKAGLNRSISDAGWGVFLTILHAKAESAGREVIAVDPATPPAPARPAGTSQRRTGRHRTPSTASAVATRRTLTRWEPSTFYGPGWSVATPGRVSEKPPRPRGEESRSRTTGPPTASVTV

SEQ ID NO: 13620 - protein, 430 aa, Lactobacillus sp.
MKRQSTSKADNIFIRTVVYRLYPSKRDQERFSKYCDYRRYVWNKFKSLNDHAYQNYRYEKEYYSKVGIKVKNKDFCAKYPTLYSLKADFNYDKKQWEYKLPSKIALMAITDYDNALSNFKNKAMPDWGRPKFKSKKAPRQGFKLPAESLSLSGKTITLAKGRKDKKHPRLVLKSRQNFLDYAFGTVSFYREKGRYYAAVPYYVPKENVASANALRGKVGIDLNVKHYNFFDGKSYSIDLNIKRLNYHYERINHYQRLLAKKKVVSRTNVNSNNYSAVRTKLQREYTRVNNLQNDFLQKLTTKLCQKYKQIIIEDLDVKHMKMGVASKGLHRAMFGEFRQILAYKAEQYGNDLIIADRLYPSTQICSNCGYRKTGDEKITLRGNQKHQTKHNEYICYECGKKLDRDDNASINLYQYLESNWLKEKETEKTA

SEQ ID NO: 13621 - protein, 578 aa, Calothrix sp.
MGKSLLSELTHRPYSKTKNPDGTRNPQLRIGVEAILPYHSFLSDWGDRYQSIMRTALNALQSGQSEDDIEKKFQGKFDIDWAWADSVASDAKGIFDQLTTARDLRIKALDDDIKAGWKSVALTIELMEQQLANPTRKNMKGFARRLMGLESKISRLERKQVEKEEFSKAKRLHICFGSSKLFNAQYHLEENGYSSHEQWRVDWERKRGGNFYSVGKGSVSGNNPVAKIFYINNDLFSVTFTVPRFLRSKYGDTVSLEFEVSGQRKHNLLYALESGKPVTVQCFRREHKNDQWYIHLTTYVQDVPTVSSINNGCIGIDLNAESIDIIYIKRDGNPERCRNAISFAIPTGTTGQKEAKLRDIVCEIVKLAELYQCPIACENLDFSTRKNQLRHSGSKEYNRILSGFIYDKFRSYLVVRAEKHGILILFKSPFMTSIIGMVKYMQKYGLNSASSAAMVIARRAMGFREYIPQKWLKTLTAFFRPEDWKDVGFGGGWKKISAWLKKFSIRRPHLFQLDTVLRFLLNSLVNESQKKTHKRRKPGGSDKSGGSRKGKAKPTEAQVLLEREEAVVTNSGAFTVAP

SEQ ID NO: 13622 - protein, 402 aa, Streptomyces sp.
MTRQVKRAFKYRFYPTDEQAAELSRTFGCVRLVYNKALEARTRAWYGEQRRISYVQSSAALTEWKKTEELAFLAEVSSVPLQQALRHLQTAFGNFFARQAKYPRYKSRKKSRASAEYTRSAFKWRDGKLTLAKLTEPLDIRWSRSVPEGAEPTTVTVSRDSAGRWFVSMLVEDIITPAPTTNAVVGLDAGVTSLVTLSTGEKVANPRHERRDRARLAKAQRELSRKSEGSANREKARRKVARVHARIADRRRDFLHKLSTRLVRENQTVVIEDLTVRNLLKNGKLARAISDASWTELRTMLEYKCAWYGRELVVIDRWFPSSKLCGNCGTVREKLPLNVREWTCDCGTVHDRDVNAARNILAAGLAASACGDGVRPQRESSRTGRSSVKQETQRATAGLPRL

SEQ ID NO: 13623 - protein, 288 aa, Mycobacterium sp.
VGPVIRGGLLRAAHPDHQITAHPADCARRNGPGSPDPGHGRHPRHRHRRADHHRIPKPGPAQGDTRRPSQGRPRTFPPHPRLPWASGSESQAGPPGSPVRAPTAGSSPPAHHRVGGHLWPGRDRRPRRGAMKRSMRRRAFRRSVSDAAMGLVAPQLAYKTAKCSGVLTVADRWFASSQIHHGCTSPDGTPCRLQGKGRIDKHLLCPVTGEVVDRDRNAALNLRDWPDNASRGPVGTTAPSAPGPTTTVGTGHGADTGSSGAGGASVRPRPRRAGRGEAKTQTPQGDAA

SEQ ID NO: 13624 - protein, 435 aa, unknown
  TnpB Polypeptide
MGSYEAVKVRLDPTPRQERLMASHAGAARFAYNAGLAHVKEALDSGEPADWSHYALRRWWNANKDELAINQDTGEVWWSQNSKEAYSTALRNLAQGFSNWSKSRKGQRKGKRVGFPKFKSKNTVMRFAYSADFTAPTARDPYGLKLPRIGRVHCMDNVYKRVNGARLIRITVSRRAGCWYASLTVEREQSSSPAHASRGVAVGVDLGVKSLATLSDGTVIPNPRALNTRLKALRKAQQALSRKVKGGARRERAKKHVARLHARVADVRADAIHKATTMIARNYSVVCIEDLHVAGMVKNRHLARSLSDAALGEFRRQLGYKTARSGATLRVVDRWYRSSKTCSKCGSVKAKLSLSERTYKCDNCGLTMDRDLNAAINICVAGSAPETLNARGEDVRRNQHTVGNADLGEARTKQSPTGGVRLGAGLGNEAMRSSV

SEQ ID NO: 13625 - protein, 103 aa, unknown
  TnpB Polypeptide
VEDLNIKGMVKNHKKAKAVADVSWSEFFQMLEYKALWAGRTFIQIDRFYPSSQTCSSCGYKNSAVKDEKVRAWTCPQCGAHHDRDINAAINILRKAKDTCTAA

SEQ ID NO: 13626 - protein, 215 aa, unknown
  TnpB Polypeptide
  misc_feature (192)..(197): Xaa can be any naturally occurring amino acid
MKEQIICSVDLGINTDAVCTIMRADGTVLGRRFIDHPSEKDRMYRTLGRIRRFQREHGSAQTQGRWAYTKRLNTELGKKIAGAIVRYAEENHADVIVFEYLEMQGKISGKKKQKLHLWRKRDIQKCCEHQAHRKGMRVSRICAWNTSRLAYDGSGAVTRDWENHSLCTFQTGKRYNCDLSASCNIGARYFIXXXXXXPSGNGKVFTGGKSPSCKA

SEQ ID NO: 13627 - protein, 398 aa, Actinomadura sp.
VKASHVKRAFRYRFYPTEAQAAELSRTFGCVRKVYNLALAARTEAWTRQERVNYNQTSAMLTAWKKTEGLAYLNEVSSVPLQQALRHLQTAFTNFFGKRAKYPRFKSRKKSRKSAEYTTSAFRYRDGRLTLAKMAGPLDIVWSRPLPEGAAPSSVTVSQDAAGRWFVSLLCEDPSVQPLPATDTAVGIDVGLDHLLTLSTGEKVSNPRHERRDRARLAAAQRRLARKAKGDGVNRAKARRKVAGIYARITDRRRDHLHKLTTRLVRENQTIVIEDLAVRNMVKNSSLARAISDAAWSEFRSMLEYKAEWFGRDVIAIDRWFPSSKLCSNCGTVADTMPLNVREWTCGCGTTHDRDVNAANNILAVGLTASVCGAGVRPQRRTPSGQPAMKQKTSRREP

SEQ ID NO: 13628 - protein, 401 aa, unknown
  TnpB Polypeptide
MNIKAYKYRIYANKATIEKLRWVLDRARELYNAALAERKEAYRVAGKSISYYEQKHDLVEIKNEIRPEYKDIASHVLQDVILRVERAYQAFFRRVKNGEGPGYPRFQGRNRYDSFTYPDHAGWKLEGEHLHLSKIGTIKIELHRPVQGNIKTCTIKREGEHWYVVFSCEVETEELPVSYEDVGIDLGVTHFAALSNGEFIDHPRHFRRAEKKLAKAQQALSRKKKGSHRRAKAARRVAKQHRKIRNQRRDFQHKASRKLVNRYQIIVFEDLQVKNLTKAPKPKQDEATGAYLPNGASAKAGLNKSILDAGWSTFTEMVKVKAASAGRTVIFVDPFMTSQLCSGCGAIVKKDLSERWHSCECGTELDRDTNSAKLILSLGYRQLSARTEPTGQLPVEASRCT

SEQ ID NO: 13629 - protein, 359 aa, Gammaproteobacteria sp.
MMKHAKTLKVRVRDRHAPLLNSMARSVNFVWNFVNELSQRSIKERGVFLSAYDMHPYTKGAGKELRLHSQTLQCIAGEYVTRRKQFKKSRLNWRKSGGVRRSLGWIPVNTAAAQWRSGQVYHNGHYFKVWDSYGLSQYRFRSGSFSEDTRGRWYFNIVVDGKTEISAGQNRIGIDLGLIDTATCSDGTKLEAGRFYRGLEEKLAIAQRARNKTQVKTIHAKIANRRKDALHKFSRTLVNRCGEIYVGNVSRLKLVKTKMAKSVLDAGWGQLKTMLDYKCAHAGIVFKEVNEAYTTQTCSHCGSLPESRPKGIAGLGIRKWTCSGCGVAHDRDVNAAQNILAVGHGRLTVGIPVLSRQPL

SEQ ID NO: 13630 - protein, 379 aa, Lachnospiraceae sp.
MEQLTITAKIQISATADDKVLLDRTMSVYSDACNFVSDYVFQTHDLKQFSLNKVLYSTLREKFGLKSQMAQSVFKTVIARYKTILENQKEWIKPSFKKPQYDLVWNRDYSLTQNCFSVNTLNGRVKLPYFAEGMSKYFDHDIYKFSTAKLVNKHGKYFLHIPVTYDVKESSISDICNVVGIDRGINFVVATYNSKHKSGFVSGKAIKQKRANYSKLRKELQMRKTPSARRRLLAIGQRENRWMRDINHQVSKALVESNPRHTLFVLEDLSGIRSATERVKTKDRYVSVSWSFYDLEQKLIYKAKQNQSTVIKVDPRYTSQCCPVCGHIEKANRNKKIHLFTCKNCGYKSNDDRIGAMNLYRMGINYLEDSQVPDTVTAE

SEQ ID NO: 13631 - protein, 363 aa, unknown
  TnpB Polypeptide
MAKKRTHPSVRIKTLKVRVRDKHCARLRAMARSVNFVWNYINALSHRSIRERGTFLSAFDLHPYTKGAGKELGLHSQTLQEVAEEYVTRRIQFKKSKLNWRKSGGSHRSLGWIPVKKGSASWKNGQIFHNGNYYKVWDSYGLANYPFLCARFCEDTRGRWYFHVAVAVPKEAHTGSGSVGIDLGCADAIADSNGEKVPGRHYRELEQKLGLAQRARNKKRVRAIHAKIKHRRQDDLHRYTRKLVNENAAIFVGNVSSQAMVKTRLAKSALDASWGMIKTMLDYKCAHAGIVFEEVNEAYTTQTCSCCGSRQNSPKGRTGLGIREWTCGCGVTHDRDLNAARSILALGHQRLAGGISTLNPLPG

SEQ ID NO: 13632 - protein, 362 aa, unknown
  TnpB Polypeptide
MIRTYKRKLILTTAQSDRIRSWTGACRVVYNLGLEVKIAAYKGAGKSVSMYELQKQLPELKKDIEWLKDVPSQTLQAVIERLENSYQNFFRNFKSGGGFPRFAKKHKYKSILIKDVSVDGNFVKIPKMGALKMFKDSEIKGTPKTATITIEPKGIFICIQCENVLVKFVSKSQAIGLDMGISHFCIDSNGNFIANPRHFKTYERRLRIQNRSLARKKKGSNSWARQAKRLSILHHKIGNVRKDFLHKESTKIAKANSIVYMEDLNIKGMSKNRQLSKHILDCGWGNFKTMLKYKTTVIEVNPKYTSQTCNECGEVDVKSRLNQSEYCCTSCGHVSNADINAAKNIMSKGIALDRQREALACA

SEQ ID NO: 13633 - protein, 418 aa, unknown
  TnpB Polypeptide
MLKAFKYRIYPTKTQIQLIEKHFGSTRFLYNYFLDYRQKEYAKGQKVNYMTTQGKLTELKSQKEYEWLNECGSQSLQMALRELDNSYQRFFKQLGGYPNFKSKKNNHQSFTAPQNIKIENNKTYLPKFTKDGIKTKFHREIPKDAILKQATISRINNQYFISILVDDNIPTPKPIKAKNAVGLDVGTETLITTSDYVKYPNLRHTKKYEQKLKKLQKALSKKQHSRKKGDTTPKSNNYLKQLKKVQKIHTKIYNSRKDYLHKISNEITNQYDIICLESLNVKGMVKNKRLSKSISDVAWSEFMRQLEYKATWKGKTIIKISKWFPSSQICSNCGTSTGKKPLNIRKFVCPHCNTSHDRDVNASINIRNYGLGQTDNRNSAGTVDYACGVSSSGVTTSYGIVTSYDTMKQEAQSSLAIG

SEQ ID NO: 13634 - protein, 238 aa, Crocosphaera sp.
VQLILKLDVREITPQLEPSKKCVGLDMGLKYLYADSDNNVVEPPKYYRKAEKRLNKLNRRKSRKFKRGQKQSNNYINARRKYAKGHLKVSRQREEFAKRLALRLIQSNDLIAYEDLKVKNLVRNKKLAKSINDAGWSQLRKWIEYFGVKYDRLTIAVNPTYTSQECFNCGQLIKKSLSVRTHVCSCGYTEDRDTMAALNILKKATQGHWGSWSEDLNAWGDSTSILVGSNTCQGKFSQ

SEQ ID NO: 13635 - protein, 377 aa, unknown
  TnpB Polypeptide
MLVGQKLRLKPNKAQEEWLKRYSGVARFIYNYSLAMKETVYKEQGISIGQKEIMRQITDMKYTPEYEWLQSYNSETVKQAVKDMLTSYKNFFQRGNKGFPKFKKKGKYKEGFYVRYDRIYSVDEKHIKFPSLKQPMKISEPFIIEQGSIINSRVSFDGKYWYLSFSYELEPIQEILTDEVVGIDLGLKELAVTSSGVVYPNINKSRTVTNLELRKKRLQKKISRAYEKNKEGKKYVKTNNIIKMEKQLKLINRRLSNIRKTYIHTVTTEIVKTKPSCIVIEDLSISSMMKNKYHSKAIQDAEWYFFRQCLEYKSQFLGVKLKLANRLFPSSKKCNKCGSVKKFLSLHERTYICKCCGFVCDRDLNAAYNLRDLAFSQ

SEQ ID NO: 13636 - protein, 411 aa, unknown
  TnpB Polypeptide
MAGFLSLVVRSLLAVKSVWQQYAPTRDVLGLLEVFRRMVNESIRIGIANDASSLRRLSLLSYNQLAQYNSPSCYKLCAISRAAGILASRKKSLKRGFPTRMPYAVRPQLISCYGFKTKNGRLEIPIARGKRLSMPLTKHTIDIISQPGVEVRSFTLTYNRLCLSIAREAPRIECASKVGVDRNLRNLTVGNDEETRHYDLSETVRIASTTIRIVASLKRDDARIRTGIASKYGMRRTARTDHLLHTATKTVVAAAVQRRQAIVLENIQGIRCLYRKGNGQTRKYRGRMNGWSFSMAQRQLEYKARWAGLPVIRLSRRETRGSSVTCPRCGERLQSDKRLKRKLWCSSCRVVMDRDRVAAVILARGGRVRFARSRPPLVEAQGGAVEAVKGNPTTTVIPGVDAPKLTQPTKS

SEQ ID NO: 13637 - protein, 205 aa, Escherichia sp.
  misc_feature (44)..(44): Xaa can be any naturally occurring amino acid
  misc_feature (75)..(76): Xaa can be any naturally occurring amino acid
  misc_feature (153)..(153): Xaa can be any naturally occurring amino acid
  misc_feature (193)..(193): Xaa can be any naturally occurring amino acid
MRRFAGACRFVFNRALARQNENHEAGNKYIPYGKMASWLVEWKXATETQWLKDSPSQPLQQSLKDLERAYKNFFXXRAAFPRFKKRGQNDAFRYPQGVKLDQENSRIFLPKLGWMRYRNSRQVTGVVKNVTVSQSCGKWYISIQTESEVSTPXHPSASMVGLDAGVAKLATLSDGTVFEPVNSFQKNQKTLAXGCFSPIQKAGTE

SEQ ID NO: 13638 - protein, 468 aa, Caldivirga sp.
VPSSGELNKRGERGLTSPAIPGEGVYEVKYTNVRTNVVRLLPNGYQERRLRRLADACARLWNEVNYERRQQFFNHQHVDFKGTWNKYYEKYKKILSVNAQAVMQKSNEAWNSFFSLLKLKKEGKLPPYMNHISPPGYWKDGRTGRRRLILVVRQDRYVVDEERHVLILKDFNMAIRFAGRLRWYGKQGRLEIHYDDTKNAWYAYIPVEVGVEEAKTGRRSRHIVKGERKSIQVESPKGSKVASIDLGINNLASVVVSDGTWILYKGIRTKEDYFYFQRKIAEIQSLRDTLKDKLLSDAIDELNHEMRRLYGRLRRRLLHLYRNLASHLVKTLHELGVSTIYLGYPFNIAQERGNKFTVNMWSYSKLMEAIELKAQEYGIKVFIVIEYNTSKYCAFHNVEVERKPRGVVHCPRGHKLHSDLNGALNIMKKATGKIPLVIKKPQSFIVGHNRVAPAKRGVTPKTPTKPRP

SEQ ID NO: 13639 - protein, 441 aa, Caldivirga sp.
MRTVRLRLLPSGAQERKLWKLGDVTAKLWNELNYTRLMQFRMMGKIDFKGTEHEYYYKYNSVLGVNAGQVVRLNNSAWKSFFETLKLHRQGKLPRFNGKPSPPGFWRDKVLGKRELIILVRNDRYYIEPINGGEGYLVLKDWNLRIKYAGRIKWAGKQGMLTIKLEGNRWFAYVPITVGEKPAKSNPKGYVRGVYERIRIEKPRGNNKAFIDIGLNNLFAVVFNHTDTAILIKGSTIKAEYYYWKRETKTYQSIRDWLRNRGFNAWRRYHAFYLHAVFKRRERFRHYYRTAIRFLARAMHEMGVDEVFIGYPYMVSQDNGNEYNTNVWWFNRITRWLGEVLQEYGIKLHVVNEYGTSRQCSICSMKHENGRVKRGLYVCETTGIGINADLNAARNIAKRAGYKTPTPKKILSYIVTTNGVKPLTPKEGETTKTPTVKTPPL

SEQ ID NO: 13640 - protein, 429 aa, unknown
  TnpB Polypeptide
MSSYESVKIRLDPTPRQERMLASHAGAARFAYNAGLAHVKDALENGESPEWSHYALLRWWNANKDTLAVNPATGVVWWSQNSKEAYSMALRDLAQALSNWAKSRKGQRKGKRVGFPRFRTKSHVMRFAYSTGFTAPTARDPYGLKLPRIGRVHCMENAHKRVDGARLIRVSVSHRAGCWYASLTVEREPHPSSTPKLGAVGVDLGVKNLATLSDGTVIPNPRALNTRLKALRKAQQALSRKTKGSARRRKAQERVARLHTRVANVRADAINKATTMIARTYNVVCIEDLNVAGMVKNRHLARSVSDASLGEFRRQLEYKTAKTGARLHVVDRWYPSSKTCSKCGRVKAKLSLSERVFHCDACGLTMDRDLNAAVNILVAGSAPETQNAHGGTVSRSNQHGCATQVPAKCEPSRGANRVRLGAASGNRGV

SEQ ID NO: 13641 - protein, 406 aa, unknown
  TnpB Polypeptide
LRQDTHWLQPWVSCRISFLDFCSRYCYTFLMNNMLIRTISIKLDIGEHEAALRETQQRFNEAASWIASICWHEHITNTNTAHHRVYGETRTHFDLGAQLAVCARAKAIEAIKATKSKKSETCPQFGPRGSIRYDARTYRLLSLDRVSLNTVQGRVICRLILGKRQHDMLIDQTWKIGGADLIWRRGTYSLNVTQHKEAPEQSRTDETLGVDLGIVNLATDSEGETFTGANVHEVRMRYHKRRQILQKVGTRSAKRRLKKMSGCEHRFQKDTNHRIAKTLVHKAVHTRKALALEDLTGIRERTKMVRRENRYERQSWAFYQLRMFITYKAAWAGVPVKFIDPRNTSRTCSQCEHCEKANRQSQASFLCKQCGFCLNADYNAAINISRAEVKRPMVAAGNSQLQASCL

SEQ ID NO: 13642 - protein, 419 aa, Hamadaea sp.
VARTVKRAFRFRFYPTSEQAAELARTFGCVRLVYNMALQARTEAWTQRQQRVTYNATSALLTGWKKTDELAFLNEVSSVPLQQALRHLQVAYTNFFARRAKYPTFKSKKKSRRSAEYTTSAFRWRDGRLTLAKMAEPLDIVWSRPLPDGTAPSTVTVSQDAAGRWFVSLLCDDVIEHAPTSAAVGIDAGLNSLLTLSTGEKVVNPQHERRDRAALARAQRALARKEKGSANRAKARHKVARVHARITDRRRDHLHKLTTRLVRENQTIVIEDLTVRNMVKNRSLARAISDAAWRNFRTMLEYKADWYGRNLVVVDRWFPSSKLCSTCGAHAQRMPLKVRSWTCRCGTVHDRDVNAARNVLAEGLSVIACGGGVRPQRESSRTGQSSVKQENPRATKGIPVLWGAEDVKESGTPLPARFR

SEQ ID NO: 13643 - protein, 317 aa, Streptomyces sp.
VSQDTLVKRQFGHRARLSLSPAGVRAADDQAHAARTMWNLLHAWWRMMPKEERTLANADAAIRQAREEIGSLAVLPAQAAQAVLKTYFQAWKNCWEGRAGPPDFKGRFRTVMSVDIPQGRDLNITRVHRRWGMVNIPKVGRVRFRWTKDLPVGKRADTENRITGARLIKDALGWHIAFRVQTLQVRPDPHQRPDIGVDVGVTVPVALSDGETYEHGEWLTGKEKAGLLDLEQRAAQRKRHRKPGERTSRRLHHTYDRIAGLRAKAKRRALDWQHKTTTDIARTYGTVVVEALTITNMVKSARERLKSQGRTWPRNPD

SEQ ID NO: 13644 - protein, 518 aa, Vulcanisaeta sp.
MLRRSIAVELETKRELNKLLHSVETAYLNIVREVVEYAVKNNVLNATQLHKLFYHKYRDEYPGLHTHLVVQAIRQASEIAKSFVERRRRGLVGKPYPEVKAVSIRFDETAWNYEQFIKSVAPVRLELSLHGRMRVVWLRPHKRFWLYWWRVLSGEAELASTLIVKRKVNRWYAVFVFEIKPKEGFPQSVISFDINENTVAVSRVDLPSTVDKVAKWNKQYLTPQLYMIRTDFGRLARRYERVRNTIIERLKPHFALPNGKYVNVTNTREYGKFVRKLREGVRKVGRVRQIANELTKTPAIIVTEELGSNPQESMIEDVGKDELRHRIKQTPFKAVERAVEGKALERGSKLFHVSSYRNSRICPVHFTKLERTDDWHVLYCPKGHYVDRDYASVMNMMWKVTPEGWVKGVWWNMKSLSKNMNWRKHENKSNPIIPYEIVKYTHTILKTFTASEQSPAVLARGKPMNPAREANEGRAREKGQIEFNASIITNEDLSEISTPEDLMRVILIAHSQMGYYYG

SEQ ID NO: 13645 - protein, 209 aa, unknown
  TnpB Polypeptide
VFGCQQVLIKPDKKLKAVLEYICGESNKLHNCAVYYARQIFFKAHIYVRPFDVINALKRNPHYGALCAQAAGRTCGAVGESVKSFKGLIKLFREGQLERAPKFPSYRTSGGLHLIAYPKQALGKKLIDGQISIPLGQKVKAWFGLKNFLLPMPSNLDYADIREIRILPRNGCFYAEFVYKSLSVQVAVDHQKALGVDLALITGLLVSAT

SEQ ID NO: 13646 - protein, 392 aa, unknown
  TnpB Polypeptide
MELTVVGKLDLSSQDKQRVNRTLHIFADACNAISQVAFNQQCFNPVALHHLTYQDIRQRFNLHANYTVRARERVAKAYKTAKAKKQPLKLLTFKPQSLDLDARLFRLFSKDDAVWVSLAACDGKRIQCAVKVGERYLPIIKASKPTSAVLKRHRDGELYLHITVSVPIPEPTDTPQSIVGVDLGEIDLIVASNGVKISGVESIERRKRFRARRRILQRKGTRAKRARTRLSDKERRWARNYLHTASRRFVDSLPPNSLVVLEDLSGIRDRCKRSSAEQRAQFHTWAFRQLQFMIAYKARLAGHQVVFVRPAYTSQTCPRCGHVSASNRLSTRLFRCRECGFQHNANFVASVNIASRAVQAGLDGTGLLSTSLKLREVNLFSASCRLKPTVVD

SEQ ID NO: 13647 - protein, 176 aa, unknown
  TnpB Polypeptide
MDSDGNVGSNHKYYRESHVKLAKAQRKLKHKTIGSNNYRKQQLRINRIHKHIVNQRLENLHILSTKIANSYDVVCVESLGIRSMSNKGFGNGKATMDNGYGMFLKMLEYKLTDRGKRYIKVDKWFPSTQLCSCCGSRKKLALNERIYKCSCGLTINRDLNAAINIRNEGLRILQSA

SEQ ID NO: 13648 - protein, 416 aa, unknown
  TnpB Polypeptide
MYLTVKQQVKHLSKEDYCSIKELCHAAKNLMNEAIYNIRQYYFTEGEFLKYEKNYSLLKNSPNYKTLNSNMAQQILKEVDGSFKSFFGLLKLAKQGKYAFKDCKLPHYLPKDGYTTIVIGFVRLNGNELILPFSNSFKKTHKAIKITIPPILLDKKVKEIRIIPKAKARFFEIQYIYEAECIQRNLNTNNALALDFGVNNLVTAVSSYGKSFIIDGKRLKSINQWFNKENTRLQSIKDKQSFGKKTTNKQKAIARDRNNKVNDYMNKAARKVIDYCISNDIGTLVVGYNETFQRKVHIGKQNNQNFVNIPYGRLQNKLQYLCDLNGIKFVKQEESYTSKASFWDKDIIPVYNNDNPKEYEFRGSRVKRGLYKTSSGKIFNADVNGALNIMRKSRVVDMNILYSRGEVDTPIRIRIA

SEQ ID NO: 13649 - protein, 399 aa, unknown
  TnpB Polypeptide
VIKQKSYKFRIYPNQEQQVYFAKAFGSVRFLYNKMLAERKELYEIYKEDKEQLKAHKPKTCTEYKKDNPWLYEIDSLALANAQINLQTAYNKFFRGKGKVGFPSFKSKHKDKDSYTTNNQGGNIRIENKHILLPKIKGIRIVQHREIPNTETIKTVTISRTPTNKYFVAILTEREEEKTQIIDIKSAIGLDFSMPHFFVDSQNNKGEYPKFYRQAQENLAREQRKLSHCKKGSNNYHKQKLVVALIHEKISNQRKDWLNKLSCQIAKDNDIVCLEDLNMKGMSQTLNFGKSVSDNGWGQFVNMLNYKAKSVIKVDKWYPSSKICNHCGRKNVNLMLNDRVWNCSECGAAIERDYNASQNILDEGMRLVRKNRKNKTVGTTGLAYLCLAQQGYRVGSHCL

SEQ ID NO: 13650 - protein, 297 aa, Lactobacillus sp.
MLFRTIARPGTTIVKSGMEFQPFHKKRSDWSYQTNCQYPKQKEAYLDNGTAKFIDAKHIKLPKLGVIRIAGLRKLIKERLLKHVSTRIGTVTIKKTAGDQFYLSMQLGSDIAFAQKLPKTQSQIRIDLNLDNFLTDSNGAMVAKPRFYRNAKKKLAHAQRVLSRRQREDFLQVLSTALIKNHDLVVAEELRSKNLLKNHALSQAISDVGWRRFLNMLAYKAKLYDKEFQTIDPKYTTQRCHNCGTIMGQNGCRKLKLKDREWTCPMCQTYHIRDWNAAVNILEKGLGSWQNPKKQTA

SEQ ID NO: 13651 - protein, 258 aa, Lactobacillus sp.
MSKPARMEFCKTLRLSVIRFCLNHYLPLQVEISEPEKYSLTGKQVGIDVGVADLAILSNRLKYPSFNSSYFEKKAKIWQRKYARRRHLAKLLVLQDRNKKVLCPRSLESFANWQKAQKSKAKYQAKAANQRRDYLHKLTTHLVKQYDVIAIEDLKTKNLQKNHHLAKSIANASWRIFRQMLEYKCEWYGKKLIAVDPKNTSRICSKCGYNSGAKPLEIREWTCSKCQTKHDRDINAAVNILHKGSTKLNGQGLAMVTS

SEQ ID NO: 13652 - protein, 385 aa, unknown
  TnpB Polypeptide
MLKAFKYRITPNKAQSELLNKHIGSCRFVFNLALETKQIAYAGNKINLNCFDLIKQLPDLKKECEWLKEINSQSLQAPIRNLDNAFTRFFKGQGNFPNFKKKSNGGSFNVPQSISLVGNKLIIPKFKKGIEIVLHRPIKGEIRQATISRTPTEKYFVSILCETGEAIKPKTPIKENTTVGIDLGIKSFLVSSDGKIFENPKHLRKAQSKLKYVQRKYSKYKGNRTKHRLTLAHEKVTNKRKDFLHKTSTELIRENQSIAIEDLNINGMLKNHNLAQAITDVSWSVFVSMLEYKAEWYGKNILKIGKFEPSSKTCSNCGYINKELTLKDREWTCKGCDFVLDRDVNASINIKNFALKNHLSVGRRLKNQNELPRLRGVLTSEAPCS

SEQ ID NO: 13653 - protein, 386 aa, Rubrobacteraceae sp.
MKLRKVYRFRMRPTKAQEVDLYRMAGARRFIYNWSLDRRKNYYAEHGKGITAKQLSSELTALKQEPDTMWLKEADSQMLQQALRDVDRAFDAFFKKRSRFPRFRSKKAGHFAFRIPQRVRLEDGKVYVPKVGWIRIRQSREVEGKTKSATFKRDATGHWYVALTAEFEMPDVEPPAPRTPVGVDLGLKDLFVLSDGERVRAPKFARKGTNKLRRAQKNLSRKKPGSHRREKAKRRVARVHRKASNQRSDFLHKLTTNLTQEYDCICVEDLSIKGLARTKLSRSILDAAFGEFLRQVEYKATWNFKRSIKVGRFFPSTKLCSNCGVVNPNLTLSDRTWLCCCGTQHDRDLNASRNILAEGLRLVAAGHTETQNARGEPVSLPTGSAA

SEQ ID NO: 13654 - protein, 492 aa, unknown
  TnpB Polypeptide
MQSCKDEKDYEHRTYQFRIKKNNPLFEYCDEMCFKAKNLYNIANFYVRQAFSGIKKEPELRHDNETMVINTVNSCIKELNHIKVITFEKRKNYNYTDKTKAKKKTKPALFRELDKNNSFISWCLLDGVFKLNKQADYKNLPAQTNQAVLKLLNQDWKSFFNALKEYKINPCKFKGRPKMPRYAKKNGRKVAAFTNQSCKIKTKNDKYYLIFPKTNLTLDIGEIGLKANNLKEVRIIPSSNFYTVEMVVAVPKPVINEKGTRIIAIDLGVNNLATIANNVGLTPIIIKGRILKARNQFYNKYRAKYYSILRNGKGTNEGQFTSNRLNKLDTDRHYFIKDYFHKASRMIINYCIDNKIDTIVIGKNKHWKDDIAMRKDAKQSFTNIPYNQFISMITYKANEKGIKVIETEESYTSKASFIDNDYIPTYGIDDEKAKFSGRRISRGMYKSKDGILINADVNGACNILRKVFPMAFSNKDLRNSGAVNAPMSLIVA

SEQ ID NO: 13655 - protein, 452 aa, unknown
  TnpB Polypeptide
MEVISSYNCKITNGKDIFKPTIEIYRRAITYLIEVVNDEYAHYINLTIKEKVNYTEKLVHMTEDNPCPKYSDFDKLFYKFPSYLRRDAISQAVGIVSSYRSNLANYEAERYNAISNGKRFKKKPPKLQLKHYKCPTLFKGNMFERISDNKVMIKIFHRNDWVWFDCNLRQQDVKYILSRVKTTADVKELSPTLCGSNRKYYLKFSFKRKVYLPKPKLKEQVIVSVDLGMNNTAVCSAMNVKGTVLGRLFINQPKEKDRQRHLLNKVCKAQYQSGKHAKIKSLWRKINNLNTQIANDTVNKIISFAIKYGASCIVFEYLGKMPKFKGKKNKRLRMQKQLWIYRRIQNKVYDKAHFLGIRVRHINPRNTSALAYDGSGRVTRNTKNHSICTFKNGKQYNCDLSASYNIGARYFINEILQSSTAKKRSELEAKVPEVLVRTNCVLSTLISVAKAL

SEQ ID NO: 13656 - protein, 431 aa, unknown
  TnpB Polypeptide
MKRVINFQLNPNKKQQIILGNLTYAASKLWNVANYERKNWSKQSGIKYPNWYEQKKKLKSHFWYKNLPSQTAQELLKQLDCSWKSFYKLLQTGGIKNPKPPKYKHQPFNVRYLNNGFELLNKHTLQLSIPKQLKTYLSDKFNITDKYLLIDVPVPISGAVKIVEIIPEHNKYSVNIIVELPDTKTKEDNAVYMSIDLGINNLITAYVSTGKTYIISGRQFLSINRYFDKKIAYYSSISDSQQAAKGIKYPKQSKRVQQLYAKRRKQINHVLHTATKSIIDIAEQNNVCKIIIGDITNIREDNNMGKANNQKFHKWPFKRIKDCLMYKAENKGIAVEMQEESYTSQCSPYTPQVSKKYAKKSNRKYRGLYKNNANTQIFNADCVGAYNILRKYLCRMEKSIPAVVRLDTPRMYHWNSQNFFANPKLSISMEM

SEQ ID NO: 13657 - protein, 280 aa, Euryarchaeota sp.
MLKSYKYRLYPSKKQIVKLEATLDTCRDLYNNALGSRKVQGELYRLPIPKQWITVKSQSKALPVQKKHDKYLPLVHSQVLQNVLRRVNKSFENFFRHLKNHESPEYPRFKSYTRYNNFTYPQTGLEIIGSKLHLSKIGDINIKLHRNMTGKIKTCTIKGDIDAWYASFSVEITDSLPEKTVIKSAVGIDVGINPLVTLVTLSNKEKEEPPKFLLQSEHKLAKEQRKLSRKQIGSHNRNKQRIKVVKVHRHIRQQRMDFHQKLSKKLVEKYDFIAFEDLKI

SEQ ID NO: 13658 - protein, 467 aa, Moorea sp.
MYKTIPVKAIFTDEEKAFWLFQGEQANSLWNCATYYSKQKHYTWLKQQPEAFTTYWKEDVLRYGWKTYKCNVKYAELCKELKDNPHYKAMAAQSAQQTLKSVAESITGYNQLVGLYYKGQVDRPRLLRYRQKGGLTGVTFPRQALTYKKGLFYPSVSKESKPELLTEIVLEAPDFIDPDWVKEVTIRPYLGELWIDWVIDDGKQPVENNPNLDYSQAWSFDHGGDNWLTGVSTHGKSLIIDGRKLKSMNQGYARLVAKYKAGKSDFYWDSNLDRVQRKRNNQMRDAIRRSRRYANNKAARFIINRCLNDHIGNLIVGWNERQKDSSKMGKRGNQNFVVIPTKRLIKRLKQLACEYGIKLTITEEAYTSKASYLDDDSLPKHGEKPKGWTPSGKRVKRGLYKSSEGHLINADCNGAGNIARKVAAQLGIDLTKAGRGSMTVPHRYDLFNSLSRSYRTRSEVARVHPAT

SEQ ID NO: 13659 - protein, 255 aa, unknown
  TnpB Polypeptide
MVLLDGKVKLPKAGWVRVKVHRQPRGLIKSATISKTATGKYFISILCEEEILPLPKTNSNLGIDLGLKNFAILSTGEKIENPRFLTSLSKKLVREQKVLSRRALLAKKKGRKLSDCRNYQKQKLKVARLHEKIYNQRRDFLNKLSTDLIKNHDVICLEDLASKNLMKNHHLARAIGDVSWYEFVRQLTYKADWYGKTIIQISRWFPSSQLCSSCGESSGKKALSIRKWTCEGCGAHHDRDINASINILKEGLRLA

SEQ ID NO: 13660 - protein, 235 aa, unknown
  TnpB Polypeptide
MHQNHIKLSLSKYFISGLSKTDIKQIEVPNRLLKYYKRHPDKLKNCKVKHVQKIDNYVRRNKVNIIGIDLGKYHYLAASNSDLTFNFVDEYSTFFHLFRKYTSRLEDKQVDNNKAYSKLKTGLKNHINQVINELIKQVNETDSFQTVFVLGDHGSSHLSFPSLIFDLTYFAIKQRKNEYDEILIVDESFTSIECPKCQNRTKSNRFRCNHCRFYHPNNDVVAAANIAIKGIKVYK

SEQ ID NO: 13661 - protein, 418 aa, unknown
  TnpB Polypeptide
MMKTWKQNLKHLTVDQYNLLRELCSLSRAVYNESLYNIRQHYFEEGSYLRYEANYHLVKNSDNYRRLGANVAQQSMKGADASFKSFFGLQKLAKSGKYQGWKIRMPKYLRKDSFFKIVFSQAQISDDKFRVPVSFDMRKDYKEPMFIKIPPHIIGKKIRQIHIVPKYNGRYFEVRYMFDDIDEEKPEIDITKAMGIDLGVNNLATCVTNTGESFIIDGKKLKSINQWYNKELSRLSSIKDKQGIKGYTKRQYSLTTKRNNRVNNYIYCAAKKIVNYCVNNKIGNIVVGYNDGFQSRSNLGKVNNQNFVMIPLGRLKSRLEYLCNQHGINFVLQEESYTSKASFFDNDKMPKWNPQNPEEAKFLGKRVYRGLYITSNKTKINADVNAALNILRKSNLTDLTVLQARGAVSSPSRCYIAS

SEQ ID NO: 13662 - protein, 363 aa, unknown
  TnpB Polypeptide
MQVTRCYEIKLKPNQKQKLQLNNYFYEAKVLYNYLLNCSNLFAVHSCKVKHVWKLNKDKQKVDVELNSLPSKLKQNVHRQMMNSIQALSASKKKGNTVGSLKFKSEIRTIDIDNQSYYIADSHHIKLSGFDRQKIRCLGLHQFDESVIKFRNAKLMKRDDEYFLKICILKEVTDHTSCNRDVGIDFGIESNLTLSTGEKFNCKIEETARLKRLQQKLARSHLINNRRTNNQRKLLKQIHKEYQKVTNCKNDFVNKLLHLLDPYDHIVFQDEQIRGWKNLKSCRKTIQHSCLGSIKQKLIMKSQEELERYIMLDKWIPTTQICPECGQKNRHGLDERIYHCSCGYTEDRDIHAAKNMLRFAQLQ

SEQ ID NO: 13663 - protein, 396 aa, unknown
  TnpB Polypeptide
VEQHQINKSHSMFKTIDELCFKSKNLYNYANYIIRQEFIFNHNYINYYDMKKELKTHDPFKDLGSQASQQTLEVLDRSWKSFFVAIKDWSKYPQKYLGRPRLPNYKKKDGRNIVIVSNTQSKIADGFLKFSWKPFRSFKTPTKVQGKLMQVRFVPRSNHYIMEIVYQINVPECIICFNRCMGIDLGINNFATISNNIGMQPFIINGRIVKSINQYYNKKKANLQSGLMLKHKKHWSNRLQRLTDKRNNKVKYFLHKSSKYIIEWAFKNKIDTIVVGRNKFWKQNSNMGKKVNQSFTNIPFEVFIEKLKYKAENIGIKIIETEESYTSGTSFLDNELPIKENYNKSRRIHRGLFRSNTRELINADLNGAYQIMKKVFPNTFVDGIEGVHLHPIRVNI

SEQ ID NO: 13664 - protein, 407 aa, unknown
  TnpB Polypeptide
LSKKSKSNQTKTRPKQEAKPRKTYLFRIYPTRKQINTLEKWLGLCCQLYNAALDERKSAYRMAGVSLSYEHQCAELPGCKSVRPDLADVPSQVLQDVVKRVDLAFDHFFRRIQHGQNPGYPRFKSRFRYDSMTFKQYQNSFSVLPGNKRNQGTLVLAKVGHIKMVLHRPINGTPKTATVKRTPTGKWFVAISVVLTEHEVQAKRLPPSQEAVGIDVGLKTFAYLSSGEVIANPRFFRIEEVALTRAQRKLAKAPKGTKQRESKRKIVARVHERIKNRRKNFMEQEVCKLLKRYGVLAVEALVVRTLVKNPKLAKSIADASWSMFFARLLDKAEEAGRVVVRVNPAYTSQTCSGCLHRQPMPLSVRVYECPHCGLIIDRDHNGSKNILEEAFSGVGRHTRDIPEAPAL

SEQ ID NO: 13665 - protein, 283 aa, Bacterium sp.
MSKFSYKFRLYPNKTHLQKLESTLELSRELYNSALLHRIQAWQKARYYVTYSEQANSLVEVKQVRPEFEEVHSQVLQDVLRRLDKNFRAFFRRLKMGEKPGFPRFKGRNWYKSFCYPQSGWQFLGDRKIQISKIGIIRVKRHRNFPEGARFKTLTLKKEIDRWYAIVSFEIPDRRDKVAIRNAVGIDVGIDAFATLSDGTKIENPRYLAKSEAKLAEAQRVFSRKRKGTCAREKARVRVAKIHRKIANQRNDFLHKVSRYLVNKYDLVVYEDLKIKQMMQNNN

SEQ ID NO: 13666 - protein, 265 aa, unknown
  TnpB Polypeptide
MNHVKRAFKYRFYPTEAQATELSRTFGCVRKVYNLALAARSEAWTLRQEQVTYNQTSAMLTGWKRTEELAFLSEVSSVPLQQTLRHVQTAFTHFFAKRAKYPRFKTRKKSRKSAEYSRSGFRFRDGRLTLAKMTEPLDIVWSRPLPEGAQPSTVSVSQDVAGRWFVSMLCDDPTIGPLPTADAAVGIDVGLIHLLTLSSGEKVANPRHERRDRGRLVRAQRELSRKAKGEGTNRAKARRKVAKIHARIADRRRDLLHKFDHSARA

SEQ ID NO: 13667 - protein, 435 aa, unknown
  TnpB Polypeptide
MKKALPNLKLNEANAVKLEQLDQLATGYMALVQRYVDHIFGMELKEARKFDDIPAIETALSARWQRCAWQQAVGMMRSFYSNERTNKPVLSNLTLQGNANVILLEPSNTETFDYWLRISTLEKGNPLRIPITLYPKARHTLSEGKLCSGVTLNKQDGVWYATLVVDLPQTKPQPDGTLMGVDLGIVNVITTSQGQQFGQFSEILKRRVEKSTQKKRRKMKLNACLKKKGRPPVSLVDKKFSRFIKNELGRTFNQFIKILPSSVTVVLENLSVKTMRFKSRLMNRILSASQLGYATQRLREKLDSAHIRYSSVVAAYSSQECFHCGFVDADNRPNQATFRCTYCGHHDHADANASKVLTKRFGDTELSGLADYREVKTILLHRFYGQNADARSVSGGLEPLVKHKSRDNRKVTVNQPTLTSFCSLRHLRTKGVTIQ

SEQ ID NO: 13668 - protein, 475 aa, Clostridium sp.
MKAMLINLNDEQSTIIDDMMLVFCTAMRHSFKKLLEGKAVGGLEKAVGKKYNLNIRQAKDAVESARQTISSQRELVKLNRDNYRRKVEAIEKKLTSSKKLTDKKRRALSSKLDKRKRKLAYFQKFIDEKTIQPVTFGTKRMFLRRCKGLITNKQWKDCRNNRFYSRGDKTKKGNPNLRVIVENQMTYLEISTLEKTANNRSIKIKVAVYLPQKLSKKTGKINGTNYTEIFLNHLKTGEAYKVELIKREGKYYCHITFELIQAEVIYTGHNGILGIDTNPDGLALTMIDNKGNYKWHFYLKQSDLLYARSTKRENLCGKIAKQIVLIAKIYNCGISIEDLKFKDDKDVSSKFSRIKHGFIYSKLLKMIESACYREGIEIVKVKPQLTSIMGLYKYCYQYGMSVHNGAAMVIARRSYEFNEKGPKILVSRFVKNVEKFNECTEWKKWSKLNKTIKEKVGENPGLWLANRKKILGLAN

SEQ ID NO: 13669 - protein, 251 aa, Clostridioides sp.
  misc_feature (89)..(168): Xaa can be any naturally occurring amino acid
MVKVRDKQVPKGRILNATISKEPSGRYYVSLCCTDVDIEVFENTNNHIGLDLGIKEFCISSCGEFIENPKYFKKSLNKLAKLQRELSRXXXXXXXXXXXXXXXXXXXXXXXXXXXXXXXXXXXXXXXXXXXXXXXXXXXXXXXXXXXXXXXXXXXXXXXXXXXXXXXXSWSEFIRQLEYKANWHGRKIVKVGKFFASSQICNKCGYKNEEVKDLNIREWICPSCNETHDRDINASINILKEGLRLITIQNK

SEQ ID NO: 13670 - protein, 392 aa, unknown
  TnpB Polypeptide
MRAYKTEIQPNKEQIELIHQTFGNTRYVYNQYIKLNLDRLKEDQDIISGYDYSKMLNNDPERPAWLLKSPSKAIKQAIMYAHTAVWGYLKGSQGIPKFKKKGKHNSFYLIGTIKVERHRIFLPKLKWVRLKEFGYIPNKVKSVTVSMKNGRYYVSCLVNETKDERIITSNKGIGIDFGLKDQFITEKLTIPSINKSPKVIKLEKKLRRKQRALSRKYESNMINKVYYKTGKKKGQLKSFKYKRPLHECKNITKQRLVVAKLYERITRIRTDYNQKAIQLILKQKPSFIVIEDLNIKGLMKNKHLSKSISKAQWYTSRLILTNQCVKLGIELRLAPRFYPSSKLCSNCGYKNKGLRLRERTWVCPECNIVHDRDVNASKNLEQCKNYTVLTAV

SEQ ID NO: 13671 - protein, 392 aa, unknown
  TnpB Polypeptide
MRKLLKSFKTEIKPTQEQIQKINKTIGTCRFVYNFYISHNKESYETEKKFISGMEFHKWLNNVYLKDNPEYLWIKEVSSKSVKQSIMNADKALRKFFKKESGFPRFKKKRKSDVKMYFVKNNPKDCWCERHRIHIPTLGWMRLKEKGYIPTTKQGYAIKSGTVSCKAGRYYVSVLIDMPETEKSQLNDFGLGIDLGIKEFAVISNGIVKKNINKTAKLKKLEKQLKREQRRLSRKYEDLKKRDKTMKGGATRQNIQKQVLKVQRIHHRIDNIRTDYINKCINEIVKTKPSYIAIEDLNVKGMMKNKHLSNAVASQKFYEFRMKLEVKCKELGIELRIIDRWYPSSKICHECGSIKKDLKLSDRKYNCECGYHVDRDFNASLNLREALTYKIA

SEQ ID NO: 13672 - protein, 372 aa, unknown
  TnpB Polypeptide
MILAKKIRLRPSLTQEQQLWKSVGTARFIYNWTLARQEENYKNGGKFIKDGDLRKEITLMKKTEEYKWLNEVSNNVAKQAVKDGCNAYKRFFKGLADRPRFKSRRKSKKSFYNDNVKLKVKEGNLVNIEKVGWLKTNEQIPIGVKYTNPRISYDNKYWYLSVGIEQEETKEELTDVSLGIDLGLKDLAICSDGIVYKNINKTYLVRKIEKKLRRLQRQVSRKYEKNKKGKEYVKTSNIIKLEKQIQLMHRRLTNIRNNYLHQTTTSIVKTKPYRVVIEDLAVSNMMKNKHLSKAISKQSFYEFKRQLEYKCKFKGIELVIADRFYPSSKTCSQCGEIKKDLKLKDRVYKCSCGLTIDRDLNASINLSQYKLA

SEQ ID NO: 13673 - protein, 387 aa, unknown
  TnpB Polypeptide
METITKTCKIKLNIPEKRKQDILKTFKQYNFALNFAIEQAWKPKRKIINKSKLHKLTYYPLREKTNLPANYICSARNKACDVIKGNVIKWHNHKKATKPVFNPFSAIQFDKRTLTIKNRDCTFSTVNSRVKADYFLGNYQKQILDDPNYEFRTATLTYKNDNFFLNITIVKPTLIKQPKIVMGVDLGIKNIAVCSTGKFFRSGLLNDKRRQFREKRANLQSKGTRSCKKVLQRISGRENRFANWILHNISRQIVNEANSHNVDIIAFEKLTDIRERAKRWRKEERKRVNLWAFSKLQQYVQYKAFEMGINTIFVNAEYTSQRCSKCGHIEPANRSSLNFVCKYCGYSLNADYNASKNIAIKVLSGKNPDWTGLPCKLALKTGSLTYA

SEQ ID NO: 13674 - protein, 354 aa, Thermofilum sp.
LREGVEQALERAKEELPSYWRKTLDERTPLYAFNDVEKMKRPRKQILKLPLAEALQVIQQNERPKNGALIDCKESKLVIYPGNGVSLELPIPERALRWLRDKEREVAPLKVHKTVRIQWRPERVQTLKVQIVFRVRRPRPPQPDPKNALLVFVDVNSRYGVVAVFASFDEGYVKIHETLKLRPPNQGRRLREAAKRMRAAAHGSKPNINYALARLSKKFDAQGWVKSAAAEIFKKAMKYAKGRSILMNIDIPNSELIKNSSLQRTLLSMRKVAENLANWYGIHAEFKCFSSRRCPLCGGELKEFRTKRTRIMRCSCGFTEDRDYTPLYWWIKELGLPLPKHPLRALPKPNDPEA

SEQ ID NO: 13675 - protein, 536 aa, Lachnoclostridium sp.
MIGEEYKKVLKQYHKLSDRHILVAETDMLYSDVLKVVALSDKIRKAGNEVVGLMRKNYGQLLRTKKYRKLFSSYGATEDKSERKNLAIQLNEMQKIYNVTWDYCRKSMIPIGKKYGIDAVFALTKAEDVWRGMEKCLYGNGKTIHFSKYGELPCIRAKQINRGIPMSVKDNKVRFKLGKTVFGIQIKDRFQQDEVNAVLAYLTGPEIIDNKAVNMLIGDACCIDTYRPCYATLVPKMIRGKYRIYLHLTIEGKAKPKYDKHGNFRHKYGKGMIGADIGTQTVAYTSDTEAGLKNLSERGNSIQTSEKKERLLYRAMERSRRAANPQNYNPDGTVKKGRKTWKYSNHYKKLKSRHSELCRINAVNRHFAVNEDANHMRSLGDIFVTEPKNASKLMKRTKETTKNSKGKYNKKKRFGKSIKNRCPSGFQTTVEKKFKISGGTYIEVPNNYRASQYDHTADEYIKKKLSDRLYKLRDGTEVQRDWYSSFLLYCYDAKTQNINKNKCITEFEKHYNKEKVLITWIKVNKIKILNSGIRIA

SEQ ID NO: 13676 - protein, 307 aa, Okeania sp.
MKLVERHIIQKNHRYYAEIDRLCFLSKNIYNYANYLVRKSWIFENTYLSYHQLQEILQSQADYQAMPAKVSQQILMIIDRNWKSFLTANEVYKQNPSKFKSRPRLPGYKNKIIGINLLVYTTQAISNKQLKQGIIHPSQTGIYLKTIIPTSQIKQVRLVPRLNHYVIEVIYEKCEKQYELEENRCASIDIGLNNLATLTFNQADIKPLLINGIPLKSINQYYNKVRGILQALLKENQSSQRLKKLCNKREFKINDYFHKASRLIINTLVAHKIGTLIIGQNTDWKQEINLGKKNNQNFVQIPHANLI

SEQ ID NO: 13677 - protein, 245 aa, Okeania sp.
MDNFTQPDKNGKTTGRPRFKGSHYYNSFSYPQLSNTNIVKNANGRFCINLPKIGLVPFVYNRPIPKGFKVKTGTVIREVDGLYISFTIEDKTVPLRRVEIQPTEQNSKGIDLGLIYYAVTSDGEFIEVPKFFRLSEHRLSKLQMRLAKKSKHSKPWKILKRKIAKLHQLIARQRLDWQFKLAYHLFSDCQVIFLEDLQIANLVRRCQAKLGDNGQFLPNGQSAKSGLNKSLQDAATINFLMFGSM

SEQ ID NO: 13678 - protein, 400 aa, Okeania sp.
MKARFKYRIYPTPGQKYRLAKLFGCVRVVWNDSLACCQQKYKSGENKPTNSELQKLFITQAKKTKDREWLSEVSNIPLQQSLNDLNQAYQNFFKSTKGKRKGRPIKPPKFKTRKSKQTARFRKGGFKVGEHKVYLAKIGKLKIVWSRELPTAPSSVTVIKDSAHRYFLSFVVEIQPEILSKTDNSVGIDLGIKTFATLSNGTKVDAPKPLKKRIKKLRKLNKSLSHKTKGSKRYEKARVRVAKFHAKLKDTRADFLHKLSTEIIRENQTVVLEDLNVSGMVKNRKLSRAISDLGWRQFRTFLEGKAEKYGRDFRVISRWEPTSQICSNCGFKGGKLDLKVREWECLNCGAKHDRDENAAINILVAGGQSETKNGRGGKRKTTAKVAAACETSTRRGASVR

SEQ ID NO: 13679 - protein, 304 aa, Bacillus sp.
VDSTALQSSLHNLAGSYSRFFNKQNKAPRFKSKNNKVQSYTTKQTNGNIAIVGNKIKLPKLGLVTFAKSREVEGRILSATVRRNPSETYFISILAEIEVQELPKTGSAVGVDVGVKNFAILSTGEVFGNLKWFRILEKRLAQAQRILSRRIKGGANWHKQRIKVARIHERSTNARTDYLQKLSTMIIKNHDVIGIEDLQVSNMLQNHKLSKAIQEVSWSQFRAMLVYKAEWYGKQVVVVSKTFASSQLCSHCGNKNKDVKDLELREWKCLSCGMHHDRDANAGQDLRKEALRLLTIGTTGIAYL

SEQ ID NO: 13680 - protein, 425 aa, Sulfobacillus sp.
MRQSFKYRLYPNKAQQQMIEDTLEHCRLLYNRLLTESKEAYEKFGHTLSYVAQANSFPARKDAIPTLHSVNSQALQDVAQRLDKAFQAFFRRVKNGEKAGYPCFKSVGRYHSFTYPQRGYALRDGCVYLSKIGDVKLKRHRPSEGTIKTCTFVAKNRKYYAVFSCEVEAAPLPTSQTMMGGDLGIKHLLVTSDGECFDHPQSLRKAERKLKRLQRAVARKKKGSRRRKKAVRRLAQAHERVANQRRDAAHKISRYLVNTDGLIAFEDLNAQGLLKNHQLAKSMADAGWHQLFQYTTRRSPGASIGPPLRARFGKPPIKPSDRSKWTNTLSVSGLSLAALARACKMWLESGAGTSESSLPNSLRRRHFQQRDVRRRTPRVMRLGDCVARYAWRWITTSPSAWLAGRVSTASSYSGQVGFQLMRRRL

SEQ ID NO: 13681 - protein, 391 aa, unknown
  TnpB Polypeptide
MSKKALAKYTVRKLNIDKIEQIDALALASGELYSMVVSRFWRTVRKKGIWLSPASMMRWCNSNKLHAHSADAVVQCFFASLKSWSVLKKTNTDAKPPHKRHRYFKVQWKSSAIRVKDGFLMLSNGKGNDPLVISWSWGMPKLVEIGWNGIGYVLRATYLNDPKPIITEGNIVGIDLGEIHIAVAHNGTDCIILNGRKLRSIKQYQNKLKAKISSKIDKKKRGSKRRKRLMRSKNKQLNRIKNQINDISHKQTTKLISVLESKGAKTVVIGDVRDIRQNIDYGKKVNQKLHQWSHGQTRSQITYKAERKGITVVLVNEAYTSQTCPCCGHKHKPQGRNYKCNACGFQYHRDGVGAINIRNKYLGNVIPVVGVMSSPIGIRYKPHNLCSSGIR

SEQ ID NO: 13682 - protein, 407 aa, unknown
  TnpB Polypeptide
VRQNVAHRAQRCTKKRYKGLDRAPKFVAMTTTFSYGYDYRFKAGQHVSLTTLNGRLVLPYQGYTPHIEYIQAGRHVAQEQTACRRQPSPPTKEQALADHERPLDQALLAQLALPWEEKRTEPTEEELPPGSLGGDLPPGVTFGAAKLWRDPRTKQWYLVVTLSIPLPAVREPDLRCVKGIDLGTRYLAVSTTADNQTQFLAGRAAVHQGEAFQRVRKRLQHKGTRSATARLRQFALRERRFKASTNHQVANLLVAPATLLGLEDLTHIRERTKRTGKRQRRKYAKWAFAEVGAFITYKAALAGSVVVKVDADYTSQQCPTCGYRAKRNRPRNGLRFRCSNPEGCRFELHADLVGARQVCLRTLAVRQDWAATGHLSPVPDVSSDEAKAARLQRYVELRWRTDTSPRL

SEQ ID NO: 13683 - protein, 159 aa, Bacillus sp.
MLDRLAKEQRKLSPKKKGSSNWHKQRIRVANIHEKVVNQRKYFLHHKSKELAANFDAVVIEDLDMKGVAQALKFGKSVADNGWGMFSSFLRYKRNEQGKQLTKIDKWFPSTKTCSHCGSIQEMALSERTYQCVCGVSLDRDGNSALNIKKEGIRLLATA

SEQ ID NO: 13684 - protein, 652 aa, Acidimicrobiaceae sp.
MPEGQATSTFVVSLDTSDAHARQRLQSLYFTMFNLRRALQRDAQRLCRAYWARKEERNTLGWKFVAEDLGLTRQGFAQLAKNHARNSRWAMDHVSMALVSHMADAVFEDAARHLWSDNTGKRRGALHVTAPHRFVTIHGRARSHTTLNKWETFRLYGTLQGHLDAYGHGALGEPTLDSVATLSPGSAVLRQHTMTTPGSTKWSSYAGPLVMVFAGGPQSHEPELQLPVRLPQGRGQWDRVGHFLSQPDLWHKINLVRRADSSQPGGWRYEMHLLVLSAGFTSAQNCALLDASPTDRRACVDVNVSNLAVVSVDAVHHARSTVVRVDADEQERLARAAAKKRRGERRVDRSRRASNAQQYAKSQAQVQRDERRCARGLRCVTDSTPRGGRLTAANGVPKRAYRHDQLSATYRDLRRRQGERERAQSLTKHTHAHDVAVQLVAIHGTNWLIEDCNLTTWAKLWGKSLHAFAPGMVTAELAALVARRGGSFVKVATGPTALSSHCLCGHRVQKDQSTRTHHCGACGFGGDRDLVSSALGTCVVTDLDDPSSARVDYTRAAALLAAITTTSTSRRFINPGRQDALTSQTHPLVSARRSDARYHGARSTRSPRRTARLNARRTAQSTNGPGSARPAKVVHDSVLRCISPPGDLRRSS

SEQ ID NO: 13685 - protein, 333 aa, Clostridiales sp.
MLSDRLLSDLTGESMEIRPAAYKKKYPWLREVDSRALCNVQLDLERAFRDYRKIKDRGRPRYKSKHHSRMSYTTNVVNRNIRIEGKKIRLPKVGMVRIRIHREIPEGWILKNVTVVKEPSGKYYASLLYEIPECESQAEGAQREKKCLGIDYAMDGLAVMSDGTRAEYPKYFRQAEEKLAREQRKLSHCEKGSRNYAKQKRKVAVIHEKVRNQRKDFLHKMSRKLADGYDVIGVEDIDMRAMSRTLHFGKSVSDNGFGLLRTMLAYKLKERGKELVKVDRFYPSSKRCSRCGRIKETLALSDRIYHCECGCELDRDVNAAINIRMEVMRLKAS

SEQ ID NO: 13686 - protein, 406 aa, unknown
  TnpB Polypeptide
MLVYQAFRYELAPTATQRVALANHAGAARWAWNWGLSIRRKAWQRRGETLGAIELHRLLTRLKRTPGYEWLYEVSKCAPEEALRDLDRAYANFWRGRKLGRRVGQPRFKKRGRCPERFRLAGVIRVEPRSVVLPRIGRVRTKEATSKFRGRILSATCRREADRWYVALTVEVVRPDPARIPGPVVGVDRGISAFAVCSDGSRVESPWALAHGLRGLRRRSRQVTRKQPGSANRRKAVLALARQHRRIRNQRVDALHKATTSLARAKSVIVLEDLHVAGLIRNRRLARAIADQGWAEFQRQLAYKCQWYGSRLLVAPRSFPSSKTCSRCGLVKATLPLEVRVFCCDECGLMIDRDVNAARNLAQLANNGLVAASSVETQNACGGGSAGPADSGLVKLPSAKQERTSI

SEQ ID NO: 13687 - protein, 572 aa, unknown
  TnpB Polypeptide
MELPKVKKKRSDVSKRIETNKDIDFVCIKMSWNSLCKNNYLKQGIQDIVYNINKISFLSYKLLNFHFTRLLEERKELPELTGNLFYNACCYVSIMKNRKSTIDKEDEMYQSFSQFSHLLKDLPFRDKMGALINNLNKQQFTMTKNHLKLNFYKRFSKYLELRTGETRKSIIYKWCKDIYDEKYDGKNYFILSMKQWLKYIPTETNIIKHSSHFIRIYHKILKEYEKHKNTKGVRAFSLLPNKHSFTMDNIQICSTALNDIISYLTKEQNCKDFDEKKREYWLNLFNIEKYETEHKKFHYTIFTDGKCGVITMDKPKAKEVKTKEIKNIDYEQYVGIDPGCRALFTSCNENDDTLQCSTKEYRHKSKMIYACKKRETWYKKWEYYTLWKSIPSFKVSNTKNMLSYFEYVLPNIDTFFRFHCDKNFRGLNFTSYCRGKATLEKICRNITKDKKTLIGFGDYSQQHGLVKNHPTTPILKLKKELKRFCDVVDIDEWGTSKTCNRCFERISLYRNKKLCKGKARMSQYHSVIRCSSNECKLCCMDRDINASKNILLLLQCEKQGKRRPKCFREQKE

SEQ ID NO: 13688 - protein, 477 aa, unknown
  TnpB Polypeptide
MLDSPSIWRSASGSFWRRSTGRNWWIKVPQLGPDLGQSVYSSYLLFEEAWSTSTADRLTTQRTALRADPRTTQLLHALSSVKGVARCRSYRYLLQPTASQRAALERLLCRQCELYNAALEERRGAWKWEGRSVNYVDHCRTLTDLRGVRPDILENGVAVCRGTLKRLDRAFGAFYQRSRNGKTPGFPRFKSVRRWDSVQWEDSGGWHLNLEQSRLRLLGVGEVKMRLHRSLRGTPKAMTVSREGRRWWVSVRCTDVPAKDLCHTGRDVGIDLGICAVVSTSDGDVVSEGRYGQRARNRLAEAQQSLSRKQRGSQHRDRAVERVARAHRKIRNQRKDLAHKLSRSLVNDYDLIVHEDLKIVNMVRRPKRVRTGDGTSVRRGAAAKAGLNRSIHDAGWGVLLRFIAYKAEEAGREVIAVDPRHTSQRCSKCGYVSVANRQAQAKFECLACGHTDHADVNAAINILRAGRAQQASACAES

SEQ ID NO: 13689 - protein, 394 aa, unknown
  TnpB Polypeptide
MIRTYKYRFYPNKKQVEPLEHTLDLCRNLYNAALQQRIYAHRLRRKNHYSKQQNELPALKKQFAEYRSVHSLVLQDTLHRVDKAFKAFFKRVKRKREGENIKAGFPRFKSRQRFNSFTYTQSGFKLLKNGHVWLSKIGELRVFRHREPIGEIKTVAVKRDKVGDWFITIATETLDVQPRKISTALGVDLGLKNFVTLTSGESIDAPKLFRKTERKVRRAQRILSRRVKGSRNREKARIRLAKLYRKVDRHRDDFIHKLSLWLVRKADLLVFEDLKVANMIRNHTVAKSIGDASWSKLVQYSSYKAESAGKRVELVDPRGTTQICSGCGTVVRKSLSERVHRCSTCGLLLGRDLNAAVNILNRSVLRGTQERTPVETTPTPVRASVVKETGSPRA

SEQ ID NO: 13690 - protein, 520 aa, unknown
  TnpB Polypeptide
VLKVKSDDGITTTIIARINVKEEDKFEINLLMGKYQSAKRMAFNQIVKDKNIVRGEIEAYIKYRIPSLNTRYMRDALMEAESIISSQKELLPMYLENNERKLRKSEEKLEKYRSGEIKPQRPLEIVLSGIGNRIKRLKEKKIEIEEHIENNTIPAIVFGGKKNLEKVQKKEISKEEWKELRSNNFYSRGDKSKEGNLHTRLYYDDLKDEFKMRLSISVEGKQCKFLYCPVSVPKEARHKGKRELLIGAIENYSPYSIRIRRDGDRYSAHITLSEETYGNYLYDIPSSAQKVAVIDLNVDRIGIVIADRKGNFLKRKTFYCHELEYVRKNKRDYIIHKTIKDVFEWLKREQVECIIIEDLKFKQDLDTNKKLNRIKSNFTYRKLYEAITRKALRNFINIKLINPAYTSQIGQLKYCLYGLSRHESAAYVIARRGCGYYERIPKGIIKEIPVLIERLKEGLEGAKEAARKKLLKQIELLKNWKNYSPINTKYKWKLWALISKLQNLLCSEFPVEGISGVSSG

SEQ ID NO: 13691 - protein, 407 aa, Natrialba sp.
MEVVRNIQVKLNVSSEDAEVLDETFKQFRQAAQHVADHGWDDNPYEITDTKNTLHDETYSDVREELSLQSSLVQSARNLAATALGNCKDRILDDGKKASKPEFRGSVVVYNGRTITYNDDHVSLATTDKRVTAEYVTPVNEEGTPFEDYWTDEWEKAEATLHKRDGTYYLHIAVKKDVDPSCDDESENGVVLGVDLNVDGYVAVTSTGAFFGNADYLNHRRDEYERRRGNLQQTGTRSAHLTIQSIGDRFARWSADYLHRISKAIVREAVENDCTAIAFENLNHIRKRISNASKFQQWAFKELQRHVEYKAEEYGIDVDDVNPAYTSQRCSHSECGFTHEDNRDGDEFECLKCGKELHSDYNAARNVGWRLIQHWLKSGAGRATSQLALKSGTLNANGRFRPTALRS

SEQ ID NO: 13692 - protein, 390 aa, Vulcanisaeta sp.
MKARRAVLIKLPRDMCDVDYIKRLMALTNLAYRGYEVLVPDIPKTIQYHLYNSFKDYLGSLVFGAKPKRWFARAWVPLKTLRIYQDGSMKGDNRAPVVLEFRNNIIRLRQVCRSESGFVVEVPMPNWVVERVKEGGDVKFAMIGLRDDEPYLALIAERVVEPYLPSNYMLVIDVNAWNNGIAWSLIKDGFIIKWKPEVPNLREVDNLYNLSVRLSREYGRLKRMGLDKTKEGKRLRKKIKNLRKRLYTKLRDYAQKLVHRLVRKALRHRAIVVIDDMIEESRRELLEEKIPSGLRKLYLTYTRRFVKLLISQLEWYGIPYKLKRLPSTICPICEHGLTQEEDRDMICPNCGFKAPRDMVPMHWAVRLIHQSNPSLATIQGWGFITNTVGT

SEQ ID NO: 13693 - protein, 374 aa, Desulfosporosinus sp.
MNKAFKYRIYPSPEQEILINKTFGCVRFVYNKMLANRKAVYEQFKDDKEALKQQKYLLPAEFKKEFEWLKEVDSLALANAQLNLQTAYKNFFRDKSIGFPKFKNKHRDKKSYTTNNQGGTIRLIDSKIIRLPKLKDVRIKLHRQLPKEAVIKSATISKTPTGNYYISVLVEFEAAIKPVTPTRETVLGLDYSSKTLFVDSQANNADYPKFYRQAEAKLKKAQRKLSKRQKGSKNRDKQRRKVAKLHEKVAHQRKDFLHKLSRQIADDYSAIAIEDLNMLGMAQCLNLSKSTNDNGFGMLKTFLTYKLTEQGKQLVVIDKWFPSSKMCRFCNNENKELTLSDRTWTCSHCGAELDRDINAAINIKNEGCRLLGIA

SEQ ID NO: 13694 - protein, 428 aa, unknown
  TnpB Polypeptide
MQRRKVTFKLDPNAAQTARLESWIRLHCELYNAALEERIDAWRKAGKSISYYEQQNALPQIKADRPEFVELGSHALQQTLRRLDLAFAAFFRRVKAGQTPGFPRFKAAKRFSGFAYPDPAGWKLMEHGGRGATLRLGSGEAAMSIRARGQHRFGIDAKPNDITLTRRNGQWFVSVTLRVPDAACARQRTDEQRRGVDFGINDWATFDDGQTIANPRWVRVELPRLAALQRQRARKRRGSVRHKRLGMDIARLHDRIANLRRDFVHKETTKMVRQCAVLATEQLSPKTMSRSAKGTVEAPGRRVRQKAGLNREILSAGFGMAHQMLAYKAEEAGTRLHLSNTRQIKPSQRCSACWELVPKTLAERMHVCPHCGHIMPRDQNSALVVLIDAFNTQDTPGTGVAARPKPLPRQRGKSKSVTRETPATTPCV

SEQ ID NO: 13695 - protein, 407 aa, unknown
  TnpB Polypeptide
MKRLQAFKFELRPNGQQQRQMRGFAGSCRFVFNKALALQKERYERGEKKLGYAGLCKELTAWRNGVETPWLADAPVHPLQQALKDLDRAYANFFAKRADFPRFKKKGQSDSFRYPDPKQIKLDQGNNRLFLPKLGWMRYRNSRDVPGTVKNITVSQASGKWYASIQTEREVAQPVPTATKAVGIDVGIARFATLSDGTFFAPLHSFRQHQDALRKAQQSLSRKVKFSRNWRKAKTKVQRIHTRIANARKDFLHKTSTTISQNHAMVCIEDLQVRNMSKSAAGSTEKPGRNVRAKSGLNKSILDQGWFEFRRQLDYKLAWNGGWLIAVPPHNTSRTCPACGHVSADNRQAQAEFLCVECGFEENADVVGAINVLRAGHARFACEVSGATRPPAAGTHRSDSGAVQCRA

SEQ ID NO: 13696 - protein, 541 aa, unknown
  TnpB Polypeptide
MQTGFRFRCHPTAAQEQILLRWIGCQRFVYNAKVREDRYFRTFARKSLALTGRHTPIDQQYAQFIGDDTAWLREVPSPILRNGAVRWKQAYGRFFKRLAGRPTLQRKTGAQSVWVTRELFHFDAVADPVTGEVSHRLIIGTKKFPLGSMPFKVSGAFQPPASIHITIEAGRWFASGSFDDGAVQPTFQETADWLATFDEAELLARTVGNDRGVAIPVMASTGQAFDFSDTQKARMAKKEAARRRWQRKQSRRAKGGSNRKKAVRRVEALHQYARNVRRDFAHQTSHALVSSPGTLLLVFEGLGVQRMTRRAKPRQDANGKWQRNGAAAKSGLNASILRSAWGKVKEYSTYKALRAGKLCLSVPAQHTSQECATCGHIHPENRTTQALFLCQRCGHRDNADANASKVIARRGVDLVLSGQCREKTAKRTMRLRQKSLAGTVRSHAHGDHGQSRRWKQYRARVAEVGNPRYNRASGLAAGEFIPEQLWETTMSPETRRLMQVEYEVADAPESDDATFELLMGDEVPPRRAFIEARAGYARLDV

SEQ ID NO: 13697 - protein, 400 aa, unknown
  TnpB Polypeptide
MKRLQAFKFELRPNGQQQRQMRRFAGSCRFVFNKALALQKESYETGGKFVGYVAMAKHLTAWRNGVETPWLKDAPVHPLQHALKDMERAYTNFFAKRAAFPKFKRRGQHDSFRYPDPKQIKLDQANGRVFLPKLGWLHYRNSRDVLGTVKNVTVSASGGKWFVSIQTERDVAQPVPTATKAVGIDVGIARFATLSDGTFFAPLNSFRQHQDALRKAQQALSRKVKFSRNWKKAQTRVQRIHTRIANARKDFLHKTSTRISQNHAMVCIEDLQVRNMSKSAAGSTEKPGRNVRAKSGLNKSILDQGWFEFRRQLDYKLAWNGGWLVAVPPHNTSRTCPACGHVSADNRQAQAEFLCVECGFEENADVVGAINILARGHRVAACGEARQSAPSVKQEPTEAI

SEQ ID NO: 13698 - protein, 542 aa, unknown
  TnpB Polypeptide
MPERRIFTYQTRLDLDVTQSAALDAYAALYGRVERSLFAAMRSGKAINDLKRDFQPRFGITARQFNAVRVGLDGKIAAIQERRPELIAESRARIARAEKVVAHLQARCPGTNKLHQKKRRLATLRSRLAAMQADQASGTVRLCFGSRRLFRAQLDLDANGYASLDAWREDWQTSRSSQFFVLGSQDETAGCQGCQAVAANDGTLSITIRLPDALRAHGKNLAMPGVRFAYGQDAMASALQSSRRVPAFTRSGKPTVKRIGSAMSYRFLRDAKGWRVFVSVEVQPAVKTSHAELGAIGIDINADHLALAETDRFGNLMHAQRIDLPLRGKTADQAKALIGNACAAIADLARVAGKPVVIETLNFQKKKAELEAVDPKTARMLSSFACNKVISGVKAACFRAGVEVIEVNPAYTSVIGVVNHAQQKGISVHQGAAHAIARRGLGLSERPAVRSGVVPTRNGGHVTFALPARNRAKPVWSFWSTVRTRLKAAHAAHIRSGAPKDPPAPLRPSNPASCSTWISTAQLRGANRQQHCSADVLGDVPC

SEQ ID NO: 13699 - protein, 373 aa, unknown
  TnpB Polypeptide
MRTVIKTYKFKLYKSKKNKHLNDGIDIAASIWNYCIAMHRRYYRLYGKHLSANKLKKHITKVKKTLNPEWQALGSQAIQDVVERVDRSYKAFFDHVKQKRHGKKSPPSFKRRSRYSSFTLKQAGYAFHEGSNCVTIMGRKYKYFKSRSIEGSIKTLTVKRNTLGEFYLIVVTKQECNDVLPRAGRAVGMDFGLKHFLNLGDGSVIDSPQWYKVSLNELRAAHRAVSRCQKGSNNRKRAIRNLGRVYQSISNRRRDWFFKLANRLVGEYAIICIEDLNLDGMKRLWGRKVSDLAFAEFVRILEWVASNAGTEVVKIDRWVASSKTCHICGWVNSELTLKQRNWDCPHCGNHLDRDVNAAINIKRLGLAQLGIPA

SEQ ID NO: 13700 - protein, 343 aa, unknown
  TnpB Polypeptide
LLQRKHYKFFGKYISKFSLIKHITKLKKQKRFSAWNKIGSQAVQDVCSRIDKSYRRFFDSLKKKNSRKARPPKIKKLHRFKSITLTHQAGFKLIGNGKIKIGKTVFRYHDSRQIEGRIKTLTISRSKTGDLFLCFACEVELPQTITSCNSAVGLDFGLKTFATLSDGTTIEHPQFHKRALRKLKTFNRSLSRKAKGSVRWRRARKRLARFHEKIANQRDDWAKKTANSLVKKYDCLFLEDLNLSGMQALWGRKMSDVAFGRFVSCLEWMAKKRGSIVQKIDRFFPSSKVCSCCGRENQGLRLRDREWECNACESKHDRDLNAARNILKVGTSTFAGVTVRPAA

SEQ ID NO: 13701 - protein, 440 aa, Streptomyces sp.
VATERAQEKRQFGHRARLALTPVQVRLVDAQAHAARATWNLLHDFWTMTPKCRRSLKAADEAIRQARKEIDWLGVLPAQAAQAVLKAYHQAWKNCWEGRAGEPNFKARLRTVMSVDIPQGRDLQITRVHRRWGMVSIPKAGRIRFRWTKDLPVGKHADKDNRITGARLVKDALGWHIAFRVQSLDTVPEPRTSPEAGIDAGVNIPLALSDGNHQDHGRPARLPNGTADRDKWLNPDEKAKLLRLEQRAAHRKSFRKRGEKTSRRLQNTYDRIKRLRATATRRATDWQHRTTTELARTYGVIVVEELDIPNMVKSARGTIANPGKNVAQKSGLNRSISQEAWGRTVTMLTYKTARHGGTLHKVPAPNTSLRCSACGFTTPGSREDQATFVCKNPDCGWSGNADHNAARNVLHLYRTGHALVPAAGRAVVRRTRGVKPATAR

SEQ ID NO: 13702 - protein, 395 aa, Lachnospiraceae sp.
  misc_feature (310)..(385): Xaa can be any naturally occurring amino acid
MNKGVKFRAYPNKGQQNLINRTLGCCRLIYNKGLAMRNDAYSNGKKIGYNQTSAMLTDLKKQADFAFLRDVDSIALQQSLRDLDRGFKNLFEKRARHPQFKSKHNNHQSYRTINQDDNIRIIGKYIKLPKLGYVKIKQSMEVGHINNVTVERTPTGKYFVVLNVDFEPEFRPNAGRMIGIDVGIKEFYSDSNGNVVNNPKYLEKSMRKLVREQRRLSRKQKGSNNRSRQRVKVAKAHEKITNQRNDFLQKQSTILVSENQTICIEDLNVKGMIRNHKLAQHIASCSWSKFFAMLEYKATWYGNDIIKVPXXXXXXXXXXXXXXXXXXXXXXXXXXXXXXXXXXXXXXXXXXXXXXXXXXXXXXXXXXXXXXXXXXXXXXXXXXXXSQQGNLLGTQ

SEQ ID NO: 13703 - protein, 307 aa, unknown
  TnpB Polypeptide
MNNGILVPRINSVSLWLVDDHVWKPINPMKIRINGVENIFFTSVAVNTHRGWVHLDLEPTKEFYKLLARDFKPTSHAKIKLDRENRSVAFHLSLEREVEIYKPGNIKPIDVNENSVTTLYEAFVITLGTDLAKTTLGYSYRKESIQRRNGSGGREAGKAMKKLKEGEKKRDYRMKTASLIVRDALRTRGVIVIERISGDNIRVMIARYKNKQLRHRIYQNALKGELNIIIDEAREYGVPVLMVDPRNTSKICPIHKTVIEYGEDRIGVCSKGGERWHRELAALINIYLKALEALLGIALIKGFEVSN

SEQ ID NO: 13704 - protein, 457 aa, Actinomadura sp.
MSDRPGDDRNHTGGRRGFEPAPGCVLQAYVFVLDPGVEAERALEMQCGAARFAFNWALSRVKANQDQREAERSYGITGTDLTPSASWSPYTLRKAFNQVKDQVAPWWRECSKEAYNTGFAGAATALRNWDDSRKGRRKGPRAGFPKFKTKRRTVPSCRFTTGTIRVEDRRHVTLPRVGTIRTHESTRKLDRRLVNGSARILSATVSHRRGRWQVSFHCEVQRARREPARPDAVAGVDLGVAKWVVIADSEGHVRTIVGPRHLDYARHRLRRAGRTAARRRGPAVRDPATGTFVRRAPSRRWVKAQQKLGRIHLRVANLRRDAVHKLTTSLVREYGTVVVEDLNVAGMLRNRRLARRIADGSFGEIRRQLTYKTGWNGGTLVVADRWFPSSKLCSGCGAVKAKLSLHTRVHRCDECGLTLDRDVNAALNLAALAGRMAGAGVAGHPGPQGPNARGASP

SEQ ID NO: 13705 - protein, 354 aa, Ferrovum sp.
VILVYRYRVKSLNGLLNKQSRAVNMVWNYCNDIQKQALKWNKRWPTGFDLNKLTTGSSKELGLHAGTINAVCEQYAKSRKQHNRPYLRWRSNKRSLGWVPLKGRDLKREGNAFRFSSNTFRVFNSRAIPEGKIKDGTNFSQDRLGNWYLNIVIDIPETEARPIQSGVGIDLGLKDFATLSTGEKIASERQYRKLESRLGIAQRARKKRTAARIHAKIANRRKDFNHKLSTRIVREFDYIAVGNVNAAGLAKTSMAKSVLDASWSFFRNTLAYKAVRHGAWFEEVNERFTTQVCSCCGSVSQSSPKGRADLGMRSWTCLDCGVEHDRDVNAALNILYKSGFGSGHRTPAEGISAL

SEQ ID NO: 13706 - protein, 348 aa, Streptosporangium sp.
VAFARDLKRRNVLQEAVYHRIKADFDLGAQAAVRTVKKVCDAYATLKANIKAGNLGPEGGKRRMRAESRPVVFREGAAQPYDDRMLTWNLDARTVSIWTVAGRLKGIPFVCSDQAMELLASRKGETDLVLRDGMFFLIATIDVPEPEVYEPDGFLGVDLGIVNIATTSDGQIMSGRQINRYRRRRRDLRTKLQKKRTKSAMRRLKSIRRRESRYATQRNHIIAKKLVATAERTSRGIGLEDLSGIRQRVTAKKDQRARLHSWAFAQLGSFVEYKARRAGVPVVFVDPRNTSRQCSECWHTHRSNRISQARFACRSCGAVLHADHNGSRNIAHRADAAWQRGAVNRPRT

SEQ ID NO: 13707 - protein, 208 aa, Paraburkholderia sp.
VTVKVKSARPNEANPDLGIDLGLKTFAGFSDERLPNVDAQRFYRDLEPALATAQRARRKSRVKAIHARIANRRKDFLHQPSSRLAREYGAIFVGNVNASALAKGQHSKSVLDAGWSTFRTMLRYKCDDAGVWFDEVDEAFSTQTCSCCASRTGPKGVAGLGIREWKCIHCETTHDRDRNAARNILAVGRDRLAGGIPALSARAAVGHD

SEQ ID NO: 13708 - protein, 386 aa, Paraburkholderia sp.
MIRVYRYRVKSLNGLLNQQSRAVNYVWKFCNDTQKHALKWGKKWPTGFDLNVLTTGSSKELGIHSGTVNATCEQYAKSRSQHKRPYLRYRGRKTLGWVPLKGRDLKREGDAFRFAGNTFRVFNSRPLPEGRIKDGSNFAQDARGNWFLDIAVEVTDVPARPISSGVGIDLGLDDFAALSNGEKTPNDRFGRRAAGKLATAQRARKHKRHIAKLHAKVANARADFQHKLALDLVRRFDCIAVGNVSAVRLARTRMAKSVYDASWSSFRDKLRYKAIAHGATFEEVNERGSSQTCSTCGSKDSATRPKGIAGLRIREWTCCSCGVVHDRDTNAALNILRSGRRAPVVGIPVLQGGEDVNGRTLRPARRERRGWPRPQSRTERESAWEA

SEQ ID NO: 13709 - protein, 414 aa, Paraburkholderia sp.
MERLQAFKFELMPTGGQARKMRQFAGACRFVYNKALAVQKENHAAGAKFIGYVPMAKRLTEWRNGTETPWLKDAPVHTQQCALKAIERAYVNFFGKRADFPRFKRKGVSDGFTYPDRNQIRLDRETGRISLPKPGYIRYRNSRMVPGEVRSATVSLRAGKWCVSILTKRDVEQPVPHGPAVGIDVGVARFATLSDGSFIAPLASFRRHEQRLAKYQRRMARKVKGSSNWKKSKARIQKIHARIADARNDFLHKASSTLSKNHAMVALEDLKISNMSKSAKGTANAPGRNVRAKSGLNKSIPDQGWGEFRRQLEYKTAWHGGYLVAVDPKNTSRTCPCCGHASKENRKTQALFACVSCRYGNNADHVGALNILAAGHAVIACGGMAQSGRPSKQEPAETTGAIAAWGCRNPRPLG

SEQ ID NO: 13710 - protein, 592 aa, Paraburkholderia sp.
LHASRRASATRRCARRASPRFASPNSPLAQSSVSFSSTNPDYRCEQNGTKLTSTPTVYKAAIHHFAHEDVGNPETLGGSFTRSCTWSSSPSNSASSASKSAHTLANTTRMSSSIPFVKTPRWHLFTKTKWTCIKKTQWRPCRRSLLAARYQNILLAMERLQAFRFELMPTGEQARKMRQFAGACRFVYNKALAFQRENHEAGGKFIGKFAMKKCFTEWRNSAETPWLAESPRHPVDEAILDLDRAFQNFFAKRADFPKFKRKGKSADSFRYPDPKQIRLDRENGRISLPKPGFIRYRNSRMVLGDVRSVTVSSRCAKWHVSILTRREVEQPVPQGSAVGVDVGIARFATLSDGTFIAPLASFKKHEQRLAKYQRRMARKVKSSSNWKKAKARVNRIHARIANARYDFLHKASNTISKNHAMIAVEDLQVRNVSRSAKGSAEAPGCNVRAKSGLNKAILDQGWFEFRRQLEYKTAWRGGFFVAVPAANTSRTCPSCGHISAGNRKTQALFACVRCAHEANADHVGAINVLERGQRLLACGDGAVGPLEEAGTRRSDSGHRGLSAVESPPFTAGRWYEHLPPLGEVPGPKGALA

SEQ ID NO: 13711 - protein, 212 aa, Paraburkholderia sp.
MAVSSRRSPASAGTNSAWQSINAGWPRKVKGSSNWKKSKARIQKSHARIADARNDFLHKASSTLSKNHAMVALEDLKISNMSKSAKGTANAPGCNVRAKSGLNKSILDQGWGEFRRQLEYKTAWHGGYLVAVDPKNTSRTCPCCGHASKENRKTQALFACVSCGYGNNADHVGALNILAAGHAVIACGGMAQSGRPSKQEPAETTSAIAAWG

SEQ ID NO: 13712 - protein, 434 aa, Paraburkholderia sp.
LSQRPNGHASRIRSGGRVEYRGQESWTNSLLSRMERLQAYKFELIPTGEQTRKMRRFAGACRFVYNKALALQQERYAAGEKKLGYPGLCKLLTGWRNSAQTPWLADAPAHPSQQALKDLERAYTNFFEKRAAFPRFKRKGIGDSFRFPDPKQVKLEQGNSRLFLPKLGYIRYRKSRSVLGEVRNVTVSQSGGKWFASIQTQREVDVPLPTATSAIGIDVGIARFATLSDGSHVAALNSFRKHEQRLARYQRHMARKKKFSRNWKKTKARVQKIHTDIANARKDFLHKASATISKNHALVCIEDLQVLNLGKSARGSIEAPGKKVRAKAGLNKSIPDQGWREFRRQPEYKTAWSGGLLLAVPAHNTSRTCPCCAHVARENRKTQARFACVSCGYGNHADVVGAINILERGQRSLACADSSPEVRASWQEPAEATT

SEQ ID NO: 13713 - protein, 265 aa, Paraburkholderia sp.
VSDRKSPKYSLGWVPFKARALTYKNGQVRFNGINIGLWDSYGLSKYELKAGSFNEDSRGRWYLNVAVKVQVEEKRVPDGASVLGIDLGLKSLATYCNGEKFEPKQWYRESEAALGIAQRARKKKRVRVIHAKVANQRKDAIHKETSALVKKHAAIFVGNVNAKALAKTSMAKSVLDAAWTTFRTQLKYKAIRQCVVFAEVNEAFSTQTCSCCGVNPPSSPKGRAGLGIRQWTCSDCGAVHDRDTNAARNIARLGLQALAEGISGV

SEQ ID NO: 13714 - protein, 343 aa, Paraburkholderia sp.
MARAVNFVWNYCNDLSLQIFRRERRFASGIEIQRYLNGASKEGLAVGSAVFQQIAEEYATRRKQHRKVKLRWRRPAGARRSLGWIPFKARSVVWRHGQAHFQGLHPGVWDSYGLACYEFGAGCISEDSRGRWYLNVTVKVKSARPNEANLDLGIDLGLKTFAGFSDERLPNVDAQRFYRDLEPALATAQRARRKNRVKAIHARIANRRKDFLHQLSSRLAREYGAIFVGNVNASALAKGQHSKSVLDAGWSTFRTMLRYKCDDAGVWFDEVDEAFSTQTCSCCASRTGPKGVAGPGIREWKCIHCETTHDRDRNAARNILAVGRDRLAGGIPALSAQAAVGHD

SEQ ID NO: 13715 - protein, 533 aa, unknown
  TnpB Polypeptide
VSRTIGRRLKGKKSQTDMTPEQLSDYTLALESQKQDMLASVLEEKQCVQRARLYRVYGTKKQYEFLRQQRGICRHLYNLCLSDINDYYQSNKHLIQYLHFLLDSDEIELTEKQAEAIKKSIYSYSILSESELRRKYQPDSYWKNNDKAWGLATPSNLRTSTIQNLLSNLHTALKTTRGQFQMSFLSKRKDKLSFHIPFSTQQINVKTGTIVPPTPPKIKKKKTKTTVPKKPHKIKEKTEKKVEIRQLKNVVFQYMTNKCPGQGLFTVRVRDKDRFPNSKDEIKHDGQFIYKSGCWYISLVQDVNVHPPTDTRELKICSIDPGIKTPYTVYDPQDGSITEIGTSKDSLERLKNPSKTLSTHARLERIRRLYKRGQSRLDIMKKEAVGRKAKHKCKRMEKYLTRLRHKKKCLIDELHYKTIKYLTSNYDVIIMPYFDTQPMLRQRNLSRRSKQALLDLNFSLFRQRLIGQVEIQGKIWLEVGEAYTTKSCVQCGHIQNLNLSQRIFKCPRCHLKLGRDVHSAISILVKNAEIALG

SEQ ID NO: 13716 - protein, 161 aa, Clostridioides sp.
VVDIEAFENTNNQIGLDLGIKEFCISSCGEFIENPKYLKKSLNKLAKLQRELSRKTIGSLNRNKARLKVARLQEHIANQRKDFLQKLSTKLIKENDIICIEDLQVKNMIRKRKLSRLISDVSWSEFIRQLEYKANWHGRQIVKVGKFFASSQICNKCGYKN

SEQ ID NO: 13717 - protein, 378 aa, unknown
  TnpB Polypeptide
VKLTAQIKLLPSPEQASALRKTLEVANTACNYVSNQAWENKTFRQFPLHKLTYRDVRDMFQLTAQVVVRVISKVADAYKIDRKVKRTFKPHGAIAFDNRILSYKLESKEVSIWTVDGRQRIPFSAGKRQLELLSGQRGESDLCYVKGKFYLFATCDVETPKPVDVEGYLGVDLGVKNIATDSDGNNYSGGQVNGLRNRHSKIRQRLQSKETKSAKRLLKKRSKKEQRFAKQENHRISKELVQRAKDTGRGIALENLQGIRERVTVRKSQRRQHNSWSFFDLRQKIAYKAERAGVPLVLVDPRNTSRTCPKCGCVDKNNRKSQSLFSCINPKCGFSGFADAIAAENIRRAAVNQPNAGRVEVKAGSPELRPSAPASFPL

SEQ ID NO: 13718 - protein, 382 aa, unknown
  TnpB Polypeptide
MNRTFKTRIYPNNVQESYLRGCCGFSRTAYNLCLGMWNEDYDNGVRHNYYSIKKKFNARKKAEFPWMYEYSKWIGEAAIQDLDKGFKSFFRGNTKHPRFHKKGVRDSFRIDGSAVRVEGRYLRLPKGLTLKMAEPLRYQDCTKIYNVTVSKRANMWFAAISCEVPDTAGESQAAVGIDLGCHVLMALSDGTVVQNPRWYRRRERRMRHLQRDLSRKKKGSKNWRKAKDRLAKFQYRTACMRADYIHKATTDVVRRYGVVFLEDLNVKGMRSNHKLAKSIADASLATMASQFEYKARVGRIDRWYPSSKTCSNCGCVRDMPLSERTYECPDCGAVIDRDVNAAINILNVGMANYPELMPVEGVEAVEVERPTKQESNGKRRFA

SEQ ID NO: 13719 - protein, 349 aa, unknown
  TnpB Polypeptide
MKRFNEACNHIAETVFAMHSANKVGIHKTVYYPVREHFGLSSQLTVRAISKVCEACKRDKSIKPEFRLDGAIVYDQRILSWKGLEKVSLITLQGRQTIPIRLGEYQKARMDRVGGQADLIFVKNVFYLCVIVEAPEESLYDPVDVIGVDLGIKNLAVDSDGEIHSGDKIQNARAKSDALKGRLQQCGTRSAKKHLKKLSGRMARFSRDTNHCISKTLVAKAKDTLSLISLENLEGIRNRTERTVKKSQRRNHSSWSFSQLREFVTYKAAIAGVPLVYIDPAYTSQECPICHCISKSNRPTRDKFYCTCCGFSGPADNIAALNIKARVAVNLPIVSRFFAQAQASSLRTG

SEQ ID NO: 13720 - protein, 486 aa, Mycolicibacterium sp.
VARFDVPDGSTVQAYRFALAPTPGQARRLASHAGAARFAHNHMLALVKAVMDQRAAERSYGIAEQELTPALGWTLPALRKIWNQRKTWCAPWWAENSKEAYNTGLDSLARGLDAWSTSRRGQRAGKPIGFVRFKTARARRSVRFTTGTIRVERDRHHVTLPRVGTIGTHESTRKLARRIEAGTARILSATVNQDGCGRWYCSFQTVVTAKARPAHARRSRHPVVGVDVGVKADGLLVVAIPDGVEVARVAAPKSLTAAQRRLRRLQRRAARQIGPYDPTSRSKRQPSKRWRATQARIGAAHAHAAAVRRDVLHKATTTLAQQHQVVVVETLNAAGMRAKGGARKRGLNRALADAALAHVRRMLDYKCRWYGSELVAADRYFPSSQTCSACGRRKSNLTLADRVFECDGCGVSIDRDLNAAINLARLGEPAHAGEQGSAGSGPVAGRGAMRESEPAPAGQAAGDEASTPHHQSVDQTGTASPQGEAA

SEQ ID NO: 13721 - protein, 201 aa, unknown
  TnpB Polypeptide
LYPGNRLREDKHYFQREEYQTEGTHGLSRKAQWAREKLSRRKEHFLHALSKDIVERCVEHDVGTLVVGDPSGVDESDWGRHGNKRLDNWAYKRVMNLLDYKARERGIGVEMPDERGTSSSCSVCGHEDDDGRVERGLWRCDRCEVVVHGDVNGADNIRQQTLTVTPPLGSGDSGNGCLAQPRVIQFDRTRGFQPREPVRIP

SEQ ID NO: 13722 - protein, 379 aa, unknown
  TnpB Polypeptide
MNTAIKYRLYPTTEQCIMFAKTFGCCRKVYNLMLNDKIKSYQSTGKFATVTPAKYKKEYPFLKEVDSLALANAQMNLQSAFRNCFDKSRKKRNNFPKFKSSKHSRKAYTTNNQNGTVAIVDKGIKLPKIGKVKAVIHRVPDAAWKLKSVTISQESDGKYYAAVLFEFEQNIVPVTSLDNAIGLDYASDGLYVDDKGDVGTNHKYYRESHSKLAKEQRRLSRKKGSKNNEPRSNNYLKQLQKVNKIHRHIANQRLDNLHKISTEIANQYDVVCVESLNMKAMSNKGFGNGKATMDNGYGLFLGLLEYKLANRGKHLVKVDKWFPSSQVCHRCGARHPKMKDLRIRTFACECGITMGRDLNAAINIKKEGLRIYNSEKMTS

SEQ ID NO: 13723 - protein, 419 aa, Beggiatoa sp.
MKTLKTKIRGLTKPQFERLRDLSCHAKNLYNQTLWTLREAYSATGKYFTYPQMDKVMKQVENLEGDINYKLLKAKVAQQTLRRLDKNFKSFFRCHQNFQTNPDKYKGPPKPPRFKHKPYDNLIYDYQAFSIKNGFVVLEKGLSFALPEKLVAQTIKQVEIVPKYRHFEAFFVYEDDEVVDRISPSDKVMAIDLGLNNLATCVTNGVAKPFILDGRKLKSINHYYNKRYSKRQSHLKKTRDRSWSNRLQRLTDKRHARIGDYLHKATRQVTNVCVREGISKVVVGDVTKSLDQINLGKRTNQNFVNLSLGQFIDKLRYKLELHGIQLSVTNESYTSKASFVDGDVLPSIYEPKKTYIFSGKRVKRGLYRSQNGTTLNADANGAYNILRKSNPEFSFGQLVKKAGEGILDWLHPDTRLKIC

SEQ ID NO: 13724 - protein, 439 aa, Clostridium sp.
MRALKGVSARLLMKEYGDELKKKLWGGHLWNPSYFIATVSENTEEQIRDIFKVKNKNRRVVDLFMKIIIKGFKYRIYPTKEQEIQLNKTFGCVRFVYNQILAKKIDLYKNESKSISKTICNNYCNRELKKEYPWLKEVDKFALTNSIYNLDSAYQKFFKEHTGFPKFKSKKNHYYSYTTNFTNNNIKVDFENNKIQLPKLKWIKAKLHKEFQGRILFATVSKTPSNKYFVSLNIECEHQELKQNNNKIAMDLGIKDLLITSNGTKIDNKKLSYKYEQKLAKLQRQIAKKKIGSNNWRKQRIKIARLHEKIANIRKDNLHKISHKIVKENQLIFSENLNIKGMVKNHNLAKSIHDCGWYELTRQLTYKSEWNNRIYHKVDRFHPSSQLCNVCGYKNEDTKNLNIRFWECLQCHTKHDRDENASINILNQGLKELKLEKVS

SEQ ID NO: 13725 - protein, 399 aa, Streptomyces sp.
VKATHVKRAFKYRFYPTGAQAAELSRTFGCVRKVYNLALAARTEAWGRQERVNYHQTSAMLTAWKKTEEYAYLNDVSSVPLQQALRHLQVAFTNFFDKRAKYPRFKSRKRSRKSAEYTTSAFRFRNGRLTLAKMAEPLDIVWSRPLPEGASPSTVTVSQDPAGRWYVSLVVQDPTIQRLPAADTAVGIDVGLDHLLTLSTGGKITNPRHEREDRARLAQAQRQLARKAKGDGANRAKARRKVAKVYARIADRRRDHLHKLTTRLVREHQTIVIEDLSVRNMVKNRSLARAISDAAWSEFRGMLEYKAAWYGRDVIAVDRFFPSSKLCSTCGAVRSGMPLHIRTWTCAGCGASHDRDVNAARNLLAVGLTVSVCGAGVRPQRSTPGGQSATKQKTPRREP

SEQ ID NO: 13726 - protein, 348 aa, Bacillus sp.
MTKHNKAYKFRLYPTKEQAYLMRKTFGCVRFVYNRMLAERKEAYEKYKDDKEQLKKQKSPTPAKYKAEFEWLKEVDSLALANAQINLQTAYKKFFRGQNDFPTFKSKKDRKSYTTNVVNGNIMLLNGHIKLPKLKMVRIKQHREIPQDYRIKSCTISMTPTGKYYVSILTEYEKEMVQKEVETVVGLDFAMDGLYVSSEDEKANYPNYYRNMLDRLAKEQRVLSRRNKGSERWQKQRIRVAKLHEKVANQRKNFLHHKSKKLATHFDVIAIEDLNMKGMSQALHFGKSVADNGWGMFPSTKTCSNCGNMKNMTLSERIYSCICGVNLDRDYNAAINIKNEAIRLLALG

SEQ ID NO: 13727 - protein, 422 aa, Cylindrospermum sp.
MRQVEKHIIKYRHEWFDYCTDITTISRQLYNAAQFTQRQGFFYRWGTQTQGSLDTLFKQNQNYKSMPAKVAQLVLKQNADGWIAYYKALSAYKIDSSKFTGRPKPPSYVDDKNLVKFNNQAIGKREFGKGCIVPSMSPIRIPVKPGLKLQDLCEVRIIPKTGYFVIEVVYEIPETSDFFCSLNPGLNAAIDIGLDNLATIVFNDLEIQPIIVNGKPLKSVNQFYNKQVAFFRSVLPKVQGKSRRIANIVRNRNNFLDSYLHQSTKMIVDEFLRLGVTHVSIGKNEQWKTHLNLGKRTNQNFTQIPHAKFIEILTYKLQRVGITVKVAEESYTSKASAIDWDIIPIHEPNNKIKHIFSGRRVKRAWYVSKDGFKIHADVNAGLNIGRKSNPEGFDCLKSILRDRGCLVVHPRRITPLFKRVHA

SEQ ID NO: 13728 - protein, 377 aa, unknown
  TnpB Polypeptide
MKVVRAYKFRLYPNKIQAKEMQTHLWLSKNLWNDGLEFAKQLYVDYQLFPSRQAYQEISKYSGMHSQVAQDVLIRLYLAIKVKIKRKKAGLKGGFPRFKSTDRVKSLHYPQSGFSLSGRKLKVTPFGEINIKKHREIYGAIKTLTLKKESSDRWYAILTAEAEVQPVPMKQGEAVGVDLGLMTFATLSNGEWIKKPRHMKKYEAKLAFRQRELSNKKLGGKNRRKAKLMVARIHVRVADTRKDWLHKTANNLLSRYSLIAFEDLDVQGIAEEHGKGISDAGWSIFTNIISYKAESAGCAVVFVNPKNTTKDCSHCGTCVQKEEHEREHNCPSCGLSMDRDLNAAINILNRATGGTPGCRERRNVPEHAQGRIADLDK

SEQ ID NO: 13729 - protein, 412 aa, Streptomyces sp.
VKLVVQVKLLPTPVQAAALEATLRVCNEAASWASVVAFEKDVKRNFALREHTYGEVKARWGLGAQAAQHVIKKTCDAYATLKANLKAGNLGRPGSKRYRKAVEKPIGFRPEGAQPYDDRMLSWQIDRRRISVWTVSGRVKDVTFTASPEQLATLALYRRGESDLLCRDGMWFLNATCEVPEAPLNSEPVDFLGIDLGIVNIATTSDGEIMAGRELNRFRVRERGLRTKLQRKNTPSAKRRLKKRRRKESRRARDINHKIAKHVVAEAERTGRGIALEDLTGIRERVRLNKPQRVTHSSWSFAQLGAFIAYKARRAGVAVVYVDPAYTSRTCAECGHVDTANRVSQAWFACRSCGFVDHADRNGSRNIRARAWELRRRGAPSTAPAPPRIPGSGAGRKRSITTSDARYASPAL

SEQ ID NO: 13730 - protein, 405 aa, unknown
  TnpB Polypeptide
MFKALRYRLYPSRSQERLLEQTLETCRRWYNDCLAERKVAWEDRRESVGKYAQLRKVKDLKHTNPYAAYVHSHVLQTAVQDLDKAFNAFFRRVKAGEIPGYPRFKGRNRFDSFGLKEYGNGFKLEGRRLRLSGIGRIRVRWHRPMEGMIKTIRLCRKAGKWYACFSCEVDVHPLESTGQEVGVDVGLYHLVATSDGEMVENPKWFRAEQARLRVMQRRIARRKLGGSNRRKAVAALQVQHERIANRRKDTLDKLAHDLIERYDRIALEDLQISNLVKSRYLSKSIMDSGWGYLKTHLTHKAAEAGRVVMLVDPAHTSDTCSQSGHVFEDLTLADRWVSCVCGLSIDRDHNAACNILKRAGRARWGQSTATGLRLPQEAAALWRVRSVTDLYSPPRLEAACPTQTH

SEQ ID NO: 13731 - protein, 268 aa, Fischerella sp.
  misc_feature (197)..(200): Xaa can be any naturally occurring amino acid
LKVKGFESISKKKFKNGGGISKVKFRSRKDPIQSCYIPKSAVSDKGIYHTILGEVIFKEALPQSFGDCRLVKAYGDYYLTVPEEVSRQQSENQGRVVALDPGIRTFITFFSESNFGEIGISANIQIQKLCFRLDKVISKIAKAKCKSKRRLKLAATRLRGKIKNLVDELHKKTARFLVDNFDIILLPTFETSRMSKXXXXLHKKTARFLVDNFDVILLPTFETSRMSKKAKRRIRSKSVRQMLTLSHYRFKQFLKHKAFETNKVVIDV

SEQ ID NO: 13732 - protein, 251 aa, Clostridioides sp.
MYCGQHIKLPKLGMVKIRDKQVPQGRILNATISKEPSGRYYVSLCCTDVDIEAFENTNNHIGLDLGIKEFCISSCGEFIENPKYLKKSLNKLAKLQRELSRKTIGSLNRNKARLKVARLQEHIANQRNDFLQKLSTKLIKENDIICIEDLQVKNMIRNRKLSRLISDVSWSEFIRQLEYKANWYGRQIVKVGKFFASSQICNKCGYKNEEVKDLNIREWICPSCNETHDRDINASINILKEGLRLITIQNK

SEQ ID NO: 13733 - protein, 397 aa, unknown
  TnpB Polypeptide
MEYRAYKFRIYPKADEIARLERMLYLCRRLYNAELEQRILAYRIQRKNVSYREQRDELPEIKKELPEYNEVYSQVLQNTTERVDKSFDNFFNRIEMKKKGTKIKVGFPRFKSSNRYTSITYPQNVNSAFVIMPNGKLKLSKVGNIRIFNHRKIEGKIKTCTIKKYSDKEWYAIFIVELPDKPKKVPKTIVGIDVGLKHLAALSTGEVIEPPKFLLKSEERIKHWQREVSKKKKGSGKRKKYIRILAKAHRRVECQRDDFLHKLSRDLVNKYDVIVYEDLQINNMLKNHCLAKSISDASWGKLMRYTNYKAESAGGSVIKVNPNGTSQICSKCGNWVKKSLSERFHHCPKCGFKSDRDLNASYNILNRYLKQKVGADSAELRTPLEMLPIPLSKEGGK

SEQ ID NO: 13734 - protein, 573 aa, Mycobacterium sp.
VVAAPPRGARIRTRLRPTANEAAALIAIGQFLGSVYRSELAGRIALGQLDKKSQAAWRAERKQALTVVSSSRWAGSLTRAVEDQYQLGMRGLAAQVTDLRAAVGVLEARCALRPGQIEPIDDCDAVGRCGRGRRRRRGYRSAAERFAKTRRLAVLRERLDSAQRALAAGHPSIVVGGNRLWRRRNNLDAADMSEQQWREQWDATRMFLTADGESGKAGGNETIRVDAEGQLRIKTPAALAELLGPHVVIDAPVRFGHRGQELAERVAARLAVRYDLSYDPVRDRWYLDASWTLTPGPPATLTELRAGPVLGVDLNVGHLACCVLDASGNPVGEPHTIEVATAGLAASRRDGRIRAAITALLDQAEHAGCTAVVVENLNFADARATGRETLGRGQRGKRLRRSISGIATGRFRDRLIAMAARRGIAVIGVDPAYTSRWGNQHWTTPLQHQTSDPATVTAHHAAAAAIGRRGLGVAIRRRPEGPRTRQRTRAGTPPARPDHHRGHGGRHGSSGPPTHPPPEACRSTGKHPPPAAKTVRAAQDSLLLSNQERFTSPIIRVTTTVNRRLQQTPDAAL

SEQ ID NO: 13735 - protein, 491 aa, Streptomyces sp.
VSSVKKFQPQPGFVVQAFRFALDPNATQEHALRSHCGAARAAYNWAVGWVTASWWQRKAEATYGIPEAELTQWRPWSLPSLRKEFNQAKRTDLRFVSWWEENSKEAYNTGLANAAAAFDNYAKSKQGKRKGKRLGMPRFKSKRKARLACRFTTGTIRVESGGRHVTLPRLGTIRVHEPTDKLLVKVRAGTARMLSATVRHERGRWFVSFSVEVARELQRVTRPDAAVGIDLGIKTLAVLADSAGEIRTVANPRHLAAALKQLRRTSRTVSRRQGPDRRTGQKASKRWEKANAARNRVHHRVANLRADALHKLTTAVTGEYGTVVVEDLNVAGMLRNRRLARHIADAGFGEIHRQLTYKTKRNGCRIVAADRWYPSSKTCSGCGAVKAKLPLHIRTYECDACGRVIDRDDNAALNLVALAVLAAAAVTGTGVAGDQDTAPAVSKPRGADQKTRATRTCRKASTGRAGGATLPHQRQTETRDRTQTEALTLWS

SEQ ID NO: 13736 - protein, 294 aa, Shigella sp.
VKRLQAFKFQLRPGGQQEREMRRFAGACRFVFNRALARQNENHEAGNKYIPYGKMASWLVEWKNATETQWLKDAPSQPLQQSLKDLERAYKNFFQNRAAFPRFKKRGQNDVFRYPQGVKLDQENSRIFLPKLGWMRYRNSRQVTGVVKNVTVSQSCGKWYISIQTESEVSTPVHPSASMVGLDAGVAKLATLSDGTVFEPVNSFQKNQKTLARLQRQLSRKVKFSNNWQKQKRKIQRLHSCIANIRRDYLHKVTTTVSKNHAMIVIEDLKVSNMSKSAGVRSASRGAMSGQNQV

SEQ ID NO: 13737 - protein, 324 aa, unknown
  TnpB Polypeptide
MVVGEELRDRHNSPKSRLRLEIVGDPNWPDYDDQSRLELWYDETDCTFRASQPVTVSADARDTPMAAETAALDIGANNLVACTATTGEQYLYEGRDLFERFRDTTREIARLQSKLEDGRYSSKRIRRLYRKRTRRRDHAREALCRDLLDRLYTEGVDTVYIGGLTDVLDTHWSVETNAKTHNFWAFKQFTERLACTAEEYGISVNVRTEAWTSQECPQCGSTDRTTRHQDTLTCPCGFEGHADLTASETFLKRQTEQAVRPMARPVSSEITDFRDAENALRFPARFEWDDHTWSESPRSHRPKEQRTDPSTVHRDGNVASGEST

SEQ ID NO: 13738 - protein, 383 aa, Methanonatronarchaeia sp.
MMQEAEKTIVAKIRTDQLTQTKRKALDYEFSEFQAYIRGDDDADLYSATKQAADAYIDTENLRDDHEYPWFIRNDVFDVEQHDTELADWWMNIPVSQVYGGVNVPINPHESIPDSAEVKDSKIVKEDGDYYAHLSIKQRVELQDEYDGVLAVDLGSRWVAVSVALPSRKTTFYGEKIRQLRRHHQELRTQLQEKGAYDTLVSAKDSEWRTIDDRLHKISRQIVDDAKERNALIVIGNLEGIQNQDKGSEMNRRLHSMPHYTLKQYIKYKARFAGIGVKVVNEYNTSQTCWRCGEKENTERVGQGRHLCDECGLDDNADKNGATNIGKKGLGKDIQSPLSSLGGVYEPSLELGDDDETAAQVRVRLRDDSETPPSTSESAGRAK

SEQ ID NO: 13739 - protein, 270 aa, unknown
  TnpB Polypeptide
MNEKSSRPVLRGRDGGNTTLLLDHLAAVTTNMGKATIITGRGIRSLKRQRTKQLGKIAKKQSRCKKYSRRWKKLQHAKNKLCRRAERRIRNIRHQATSKVIDFCVENRVGTLFIGNPHGVRSENRGRYHNQRMALWEYGKDINYLTHKSKAAHIVSFTGSERGTSSRCPQCGHKHKPKGRNWVCRNCQFSGHRDLVGSVNMHKVAYGNHKVQFPRSFTYLRPPGLSRPSSSRADTPQRCLSKTEAQPPRDARVSSETGHASELAQKSVPL

SEQ ID NO: 13740 - protein, 391 aa, unknown
  TnpB Polypeptide
MLRATKVRIYPTPEQVDFLNQQFGAVRFAYNKALRIISTQYRRHGVSLKARKDIKPLLAIAKKSRKYHWLNQYDSISLQQAVINLGKAFDNFFDKKKGFGYPKFKRKHGEQKSYHCTSVSVTDNYIKIPKIKTPIPANIHREIGGKVKSITISRTVTGKYYASILVDDGQEAPKTTKTVSRITGIDLGLSHFAISSEGHKEANPRFLKRAERNLRRKQRQLSRKQKGSKNRAKARLLVAKCHEKVANARADFQHKYSRQLIDENQAIVVETLKSANMMKNRKLSKHIADASWHSFVEKLKYKAEQAGVHLVKIDQWYASSKTCNCCGHKMDDMPLSLRKWDCPNCGSKDIDRDLNAALNILEQGILKLKAAGLVVSACGGQRNSRHERVAA

SEQ ID NO: 13741 - protein, 394 aa, unknown
  TnpB Polypeptide
MKKVLDSLCDYRRYCWNQGLDLWNTLYDARSICLSTELRAKIKASLTDKSIKFSEEEQALRARFPAPSQNLVQNELVAQKADWQYELSARVLLLAIKDLSVAWNLFFKNQKTANKPGFQSRKKPKQGFKTDRARIINGRLVLDKPHAYKGAWLSIRFKGASIPDGHLKLCAVTRTKGKYIATITMDVEIVALPKTGRKTAVDANVDHFDTTGGQTSLKPEQLDNLYKRVRTYQRQLARKRKVNKNYRNSKSYQATRAKLQETYERIRNIQNDLLHKFTTDLFREFDTVVIEDLDVKSMQMKKKAKNLHRSLFGRFRQFMEYKVKKFGKTLIIADRFYPSTQRCSNCGHVKTGDEKITLSGNQKHGTKHNEYICYSCGFVADRDQNAVLNLLALA

SEQ ID NO: 13742 - protein, 390 aa, Nocardiopsis sp.
MVDVSKIVVCVKLTPSPEQATVLESTLRALNDHATWVAKVAHERGVTRNYALRKHTYQQLREAGVGSQAAQHVIKRVCDAYRARRSNLHHGNYGPKGSARRERIESTPITFRPDSGHPYDARNLSFALDARTISLWTFQGRLKDVPFTGSPDQIKTLAEHKRGETDLLCRDGVWFLAVTVEVPDAPQVEPDSFIGVDLGIANIATTSDGQILAGRKINRYRRRQQRLRQKLQAKGTKSTKRLLKKRRRREARHAKDTNHQISKRIVAVAERTSRGIALEDLTGILRRVRQRKPQRATLYSWSFHQLGQFITYKAKRAGVPVVFVDPAYSSRECAECSYTDKANRISQASFICRSCGVVAHADRNASHVLARRGQGVWDAGRQSHGPPDQP

SEQ ID NO: 13743 - protein, 298 aa, unknown
  TnpB Polypeptide
LERYLKGDSKSSCSGKPRFKSLSRYRTFTFAQLKQDCLQGKFIKLPNLGNLKLIKHRSVPDGLKLKTASITRKANGYYLSLSIECENVANGSPDPDWSKTVGVDVGLKDFLTRSKGETVAIPQCYRKTERKLKRLQRRVSRKKKGSNNRKKAVHRLAKQHKKVADTRKDFHFKTSKWLLDNYDVVAHEDLNVRGLANSRLSKSVNDAGWGQFLSILEVKAANAGLWSVAVNPNSTSQTCSNCGANVPKQLSDRWHSRPHCHYEADRDVNAAVNIKTLAEGHPVHQACGELRDGGSKKQ

SEQ ID NO: 13744 - protein, 412 aa, Micromonospora sp.
MRTAYRCRAYPTPEQASVLNRTFGCVRVVWNRTLAARHGRYHAEGKSTSYAETDRALTQMKRLPELAFLNDVSSVPLQQTLRHQHSAFTAFFQKRARYPRFKSRQGRQSASFTRSALRMCDGNLTLAKMPGALRFVWSWSDMDVKAVDPTMVTVSRDPDGRWFVTFAVNINPPTAPEPTEQIVGVDLGLADFAVLSTGERIPHPRNWKRHERRLKRYQRIMARKQRGSNNRNKAKVRVARVHSRIRDARQDFLHKASTDLVRRFGAVAVEDLNVAGMVRNRKLARAISCTGWVKFRELLTYKAHRDGRHLAVVDRWFPSSKTCSACGHLLDTLSLGTRHWTCPSCGTLHDRDVNAAKNIAVAAGLAETKNACGADVRHEGQPSVQSAVNQEHSPARVGKPGPLEPGGCQRCR

SEQ ID NO: 13745 - protein, 426 aa, Micromonospora sp.
VLEINSWRRRRRDAPLAGYQELCRELAAAGPGTFGELDTTGARSVLRRFSDAWFAAAKRRAAGEVSARFPRRRRRLVPVRWYHGTFTIEGRRVRIPAAKRMPPLRVPLARDLPYPVEQVRSITLLCDGGRLFLDVTAEVPIATYPPGEEPDPHRVAGVDLGIIHPFAVAGCDGEGLLVSGRAIRAEHRMHLADTKARRRAVTRRAPKPGEKGSRRWRQYRRRARAVQGRHRRRVRQAQHEAAATVIGWAQQRRAGVLHVGDPRGVLDIPAGRRHNLRLRQWQIGRLLQILTDKATLAGITVRLVDERGTSSTCPTCGRRVPKPRGRTLSCPHCTYSGHRDLVAAATIAARTPGGGPTTTAAPVLPEVVTHRRAGRHLPGAGRSRRDPRRPTMAARGSVGPRRPAPPPGGESLAHPARIHSIHRITR

SEQ ID NO: 13746 - protein, 410 aa, Micromonospora sp.
VQLRYNYRVYPDAAQREALARSFGCARVVFNDALRVRQEARAEGLPYVSDGDLSKQVITQAKTTPQRAWLGEVSAVVLQQALADLNTAYRNFFASVTGKRKGRKVAPPRFRSRKDNRQAIRFTANARFKVLDNGRLRLPKIGDLDVRWSRELPADPSSVTLVKDAAGRYFASFVVTTTDEPLPEVDSEIGVDLGLTHFAVLSDGTKVAAPKFLRRAARKLKRLQQDLSRKQRGSQNRKKAVVKVARAHARVTDTRRDWQHKLSTAIIRDNQAVYVEDLCVVGLGRTRLATSVHDAGWASFTAMLEYKAARYGRTFARVDRFFPSTRMCSDCGRINEKIALNVRSWDCPCGAAHDRDVNAAINVLAAGRAESLNDRGAHVRPALVPAVRREAVIHPGAACSARSAEGIPVL

SEQ ID NO: 13747 - protein, 471 aa, Micromonospora sp.
VKVTRIAYSIGLNPGKYMALVEQARRLGRVRSEVWQRYGSISGVGSGLKDRQVRDRWLADGTHQRFGVLANAWKETARDAMADIAAHLASAKVEVRRAILRRTGAPAERKRMLTALKTHRWADDPFLARQMRKHWRRGKNRTHDQIVVRADQHHTLTDGHGRLWLAVPGLERRKMVRIPLSTTVAPTGTLRLILRGGRVEVHYQIDVSQMRSSQRPRGSRTIGVDKGYTEVLTDSDGEHHGTRLGELLATESDRLKQRNRRRAKLRSIANTAARRGDHRKANRIKVNNLGYVKRDRQAARHRAQVRTEIFIAVHRVVDKAATVVAEDLTKSFAGRTKLDRNVNRRLAAWTKGVTAEALTNVSERRGSALVHVNAAYTSQACHRCGSLGRRSGDRLHCTSCRVVWQADVNAAINILQRAGDPDIALHTSHHAVKQILQDRADRHRTRLPVQDSSPATAERSANHPNRSPMSN

SEQ ID NO: 13748 - protein, 475 aa, Micromonospora sp.
MSYRMVIVPGVGHRDRLSVVQAYRFALDLSPAQERAVLGHVGAARMAYNWALARVKAVLDQRAAERSYGIPEDELTPAIGWSLPALRRGWNAAKGEVAPWWRDYSKEAYNTGLDALARGLNSWADSRSGKRAGRRVGFPRFKSRRRSTPSVRFTTGTIRVDPDRKHVVLPRLGRLRLHESARKLARRLAAGTARILSATVRRDGHRWYVSFTCQVERARRTPTCPDATVGVDLGVRRLAALSTGEPVPNPQHLDAALRKIRRISRGLSRKVGPDRRSRRDASKRWQRARGRLGRVHARVANLRRDGLHKLTTRLAATYGTIVVEDLNVAGMLRNRRLSRRIADAGFAEIRRQLVYKTQWYGGRLVVADRWYPSSKTCSGCGAVRTKLALSERTFTCTTCGLVADRDVNAARNLAALAAAVAGSGPETLNGRRADCKTPPAGPVAVKRQPGTTSVGKTGTVPPQGRTSDHELTPAS

SEQ ID NO: 13749 - protein, 408 aa, Micromonospora sp.
MLTGRRYLLALTDEQAAYAEQVGAACRAVWNTALEQRREYRRRGAFIGYVGQARQMAEAKKDPHCAWLADAPSHVLQQTLRDLERACKAHGTWKVRWRSKSRTAPSFRFPDREQIVVRRLSRRWGEVRLPKFGAVRFRWSRPLGGAVRNATVSRRGGRWYISFCVEDGVAESAPNGKPPVGVDRGVAVAVVTSDGDRHDRGFVTPGETVRLKRLQQRLSRSLRVHGRNRRSNRRDRIRGEFARLNARIRDRRADFAAQTAVQLVRDHGLVVVEDLRIANMTASARGSLEQPGRNVRQKAGLNRAILAKGWGAFLVQIEHAARYHGATIVKVNPAYTSQTCNACTHVARQSRESQVVFRCVACGHQDNADVNAAKNILAAGLAVIGRGDLAAGRSTKRQPPQRLRPETP

SEQ ID NO: 13750 - protein, 369 aa, Micromonospora sp.
VGEVVKRAYKYRFYPSPEQAEQLIRTFGCVRLVYNRALEARTRAWTVDRQRTTYVHTSAWLTEWKRTDDLAFLNEVSSVPLQQALRHLQTGFVAFWEKRARYPRFKSKRKSRASAEYTRSAFRWRDGHLTLAKMALPLDIVWSRPLPEGAQPSTVTVSRDSAGRWFVSILVETTVEHLPVTDVAVGMDAGLTSLVTLSTGEKIANPRHERADRCKLTKAQRALARKQKGSANRAKARLKVARINARIVDRRRDQLHKLSTRLVRENQTVVIEDLSVRNMMRNHSLARAISDAGWSQLRSMLEYKAAWYGRTLIAVDRWLPSSKTCSACGRINTTLTLSVRAWTCAGCNAVHDRDVNAARNILAAGLAER

SEQ ID NO: 13751 - protein, 394 aa, Microbispora sp.
VRRSFKFLLRPTSKQAASLAACLEDHRVLYNAALEHRRTAYRKAGVTVRYGDQSAELKHIRADDAEGQGRWSFSSQQATLRRLEKAFAAFFTRVREGRTPGFPRFKGRGWFDTVTWPKDGDGCRWDSQPEHPSTAYVRLQGIGHVRVHRHRPVRGRVKTISVKREGNRWYVILSCDDVPAEPLPQTGAAVGLDMGVASLATTSDGDPLDNPRHLAASAGRLAAAQRALARKKRGSRRRRKAVAWVAALHAKVRRQRQDYAHKQALALVAAYDLIVYEDLRIANMTRSAAGTIVQPGRNVAAKSGLNRSILDAGWGVFLRVLAHKAESAGRELIAVNPANTSRTCSRCGHCAKDNRLTQARFRCQACGHEAHADVNAAKNILRAGLALRGAAEAA

SEQ ID NO: 13752 - protein, 475 aa, Mycolicibacterium sp.
MAEKFEVADGWVLQAYQYALDPTPTQAAVLESHAGGARFAYNTMLRAVKANLSQREAERSYGIAKADLTPTLPWSFQSLRNDFNNRKHRVAVRDDGTPWWGENSKEAYANAVKNLSVALKNWDDSRKGKRKGPRVGFPSFKSKRSTRKFAFTTGTIRIEADRHHVTLPRLGTLRVHESTRKLARRLEQGTARVLKATVRFERGRWLVSFTCVVERATHRPAHVKRLLPVVGVDVGVKDLVVAATPDGREVMRIRAPKEFKQASRKLRALQRRAARQHGPWDAVANTQRQPSTGWLRTQQAIAKHHVRVANLRRDRLHKLTTLLAQRFEVIGTETLAVKNMMAAGGSRKRGLNRSIADAGLGEFFRQLDYKTTWYGSAHVRSDRWYPSSKTCSGCGSVKAKLTLAERTFVCDNNECGLSIDRDLNAAINIARLARAEQSACFDSGGADRKTTASAALVAEKPQSSNGSASPQGEAA

SEQ ID NO: 13753 - protein, 159 aa, unknown
  TnpB Polypeptide
MSEKLAKAGRILSKRKKGSARWNRQRLVVAKLHEKVANQRMNFLHHKSKELASNFDAVVIEDLDMKGMSQALHFGKSVHDNGWGMFTTFLSYKLKEQGKQLVKIDKWFPSTKKCSCCGAEKPMKLSDRTYDCSCGYVAERDYNSAINIKNEGIRLLALS

SEQ ID NO: 13754 - protein, 414 aa, unknown
  TnpB Polypeptide
MDITKKVRLYPNKTMSMILDNLCDYRRYCWNQALEVWLSLVQQRQKYLPADLRLKVKQAIKDKSITFTDDENALLIQYPAPTHYTVRKMLTADKQDWQHQLSSRALYLAVDDLAKAWTYYFNNKDTTSLRAGKPSFKEKKRPKQGFKTDRSQIKNGKLVLDKPRQYKGDWYGIPFKGYPLPDGNIKYCSITKINNKYYTSLVIDTPIEPLAKTSQNTAVDANVNHFDYTDGQYSINPKRLNSLYAQIAFYQKRLARKRKENGKKASDSKSYTVMRAKLQALYEKATAIQNDLLHKFTTRLYHEYDIIVIEDLDVKSMQMSKKAKNLHRSLFGKFRFQMEYKAKKFGKQLIIADRYYASTQRCSSCGHIKKGDDKITLTGNATHGTAHNEYVCYDCGYKADRDHNAVLNLSALIK

SEQ ID NO: 13755 - protein, 418 aa, Ruminococcus sp.
MRSVKEMPYHRGLVVKLYPTDEQKRLIAVNDGAKRAVYNFLVAANNELYQLGKVKTYLKPVAERIAYLKGVLASTSAIQNALPFLYGDDVDSQAVANAKQNYRRAWKNQKELHTGVPQFKKKGMQQSYQTNAHYRKDARSLNESNLRFISKHRVKMPILGIVQFAGSPKEIEMLFSHTQQTRIGGVCISRDSVGEYWASFSLASEYPFYEDLPKTGAMAGIDLNLTNLASTSDGEVYDNPRYLQKSEKSLKKAQRKLSRRYRHAKESGRALRDCKNYQEQRKKVAKIQRQIARQREDYLHILSKREVENQDFLAAEDLKVKNLLKNHTLAKAVSDAGWRSFLTMLDYKASWYGKEFVLVPPQYTTQTCSNCGYVLKNEERLPLSVREWICPACRIHHNRDVNAAQNILNKALQQAGYA

SEQ ID NO: 13756 - protein, 390 aa, unknown
  TnpB Polypeptide
MIKSMRVRLNPNNKQLTKLFQYAGCSRFAYNWAIAREQENYKQGNKFLSDNELRKEFTQLKKQEDYKWLWDISCNVPKQAIKDACNSYKRFFKGQSNYPKFKNKKHSKQSFYQDNVIIKFTETHVKIEGFAISRKKNKQKLNWIKLCEKRRIPTNCKYMNPRFTFDGLHWWLSVSIETDDNPDIPTKEGIGIDLGLKDLAICSDGNTYQNINKTTKVKGLDKKKRRLQRSISRKYNMNKEGESYKKTSNIIKREKELLKLSRRLTNIRHNYLHQTTSEIIKRKPSFICIEDLNVSGMMKNKHLSKAIQQQGFYEFRRQIEYKAKWNNIPVILADRFFPSSKLCSCCGEIKKDLRLSDRVYKCDCGNIIDRDYQSSLNLKKYGENVLKQNL

SEQ ID NO: 13757 - protein, 460 aa, unknown
  TnpB Polypeptide
MAFEARRAESGDGMKPTPRSGPKKKKTRQTKTKKGMGKEKEPPKKRAREGNKSESTKGEEILANQEAQVKARKVEIFPDSEQRRKIDRWLEVARWTYNQGVWATKERLIPMQISKLRAAFVNENGLALHRWLWATEVPYEIRDGAMMDLVKANKACRAKNMLRKQRGEDSVAFDFRFRCKKDRRQSVVMLKKNWNVPRSAFFANVFTPLMKSSEGSLPSSLFHDGRLVRERKGNRYRYYYILNVPLESRGENQAPSDRAVCAVDPGVRCFATIYDPHRHSVVNWGDGDMQRIYALSNQVDKLQSRWSAPGVRHRQRARLKNRASLLRSRIRSVVDETHKKLCTYLCSNYAVVLIPEFAVKHMVSRKHRKISTKTARAMCTWGHYRFRQRLCHKAREYPSCRIVVCDEPYTTMTCGACGVLNDKLGGAKVFRCPNASCRCILDRDANGARNIMLRYLSLVE

SEQ ID NO: 13758 - protein, 399 aa, unknown
  TnpB Polypeptide
MECVNIKYCRKIKFYPTKPQIEYFQKCFGTTRYLYNKTIKMYNQEKFNLNIVSARSIIMKNNKDMNNEDPEKWLIDIPYDTRQLAISAALDAIKSSFALLKNGHINKFSMRMKTKKDKKQVFYVNDKAIKNLNLFPKKLNDHSKLIVNNKYKKYYNYIPESDCIIQKDGFNYYILIPKEKEIKIEKERKENIVSLDPGIRTFQSFYTPDGIVGDLGNQQLKNKIMKYENKIDILKSINQKLRNQNINSNTKRKILKIERKCFKLKTKVLNIIKDFQWKVSSFLCKTYKVVLLPIFKSQELKNNLNRKNNRLLDLLSHYKFQEKMKHQAIKYNCDLKIVTEEYTTKTCGKCGCINNFIGSSKIFWCNKCNVTLERDYQAARNILIKFKCQGSDTYPLRGT

SEQ ID NO: 13759 - protein, 368 aa, Proteus sp.
MKRLQAFKFQLRPNGQQEREMRRFAGACRFVFNRALARQNENYEAGNKYIPYTKMASWLIEWKSDTETQWLKEAPSQPLQQSLKDLERAYKNFFQKRTAFPRFKKRGKNEAFRYPQGVKLDQSNSRISLPKLGWMRYRNSREVVGEVRNVTVSQSCGKWYVSIQTEYEATEPQHESTSIVGLDAGVTKLATLSDGTVYPPVSSFKVNQRKLARLQRKLSRKIQFSANWQKQKRKIQRLHSHIANIRKDYLHKVTNEISKNHAMIVIEDLKVSNMSKSAKGTTERHGRNVKAKSGLNRSILEQGWYEMRRQLEYKQLWRGGQVLAIPTPVRSALAVVIQQRKTGSHKVNSSALNVDIQRMLISTGHVTF

SEQ ID NO: 13760 - protein, 402 aa, Proteus sp.
MKRLQAFKFQLRPNGQQEREMRRFAGACRFVFNRALARQNEEHEAGNKYIPYTKMASWLIEWKSDTETQWLKEAPSQPLQQSLKDLERAYKNFFQKRTAFPRFKKRGKNDAFRYPQGVKLDQSNSRISLPKLGWMRYRNSREVVGEVRNVTVSQSCGKWYVSIQTEHEATEPQHESTSIVGLDAGVTKLATLSDGTVYPPVSSFKVNQRKLARLQRKLSRKIKFSANWQKQKRKIQRLHSHIANIRKDYLHKVTSEISKNHAMIVIEDLKVSNMSKSAKGTTERPGRNVKAKSGLNRSILEQGWYEMRRQLEYKQLWRGGQVLAIPPAYTSQKCACCGHTAKENRPSQSQFECLECGYTANADINGARNILAAGHAVLASGGRVQSDRPSKQEPAEVIQTSV

SEQ ID NO: 13761 - protein, 441 aa, Proteus sp.
MNVIPFPIYFNQFNIKISTNTGKVASQFFNCILIKYFSPVFCDKDQMDGIRNTQCLPRRILVSFFIDQSIIGNMKRLQAFKFQLRPNGQQEREMRRFAGACRFVFNRALARQNKNHEAGNKYIPYTKMASWLIEWKSDTETQWLKEAPSQPLQQSLKDLERAYKNFFQKRTAFPRFKKRGKNDAFRYPQGVKLDQSNSRISLPKLGWMRYRNSREVVGEVRNVTVSQSCGKWYVSIQTEYEATEPQPESTSIVGLDAGVTKLATLSDGTVYPPVSSFKVNQRKLARLQRKLSRKIKFSANWQKQKRKIQRLHSHIANIRKDSLHKVTSEISKNHAMIVIEDLKVSNMSKSAKGTTERHGRNVKAKSGLNRSILEQGWYEMRRQLEYKQLWRGGQVLAIPTPVRSALAVVIQQRKTASHKVNSSALNVDIQRMLISTGHVTF

SEQ ID NO: 13762 - protein, 526 aa, Hapalosiphonaceae sp.
MRRQAVKVRLYPTDEQIQVLAQHFGCARWWWNYGLNQCIETYKATGKGLSQSGLNSLLPKLKKEKDTEWLGECYSQVLQSVSLNLSRAYQNFFEGRAKYPKFKSKHHRQSIQYPQKVKQVDETLKFPGKLGVVKAKIHRPLDGTIKTVIVSKNPSGKYYASVLMEYEGDYPTTNAEGKVIGIDLGIKDFAVTYDGEKTSKYPNPKHLPKYEKKLAVKQRIAARKVKGSNRRKKANKIVALVYEQVSNVRQDYLHKLSRKIVDNNQVVVVENLNVKGMVRNHKLSYAISDTGWGTFVNFLSYKLERSGRKLIEINRWFPSSKLCSNCHYQISEMPLNARTWICPSCGTHHDRDGNAAMNIRAEGIRMLSSSGTGEANANGEDVRPIRGRKSPVGLWGESLTPDLNGAQFIENALSGLEIKPKEQHKAGKTHAIERTNLQFTTELIKNAYKWENIAAFKAIPFDDKKTEEENNNASKQRITESIVDNTVKTTRENLLRGLNLNIEEIDISKTIVDDFFISPKIAELVK

SEQ ID NO: 13763 - protein, 402 aa, Candidate divison MSBL1 archaeon
MNLTKTVVLKLKKTDDSIQKTMEKYTEGMNFTSKVVYENGEPLSANKLQELTYKHLRENIGLLSQMSCNVARQVSGTYKTLQEQVEKGETEWQKIEFAPTNVKFSYGRDYKINEERLSISTLDGRKEYEILNYEYAEQYFSEEWEYLASELVKHEDGEYYFHLTCEKEVEEKPIEKSSNFMGIDVGINCLAVGTTTDKNQAFLGKGVAKDLRKTYKKMRKRLQSKGTFSAYKRLKALSGKEKRLMKQLNHKVSKKIVEFAKKEGVDVIGMEDLTDIRNGTKVRKKDRYNHESWAFRQLQKFIEYKAAEKGIRVEYIDPENTSKTCSRCGHISRNNRNGLDFVCEECGYELHADLNGARNIEHRVRDFRHDLESQGSRQPPDVDGAEATSAMASRGAEPQASS

SEQ ID NO: 13764 - protein, 463 aa, Mycolicibacterium sp.
MPGLEIPEGWTVQAFQFTLDPTAEQSRALVRHFGARRKAYNWTVAALKADIEAWHQTGAQTTKPSMPVLRKRWNSVKDQVCVNADTGQPWWAECSKEAYADGIKGAVDAYWNWQQSRAGTRAGKRVGFPRFKRKGRDQDRLTFTTGAMRVEPDRRHLTLPVIGTVRVHENTRRIERLITKGRARVLAISVRRNGTRLDASVRVLVQRPQQPRVTLPDSRVGVDVGVRRLATVAAADGAVLEQVPNPRPLDAALRELRQVSRARSRCTKDSRQYRERTRELSRLHRRVNDVRTHHLHMLTTRLAKTHGRIVVEGLDAAGMLKQKGLPGARARRRGLSDAALGTPRRHLTYKTRWYGSQLAVADRWYPSSKTCHCCKHIQDIGWGEAWVCDLAAGGCGAVHQRDDNAAINLARYEETSSVVGPVGAADKRGADRKTGPRPAGGREARKGRSRKAAEQPRDGVQVA

SEQ ID NO: 13765 - protein, 351 aa, Halorussus sp.
VVGWPLRRVLEVLQTVVERLFDNLKGLSALKKNGYGVGQLKWKPPREFRSFTYSQSGFKLDKKGGQTVLSLSKLADIPIRLHRPIPDDAKLKQVTLKKEPTGEWFATFGVKVNHEPPEPPANPERCVGIDVGILTYAHDTDGTAVGSLDLSAERKRLELEQRSLSRKQHGSNNWEGQRRRVAECHADLRRKRRDFLHKLSNYYAREYELVAVEDLNVKGMMESPSNSRNTASAAWRTFLSLLEYKCARKGTHFVAVNPRETTKECAACGVETEKPLWVREHSCPACGFEADRDANAAWNILSRGLEDVGVGHSEGTPVETALPADTSVSAKRVVETGSPTLNERMASAVSE

SEQ ID NO: 13766 - protein, 377 aa, unknown
  TnpB Polypeptide
MLARIFGCCRVVFNDALRIRDETCRSGVKLSDSEVQRRVITYAKATAERGWLAEVPSVALVQSVNDSRRAWRNFFDSRSGKRRGRRLGRPRMKSRKDHRQSFRLTRNGFSVRPNGQLFVAKVGELRVRWSRPLPSEPSSVTIIREPDGHFYASFVVDVAVVPLAMVDREAGMDVGIARFATIATTDGVRTDIANPQHLGRKRRKLRRLEREKSRRQKGSANRDKTRRKIAIAHGNVARARRDYHHKQALALVRDNQVIHVEDLNIVGMLANRRLARAISDAGWGQLVRIIAEKANRYGRTVSVVSRWLASSKTGSDAGTVSTSCRCRSGSGRARCAGPSTIATTTLPRSFSPPGGRRDETPPTPVGGIAPAVPVEPV

SEQ ID NO: 13767 - protein, 496 aa, Pyrobaculum sp.
MGGGDMERVRRAVAVELEHLPPELYAVEEPYRHIVEEVAAYVAERGTLEKEKYNELYRRFREQYTLPAQLIQQAINQGVEIGKSFLALKRDGRIHKPHPEVRRVSIRFAKDSWSYRKTVVSVAPVEIAVSLPGGRREVWIKPHRRFWLYWWKVLRKEAELASTLMLKRRRGRWYAIFVFDVAPKRKPPAEVVAFDVNENSVAVARVSLLSTVDAVARWNRQYVDPAVYSIKTDFGRLAKRYEAVRGRKLEELKQKYPFAGRDNEEKVQNVTDTREYKKFAKRLRERSRKEGRMRQVVREVTRNPAVIITEELGKNPQEEMIGKKKRELRHRIKQTPFKKLIRAVEDKARETGSVVFYVSPYRNSKVCPIHFTLLRNDGDWHTLHCPRGHAVDRDAAAVLNMLWKTTPEGVVKVVWWDVKEVRKRLKKEIVPREAVGRANPIIPRPIVHAAWASLKTLMASSQWPAVLARAAPMNPARGAYEGGTRAPPRPEGTPAL

SEQ ID NO: 13768 - protein, 372 aa, unknown
  TnpB Polypeptide
MKILRSTKCSLQYATAAKRAVLSHVLTEYATVVNHFIIRFWADGCPAKAALLKPIVDSPQTWLSFRLRKVAAREAIDMVIAARKRWAEKAVVPVHRGTRVCANANIARLTNAAPDSAFDAWLVLTCLGEHIRLDLPVQFHRQYHKLAARGKRLESYIITAHDVQFSFEIETGPKREPQRCIGVDTGINALATLSTGEKLGTDIKAAIERIKRCQHGSQGQRRASRALRQRMDEVARDVVAQADLIVVERLTGITHGTKVKRRLTKNMRRTLGRWCVRHWLRRLQQRTEWNCVSFRSVVARHTSQMCRLCGHVERGNRRGLEFRCLRCGHTDDADVNASLNILARFTTGAYGPGCKVIKQHNGPGSECERDGV

SEQ ID NO: 13769 - protein, 469 aa, Haloarcula sp.
MYCVSDRPQRTNTYTAEATSDRYRQCLFDWLAAQPPLWNQITYRRRQAYFSDNGDVWDADYTDLYDEYAPILGKATCQQIARKNSEAWRSHFRLLDQYHDDSDPTVTEKPSPPGYWGTREEGYELHGLVRNDLYTFDWDENWSTLEFGVGDVLEDRYDFEHNERVTLEVKGNPQWDGDDSRLELIYEEHADQLRVQHPVRIQPDNLREQREDAFTHTLDSENTTQAAAIDVGANNTLAVVTGNGETAVYHARPEFERFQSYSERIATLQSKLREEEYTSHRIQRLYDERSRKRDHSRDAAVKNVAEWLLERNVDTVYVGDLTDVLDTHWSAEVNEKTHNFWSHRQLLDRIELTLGDVGITVQEVSEADSSSECPGCRSSDVTRNGDSFRCHDCELDAHSDVAGAWNILQSEVGPMARPAALSAERDRDAPQEGAYWQWNEHDWIPAEFGEQSWSLDQPSLSKPASSQPG

SEQ ID NO: 13770 - protein, 388 aa, Streptomyces sp.
VFCVKIVAHVKLLPASAHDVDALAATLRACNRAANAASEVAFARDLKRRNVLQEAVYHRLKADFDLGAQPAVRVVKKVCDAYATLKANIRAGNLGKEDSKRRKRAEAKPIVFREDAAQPYDDRILTWNLDQKTVSIWTVAGRLKGIPFVCSDEAMKLLGSRKGESDLVTRDGMFFLIATIDVPEPEVCEPNGFLGVDLGIVNIATTSDGEIMCGRQVNRYRERQRGLRQKLRKKRTKSAMRRLRSRRRREARYATQRNHIIAKKLVTTAERTSRGIALEDLSCIRQRVTAKKDQRARLHSWAFAQLGQFVEYKARRAGVPVVRVDPRNTSRQCSQCWHTHRTNRVTQGRFECRSCGITMHADHNGSRNIAHRGDAAWQRGAVNRPRTA

SEQ ID NO: 13771 - protein, 379 aa, unknown
  TnpB Polypeptide
MLSNMLRTFQFRLYPNATQRRALEFILRDNADTYNAALQERRDAWRLERRAITYRMQQDELTELRRDAAFAVVACDIQRDSLRRVDRAFKAFFRRVKTGQKPGFPRFRSSQRYDSFGFSLPVMCGDFLRVPKLGPIKARGGRDIAGKARCCTVKRDGNRWMASVVCDIGPAPEKRTVTTAVGIDVGLTTLATLSDGTEIENPRWTKRHEDRIAAANRLLARKQKRSKNRARAREVLHRAHQRAANARRNYLHHVSKWLVANYDLIAYEALNVKSMAQGNLARSIHDAAWTILLSQVHYKAESAGVYAIAVNPRGTSQLCSGCGQKVLKKLSQRTHDCPHCGLVLGRDHNAGRNILTLGMSAAGVSPQNLCMTPVRKLCI

SEQ ID NO: 13772 - protein, 628 aa, Microcystis sp.
MSLNFSRTRDLLSNFQFGELFIEELGWSHPRGKKSFPVTIENQEYNCQRIAEVSGVVVLEVSREDIPDSQTRQEIQRQVTERIAENLLIFVDSKRTRSLWYWVKREGSKSYIRDHLYIKGQPGDLFLSKLAELVLDITDFEDGEPSVVEIAQLLQKGFDIEKITKKFYQEFQREHLQFLPFIQGIDRESDRKWYTSVILNRLTKCQQKSLAFSDGMNADQHIDNSQNLCYHEFTFMITAMYKAYKFRIYPNTEQEIALAKSFGCCRWFWNYSLNLCQETYQSTGKGLTRGYIQGLLPGLKKEYEWLTDAYSQCLQVVALNLSQAYQNFFEKRAKLPRFKSKHGRQSISYPANVKFEEDYLKLPKIGLVYCVRHREFEGAIKTVTISKNPDGKYYASILVDDGKESPHPFSDGKAIGVDLGLTHFAITSNGSKYDNPKHFARHQRNLKRKQQKLSRKKKGSINRQKAKHRVAKVHSKISRCREDFLHKLSRKIVNENQVIAVENLNVKGMVRNHNLAKAISDCGWGMFCTMLKYKAEWEGKTYIEVDRFFPSSKTCNVCLNQVGSLPLDVRTWTCEHCKTIHDRDINAAINIRDEALRILSLGTSDTAYGGDVRPKGGRKSVLRQSPVK

SEQ ID NO: 13773 - protein, 382 aa, unknown
  TnpB Polypeptide
MARRGKAIRATVSMKIAPSEPLLALMNNYVKALRFVLFWLKENVPNPNEKGVLGRVHEGLYEELREEYNLPSKVAEDCYRDALSIYKGWFNNPKKGRFPRVYKPTVWLTPKASYNVDFDKKSVRIASVGELPILGYPRNLKEYMSWRMKESRLVIRDGKAFLKVVFEKPLDSVEPKESIAVDINIAEIVAGSDDKHYVRIPTRLEEVHHWKSLAENLQRKYPRRWRENKRILHRIHTFHLKARRIAEDYARKVGKWVVEVAERMTGANVIKLESLKNLIKNVDKLPKEFRDKLYLMQYHRLQYWICWQAKKHGMLVEFVNPRYSSVSCPKCGRKMVEVSHRWFKCNCCYENDRDVIAITNLNGRGSLTLSTTPQMRDVNPNQ

SEQ ID NO: 13774 - protein, 423 aa, Scytonema sp.
VLVIEYKTKGNQAQYQAIEEAIKTTQFIRNKCLKYWIDSSREDNINNAAISRYSTVLRADFPFVAALNSMAVQAAAERAWLAISRFYDNCKNKKSGKKGYPRFQHDNRSVEYKTSGWALHPTKRRIRFTDKKGIGEVKLLGTWDIHTYPVKSIKRVRIVRRADGYYVQFCVDVECKETVPFTGQEIGLDMGLEHFYTDSNGHHEPNPRFLRKAEKQVKHCQRKIYKKQKGKNGRKKARNRYARKHLKISRQRTEHAKSRARHVMQSNDLCVYENLQVKNMVRNHHLAKSINDAGWRQFRSYLEYFAQKYGKVALAVEPHYTSQQCPDCGTMVKKSLSTRTHTCKCGCVLQRDYAAAINILQKGKEKIATSGHGGSKVSSKKKSRNARGVGTATLSGVTLTEQVLTMSLESPCMRDRRVSNGIS

SEQ ID NO: 13775 - protein, 222 aa, Clostridiales sp.
MLSQLKEEQRILTQKTKGSRHWEKQRLKVTRLHEQVMNIRKNHAHEISTELVRRYDRIMTENLSIQEMLKTSEADCARGIIASGWSELISMLEYKCVWYGRKFVRMGMYFPSSQLCSACGFQNAEVKNLNIREWVCPVCGERHDRDINAAKNIKWKEPVCWQESFHKQSPESGGKHPKCAEKIQGAKPYTAAELLQRAQRRIPRFNGDAVSGGASNRTKYRV

SEQ ID NO: 13776 - protein, 402 aa, Shigella sp.
VKRLQAFKFQLRPGGQQEREMRRFAGACRFVFNRALALQNENHEAGNKYIPYGKMASWLVEWKNATETQWLKDSPSQPLQQSLKDLERAYKNFFRKRAAFPRFKKRGQNAAFRYPQDVKLDQENSRIFLPKLGWMRYRNSRQVTGVVKNVTVSQSCGTWYISIQTESEVSTPVHPSASMIGLDAGVAKLATLSDGTVFEPVNSFQKNQKTLARLQRQLSRKVKFSNNWQKQKRKIQRLHSCIANIRRDYLHKVTTTVSKNHAMIVIEDLKVSNMSKSAAGTVSQPGRNVRAKSGLNRSILDQGWYEMRRQLEYKQLWSGGQVLAVPPAYTSQRCACCGHTAKENRLSQSKFRCQVCGYTANADVNGARNILAAGHAVLACGEMVQSGRSLKQEPTEMIQATA

SEQ ID NO: 13777 - protein, 427 aa, Escherichia sp.
MHQENTMLPRRISVSLFIDQSIIWPVKRLQAFKFQLRPGGQQEREMRRFAGACRFVFNRALALQNENHEAGNKYIPYGKMASWLVEWKNATETQWLKDSPSQPLQQSLKGLERAYKNFFQKRAAFPRFKKRGQNDAFRYPQGVKLDQENSRIFLPKLGWMRYRNSRQVTGVVKNVTVSQSCGKWYISIQTESEVSTPVHPSASMVGLDAGVAKLATLSDGTVFEPVNSFQKNQKKLARLQRQLSRKVKFSNNWQKQKRKIQRLHSCIANIRRDYLHKVTTTVSKNHAMIVIEDLKVSNMSKSAAGTVSQPGRNVRAKSGLNRSILDQGWYEMRRQLEYKQLWRGGQVLAVPPAYTSQRCAYCGHTAKENRLSQSKFRCQVCGYTANADVNGARNILAAGHAVLACGEMVQSGRSLKQEPTEMIQATA

SEQ ID NO: 13778 - protein, 492 aa, unknown
  TnpB Polypeptide
MYDMANSNRKKARKLHEAKQAKKTEATKKAESTKKVKAAEEKQIKYTVTAEQHADGTFEFRGGKGGFNITAQKNKALEPYGKCIHNYGVLLGLIPGDKQVAINQQIGNARVVHNDYLSKREEYYKETQKALTVSQYKKDYLPELKKEKEYLNGTDKFVYENACQNVDDAYNRFFKGLSGFPKYASRTKPNGNSFTTNFTNNNIELKMIDGIPYVKLPKVGCVRFILPKGKLLADIQPHGVTIKAATVSREPDGSYRIALRMESVIDKPIFPAVINAREIISVDLGLKEFGVFGNLEESIPVPNPRWIQVHAKRLRRFQQSLSRKQYDQETHTGSKNWEKARAKVTKEQRKIADQRRDFHHKLSRAIADNCVAFICEDLAVKNMMKNRHLSKSIASVGWSQFLTMLQYKMERAGKYFRKISRWYPSSQTCGCCGYKNTDVKDLSVRKWICPKCGTWHDRDVNAQQNIYKTGAKILQDEGIQIVGFPVTNKSSN

SEQ ID NO: 13779 - protein, 488 aa, unknown
  TnpB Polypeptide
MCKEYVTRNYQARMRFLDNGKEKLELLGAYLGEIRNSDYAALVKSEQNKAEYSRKQRREYGRNNFLTTRIMDTIISSNNEQLEFAKRTSEANIQAWLKDIDRYEKQLKNTNIRGKKREYLNIQVEKTRSKISRSENRSPSCCFGGKKLQRDITLHPDDQDKRTTWVNKRMFLSFDGANHRSLGNDHVKLMPCEDKFLVVLALPKELSSNLGFTPMSTEMREKYGVKNNNHHVIGIIELKYGKDNVKYCLNTNTCLSYQFVWSHKKQCWNIHITTRINKYHIEQKNKRYAAQIIPGRVCGLDQNSGFITATIIDQHGNPLTQKTFTHSSSKEMSKLVFEIITWCQKNYCGVISIEKLTHLHQRARKSWGDAKAKNRVVNKIPYGEFTTRLAQSCEMRSIQLVKVFAGGTSSMTTQWKEDYFGQTIHEKASYLVARRGLGLSLKRRNRHRNSVCDEGVIPVPFEGSCDNTVRVASIHDSTCLSMCSGAST

SEQ ID NO: 13780 - protein, 353 aa, unknown
  TnpB Polypeptide
VFNKTVKILHDGTVKANWKAIKTGILNDLPEWCKDVPYQIKSIAIKDACTAVREANKKYKKTSQINRVKFRSRKNHVQSCYIPKSAVSESGIYHTKLGKLTYSEGLPGDICDCRLTSNNGDYYLVVPHKVTASNTDNQGRVVALDPGVRTFITFFGETSVGKIGHGDFSKIQRLCQHLDNLISKISKAKRGQKRRMRKAARRMVIKIKNLINELHHKAARFLVDNFDVIILPTFETSQMSRRGSRKIKSKTVRNMLTFAHYRFKEFLKHKAQETGKTVVDVCEAYTSQTVSWTGELVNIGGSKTIKSKVDGRSMDRDINGARGIFLRALVDTPWLREQLALVSQDPPLVDFGS

SEQ ID NO: 13781 - protein, 374 aa, unknown
  TnpB Polypeptide
MSKDTFSLKEMRNYKFRIYPDKEQEQNLTKWLEACRVIYNSALADRKNHYYRNGKGLTRIKQQVILKADKEKHDQVKAIHSQVAQEVLFRVERAFNNFFRRVKAGVKPGYPRYKGPGQYKSITYTQYGEGLGASFQNGTLKLSKIGLVKIIVHREIYGEIKTCTIKKEQSGKWYAVLAVEEYPVLYSPNCQAIGIDVGIKEFATLSNGETISNPKHLVKSEKKLKTLQRSVFRKKKGSKNRIKAKKRLARHHEKVRNQRKDFHHRVSSQLAWKYGKIAVEDLQIQNMVKNHNLAKSITDAGWGEFVSMLSYKAESAGREVTKVIPHGTSQQCSRCGNIVKKDLSVRTHVCSYCGLVLDRDHNAAINILYKAKAS

SEQ ID NO: 13782 - protein, 532 aa, unknown
  TnpB Polypeptide
MKKNNKQSLVQNTELRTFSIRIKSDKLEKKLKNILLTYKHFENILLILINQNYNLYKEGRDVNDFNLLTSPQLMRNALYDYNSKHSAQIEYLKNKYEDNQLWQELKETAKKLKPHNLTYIIKRVKASFNTYFTSLELYKQNPSLFQGTPKPPKPKKLSKLTNYAVELDKYCSLSFVRLEKENLVGINLSDSIVYIHINKEQVKKLTDINKLYSARVIYDNGNLYLQISYLKELKKTQTKQLKYASIDIGINNLMAVFIDDENTPSLIIDGKPFKHYNAKFNRIVAKLNESKSKEVLEWDVSKTGTKCPVKYTEKGKRIGKFISFLYSKRNRFFTDQFHKMAKRVVEYLHLHGVSELFISKNLAQLKSNGECELSKAVKQNFIQIPFVKLLKYIEYKAQEYGIKVSYIDEKYTSKASCISDDIKGIQESPNLTNAFNGKRVKRGLFLDTVINKVFNADINAAVNHIKIGTGKCFAWLKDKLFKLCNPIKVKSDYEFCRLLKGLQNSVSGKSVFYNTETPLSSKLVENISFCYV

SEQ ID NO: 13783 - protein, 424 aa, unknown
  TnpB Polypeptide
MRLVYKFRHLKADPQLTCLTHIAKNLYNEANYLIRQEFIHNGRWIHYVELDKLLKTASLNYKLLKAQTSQQLLRLLDKNWVSFFHAIKDWKVHPEKYRGKPNLPHYKEKEDHFLLIFTNQNCKIENNQLIITMSETFQQRYPTLALPLTLCIPPYVNKSFIAFHQIRILPRRSFFDIEIIYEEPVLTSTVDYTRFASIDLGMNNLVTVVQNQNVKPILISGRLLKSINQRWNKQKAQLSSIKDKQKMKWTTLLNGITTNRNAIVRDYLHKVARFLIKYCLDHHIGNICIGKLQNIKDGIQLGRKNNQAFVNIPLQKLKQLIKYKARLVGIRLIEKNEAYTSKCSSLDLEPIRKQKNYLGKRITRGLFKGNNYILNADVNGALNLMRKVVGDAFIRTLTDRGCWFQPIRIRNLVQTSYEQLVSSV

SEQ ID NO: 13784 - protein, 379 aa, unknown
  TnpB Polypeptide
MLNFRYRIKELETRQLDELMVTSNCIWNYALMLQRKYYAWYGKYIPCSKLCSYIAKKRKRNPYWMKLNSQSVQGIVQALDESYQRFFHKLQKRPPKFKRWSSDTSIRFTQTGYSIDNDVFKFNKIGSFRFLKHRPYPPDKVRQVRLKRYNNRFYVIVTCDVVPKQLVRNCNGEAGIDFGLKTFITLDNGETIESPRFLFSNSRRLRRLQQVVSRRKKGSNRRRKAVRKLANFHTHVSWQRDDWQWKTAHDLCKTHSKISIEDLCVKGWVAMWGRKASDLAVGSFIEKLQYVAGKYGTEIVVVDRFYPSSHICHCCGGKLDRKLGLEERTWQCVCGVAHDRDINAAINIKQWDATVRGAEIRPPRKRGSRDEARTRSPRL

SEQ ID NO: 13785 - protein, 416 aa, unknown
  TnpB Polypeptide
MKIKRSTKCTLRFTTEQKQKQLRVFLVEYCRVVNFYIKLFWFNPPGRKNDLTATVICQADKKLCTWLSYRGKQDAARQAVSMIYAAKERYKTAKENGERCKPCQKRPVLRRLKAVLSTNCVHLQLPEKAHGFDTWLHIGSFDGRKRNVSMDIPVKLHKHFHELQKIGKRGSSVVVTDKHIQFSFTITTGAKLNPTGCIGVDSGIKALASLSNGQQLGTEIEDKIDRVNRCKHGSKGQQRARRALRHYIDSVAKQLIVIAGVTLVVVERLKNITKNTKQNHKRRLCKNMRRTIGAWNLRHWLMRVEQQCERNRVSFRTVPAYNTSRTCPACGHCNKKNRNGEQFVCLQCGHADNADINASKNILNRYLSDDYAVGCKPLPDRRNLPSMTSSRNSRSNEPENAALQSDIGKKRRKRVA

SEQ ID NO: 13786 - protein, 400 aa, Thermus sp.
MKGTITVNYQYRLRPTRAQAETLDHQLGLAAHLYNAALEQRKLLWKQRRKALGYLEQAAELKALRREFPEYGALNHTALQNVLRRLDKAFRRFFKSLERGEKAGYPRFKRKDRFRTLDFTYGDGAKLIPDGRGGQVLRLHGVGWVRLVWHRDLPPGAKVKRVWVTKKADGWYATFALEVPSEAVRRPLPPTGKGVGVDVGLENLLALSDGALVDNPHWLKEAEERLKEKQRVLSGKSKGSKRWRRLKAQIARLHQRVARKRRDFYLKLAWDLVRGYDLIAVEDLNLKGLSQGTLAKPVHDAGWGVFLRETLPYIAWKAGREVVFVDPKGTSQTCALCGAIVPKPLSERLHACPSCGHTVHRDVNAAQVILSRARSGPTGVPVGGRSPAPCPYEAGGFSRQ

SEQ ID NO: 13787 - protein, 401 aa, Gammaproteobacteria sp.
MYRGVIYRLYPRSQRKHDMLSRLAGACRFVWNEAIAHNQQQLEIARLLAQFPATADAVPAPSTTFFSMGKWFTSLRSGKTRSSRGRQETWLQELPFAIVRYSLKRQSEAWKKAFKGGGFPKYKSRLGNDSFTIPEKFRLSRKGGDPYLDRTGCKPVQVTVKRFLGKWYAVVTYAVPDVREDNGRSIGMDMDVGQVATREGAIYFMPDTSRLEARKRRYQRMMARRQKGSSRRARARHSCAKTQRGIAAVRADWQHRVSRGVTDIAGTVVVEALNVRGMTASARGTRDQPGKNVSAKAGLNREVLQTGWTSFRMQLEYKASRVVSVDPAYTSRTCHACGSVDKGNRKMRSEFECVHCGHQGNADVNAALSILASGIGASGRGEALGLSTSTIRQNVSDRLAA

SEQ ID NO: 13788 - protein, 377 aa, unknown
  TnpB Polypeptide
MNKSLKYRLYPTKHQQQLLQEQLQECRWLYNHFLEERKNAWEQERRSISYFQQCNSIPALKKERPSLNKVYSQVLQNVADRLDKAFANFFRRLKKGEEPGYPRFKGFDRYDSLTYKQAGFGWKVHGNCLELFKTGNIEIKLHRPPVGKLKTCTIRRQSGKWYACFCVEYAPEPWPENEKAIGIDVGLESFATLSTNKRIANPRFFKTDEKALVKAQRGLSKQIKGTPERRKAKKIVSRVHERIANRRHNFIHQEARKIVNTFGIICIEKLNIKSMLKNHFLAKSIADVAWNQFAQALARKAEEAGRKFVAIDPRNTSQICSRCGATVEKTLSTRWHDCPICDAHLHRDFNASLNILRLGLQSLGIQPVEAPDFSRVE

SEQ ID NO: 13789 - protein, 337 aa, Streptomyces sp.
VARGKHYGNETIRISPDGEVSIRLPAPLAYLANAPHGRYVLACRVVFAHRGVEWADRVAAGRAVAYRIHLDTGRERWYLTASWQIPPTPAIPIEAALAHGVIGVDMNADHLAAWRLDVHGNPTGSPRRFFYDLTGTAHHRDAQIRHALTRLLHWSRVCGVKAVAVEDLDFTTEKTREKHGRRKRFRRLISGMPTAKLRARLASMADQTGIAVIAVDPAYTSRWGAQHWQKPLTSTTRTTTRHDAAAVAIGRRAQGHPIRRRTTPPPQHRSDAVGHRTVRAGPGFLGREGTRPRIPGPRTRSVGAGRGTNAGNQNAQHRPGRSAEHESWKQDSLPLSP

SEQ ID NO: 13790 - protein, 398 aa, Streptomyces sp.
MAIHVKRAFKYRFYPSDAQAAELSRTFGCVRKVYNMALAARTEAWARQERVNYNQTSALLTAWKKTEELAYLGEVSSVPLQQALRHLQIAFSNFFAKRAKYPRFKSRKKSRRSAEYTTSAFRFRDGRLTLAKMSEPLDIRWSRPMPEGAKPSTVTVSHDAAGRWFVSLLVEDPAVQPLPANGTAIGIDVGLSHLVTLSTGEKVANPRHERRDRARLARAQRQVSRKATGSANRAKARVKAARVHARIADRRRDMLHKLTTRLVRENQTLVIEDLTVRGMVRNRSLARAISDAAWADFRSMLEYKAAWYGREVIAVDRFFPSSKLCSHCGALAERMPLNVRAWTCDGCGTTHDRDVNAAKNLLAVGLTASVCGAGVRPQRESSRTGRSATKQKTPRREP

SEQ ID NO: 13791 - protein, 348 aa, Streptomyces sp.
VKADAGRRYRLYPTVDQEQVLAAWGHTVRALWNVALEQRVHVYEQHRRTLRAMEQCRYLTEARAESELAWLAELPAQAGQQVLRHLDAAYDNFFNPKHPAAFPVFKKRGHRLSVPLPGQAVQIRKLNRHWAEVRLPKLGWVRFRLSRALGGAIRNATISRDRVGWHIAFGVATGIKAAALNGKPGCGVDFGVSASAYVSTETAPRIKPPGLDKRERARLRYLEQRKARQLVHAKRHNGGKYSNRLRRTSAQIAKMKGRETSRRQDFTHRLTTYLAKNHGFVGIEDLRVTSMTASAKGTLQRPGRNVRAKAGLNRSILDNCPGERRRQLEYKCRLYGSQLRPVSPFHTS

SEQ ID NO: 13792 - protein, 483 aa, Bacillus sp.
MTKEKEYVTYQISIKKGHKLYPYFLEMCQNAKNLYNTTNFYIRQVYTALRAEKPSQPLQQEVLHTLQAYIGIMNENQLRTYQKNLQKQKEKPAEERKEIKCNLFTLPTKEKSFLSYNFLDCLFKTMRQQDYINLPSQVNQAVMRKLFKNWDSFFESIKKYKKHPSTFTGKPRIPNYIKLSMREVVFTNQVCKLQGKYIRFPKTSIKLNIGKLFGEIENLKEVRVSPAYGKFKVEIVTQQSEPPPKHIDNNCYMSIDLGVNNIATIATNTGATPVLVKGNVIKSINQYYNKQKAHLLGILRHGKEPKEGPHTSKRLERLHEKRFLKIKDLFHKMSYHIVQFAIQHEISTIMIGKNTSWKQNSDMGKQQNQSFCHIPHNLLIEMIHYKAKRQGIMVQVVEESYTSKASFLDNDAIPTYDEEDIPVFSGKRIKRGLYRTKENKLLNADVNGAYNILKKVVPKAFADGIEGLCHQAAVSTPLVLSIS

SEQ ID NO: 13793 - protein, 246 aa, unknown
  TnpB Polypeptide
MSRYRLAPTATQAAVLRDHCAHARFVWNLAVEQQSHWRPGRKSAPSYLEQCRQLTQARSGYDWLRHGSQMVQQQALRDFAQAMANFFAGTHRRPTWRKAEHNEGFRIVAVKSGHVRRLSRKTGEAWIPKAGWVRFRWSRAIPEGVKSYRVTLDRAGRWHIAFAAIPLPIAPPGTGSVVGVDRGVAVSAALSTGEMLTVPRLSPAQQRRLCRLQRRLARARRGSKRRARVKLAIAKLRVRDADARKD

SEQ ID NO: 13794 - protein, 405 aa, unknown
  TnpB Polypeptide
MDLTEKEIIYSTDERFNLIKELCHLSKNLYNASLYDVRQYYFETKSYRTWQSQRPIFTKNNNTDYYALQSHLAGEVLIQVGKQFIGFFNNKINKKKRIPKYKDKNGYNVVTFPKITISKQVEFDEDKQLYTYTLCKRNYNLKIQSTKPNVKMVKFVYDETNDLIKCFKIYEVEQHKLKKDNSRYFSIDPGLNNIVSIYNNIGIRPLLYNGRPIKSINQYYNKTKAELQSKLPNNVKNSKRLKQLSFKRNNKIDYEMHKISAHIINEAVKNNISKIFIGNNIGWKNEIKIGRRNNQNFVNIPHTKLFNQLLYKGLLNGIEVIFTEESYTSKASFFDKDKLPVYGESDNYIFSGRRIKRGLYRDNKGNIWNADLNGAANIMRKCSDKAYKGIRKTKELIKRPILVTL

SEQ ID NO: 13795 - protein, 412 aa, Nostoc sp.
MKLVEKHLINKSHPNYKEIDKICWLSKNLFNAVNYVVRQKFIHEQKYLNYATTYHIVKESIDYKAIPSKVSCQIIRLVDRCWASFFAAKKEYTKNPDKFKGEPKIPKYKDKIKGRCVVIYPAQAISKRGLAKGLLQPSGTRISITTSLVGKVDEIRSVPKKCGGYVLEAIYEKPELPLLDYNYIAAIDLGLNNLATVSSNNQGFKPLIINGRPLKSINHYFNKKKASFQSELQLQYEKRYTSNRINKLTSIRNNKVDTYLHQASRTIIHYLLQNQIGTLVIGNNKHWKQDINIGSRNNQNFVQIPHYKFIQQLIYKAQLVGIKVILNEESYTSKATFLDLDNIPKYKKGVEHRFSGRRIKRGLYKSANGQLINADLNGSYNILRKAVPDAFAKGIEGLGVIPSRFTPGKVSL

SEQ ID NO: 13796 - protein, 473 aa, unknown
  TnpB Polypeptide
MKIVSSYSVRLLDVGKLLAPTIQIYRAAVAFLIDVADKEWDTVGPIFKEGNLKGQQQLERLVHGTKSHPNPKYDFDAGFYKFPGYFRRAALSAAMGVVSSYRSNLMNWEQAGKQGKPPKLTYDRNVMPTFFKDGMSDSTEMLSGAKNEVRLKLYINNDWVYRSIQCRRQDVQYLAKWWNSVKVSAPTLEVQRRKGGKLVYRLRYAFEETRNLALRDESLKKRTVLAVDLGINNDAVCSVMCADGTILVRKFINFPSEKDRLHHILNRIKRLQREYGRTSGRHEWAKANRINDQLSRNIANAIMDVTVQYAVNVIVFEHLDMRGKSKGSKKQWFHLWRKRAIQKMVMHKAHRNLMRCSSICAWGTSKLAFDGSGEIIRGRVGLTADELAVLKELRFRRQPIPKDGRPETYCKSDRCTFANGKEYNCDLSASYNIGARYFLREFCNEFPELEETLPKATLRTYADLRNLKLRKAA

SEQ ID NO: 13797 - protein, 294 aa, Thermococcus sp.
MPSETVKLTSKFKLKETPEELDTLFSTYREIVNFLITHAFENNVTSFYRLKKETYKGLRKKYSKLPSHYLYTACQMATAIFKSYRKRKKKGKAKGRPVFKKEVVMLDDHLFKLDLEAGVVKLSAPSGRVQLEFYSAKYHERFKDWRIGQAWLVRSKKGVFLNVVFSKDVEIREPEAFVGVDLNENNVTLSLPDWEFVQIITHEREIRTGYFVKRRRIQKKLRAGRKRRELLEKYGERERNRLNDLYHKLANKIVELAGKYGGIALEDLAEIRGSIRYSAELNGRLHRWSFRKLQ

SEQ ID NO: 13798 - protein, 391 aa, Thermococcus sp.
MPSETVKLTAKFKLKETPEELDDLFSTYREIVNFLITYAFENKITSFYRLKKETYGGLRKKYSKLPSHYLYTACQMATAIFKSYRKRKKKGKAKGKPVFMKDVVMLDDHLFKLDLEAGVVKLSAPSGRVQLEFYSAKYHERFKDWRIGQAWLVRSKKGVFLNVVFSKDVEIREPEAFVGVDLNENNVTLSLPDWKFVQIITHEREVRTGYFVKRRRIQKKLRAGRKKEKLLEKYGERERNRLNDLYHKLANKIVELAGKYGGIALEDLAEIRNSIRYSAEMNGRLHRWSFRKLQSIIEYKAKLKGLRVVFVDPAFTSSLCPVCGGKLSPNGDRVLKCGCGFEGDRDVVGSWNIRLRGLKMWGVTVPPESQPMSRGWKVSRNDIYELYKSYG

SEQ ID NO: 13799 - protein, 252 aa, Streptomyces sp.
MAIDIPQGRDLQIVRLNRRWGRMWAPKIGHVHFRWTKDLPVGKRAGKLNKVTGARLVRESDGWHVVFRVQAEVVDPTPHTGPTVGIDRGIAKPLAPSDGTFREHSPWLTPGETKRLRRLEKASARKRHARKKGEKTSRRLARVYNQIAQLRAKAKRRAADWQHKTTTGIAETFSRAGVEDLAITGMVKSVKGTMEAPGRNVRQKAGLDRSIAGEAWGRTVMLLEYKMAEREGGEVKYVGIKSLYGTATRVGP

SEQ ID NO: 13800 - protein, 452 aa, Lactobacillus sp.
MAEPWVQEKRSRSKTFAFTEKFKVTLSSNQILQHECALLVQDQLFNYSLNYMYKTYGRKHIDRNIPTGINRHKLINHIIKLFLNEKYQLNRWSHKVLFLSSHNAQLFLQTLIVSFTEYQKQLRAGFKWSDRVKFQYKQNIIKDKRGKHKNPHHNSWYKRGHLRFNLKSKTRAVEIQKNTPIQVLSAHVIKVPNFGILHLHKSSKEYDFSDVKIIKLKRKGDNTYQLQIVHVQPKAEANVKAEPAIGIDWNMTNNVAYHDSNNKQYPLPLQVITKADCYEHLINKFKSKRSLMHGSANNITKKIQRLSAKRAQLLNEAYRQLAIKLVAPIKLLVMERLAANDMRKSTGKAKNRKLALLKPYEAKQVIENRAFKQGVTVVEVDAYKTSQVEYGTEVIDKHPLSQREWISPVTGKVIDRDHNAAQNILAWGLHPSRHIKVKIFPKVTAAMVSSII

SEQ ID NO: 13801 - protein, 346 aa, Streptomyces sp.
MTLLTMPFAHRGQEWADRITTNRAVAYRIHLDTHRGRWYLTASWQRPAVKTIPLEAARARGMIGVDTNADHFAAYHLDQHGNPVGNPHRFPYDLTGTADHRDAQIRHALTRLIHWAKQAGVAAIGIEDLDFTTEKTSEKHGRKKRFRQLISGIPTGKLKARLVSMAAEQGLSIVAVDPAYTSLWGAQHWQKPLATPHRKMSRHDAAGIAIGRRALGHSVRRRTAPPPHDRSDRAGHRTAQAGPGNRGREGTRPPATDHAPGGVPPNGTRKREPSASIQHRSGCAQNAAVGPRLTYTHWLGTVSGMHLFGVWGAFDRKSAPLAQGRTLCQGCCQERVDVRVSERRRP

SEQ ID NO: 13802 - protein, 665 aa, unknown
  TnpB Polypeptide
VGTQRAGGGRRRIGRAHAFLRLTPAGRAGHRHHGPVRLPVLLDLVRRCPHVPDQQQLVHAAAGAAQHGIRQRRPGQLRLPGSGGGDRDDPVRGAVHRPAALPSCLLVRRPSGPVVGADGPGPLSGRGVLLLDVVAQDSDRGAADGPGEVGPGPQPVRPPVVSAQVWELLAQPSRGHALEAVDQPGQGDLGREPDEQVNMVRLAVELGQFAFEVAAHVPDDLFHALQVPRGEHRMPVPGHENRIEDMMSASADVPVPGHEANYTGDVQLRYNYRLYPTPGQRQALARAFGCARVVFNDALRARQTAYAAGRPYIGDAELSARLTAAKKTPERAWLGEVSAVVLQQSLADLNAAYRNFFASVTGERKGPKAGPPRFKSRKDRRQAVRFTANARFRVLPNGELRLPKIGDVPVRWSRDLPSAPASVTIIKDAAGRYFASFVVQAGPARFPAPGAGAEVGIDLGLTSFAVLSDGTVIRSPRFLRRAERKLRRLHKSLSRKAEGSSNREKARVRVARAHAKVADSRRDFHHKISTAIIRDNQAVYAEDLCVTGLARTPMAKSVHDAGWSAFVTMLEYKAERYGRHFGKIGRFVPSTGPCSACGVNSGSKPLNVRQWTCPACGTVHDRDLNAARNILALGRRERLTACGDGVRPPLAVAAVRETGTLPGAA

SEQ ID NO: 13803 - protein, 378 aa, Pelistega sp.
MLIRKAFRFEIRPNGEQIRKMKRFCGCSRFVFNRALAYQNEQYEADKSFKFSYAKIANLLPGWKKKFLWLKDCHSQVLQQSLKDLESAFRNFFAKRADFPKFKRKGIKDSFRFPQGFKLEQQNSRVYLPKIGWVRYRNSQAILGEPKNITVSQRCGKWYVSIQTEWETETPTPKGGEVGIDMGVVRFATLSTGQYFEPIHAFKTLKGQLAKLQKQFKHKTKFSKNWQRLKAKIAKLHHRIANIRKNYLHQISHQISKNHAIVYMEDLQVSNMSKSAKGTAEQHGKNVKQKSGLNRSILDQSWYEFRRQLDYKLLWNGGYLVAVPPQNTSRCCPACGYTAKDNRQTQALFECMDCGYTGNADVVGAINVLKRGQAILAA

SEQ ID NO: 13804 - protein, 380 aa, unknown
  TnpB Polypeptide
MRRTFKYKAYPNRVQSEALDAQLGEACRLYNGALDERRSAWKMQRTSISYYDQANQLKAIRADGSLDLANFSACQDVLRRVDKTFKAFFGRIKAGRKAGFPRFRPRRRYDSLTFPSYGDGCRLRTNGRLYLQGIGDVKVKLHREILGKIKTVSVKREAGDWYILFSCEIEPSPLPTSDEAVGIDVGLTTFAVLSDGSEIANPRYARKAAAAVRRAQRKVARRKRRSNGRRKAVALLQKAHAHVAARRNDFHHKTARALVDRFGLIAVEDLNIKGLAGSMLARSVHDAGWASFLHMLDYKAEGAGRRVVRVNPAGTTQRCSGCQTTVPKTLSQRWHDCPACGLSLGRDENAAREILRLGLSLDARTWPVAASVASEAVCFS

SEQ ID NO: 13805 - protein, 401 aa, unknown
  TnpB Polypeptide
LDSSAIERLYFSRIETAIQVSENTVAYIVDKKLLCRVLRTYFGRYDQAIHRRAKENMILTYKIKHGRDFSDELRKAKKVANFAILTYSISSKDVKHIGLKSMIANQILRKYSRNKKVERVKSVKLAIPNQGIKVDRDTRTIFAPCLKLSLKYDFPDSFEKVNQIEVGKEYAYVSVSIPEPEPSKASNWIGVDRKTTGHIAVVSDPETGKVLKLGKSALHVHQKYKNMRKDLQMKGKYGKVKQVQDRESRIVRDTNHKVSRKIVDTAKESGNGIKLEDLTGIRGSKTAKSFRYSKHSWSFYQLQSMIEYKAKLLGIEVAYVDPHYTSQECSICGHIGDRNKKRFKCPHCGHVDHADSNAGFNIAKRPRIDRSTKERDLVEGTTDSPKGALACILLTSEPQVL

SEQ ID NO: 13806 - protein, 401 aa, unknown; identical to SEQ ID NO: 13805
  TnpB Polypeptide

SEQ ID NO: 13807 - protein, 218 aa, unknown
  TnpB Polypeptide
VLRRKAIQGFKGKDRYKRISINLLFSARLYRRYISILQFGEVFRNPHNSFTYPDAGIGCKIEGSRLILSKIGSIRIFKHREIEGKIKTCTLKRDGTGCWYAILTTEREDPVKLEPETAMGVDLGISHAAVTSEGLVFDYPKYYVQAEKKNRAAEKTLHRRKKDSQNRKKAQIALSKIGKRIANLRDEFCHQVSRKLVDSGMWSYSKISISPEWSRIIV

SEQ ID NO: 13808 - protein, 218 aa, unknown; identical to SEQ ID NO: 13807
  TnpB Polypeptide

SEQ ID NO: 13809 - protein, 212 aa, unknown
  TnpB Polypeptide
MTFLKRLPHLDNAVGIDVGISNFAVFSDGTFVENQRYLVECEELLSKSQSKKDKLPHRSPERKKAAKKVSHIYERLGNLRDNFAQQLSHRIVNSYGIICMEDMDIKNLIEDKPWMAKSTLDASWRRFRTYVMYKAANAGRKMVLVNPAYTSQMCSCCGTIVPKDLSERVHNCPKCGLVMDRDLNASKNILRLGLQSVPIRLTARSPRIHSGE

SEQ ID NO: 13810 - protein, 212 aa, unknown; identical to SEQ ID NO: 13809
  TnpB Polypeptide

SEQ ID NO: 13811 - protein, 283 aa, Desulfosporosinus sp.
MILGKKVRLKPTEGQEHQLWKSSGTARWAYNWALDQQEKNYAKGGKFLSDHVLRKELTQLKQTEEFSWLYDVSNNITKQAIKDACDAYKKFFKKLANKPKFKSRKKSKPSFYNDVVKLKVKAGIVLIEKVGWIKSSEQLPIGVNYTNPRVSFDGKYWYLSLGIEQEQSTDPLTSEVIGIDVGVKELAVCSNGMIFKNINKSGVVKKLEKRLRRLQRKVSRKYELNKEGSRFVKTCNIIKVEKQLRILHRRLNGIRNNHIHQATNAIVKTKPCKVVMETLNIKV

SEQ ID NO: 13812 - protein, 434 aa, unknown
  TnpB Polypeptide
MRQACSIEKRLKIKKSMKETREKRSRQVCRVFKIKIDQSKLTNRQAEQLKMMFVEGKWIKNSRLAWAKDNGKSVFDCEAPHKHELIQVKNKDGEFEERELKFIGSQMAQDVVADMKSNLKTIIRLCKSKKQKHGELQFVSEISSLNLRQYGTTYKFKTQKKMKIQGVSGLVRVCGAKQFFEDDNIEIASAKLLNTAKGYYIAISTFTSKEKLEKKPSNGKSIALDLGCQTSITYSDGRKQTVYIEESERMKRLQRKVAKQVKGSNNAKRTRKLIQVEYQKIDNKKQDTSNKIVAGLKYFDNVVIQDEQLANWHKNGHGKAIHHSCLGRIKSKMKNMDNVLILDKFIPTTKICMNCGKVHEIPMSQRTFTCNCGTSEDRDVHAAKNMLELARFILEKDLSVPVGRREFKREEFLKAYEKKFGVGYETMIHEADTL

SEQ ID NO: 13813 - protein, 404 aa, unknown
  TnpB Polypeptide
LPLTSKKQQIRNSFFKEYLRVLNATLKSLPDAKSSNDLHHLTYFNIRETSFLPSDIVQEARKDVWAKRKTVNNRFKRCSIRLNKRWFRFFTTDRATPSFKITYAPHKTFTIPIAIDGGYDRFTCFLDDGWVIKTISLLDSKIAVAIDKDFEVPANISRYVVGVDVGSTTLAAITIFDTLENRVVKQLYFGRDVAIRQRRIADQRALLRSNVDKGSDQAKKSLKRLANKQFNFVKTRSGQIAKEIVELAVKHSASIAIEKLTIRSRKHQFNKTANRKINTIPYAQLRDFLISNCAEYGVYLDQVDPYHTSKWCPHCGAVNNGHATSNYALYRCKECGLVVNSDRNASLVVAIKSALVRENSQGLTNLFSQFTRAKVPVNGLFRPDDKFLSCAVHDISPLMESPFR

SEQ ID NO: 13814 - protein, 402 aa, Escherichia sp.
VKRLQAFKFQLRPGDQQECEMRRFAGACRFVFNRALALQNENHEAGNKYIPYGKMASWLVEWKNATETQWLKDSPSQPLQQSLKDLERAYKNFFRKRAAFPRFKKRGQNDAFRYPQGVKLDQENSRIFLPKLGWMRYRNSRQVTGVVKNVTVSQSCGKWYISIQTESEVSTPVHPSASMVGLDAGVAKLATLSDGTVFEPVNSFQKNQKTLARLQRQLSRKVKFSNNWQKQKRKIQRLHSRIANIRRDYLHKVTTTVSKNHAMIVIEDLKVSNMSKSAAGTVIQPGRNVRAKSGLNRSILDQGWYEMRRQLEYKQLWRGGQVLAVPPAYTSQRCACCGHTAKENRLSQSQFRCQVCGYTANADVNGARNILAAGHAVLACGEMVQSGRSLKQEPTEMIQATA

SEQ ID NO: 13815 - protein, 395 aa, Glycomyces sp.
MKLLPTPEQAAALAATLRAVNDAANWTSQTAFAHGVPREYALRQHTYTSLKAERGLGSQVAQLVIKKTCHAYATIAGLIKAGRLQGKRAAKATAKPVTFRPDAAQAFDDRCLSWQMDARTVSIWTVQGRKRNIAFTGHPDQLKTLERYRRGESDLVCRDGSWFLIAAVDVPDAEANADPVDFLGVDMGIVNIATTSDGYNHAGAGLRRYRKRMAKVRAELQAKATKSAKKKLKARARREARAVKDQNHRIAKQLVTSAERTGRGIGMEDLAGIRDRVRLTAAQRGELNAWSFHQLQTFIAYKAKRAGVPVVVVDARNTSRRCPRCGHTTKANRPTRDHFACVGCGLAGPADQVAAVNVRDRARKTWAFVSTPNVADTPQPAADTSDKPRSSVRGS

SEQ ID NO: 13816 - protein, 314 aa, unknown
  TnpB Polypeptide
MEIKNDLLKKLPKWCDDVPFLIKGNAVKEAHQAYWKAKGHPKRSNGACDVQFRSRKNPTQSCYIPKTAIKNTGIYLRLSGKGLRLSESLPEIPLDSRLIYQYNEWFLSVPHKLKTTVAENQGRIVSLDPGVRTFQTFFSETSAGHIGYDDFGRIHRLCHYLDDLISRTSQKTLSSKAKREMKKAQARIRKKIKNLIKEIHYKTAVFFVNNFDVILLPTFETSQTVRAMLTWAHYQFKVRLKNKALEFGKKVIDVCEAYTSQTVSWTGEIKNVGGSRVIRSGDITLDRDLNGARGIFIRSLVDSPSLRSAIINGC

SEQ ID NO: 13817 - protein, 520 aa, unknown
  TnpB Polypeptide
MKRTQVRISEELNTGKFNEMVRLVDSFAAQKDDFLVAYSHLKYLSQLKDHHIQDAILKENFVSPYNLKARAWKLALTEALLTIDRYWQATIEKIRKHIYRRFDTEQERHYAFWLLFGYRRIPLVVKGVVPEGMPKIKEGETEIVLDAEQKRHIVMFLRRVLREHLGERPRVHLKRSMVFDAEMYRVFEEGGRQYIAITRLSEYGRIAIPLKGHQTIEGNIRLVLNRDSRTVEIHVVGDLTPEPSPEENIVGGDFGQTELLATDTGNKYGKSFGTDLTAYADMVDEKGRQRNKVHAFEKSLRATVPKKARRIRKNNLGHKKWKRRKIRALGRIKTEVNTAINRFIDSEHPSVLIHEDLTHYRPPFGKGRFSRVCSFWFRSILSHRIPFKLQARGSGSQAVNPAYSSQTCPTCGYVDSRNRNGDRFQCRNPECPDRDAVLDADVVGARNSKARKDDPEIRLWTSKERVREILVKRFEERRLEGKAAKAVDPTVPAKTPDTAMISVHVERSLGERNYNDMVGG

SEQ ID NO: 13818 - protein, 463 aa, unknown
  TnpB Polypeptide
MQTKKKKKKYSRNKEPNYIKFKNQIKNNSNDIWIPYTSSRNNLIKNNSWFDINENKYNSNKNVCTDLNFSEKIIPKEFYKCIKVELQLTLEQQIIMQRWMKAYIHMYNETLHFMKNQPKDKFCTSFKTIRTYHLKSVRDKLIKESQCANIIRNTCIYTHIMDAAIKLACANYKSAITNFKRGNIKNFRIRYWRFNKNYNIIDIEKEYFSQNTIGPKIFGLIKAKYNNSDFNLNLIPTKYNCSCKILYEKYTNKYILLVPEIVEKQNVNQTHKLISLDPGIRTFLTGLSENETIEICNNPINKIKPIIKNIDKINKLNKLKQITNKKYKRITKRNYKKIKDLVDELHWKTINYLTNKYKIILIGDMSIKEIIKKETSVLSNMTKRIGSSLSFFKFKQRLKQKCYLKDCKYEEVNEMWTSKLCSCCGNYYNESLGSNKIFKCPKCKTIINRDINGCRGIYLKMTK

SEQ ID NO: 13819 - protein, 346 aa, Clostridium sp.
MKEYIKSSREKVFVVEKAYKFRMYRNKKQEELINKTFGCCRFVYNRYLAKRIELYENNKETYSYKQCSSDLTNLKKELVWLKEPDKFSLQNSLKDLEAAYKKFFKEKIGFPKFKSKKTNRFSYRTNFTNGNIEYCGKYYVSLCCADIEIKKLENSNSDIGLDLGIKEFLITSNGETIKNPKYLKKSLNKLAKLQRGLSRKSKGSSNRNKARLKVARLQERIYSQRKDFMQKLSTKLIRENDVICIEDLQVKNMIKNEKLARSIADVSWSEFIRQLEYKANWYGREIIKVDKFFASSQLCNKCGYKNEEVKDLKIREWICPKCNAEHNRDINAAINILNEGLRNITI

SEQ ID NO: 13820 - protein, 441 aa, unknown
  TnpB Polypeptide
MAKPFAAQVNRLPDDPPLRAALEYLCTASNNLYNSTVYLARQLYFKENKFSNGRWLSSQMKRNAHMKALYTSAAQQTCISVGEAFKGFKELLKLWRSGGLADRPKPPNYRRSGGMFQISYPKRWLRLVDGQVRVPMGTACKVWFDLPEIFLPFPSNLDWATVRELQIVPRAGYFDAVWICTAPPIAPTALDPEKSLAIDHGIDNWLTCVDSEGHSFIVDGKHLKALNQFYNKRVATIKEGKEQAFWCKLLDKLTGKRNRQMRHAVNKAARVVVNHCLSHSIGTVVFGWNQGQKNGVNMGRKTNQKFVQIPTGRLKARIAQLCEAHGIIFIEQEESYTSKASALDLDAIPVYGEKPEGWKASGRRIRRGTYRSAAGVEVNADANGAWNIGRKANVIGMQGTPTRGVLTSPKRLRIWDLPVVSILAQKCCNPSGESPSLQRGE

SEQ ID NO: 13821 - protein, 367 aa, Clostridiales sp.
MTRIRGYKYRAYPDKKQREFFERTFGCCRFVYNYYLEAKQQIWNEWHDTLSYSEMSKDLSHVLKKENAWLKEADSIALQQSLRHLDRAYDNFFKRRGGYPKFKRKRSAQSYRTMSGNGNISIEGNMINLPKAGYVKIVNTRIFEGRIISATVSRTASDRYYISLQVEEEFEVLPNKGGEIGIDAGLKSLYTDSDANSVINPKAFAKHEKRIRRLQRSLSRKQKGSRNREKTRKKLAIEHEKVSNIRNDFQHKISYRLANENQVVCIEDLDVKGMMADHRLAKAITDASWSGFYRKLEYKMADHGGVLIRVPKTYPSSQRCSCCGKINHKVRDLSVRRWTCPVCGAEHDRDINAAKNILEKGLEMLAS

SEQ ID NO: 13822 - protein, 167 aa, Bacillus sp.
LIKSVTIAQIATVTYFVSILIEENQPLFLKIDTSVGVDLVLKDFAVLSNGIKFENPKWLRIAFLQRSLSCKKKGASNQTKGMLQVAKLHEKIVNQRNDFLHKISNEITNENQFIVMGDLKEKNMQKNRKLAKAISQVPWSKFREYLFYKAVWKGRDLIIAPKNYASS

SEQ ID NO: 13823 - protein, 220 aa, unknown
  TnpB Polypeptide
VTVSREPSGKYFASLLFDCENQTAEKRQAEKFLGMDFAMHGMCVFSTGERAGYPMFYRNAEKKLAREQRKLSRCEKGSRNYQKQKKKVALYHEKIKNQRKDFQHKLSHSLAEDYDAVCVEDLNLKGMAGGLHFGKGIQDNGYGQFLSMLGYKLEERGKYLIKVDRYFASSKICSVCGHKKKELALSERIYLCECGNRMDRDVNAAVNILKEGKRIYKKCA

SEQ ID NO: 13824 - protein, 381 aa, Allosalinactinospora sp.
MQLRYGFRLYPQAGQRTALAKAFGCARVVYNDALRARETARSEGLPFPKTGELSTALITEAKKTPERVWLGEVSAVVLQQSLRDLDAAYKNFFDGLKAKRPRMGAPRFKSKRDTRQSVRFTANARWSITTGGKLRLPKIGDIKVKWSRDLPSEPSSVTVIKDASGRYFASFVVETAKEPLPESAAEVGIDLGLTHFAVLSDGTKIDNPRFLRRAERRLRKAQQALARKAKGANNRKKAVAKVACAHAKVADARRDFVHKLSAQIIRENQAVYVEDLCVKGLARTRLAKSVHDAGWAQFTAMLAYKAARHGRTLGKLDRWFPSSKLCSACGAVAQPMPLNVRKWECPCGALHDRDVNAAVNILAAGRVERLNACGGTVRPAA

SEQ ID NO: 13825 - protein, 416 aa, Haloferax sp.
MEYSHRYRAYPTQAVGAELEYHINVHRQAYNYTRYEYTHVDADNIGSAYKHHERLTDWKDKFAVFKEVHSKALQRTVTRFYQNLSNLSIQKANGWKVGSLKWKAPREFQSMTYSQSGFKLKNTSGRHATLILSKIGNVPIRLHRDIPDEGSIKEVTIKKETAGEWFVSFGLENDDSDLPGKPALDSLNTSNSVGIDLGILNYIHTSDGITVDWLNLEEEYERLRCEQRKLSRKRRGSNNFEKQRVKVAKVKRRIRRKVLDYQHKLSTWLVKEYDAVFVEDLNVQSMLQNAGNARNKQDVAWRQFITLLEYKADIHGCHVVQVEARGTTKECAQCGMVSEKPIWVREHSCPACGFECDRDANASLNVLQRGFSKLGLGWPESTPVETALPADTHSVSAKCVVETGSLGVGGRRSLPG

SEQ ID NO: 13826 - protein, 436 aa, unknown
  TnpB Polypeptide
MYEAVRVGKEGAPVMVHRAYRTELDPNNAQRTLLLQHAGVARFAYNWGLRRKLEVMRMNQLPIPRIKLPTAIDLHRELNRLKPIEFPWMYESSKYAPQEALRDLDTAFKNFFQGRARFPRFKGRKHGIGSFTLIMSIHVKDDRIRLPRLGWIRSKEHGYLPKEAHINSATVSERAGHWFVSLNVVEERENPEPIIGGAVGVDRGLKSLAVVSDGIVIENPKAMARCERKLKHLQRAVSRKQRGSSNRRKASHRFARFHARISNMRKDVLHKATTVLATTKSVLVVEDLAVRNMMANHHLAKAIGDAGWAEFVRQLEYKSKWYGSRLVVADRFFPSTKRCSSCGGVKASMPLNERTFVCEFCGFTADRDLNAALNLEQWPSVGRTLETPVEGGVQVARPQPSYESGTEMVVNDHESGNGIIISFEHPVRRRTRCRTT

SEQ ID NO: 13827 - protein, 368 aa, Okeania sp.
MKSIRTKLKLNNKQKTLMAQHAGYSRWCYNWGLSLWNATYIDGYKPNVRKLREVFTNHTKPLYPWMKNLSSRVYQYAFRNLGEAFKRFFQGLGKHPKFKKKGRSDSFTIDNCGKPIELNGWCHKLPLIGIVKTYEPIEATTQKITISRHAGDWYLSCSYEFTPASTPKTTEVVGVDLGVKNLATISTEVVFEGAKSYKKFENKLSNLQYLNRNKKIGSTNWKKAQLKIAKVHIKVANIRKDVLHKLTTYLAKNHSIVSIEDLNVRGMLANHKLAKSIADQGFYEFRRQLEYKCEWYGSNLVVVDRFFPSSKTCSNCGHVQDMPLNVRTFDCPECGISIDRDLNASLNLRDAVGLTVNACGRSAADSSD

SEQ ID NO: 13828 - protein, 391 aa, unknown
  TnpB Polypeptide
VLYSHKGGELAIEYLTQNIHLKHLTPAEIECLDKLSKLLRQHYNYLIWCLDLYYKAEGKLMPLGMLLQAETNSKYYLGGGFYLARQARTNFYTSFLKNNKPIKQTNKPMSITFKPKIQGNRITMQATKYSPPITFEADLICDCKDIKTVTISIRSRKMGYWKAAITYEQTSTENPPICSYDGLVCAGLDFGIENFATICTSNGKSLIVDGRRLKSIVHCYIKNGKSAAASIRYNNRTFDYINKSVSVIVGFCIKNDVKAVVLGEGVINGAFRVQQQNKFLNLFCFSQFQKNLIQKLKMNGIATYLVNEAYTSAASFLDNDCMPMYTTRTKPNFSGKRTRRGLYVSSNGTKINADINGSLNILRKSRIVDLTELQRNPSLIEHPKRVDPLNQ

SEQ ID NO: 13829 - protein, 206 aa, Escherichia sp.
MPVTAKTVGIDVGLKDLFVTDTGFKTDNPRHTAKYAKRLTLLQRCLSRKQKGSRNRIKARLKVARLHAKIADCRMDNLHKLSRKLINENQVVCVESLKVKNMIRNPKLSKAIADAGWSELVRQLQYKGKWAERSVVAIDQYLPSSKCCSCCGFTMQKMPLNVRKWHCPECGADYDRDINAARNIKAAGLAVLAHGEPVNPESQHAA

SEQ ID NO: 13830 - protein, 377 aa, unknown
  TnpB Polypeptide
MLHPNNKQRTRLFQSFGVSRFSYNWALSRQQENYKNGGKFISAFDLKKELVRLKKTPEYSWLNEYSSVISATAVIDACASYKNFFEGRCNFPKFKSKKKSKPSFYVKGEVIEFTDTHVKIAKMATSKKRNKLRLNWIKLGECGVVPIGCKYFNPRITFDGINFWVSVAIEVEDSEEIPTGKGIGIDLGIKDLAICSDGYIYKNINKTEKVKRLEKKKRRLQRKLSKKYTANKYEKTKNTIKLEREVLELNHRLSNIRHNYIHQVTTEIINRKPIFISLEDLNVSGMMKNRHLARAIQEQSFFLFKITLTYKAALHNIQIVNVPRFYPSSKTCSVCGAVKSNLKLSDRIFICPDCGNKIDRDVNASINILNYGLSILR

SEQ ID NO: 13831 - protein, 505 aa, unknown
  TnpB Polypeptide
MTMAKMLYKSYSPEILAIFNDDYEVYSEEETEEIINDIKNDVNYVSAVSQLLITSELLKEYESFVDSGKCNTSIPNAVGKLMKINIPDELVRSPQTGRSRLEHMVRDRVVRELSSWSERRKAVEGESGKYISQGWSRTASASRPHTLNPKMSLSAADSQYVKILNNYVSDGFIDLKMVAGRKWYTLRFAYPQKRFKESLKLCLPDVIINKDGELKFNFAVGYVKNQPEFNPDYFVVVDVGISDYITAGVVRASDGETVEVMEVSQLLKTLENKAKKAHKQVSALHKTHRKEEAKSHRASNVKRKHELAIQAAQEVADFAFKWGNAAIVIEDLSWIKNTMKNGRWNRGEFVKWLKHFSELNGSRVMRANAKDSSQKCWKCGGRVTHPTWGTSRCINRECDLYHVIQDRDICSLSVIAQNFIKPGSFEKSVKTRKRSKTKFKKKEQRSPKITRAKVPRKDRTKNRPTKKRKKIRTKRLEYVRLEVKKFGGSRGLTVACIKKEKQMSA

SEQ ID NO: 13832 - protein, 436 aa, unknown
  TnpB Polypeptide
MDFAASTENATGQGYWFALDPNKNNEVILYIKTPPGVLGHDDADTSSPYRNRTISFRFLNWLPEKSVRARKKAKDARDSGDDERAVMLDYRAAVFDDMNQQLLNTITLHHVARSASAAKSKKTTKLSTCELERLRRSRRCAPPILRVEGKRVLLLIPFMPLTRELLEKTIPNIPRTARAGADRGLRYPVVISVQGVNKQYKERQISHTRLLIKREKLRQRTRILMSQVDRKRNNWEKKRMGLHPPASVLKKERELEAVWLKVRRLDREISHQVASETVWFCERNRVKTIYFEDLKAFQSKAGMHAFSWSLSTNLWGKIIEGVRYRRMALGHRYGGVWTVNPAWTSQTCSGCGERGLRTEDMTSFEEKKGGEYFYCPHCSLHIHADVNAARNISAIQTQPSAVLGRTNTECPSLSNSQRMVYNPSTRSPRQRLPRVR

SEQ ID NO: 13833 - protein, 373 aa, unknown
  TnpB Polypeptide
VRKTFKYRLFTTRSQSEVLDGQLREACRLYNGAMQERRDAYRSHKKSLNYYDQANQLKDIRAAGDLGLANFSCCQDVLRRVDKTFKSFFLRVKRHQTPGYPRFKSSRHFDSITFPSYGDGVKLTGNTLRVQGVGEIEVKLHRPVAGKIKTVTVKRECGKWYVCFSVECEANILPPLDNAIGIDVGLESFATLSDGEMIPNPRWYRTAEAKLRRGQRKVARCKKGSHRRRKAVALLQKVHARIYRLRNEFQHRQSFSLVRDFGTIVVEDLNVKVLAAGMLSKSIHDAGWSSFIAKLSYKAANAGRQLIAVNPAGTSQTCICGASVRKLLSDREHVCIECGLVAPRDVVSAQVILQRARISPSSVNVEPFSSCVA

SEQ ID NO: 13834 - protein, 389 aa, unknown
  TnpB Polypeptide
MMKNYKGIKIEIKPTKEQIEKINRTIGTGRFLYNFYIAYNKEIYEKEKKFVTGFEFSKYINNKYIKDNPDKLWIKDVSSKSNKQAIMNSEKAFKRFFNKISSFPKFKKKNCNNQSCYFPKNNKTDFKFYRHKIKIPTLKFVRLKEYGYIPKNANIKSGTITKVADRYFLSLIIEVEDILKVINTDTEGLGIDLGIKDTVICSDGKVFKNINKTNKVKRLKKKLKREQRKMSRSIEYSKSKKIKLRELKNFNKKKLKVQKVFYRLNCIRNDYNNKIVNEITRAKLKYITIEDLKVSNMMKNKHLSKAVQEQNFYTIRTKLINKCKERNIELRLVDTFYPSSKTCSCCGNVKENLKLNDRIYKCNKCGLEIDRDYNASLNLKNAKNYKILV

SEQ ID NO: 13835 - protein, 359 aa, Symploca sp.
MRISYQYRLKPNKHQRQIIDNTLNMLRCQYNYQLAQRFNWQEQNRCSLDRCPLVCHLPELKERPEKSNQSKNLVQLKKDRHWYKNIHSQVLQSVCERVEKAFDRWLKGDVNGRKSGRPRFKGVGQYKTFTYKQFKQHHLVGNKITLSKIGDVKIIVHRPILEGFLIKTASVTKKANGYYVTLSLDNQQIPTIKPDFNAKNIVGIDVGLIDFYVASDNTRIAAPKYLRKSERKLKSAQRKVSRRKKGSKRRLKAIKKLGIRHKKVADTRQDFHFKTAKKLLNKYDVIAVEKLKVKGLARTRLAKSIHVCEAWCDSSIAGWSQFINILSFKAVCEAWCDSSKNAGRESNSCISKWHKSRML

SEQ ID NO: 13836 - protein, 378 aa, unknown
  TnpB Polypeptide
MISYKYKLYRTKNTSHLDNMLSEACFVWNHALALQKRYYRLYGKYVSCAAMQRHFAKRIKRTYLHSQSAQEVLQRLDAAYARFFKHLAKRPPKFKRTADFASFCYKQGGFSLCGNVFHINSCKKDYKFSLSRPYDGKVKQVRVKRSHLNEWYIYVITDASPKSYAKTHDGASIGVDFGLKTYLSISNGEKVNNPQFLKKDLRRIRKASEKHSRCISGSNHKEQARLTLCRLYESVANKRNDFQWKLAHELCKRYDSIFIEDLNLNGMSRLWGRKMNDLAHGSFVNILEQVAAKYGCTVHKIDKWFPSSKLCDCGYKNDNLSLNDRSWVCPHCGQVHDRDVHAAEMILRRGIYELTSNGKTIEPLGFEAVAFESRISLL

SEQ ID NO: 13837 - protein, 395 aa, unknown
  TnpB Polypeptide
MKTYKYRLYPTKSQAEKLTSTLESCRVLYNCALEQRKTTYKQFKISLDYYIQADELKEIKKYFSEYKQVYSQVLQNVLIRLNNAFDNFFDRLHKGEKPGYPRFKGRGWYDSFTYPQSGFSLSENKKGNQRLKLSKIGNIKVKLHRAIKGVIKTCTIKRELNSWYVCFSCEVEPELLPKTYQDVGIDVGIEKFAALSNGTLIQNPKFLRKSETKLKYEQRKLSRKKKGSNSRKKQKHKLAKIHCKVKNQRNDFLHKESYKLVNNYDVIVFEDLRIKNMVKNHHFAKSISDASWSRFIEYVSYKAESAGKKIVFVNPRNTSQICSGCSMIVKKSLSVRVHKCPSCGLEIDRDINAAINILRAGTAPGGATALAGRRSQKPSTLVEGGSLDFHFNQVF

SEQ ID NO: 13838 - protein, 357 aa, unknown
  TnpB Polypeptide
MILTFKYRVKDASSRRHLARYARACNTVWNFCAATQREAERRWKAGRKIRWPTAFDLIKLCTGAAAEIGLHSDTVQAICRQFAASRDAKRRAPKFRASFGAKKALGWIPFIERAVRVDGNAIVYLKRKFCFWRSRDIGGEIKCGSFVEDARGRWSVSFQCEVPDSLPCGNGEIGIDLGLKTVAAMSDGTKIENQKLVARYAGKLALAQRARNKRRVCAIHAKIANARRHQLHVASTKLADANSLIVVGDVSPAKLTKTKMAKSVLDAGWSTFKEMLRYKAARRRAVFLEVSERWTSQTCSSCGSISASSPKGMGALGIRRWACSECLVEHDRDTNAALNILRVGLERQPLAGEIPVL

SEQ ID NO: 13839 - protein, 443 aa, Halomonas sp.
MPIIRSDSLALHVTSADQQTALADTLALYRRLVRDLMTVAYTHWPVVGAGKGNDVVKVIEGLIHPTRQRPQVRYPYFAKRYYKFPSYLRRVAIMDAVGQVRSFVTRFDTWLRGKRKHPHEKPPRLTSSTKTFPSLYGSQCAKINADASHAFIKVRQHNDWVWMGFRLKGTCRFRGKGKAKSPLLTTNGRQWQLSLPEQFDPPKPAKGAPDRVLAVDVGINTAATWAVVDAQGTVHARGFLSRTDKGREYRLMQRIRRQARKQTRHGSRLPPGFCRRDHQRLTHLADNQAHQVSRRLVNLALKHDCQAIAVEDLKGWRPKAGKKRTPMKARFHRWFHRQLVTRIESKAEEIGLRFVAVYARGTSSQAFDGSGPVKRDKDDYSQCTFSTGKRYHADLNAAYNIAARGHVVYQGRGRKATARVSSQTPTRTPRTPVTLSTLWQQSA

SEQ ID NO: 13840 - protein, 460 aa, unknown
  TnpB Polypeptide
MKRVNTFEVVPQTENVKECLLRLLDASASLWNELTYERRQNYFGDGDVWDTSEYRGRYNGVVGSATVQQVTRKNSEAWRSFFALKEKGEYANPPSYWGNEEDGRELRTYIRNNQYTIRWGKRSRLEIHVGQELKDEYGLGYHERLCLEVRGNPKWDGKQGRLELEYDEVSDTFRAFQPVTVPDSRLDSRKLEEFPEVENGSRFRNSPLASHEAALDVGANNLVACSTTTGSQYLYDDRELFGRFRETTDEIARLQSKLPERLSLSESRKTKSSGRLREGRYSSKRIRRLYRQRTKRRDHAQNALVRDLVERLYDEGVATVYVGDLTDVLETHWSVRVNEKTHNFWAFKKFIHRLSCVCEVYGISLEAESEAWTSQTCPECGDHEETVRHGDTLTCPCGFEGHADLTASETFLRENSDTEVRPMARPVRFEWDDHDWSGKSHPHESPKEVRTNPQVASVDR

SEQ ID NO: 13841 - protein, 392 aa, unknown
  TnpB Polypeptide
MKSRWTFRCYPTPEQEQHLARTFGCVRFVWNWALRARTDAFRAGKRMSYPETDKALTALKATPEHVWLNEVSSVCLQQALRDLQVAFSNFFAKRAGYPQFKRKDARQSANYTERGFSFDPERRILKLAKIGAIKVKWSRKAIPHPSSVRLIRTASGKYFVSLVVETQPAPLPKTGEAVGIDFGVARLATLSNGERISNPKHSAKWQRRLAFYQKRLARAKKGSKRREKVKRHVARIHEKIANSRSDALHKLSTDLVTRFDVICVEDLNLRGMAKNHSLARSLHDVSIGTAIRMIEEKAERYGKTVVKIDRWFPSSKTCSACGHIVEKPPLSVREWTCPECGATHDRDANAAVNILAVGQTVTAHGDGVRAVRSTERKANCLRSANRQGINRA

SEQ ID NO: 13842 - protein, 298 aa, unknown
  TnpB Polypeptide
VADAYKLGNKTQCHFRPLGAIAYDSRNLNLYLGKQVVSIWTMKGREKIPFVCGDFQRDILKRGLIKQCELIRRRSGKFFLHVSVVLPDEIEREVTDMLGIDLGIACIAYTSDGKEYSGSKLNKIRYRNNALRRKLSIIGTKSAKRLLKKRANKEANFARDTNHVISKQIVMLAKRTERGIAIEKLNGIRSRIRARKTERTKLHNWSFSQLGTFLKYKAKRDGVKLVEVDPTYTSQRCSSCGHIEKANRITRSEFVCKACGHTSHADKNGADNIRLLGLDAIGSGELRRPNAEVNSHAN

SEQ ID NO: 13843 - protein, 408 aa, Polynucleobacter sp.
MQRLSAYRFELKLNGAQQRQCAQFAGVKRYIYNKALALQQTNYAQGNKYISYASIAKHLSPWRNDPLAPWLKEAPFHTQQQALKDLDRAYSNFFKGLSDFPKPKRKGLHESFRFPDPKQIQFDQTNSRIKLPKLGWMRYRNSREVSGELRNVTISQSGGKWFMSIQTQMEVDQPIPEGVDAVGIDVGIANFAALSNGIFIAPLASFKKHEQRLAKYQRRMSHKVKFSYNWKKEKAKVNQIHSDIANARKDFLHKTTTTICKNHALVCIEDLQISNMSTSSKGTIENPGKNVKAKSGLNKAILDQGWGEFRRQLEYKMAWNGGMVIAVPPQYTSQACPNLQCGHIAKENRKTQSRFKCVSCGYENHADTVGSINILERGLRLLACGDPMPLDRSVKQEPTETTFDALAA

SEQ ID NO: 13844 - protein, 386 aa, unknown
  TnpB Polypeptide
MKIVKTCRVKLVIPEERKQDVLETLRQYNFAVNFCVNKAWEPKRKIIDRHELHKLTYYPLQENTNLSATLVRSARNRARDAVRLCVVRWSKRRRASKPVFKPFSAIQLDDRAVTVKSRECTFSAINGRVKAKYRLGSHQKKILDNPNCEFRAGTLSYNGRDFFLNIAVIKSAPIKETGTIMGVDLGINNIAVTSTGKFFKAGVLNDKRRQYAERRSKIQRKGTRSAHLLLKKMSGRENRFARWVLHNISRRIVEEAKRVGASVIAMENLKGIREHTKKCGKSHRRRMSLWAFSKLQKFIQYKALEEGIDVQFVDPKHTSQRCSKCGHICQSSRNGSVFRCGACNYCAHADYNASKNIAYLVQEGKSSFLDRVACKPALNQEPVMVH

SEQ ID NO: 13845 - protein, 414 aa, unknown
  TnpB Polypeptide
MEGQPSMARYRMYPTAAQDAVLLEHCAHARYVWNLAWNLHQFGQLETYGKASRRVSRDGRENIHQKRRPVRPLPGYVEQARMLTEARAGYGWLAAGSVVVQQQALRDFDQAMRNFYAGTHGRPGRRRRHEDEGFRIVNLEPTRDVRRLNRNWGQVRVPKGGWVRFRWSRRVPDAKSYRVSLDRAGRWHIAFAVIPEPIPAPGTGEAVGIDRGVVITAALSTGEKLHCPGLTEPERARLRKAERRAARAPKGSPERQAERARIARLRAREADRRKDWCEKTSTGLARRFDLIRFENLQIKTMTRSAKGTPENPGRNVRAKAGLNRAILAQGWGQLVRRTQDKAPGRVEKVTAAYTSLRCSACGWIDTNSRDSQAGFVCVHCGFTCNADQNAAVNIAAGHAGGTPLSVREPLTSTA

SEQ ID NO: 13846 - protein, 395 aa, Lactobacillus sp.
MEISLTIKARIYPSQSEAESLKKTMEAYRQGCNYASQYVFNNNFELGQSKLNKALYHDLRDTFDLKSQMAQSVLRTVIARYKTVATQLSQKPYKCLGYKIKRDLTWLWKPITFSRPQFELVRNRDWSFKNDNQVSLNTLDGRIICQISMSGFEKYQDWQFGSARVLKSSKHWYLHISASREIDDYDINQTRHVIGIDRGLRQIVTCYDEKGKTLFKNGKQIAKKRNHYKQLRRHLQLTNTKSSKRRIRKIGQRENRWMSDYNHCLSKTLVEKYGTDSLFVLEDLTDITFDTVNNRKREDRYEHCSWSFYDLEQKLTYKAHLNHSEVIKVDAYCTSQRCPKCGRINKENRKHNLHLYICDKCGYKSNDDRIGAMNIQNLGTMYVSGNYKPTYQKLV

SEQ ID NO: 13847 - protein, 235 aa, Enterococcus sp.
MWQSYTTNNQKGTIYLKDKYLKLPKQKELIQVNLHRPIEGEIRSATISSRYNEAFYVSLLCEVSAKEITESRRWIGVAYDPQKLIETSSPVDVPLPLLKKTEKEMQLAKRKLGIKGRAAQKRKARLERSKNYQKQKRKVMDLYLKQKFQKENYLEQLSGKLIRYYDYLFVEAVPNETFLSDFSLQDWYKLVTKLRYKANWYNKTLILINMNEQTDPLVIKKSLELEKIGKQVIFE

SEQ ID NO: 13848 - protein, 215 aa, Halorubrum sp.
LKHFSNRSRRPTVQASDTADTVVGVDINERNVSLTALDREMMRTKGTLVLDYGRVKQERQRYHTITKRCQEHGKPSIHRKLGDKEERFTKWVLHRLSRAVVEFAEQFSNPVIVFEDMSGIRDEIKYGSYMNRRLHKLPFHKFEKFVSYKATWRGIPTDTVEGYYNSKTCSCCGERGSRQGPAVPVYERRVRRGARPRRPERVGEHRMAREGETQR

SEQ ID NO: 13849 - protein, 409 aa, unknown
  TnpB Polypeptide
MNLVYKFNIPHSEALDAMFRVSNNLYNQALYVFRQSIEADGTWLWYGDLDKIMKATPNLEGQCNYRLLKAQCSQQILKVLDRNIKAYCKSIKDWKANPGKYRGMPKLPNFRKRGGMFNMYYTNQSCSIKDGKLRLSKDLFLDIPQWDKYKDRISKFCQCNLVPEPDSIKVEIVYEMETKPSSLDASRCASIDLGIDNLATMATPEGCEIFSGRFLKSYNVYFNKTLARLQSVKDLQGVKRVTKRIRRMYDRRDRYIDDAFHKISRQIVDTLVRQNVGTLAVGYNAGWKTNVCMGRKNNQKFVQIPFARLTSYLKYKCELSGITFVEHEESYTSKCDALALESICKHEVYFGNRKKRGLFQSSVGKDVNADLNGAWNILRKVVGDSAFLQITDRGRSLRPVRHRNPFVGL

SEQ ID NO: 13850 - protein, 480 aa, unknown
  TnpB Polypeptide
MLCRAVAVELETPREVSKLLHSVETAYLNIVREVVEYAVANNVLNATQLHKLFYHKYRDEYPGLHTHLVVQAIRQASEIAKSFVERRRRGLVGKPYPEVKAVSIRFDETAWNYEQFIKSVAPVRLELSLPNGRTVVWLRPHKRFWQYWWKVLTGEAELASTLVVKRKANKWYAVFIFKIKPKRELPQSVVAFDINENTVAVGRIDIVATIDKIASWNRQYTTPQLYLIRTDFGRLARRYERVRNAIIERLKPHFALPNGKYSNVTSTREFRKQVRKLREEDRKLGRVRQIANELTKTPAIIITEELGEKPQESMIEDVGKDELRHRIKQTPFKKLEEAVGDKALERGSKLFHVSSYRNSRVCPIHFTRLEKTDDWHTLQCPLGHLVDRDYASVLNMAWKVTPEAWTKAFWWNMKNLSKNMNWRKHEDESNPLVPYEIVKYIHAVLKTFVASEESPAVLARGKPMNPARGADEGWARGKGR

SEQ ID NO: 13851 - protein, 171 aa, Leptolyngbyaceae sp.
IKIETSRIAGFDFGLKTFFTCSDRSEIESPQFLKSSLAAIRKASRQLSSKQKGSANREKARQHLVRQYEAVSNQRRDWFWNLAHQLTNQFDVLCFEDLNLKGMQRLWGRKISDLAFGEFLQILQWVAQKKGKLVQFVSRWYPSSKTCANCGHIHQSWNCRIGCGVARSANR

SEQ ID NO: 13852 - protein, 368 aa, Leptolyngbyaceae sp.
MFILGHSFVDGLQLSTKYVNIGNMKTFKFKLYQHKRNRHLKRMLIAAGVIYNHCIALHRRYYRMWKKHLNCNRLQAHIAKLRKRKPFWQSVGSQAVQDICQRIKRAYQLFFKHHKKRAKPPSFKKVKTYKSFTLEQTGYKFLSGDRIAIGKRVFQYWNSRSIEGTILIVTILIVTIKRTLLGEVFLIVVADAGGEPEIKIETSRIAGFDFGLKTFFTCSDRSEIESPQFLKSSLAAIRKASRQLSSKQKGSANREKARQHLVRQYEAVSNQRRDWFWNLAHQLTNQFDVLCFEDLNLKGMQRLWGRKISDLAFGEFLQILQWVAQKKGKLVQFVSRWYPSSKTCANCGHIHQSWNCRIGCGVARSANR

SEQ ID NO: 13853 - protein, 389 aa, Geobacteraceae sp.
MRKTYKYRVYPSRDQESRLLETSETCRVLYNSCLVDRKNHYQSTGKGLSRIRQQEILAADKKRVLLLKEIHSQVLQDVLFRVERAYQGFFRRLQERSGKAGYPRFKSEGRYDSITFPQEPGFRIEDGKLKLSKIGQLKIKMHRQIVGTVKTCTVRKDGTHWYACFSAEYEPTPRPIPLKAVGIDVGLKSFATLSDGSEIANPKHLRKAESSLKRVQRSLSRKKKGGKNRKKAKVVVANLHRKVRNQRSDFHHKTARAIVDANGLIVAEDLKIKNMVRNRHLSKSISDAGWGNFLLILASKAEEAGCRFEKVKPHHTSINCSCCGTAVLKTLATRTHRCHVCGLVLDRDHNAAINILKRATAGTAESYAWGESVLSDLSMIQEAPSLAAG

SEQ ID NO: 13854 - protein, 225 aa, unknown
  TnpB Polypeptide
MIWIPRVKYKRTGKIIGINRGIKHPFVSSNNKFFGRREWHERERKFLSLIARLQSAGTKSAKRHLKKLSSRLKRFKENCDRILVKEFFATFLPGDTIVLENLINIRDNCGAKGKAHKKHRTKIGRWSFKRLENALKYLAELAGVYVEYIDPRYTSQRCSQCDVVKKSNRKNQSMYVCSCGLQLNADLNASRNIKNIWCMANGYTSGPESTGLLQQVNSLAASSLL

SEQ ID NO: 13855 - protein, 375 aa, unknown
  TnpB Polypeptide
MHDMELILKLKLFEPRKGKKMLIEETMRQFKECVNDWIQALHQLGDKPTRTTIHRFAYKKLRQKYPQLHTDVLQEAMDLAIEIYRAWLNNPNKGKEIPKFDKDCIYFEGRCVKFDRHFISLPLVGKRVWLPMYVPARFKQYLQHKHGRVILKKVKDEYYVYVSVNVPEPEPYEPRGWFGVDIGIRHIIVVSDSKGKVNWFLNDTLGWKKNMECRISGLQRLKDKKVKKGVWRVLKRFSGKVKNRQRYINHVIAKQLVLMAKMWRYGIAIENLKGLRRGKVGKRHRKRLHKWAYRDLIDKIVYKAKLHGVPIVFVNPKGTSRTCSRCGAKGVVRSRVFVCKKCGLKLDRDLNASRNIALRASPRIEKRGFRTEVVL

SEQ ID NO: 13856 - protein, 452 aa, unknown
  TnpB Polypeptide
LLESLKTPTKIIRTDKWQLNPTPDQKLLFGETVKVYRRACRYLVGIIYTHWSELGELTANQLTPAVERLMHQTQSRPNIKYPQFNKAFYKFPSYYRRAAIAFAAGLVSSYVTRYSEWQSGTRKRRDTKPPRLNADTGCYPALYKGQCYKLHGYDQVEIKVFNGSDWVWTGVQITGLRERHLVATNKMMSPSLIFNERACYLSVPFACKPEKRKPQANVTAVDLGINTTATIAVVTHSGTVIHREFIHPGRDIDRRDKRLKSVSMRASKTMGFGGKLHKGFCSKTYEKCRRINHQISHVVSKRIVEIAEQLNSEAIVFENLKGWKPKGGRKRSNLRQRFHGWLKAKIRNFTEMKWAELGGKVIEVVAAYTSKLAYDGSGVVKRNSKKYSLATFASGKRFNADLNGAYNIGARGVSKLVRRNDNEGRSSKRSGRPPRSWVCLCDLWVSGNPKLA

SEQ ID NO: 13857 - protein, 390 aa, Paenibacillus sp.
MVSWMKTYKTEIYPTQEQIIKLNQTIDVCRFLYNQFISYNKEVYEKEGKFVSGLDFDKYVNNELSVQEGFKWIKKAYGKARKKSIMNAENAFKRFFKELSKFPRFKKKRNQDVSFYAPRNNKGDLLIERHRIKVPFLGWVRLKEKGYLPVKQQAKNITITQKAGRYYISAFLDCDFPYSNNQQKSEGIGIDLGIKEFAFASNGHSFRNINKTPRVRKFEKKLKREQGSLSRKYEFYKKKGGKSAAKERRNLNKNILRVQKLYQRLLTIREAYRQHVVSMMVKTKPSFITTEKLNVKGMMKNRHLAKSVANQGFYDFKQRLLHSCKKFGIELREVDTFYPSSKLCSCCGHKKVNLSLSDRIYKCDNCKVELNRDHNASLNLKQATKYVVLT

SEQ ID NO: 13858 - protein, 164 aa, Bacillus sp.
VSLLVETEVQELPKTHSYIGIDVGLKDFAILSDGKPYKNPKFFRSLEDKLAKAQRVLSRRMKGSSRWNKQRVKVARIHEYISNARKDYLDKISTEIIKSHDVIGIEDLQVSNMLKNRKLAKAISEVSWSQFRTMLEYKAKWYGKQVIVVSKTFASSQLCSCCGY

SEQ ID NO: 13859 - protein, 365 aa, unknown
  TnpB Polypeptide
VANKAYKFRLYPNEEQKILFAKTFGCVRFIYNQMLSDKIAHYKETGMKLNNTPAQYKKEFEWLKEVDSLALANAQMNLQTAYNNFFRTPKIGFPKFKSKKRDKDRYTTNNQNGTVCIVEKKLRLPKVGLVKMVQHRLISDNEKIKSATITRTPSGKYYVSILVECDKIIPEIELSRDRAIGLDYASHSFYVDSQGKKADYPKFYRKEQDKLTREQRKLANMKYGSKNYCKQRIKVARVHEKVANQRLDWIHKLSTQLANEYDIVCVEDINMQNMAKSLKLGKSTNDNSFGMFRDIISYKLADRGKLLVKIDKWFPSSKMCRHCSAINHKLTLADRVWTCGCGATINRDENAAVNIMNEGLRMIFT

SEQ ID NO: 13860 - protein, 480 aa, Actinomadura sp.
VRRPRRRRGAFAGGRAGAKPVRRHPGRRRRLRRRLRLHRPARQGQLLRRRRADGGPAPRAGPGGGPARGRRRIDRGHAPGGRRDRAGLPGRGRARRAGGGGEGRRGGRGRQDVPVVEGGAGPVDAPRLRHRRVGGRGHPAQRGGAGGRQDADERAAVRGRGDAQGDERGRPDAAERLRGPRGDRGGPALAGLARQHPHDRPGRLRGRRSRGDPARPGHVLNEQRALNRARPPRAAGGLLVATCEVPETERYDPRDWLGVDRGITNLATSSDGDNYSGRRLDRYRRWQARKKAEIQAKRTRSAAQLLKKRARRESRHATHTNHTISKTVVAVAQRTERGIALEQLQGIGGRVTVRRDQRARHSSWPFHQLGRFIAYKARRAGVPFIEVDPAYTSQRCPRCGHTERGNRPTRDHFCCRRCGLAGPADVVAGVNVRDRARSAWVFVNMPPPVPTRTGTGDVPRERPPVGDSREHEQSPSGLSS

SEQ ID NO: 13861 - protein, 190 aa, Providencia sp.
LFVTDTGFKTGNPRHTAQYAKRLALLQRRLSKKKKGSSNRAKAKLKVAKLHAKIADCRMDNLHKLSRKLINENQVVCVESLKVKNMICNPKLSKAIADASWGEFVHQLQYKAECSGRSVVAIEQFFPSSKRCDCCGYTLPKLALNRRSWVCPECNTDHDRDINAAKNIKAAGLAVLVLGESVIPKSLSEA

SEQ ID NO: 13862 - protein, 232 aa, Paenibacillus sp.
MKECSPTLVRKGKRYALHIAYEGDVKLTQAELSKQRVCAVDLGLTNSAVCSVMDANGTVLARTFINQAKEKDRMRQMTGKLKQAQRQSGIGAKPNFWRRMNGLQTHIVHDTAHRIIAFAQKHSADVIVMEFLGKMRLPKGTWGAKRLRAKLQFWAKRRIQTKVTEMAHFIGMRVSMVNPANTSALAFDGSGFVQRNTKPHLKRCGCPWRPKTLHWQNERIGRWLPSFGCNRR

SEQ ID NO: 13863 - protein, 499 aa, unknown
  TnpB Polypeptide
LPHPAGRHALEAVHQPGQRDLGRVVHQQVHVVGMAVELGELAFEVRAHVSHDFLKSLKVLAAEDRMPVFGDENQVGMQDEDTVPARAHITGFSHETNYDGCVQLRYSYRLYPDARQREALARAFGCARVVFNDALVARRAAYEAGEPYITDGEMLARLTASKDSPERAWLGEVSAVVLQQALADLNTAYRNFFASVTGKRKGPKVAPPRLRSRKDRRQAIRFTKNSRYRVLGNGKLRLPKIGDVPVRWSRDLPAEPSSVTVIRDSAGRYFASFVVAVTPDLLPEADAECGIDLGLGHFAVLDDGTKVAAPRFLRRAAKKLRRAQKNLSRKQKGSSNRDKARVKVARAHAHVADARRDFHHKLSTAIMRDNQAVTAEDLAVKGLARTRLAKSVHDAGWSAFTSMLEYKARLYGREFRRIGRFEPMSQVCSACGVKDGPKPLHIREWTCAACGTVHDRDVNAAKNIAALGRREALNARGGQVRPATTLAPAGETGSRRDAA

SEQ ID NO: 13864 - protein, 346 aa, unknown
  TnpB Polypeptide
MEAFNRGCDYVAQVAFQKRLANKIAIQPLVYGTLRSEFGLSSQMAIRAIAKAIEAYKEIKKRDKNIQPTFDPHGAMVYDHHIMSFRDLSHVSLLTLTGRELLPLRYGAYQEARMGRVRGQADLTFRDGVFYLYLTVDMPTPPPIEPADVLGVDLGIAVLAMDSDGEAHTGEGVKQCRRRFQRLRKGLQSCGSKSAKRHLKRIRRRESRYQRHINHCISKHLVQKALVGQRALAIEELTGIRERTQATVKKTQRYERLSWAFHQLRQFLAYKCEATGIPLHVIDPRNTSRTCLACGHCAKENRRNQSGFLCIECGFQANADWVGSVNIRRRGLEARASLSGPMSAPA

SEQ ID NO: 13865 - protein, 374 aa, unknown
  TnpB Polypeptide
MRTYKFRIYPSKTQENLLKHHLWIEKELWNELLEANKKRYQEEKKFLTKNEMQKIVKGKGLYSQVAQTLSHRLHNALWHMVKMRKQGKECGFPRFKNIDRIKSLNYPQAGFSLDKKLKVTPFGEISIKKHREIEGKIKTLSLKREASGKWFAIFCVEYEPKTARQNTDKKVGIDLGLLNLATFSDGIIIKNPRHLKKHEDKLAWHQRILSRKNKRSKNRIKQKIKVARFYEKVSNTRADFLHKTTTHLVNSYSLIALEKLASQEMAEQNFGKSINDAGWGMFANMLAYKAGSAGCKIVFVDPKNTTQECSNCHQIVKKDLTERMHNCPFCNLSIERDFNAARNILTRATVGQTGSNACGDEAIVSSLKQEAHTF

SEQ ID NO: 13866 - protein, 444 aa, Desulfurococcaceae sp.
MIIKTIEKTIKLKLLPLTKSDKKQLFSLLNDYALMIREALDIIIKNDVCSRKKAHELCYRFLRGKYPHLHNKFVQEAYKRALIMYRSYRKLLNKWKRLPEKKRKKISPPSPPTVEDNRVIELHIDTYKLERRHGFLVLTVSKGNGVYLRFLVIEYKYAWKEIEGAKLGNSKILVDGKNVYLLLTIRKNVEINEHENKLFIDINEDSIDCLLVNYDKNEAVLFSIRHDIRRIRTNYRRIRKSIQMKVRNPRLRDKLLAKYGRREKKRVEDRVKKITTLLAEIAREYNAGLVRESPKDLRLNSRKRSKQLNYRLSTFPYRRFIEYVDYKFYERGLSVLEVGAKGTSITCPICGYVDKRNRVNKETFMCRRCGFTFNAQYVACLNLFSRSNDGRVAIRGGRLFLITRKTAPVVAVDVAPDEPPNQMRWMREKPVPELIISNPSTICT

SEQ ID NO: 13867 - protein, 544 aa, Burkholderiales sp.
MSDRPIFTFQTRISLGDVQRMGLDAYASLYGKVERSLFAAMQAGVSLNDLKREFLLKFGITARQFNAVRVGLEGKIDSIKARRPELIAELQIRIKKALKVVAMLELRPTQATKLHQKKRRLHILQTKLDAIQVDHKEGKVRLCFGSKKLFNAQFDLQANGYADHAAWKADWQDSRCDQFFVLGSQDETAGNQSCQAELQQDGSLMLDLRMPNVCEAEHGKRVLLSGVRFAYGHDKIIAALASSQRVASTTKAGKPIVKRIGSALSYRFVRDVKGWRVFVSCEAQPIEQSTHTKLGAIGVDINADHLAVSETDRFGNLVLSLRIDLHTYGKTTDQAKALIGDAGVRIADLAKLKCKPIVIEKLDFSKKKAELEATHKPLARMLSSFACNKVISSIKAAAFRRGVEVIEVNPAYTSVIGAVNHAQRNGISVHMGAATAIARRGLGLSEKPPKREAIVPTRNGGHVTFCLPARNGKKHLWSYWGKIRTTLKAAHVAHGRSGVSKGMPAPLAPATRPLGAIRPFTVKPRDANRQHNCSAGVNFQDVPC

SEQ ID NO: 13868 - protein, 504 aa, unknown
  TnpB Polypeptide
MKPCNPKPKPLSAPVSVDPTLNTVTRTADQTPIRLANLSMSVASCKRGSRTCYLTLTDSGHKVDHITASASSCLQRWSKRALSSFKGVRSGAEHEMKRTNLFNLAPTREQHRILQELAVNCAKLWNEINYIHRQQYSDYLRLDWNPQVYKKYVPLVGSATAQQIVRKNNEAWRAFLALKRMEKNRELPISIKRVKPPGYLKRDGRYVLRILFRCDSYRIREGRVDLPRRLSIPFKGKLKWTGKQGRLEVAWDTFSKKWRVFQSVQVKPIITPLGSKTCYIDMGVRNLATIWLPEWRQPVAYHSGRVLADWWYLTNRIARHQQRLAAVNERKKSKQLARLYRIRKKRFRHAVATFARQLVRDLYARGVSTIVIGELTGIRNNSDHGRQGNAMVHNYWSHKHVADRLKWTAEEYGMKVRTISEAYTSQTCPRCRSRHSQRVLRGFRCLDCGLQAHRDAVGVVNMAARCGEYAVRPMVWPMLLHWDGCRWNRNNGMPTQEKRIRVEA

SEQ ID NO: 13869 - protein, 434 aa, unknown
  TnpB Polypeptide
VKRTQLVEKYVIDRNDPRYAAIDEAAFKSKNLYNAGNYEIRQSYIFTGKYLNYNEMDRHMQSHEAYKALPAKVSQQVLMQLHHDWDAFFKARAAYREDPSKFKARPRIPGYKPKTEGRNMLVYTIQALSRGKKGLKRGMIKPSQLAIEVKTKQKDINQVRIVPRKGFYVVEAVYEQEEKQAPVNPAYYAGIDLGMNNLVALTSNKPGFRSVLVNGRPVKSVNQFYNKRKAELQSQLRRKGTTKRMERMTSRRNRRIDHYMHTVSKRIIDLLVKEGIGTLCIGKNDAWKQEANMGKRTNQNFVSIPHARFIAMLTYKAELVGITVKVTEESYTSKASLLDLDPLPVRNNGNEKHIFSGKRIKRGLYRAKDGRKINADINGSGNIIRKVAPDAFSEAEGVEDGKAVLASLVVHPVRLVVTPSRTQKGKSRAKASNQ

SEQ ID NO: 13870 - protein, 396 aa, unknown
  TnpB Polypeptide
MLIYEYKVAGAQKQYAAIDEAIKITQFIRNKCLRKWMDERGVSANDLQCYCAVLAREYSFASSLNSQARQVAADRAWSAISRFYDHCKNHTPGKKGYPQFQHDNRSVEYKQTGWKIDPDGKHLFFTDGCGIGRLRLVGNKKQKVAAFPIKQIKRVRIVKRADGYYAQFSVQAERTVEHVTTGAQVGIDVGLKEFYTDSNGNTIANPRFLRKAENKLKRLHRQLSRTQKKSANRIKARQKLGKAYLKVQRQREDFARKTANALVTSHDLIAFEDLKIANMVRNHKLAKSISDAAWGRFLSWVQYYGVIHTVPVVTVAPHFTSQDCSGCGTKVKKSLSTRTHICWSCGLVMDRDHNAARNILVLALAYLKAVPWGTRKQAGRAPRKASGQKTTTASQK

SEQ ID NO: 13871 - protein, 414 aa, unknown
  TnpB Polypeptide
MPYHIGLKVKLYPSDIQKHLIAVNAGVSRSVYNHLVACGNEKYRLSKAVSSVPVYQDRMDYLASVTGDVRNIKNALPYLYGKDVDEQAIANAVKNYKTAWKNQKERHTGVPTFKRKSYELSYQTNAHYYKNPKPGRESNVRFEDETHVTLPKLGRIRIGGSKKRIRMLMERTCDTRIGAICISRDAVGEYWASFSIASEEPFREALPETGAFHGIDLNLIELVNDSDGNAAANMRYRVKSEQSLCKNQKKLSRMAERAKQEHRSLSTSCNYQKQRQKLASIHRKVERQRAEYLHVLSKQEVENQDFIAAEDLKVKNMLKNHRLAKAIADASWRKFLTMLQYKGILYGKTVVLVPPRNTTQTCSQCGYVMKGEERLTLSDREWTCPNCRAVHKRDTNAAQNILSRGLQLAAMTAG

SEQ ID NO: 13872 - protein, 363 aa, Archaeoglobus sp.
MEAIKSYRIPIEPSTELMGLIESYFSVKKKALEVVLSHIKFSEKSKARLDFRNNDRKKLRDDLLKDWEYSKHYVDSAIHSVISLVKGWIKLYNKGRAEKLPEITRRTVYIKNTLFTFKDGILKISIKPHKQYFEVDLSEYRWIPKDFDRLGGLILTEKELIITTKKNVEPEANNYASFDVNLTNITALINGEIERYDLRELYHIHRVYELKCQRIQKMSKYKPKTSRRLMEKYSEREKNRTKDFLHKLTTKIARKLKESGCGAVMENLNGIKYRVLNGSETQNRKLSKWNARMFQFMLEYKLKWFGLPVKYADARNTSRTCPYCSGYLVASEGRFMRCEKCNIIMDRDVVAVLNLQMRGAGFP

SEQ ID NO: 13873 - protein, 411 aa, Bosea sp.
MLRQQAYRFRIYPGDDQVDLFRRTIGCCRLVYNLCLDQKTLEQHRSAPRRLSYSEQCDGLTELKREVEWLRDVPHHPLQQAIRDLHRAFTNFFEGRARYPSFRRKGQNEAFRYPDPKQVKLEKQRIFLPKAGWVEIVQHRPVKGEIRNVTVSVIAGDWFVSIQVEQEVAEAPANQGPAVGVDLGVEQPITLSDGTIFQLPRVTPHERRRLASAQQSMARRRKGSRNRAKARRRVARLQAKFARRRRDAAHKATTIIAKSHGTIVVEDLKVRKMTASARGTAGEPGSKVRQKAGLNRSMLDIAPGMIRSMLAYKASWYGSRLIAVDPAYTSQECSSCRTVDAKSRISRSQFVCTNCGLIENADVNAARSILARGLGSTGGLPGMACGSSRAGGRNQELTPAKARSSVLQGRE

SEQ ID NO: 13874 - protein, 411 aa, Bosea sp.
MLRQQAYRFRIYPSNTQADLFRRTIGCCRLVYNLCLDQKTLEHHRSAPRRLSYAGQCDGLTELKREVEWLRVVPHHPLQQAIRDLHRAFTNFFEGRARYPSFRRKGENESFRYPDPKQIKLEEERIFLPKAGWVKLVQHRPVEGDVKNATVSMIAGDWFVSIQVEQEVAEPALNHGPAVGVDLGVEQPITLSDGTVFALPRVSLHERRRLASAQQSVARRRKGSKNRAKALRRVARLQAKFARRRRDAAHKATTIIAKNHGMVVVEALKVRNMTASARGSAEEPGSKVSQKAGLNRSLLDIAPGKIRAMLAYKAPWHGSRLIAVDPAYTSQECSSCRTVDAKSRISRSQFVCTNCGLIENADVNAARSILARGLGTTGGRPGMACGSSRAGGRKQEVAPAKARNSVLQGRE

SEQ ID NO: 13875 - protein, 407 aa, Bosea sp.
MLLTYRYKLKPTRAQYAALDRLLEAQRQLYNAALQERIEAWRKAGKSISKIDQNKSLTQIRSCDETYASMPVSLSRWSLARLDDAMAGFFARVKRGQSPGFPRFKPRSRWNSFGFDEWKGIRLFSDRLLLKPIVGGLRLNLHRQIPEGSSIKSCAFTRRGRHWCITMAVDVPAAEAHAAPDSAVGLDVGIEHLATLSDGSQVENIRPRSRREKELRRAQRALARCKRGSKRRRKVRERLAAAQLRIQQARTSHLHEVSAGLAMRYAFIAVEDLKLRNMTRSARGTADEPGTNVQQKAGLNRELLDAAPARLIQMLTYKAERAGGMVVRVDPRRTSLECSSCGTIVEKALSERRHVCSCGADLHRDHNAAINILNRALAAHGRAKPPGDVNVGHQPERRLGTAVAKAA

SEQ ID NO: 13876 - protein, 435 aa, Acinetobacter sp.
MKINKAYKFRLEPNADQEVVLNNLVGSARFVWNHMLVLSFEMLARNEHINAVNLVNKITVLKKNPEYAFLALHSNAVSLQQKVRDLASAWGKFFDTKEHARLKENKRKPKKPKFFKLNDGTEIQLRPLMPRFKKKSDGYDSIRLVQFDKYCWIKGNKLKLPNGVGVVKFRKSQDILGTIKNVTISKVSGRWYISFCTEKELTEMPIHPSKSAIGVDLGVAKLITTSDGQVFEPKNSFKANQFKLAKLQRKLRKKTKFSQNWKKLNQKINKLHHHIANIRHDYLHKITTTLSKSHAMIVVEDLKVANMSKSASGTLENKGRNVKAKSGLNKSILDQGWSMLVGMLDYKQKWRGGLLVKVDPRYTSQKCSSCGHIAKENRQTQTKFECVACDFVANADLNASSNILAVGHTVLSVEGGCSKGHPVKQKASEIRKEVA

SEQ ID NO: 13877 - protein, 403 aa, unknown
  TnpB Polypeptide
MRLTEQIQIKKTTNLSYLCHLSKNIYNVANYYVRQELFHLGNWLRYYDLWYMLKDKEVYKKLPSQTAQQILRLVDKNWKSFFNSLKKWRAQPRKYQSRPRPPKYKKKNGEFLLIFTNQQCRIKEGYLHFPEKVAISPIKTRIENQLNQVRLVPKGLYYVVEIIYEKDVKNLKLDRKRILGIDLGLANIVTMVNNAGLQPAIIKGGIAKSTNQFYNKQLAKYKSDKDKRGIAFETRKIQKLTKKRNNKISDLFHKISRKIINYCVDNNFGTIIIGYNQFWKQKINIGHINNQKFVQLPYFKLTSQIRYKSKLVGIDVILEEESYTSKCSFLDKESIQKHKNYAGKRINRGLFRSKKGIILNADVNAGYNIIKKVIPNAVMVDGIEGIGLYPYSITVSKFTNLIE

SEQ ID NO: 13878 - protein, 547 aa, unknown
  TnpB Polypeptide
MPVSTFVRAHRYRLAPELNPGKLAALEAVHAEWVRTLALAFHWHWTPFMAGGLFPYKPACSGPHSTFPATRLVTSQKDMMARAIVSQAKGWASNLKNRITRSVMSSEALAGRPLLRRQLLWVNAMRAWLLPLDKQRALLAAQPHKADALTELSPQASRWMRKLVRRYIELHRLPDPLQLPLQVNQLSSVMAPAQETRSPWACRWLTVSTLERGQRIALPVMDNPYARAHGGIEATTFSLLRQDHGWEVLAARKQETTPWTEHRTAVLAIDLGLRNLMATSEGDVYGRGFLDELRRRDDQLMALQKGLQGAGIVRLAQCRRYQAFVERMRGWLKTTVQTALARCLALHRPAKVVVEDLLFAGQPGLLSRRMNRLLRRFGQRYFLQTLKERAEEFGFELEHVNPAYSSQTCSGCGFVHRGNRDGDHFHCLSCGRRAHADVNAAQNLTRRSGQEATPRAGERRTYRMRALEQWSARLRATLAQATPGSMRHQRAVGGARAGLTRLMNEKRPASLQASESSAWSGLLEELRCALPGGTLVPSVEVSTRNSG

SEQ ID NO: 13879 - protein, 397 aa, unknown
  TnpB Polypeptide
MAAPVNAPHTTRVLRLRLKDRHADALRALAGEVNFVWNYCNELSTKVFQRERRFIGAYELHKYLSGAGKDGLQLHSQSVQAVADEFARRRKQFKKVKLRWRVSRGARRSLGWVPFKASAIQYKNGQVHLAGTPLSLWDSYGLSRYELGAGNISEDARGRWYLNVTVKSPGWPKSRNLEQVQGDAVGIDLGLKDFLATSEGELVEAQRFYRDLEPALAGAQRAHRARRVKALHAKIANRRKDFLHKLSTGLVRQHQAIFVGDVNARALARTTMAKSVLDAGWSAFRTMLQYKCDDAGVWFSEIDEKFSTQECGACGARTGPRGREGLSVRSWECSRCGTQHQRDVNSATIIRNRGLVWLEKAFSTPGEARADEAGVNEGALRAPAAGHGRPDVGIPAL

SEQ ID NO: 13880 - protein, 365 aa, Solobacterium sp.
MIINKYYKYLIKPDVRQKQIIDDTFAAVNFVHNCYLSDLEKGIRMEKRAVDIAARYKKEYPFLKQIDGSAIMNEIFHCQDAGKKHRRYRSENESMNSYCTANLPKSPVRILNGEYLCVTKLGKVKMAYSRPIPEKAVIKAACIMCCPDGKYYASILIAYEKKKETYVIDPDKSIGIDYSSPHFFVDDKGNRVDMPHYFEESEKRIHKEIKKLNRMVKGSNNYKKQKLKIAKIHAHVKNQRMDFLHKLSSDIANRYDVVCMEDLNMEQIASRFSLAKRTYDNAFGIFQNLLKYKMEEQGKKILYTDRYYPSSKTCGHCGYINNGLRIDERIWICPGCGMIHDRDVNAAKNIRKNCLERYYGRRVSG

SEQ ID NO: 13881 - protein, 387 aa, Serratia sp.
MMKRATKVRLYPTTEQEAFLNAQFGAVRFAYNKALHISRHRYQRHGVSVSVKRDLKPLLAVGKRSRRYHWLKDYDSLALQQAVINLDTAFGHFFRQRARFPTFKHKHGKQSSYHPNGKVLTDAIQLPKMAPIKAIIHRGIIGKVSSITVSRGTTGKYYAAILCDDGLAAPAKPALITSVTGCDLGLSHYLIQSNGEKTANPRPLVRASRNLRRKQKSLSRKIRGSANRAKARLLVAKCHEHVANARADFQHKLSRTLVDENQAVIVETLKAANMIKNHKLARHIADASWSGFVMKLEYKAEQAGKHLVKIDQWFASSKTCHCCGYKMAEMPLNKRIWPCPACGVEHDRDINAAINIQRKGITDLQAAGLVVSAHGGQRKSVISTVVA

SEQ ID NO: 13882 - protein, 376 aa, Serratia sp.
MKRAYKYRFYPTPQQSALLAQTFGCVRFVYNSILRWRTDAYDERKEKIGYLQANARLTALKKKPEYTWLNEVSCVPLQQSLRHQQSAFTNFFAGRAAYPAFKRKRHKQTAELTSSAFKYRDGNLYMAKSKVPLNIRWSRELPSMPSTITLSRDAAGRFFVSCLCEFEPVSLPISAKTVGIDVGLKDLFVTDSGFKSDNPRHTAKYAARLALLQRRLRKKAKGSKNRAKARLKVARLHAKIADCRRDNLHKLSRKLINENQVVCVESLKVKNMIRNPKLSKAIADAGWSELVRQLQYKGEWAGRSVVATDRYFPSSKRCSCCGFTMKKMSLDVRKWTCSECGVAHDRDINAARNIKAAGLAVLAHGEPVNPESHYAA

SEQ ID NO: 13883 - protein, 380 aa, Azospirillum sp.
MVQRSYKYRLYPSKAQSVVLTEMLGAFCDLYNAALQQRIEAYRRQHKTLRYFDQSSELKAVRAIDERLAGFSYSAAQQVLRRLDKAFTAFFRRLKTKAKAGFPRFQAKHRFDSAEFRVGDGLTIRKSKRLSVTGIPGEIKVKWHRALPAGAAVRAAVLSRSAGSWFVCFQIALPDQEKPLRDGAAVGIDVGLASLIATSDGESIATPHWTKHAAKKQRRLQRALARCKRGSRRRLKAKQRLARHSAHTANQRRDFLHQLSRSLVERYAFIALEDLNVDRLTRSRLAKAVHNAAWGQLRSFLEYKAASAGTRVEAVDPRGTSQTCPVCGVGVAKTLADRMHKCPCGCVMDRDIAAATVILQRAQGMGPGTGLRSPSQRVTA

SEQ ID NO: 13884 - protein, 358 aa, unknown
  TnpB Polypeptide
MILTFKVKHQIDFSEPLKQAKQVAKFAIANRNKLSSKYVAHIGLKSVISNQILRKYGMNRKCKTISRVKLIVPNQGIRFDKITKTIEISSLKLKFQYQFKQLFSKINQIEIDKEYFYVSVEVEEEKQYKVEGWVGVDRNTTGPCAVAACTKTNKVMFLGKQAHHIHKKYSRIRKKLQRLGKLKKLNTIKRRESNITKDINHKISKKIVKYAKDNKCGIKLEKLKGIRQTTKQAKSFKYSLNSWAYYQLQTFVEYKALLAGVPVAYIEPAYTSQRCHKCGLLGKRNDKSFKCPFCGYTSHADVNAAWNIAYSEKLLEEPRAEHCSKSASLPSGNVYIQRLAQEGDCVKGNTDIPQLDLS

SEQ ID NO: 13885 - protein, 288 aa, Acidimicrobiaceae sp.
  misc_feature (203)..(203): Xaa can be any naturally occurring amino acid
VPEPVQGLHQLPRGPLEVPDVQEAGQGGSVSFLASAVRLADSHHVRVTRIGEIKTYESMRKIHRHLERGTGRIVSSTVSLSNGKYFIAFNVEVMRVIPVTRAPDRIIGIDVGLTTLHTGATPDGEHVLRVENPRHYVDAEKKLAHAQRIASRRQGPKKGVAPSNRWKKANGRVQKIHVATRNARTNLIHGTAARLAKNYDVIXSSKTCSQCGAVKAKLPLDERLYHCGACGLVLDRDLNAAINLARMGLPGTSFGTRRGGEVSSAQQKLVAMAHPGEASTETPPEVGA

SEQ ID NO: 13886 - protein, 396 aa, unknown
  TnpB Polypeptide
MIVLEFKLAGAAGQYTAFDEAIRTTQFIRNKCVRKWRDERGVKPYDLNKYCAILAKEYDFAGKLNSQARQAAAERAGVAVLRFYKNCREKKPGKKGYPQFQKDCRSIEYKQTGWKLDEARRAITFMDGFKAGTFRLKGTRDLLGYALDQIKRVRVVKRADGYYSQFCIDAERRVSVEATGRNVGIDLGLTHFYTDSEGMTVENPRHLRRSEKALKRIQRRVSSKVKGSKNRAKARGKLGRKHLKVRRQRKDFAVKTARALIMSNDVIAYEDLRVAHMVKNRHLAKSISDAGWRAFVSWLDYLAHVYGKIVVAVPPHYTSQDCSGCGERVKKTLSERTHVCPHCKMVLDRDHNAARNILARGLRLVEETTAGHAESNAWGQSARYPSEVTQVDTAAG

SEQ ID NO: 13887 - protein, 398 aa, unknown
  TnpB Polypeptide
VSHIVHRREIKGETDATVRQGLIENPERKPTPFGKGGSESVASLAPTWNRCAPTDYRCYPNAAQRRILARTFGATRYVYNWALRMRTDASYERQERIYYKGCSACLTQLKKQPETLWLNEISSVPAQQALRHLDTAFRTFFAGRTAYPSFKRKHGQQSAEYTVSGFRFADGRLTLAKMDSPLKIRWSRPLPNGAKPSTATVSRDSAGRYFVSLRVTDDIHPLPKSDAVVGIDLGIASLVTLSTGEKVGNPRHRNSDAKRQRKAQQSLSRKQKGSKGREKARLRLARVEARIADRRRDFTDKLTTRLVRENQTICCESLRVKTMVRNHTLAKQISDAGWGNWYGNSTTKRRGTDGRSSPLIAAIRVASGVRTAATSFPRFLSTFGTGCVPSAVPGMTGM

SEQ ID NO: 13888 - protein, 531 aa, Streptomyces sp.
MVPGPSGVAVRTRLKDLTADDEKVLRLVGDHLGSLASRDLNARCAAGLEHDSEQWAQRKRVLTEESSSRWAGSITKATHDQWALARRGQLAHIQSLEAGIETITHRLSLPVGEKGTKKAPGGYGTRQVWFAKSRRLHVLEDRLQAVRADREAGCVRVVRGGKRLLNTRHHLDAAQLTEEQWRARWQAGRRFLKADGESGKRFGNETIRVTADGEVSVKLPAPLTHLANAPHGRYVLTSRVAFAHRGEQWADRITANRAVAYRIHEDVSRGRWYLTASWTIPPVKTVPLEAARAHGLIGVDTNADHLAAWRLDEHGNPVGTPLRFGYDLTGTAAHRDAQIRHALIRLLHWARRHHLAIAIEDLDFAAEKTREKHGRRKRFRKLVSDLPTSRLRTRLVSMATELGIPVIAVDPAYTSRWGAQHWQKPLTSKTRKTTRHQAAAVAIGRRALGHPIRRRTTPPPAHRSDKQGHRTVQARPGTPGREGHRPRIPGPRTRSVRAGCGAKAGDQNAQHRSGRSAEHGFWQQDSLPLSF

SEQ ID NO: 13889 - protein, 386 aa, Myxosarcina sp.
MKQLRGFKFRFYPTSAQRLELAQTFGCTRYVYNWALALRTNSYYQAGVSLSYTDTSNALTKLKKDPEKPWLKQVSAVPLQQGLRHLNTAFINFFAGRNKYPRFKKKNGRQSAHYAPNAFKWIDGKLTLAKMSQPLKIRWSRHFEGQPKSVTISKDPSNRYFVSFLVEEELEQWQATEGKIGVDLGVLDVMVTSTGFASSNPKHYQKYQARLKTLQRRLAKKKKGSSNRYKVRLKVARLHAKIADCRRDFLHKLTTQLVRENQAIYTETLAVKNMMANRKLSKAIADCGWGEALRQFQYKCKWHDRELGAIDRWFPSSKRCSSCGYILDKLTLSVRKWTCPNDSCRTTHLRDVNAAKNILAVGQTVFACGSGTGGETIDLLSLAIQG

SEQ ID NO: 13890 - protein, 419 aa, unknown
  TnpB Polypeptide
MTVATKSTRVPRAYKAELDPSSAQIETFEHHAGASRWVWNWGLARKTAVIALCQLPIERIRIPTAYDLGKEIVQLKRTTHRWLAEISKMVPQKALEDLDTAFKNLYENHCGFPKFKSKKWSKRSFRLQGNCPTTPKVIDVQKRRVRLPFFGWIRVKHGQAGYLPITPNDHVKIHSATVSERAGRWFVSLNVHEERSEQRPVEGPVVGVDLGISRLATVSDGSVIENPKPLRRMEGSLKHLQRVVSRRRKGSSNRRKAALRVQHLYLRITNVRKDALHKATTMLAKTKSVVVVEDLAARCLLKNHRLAKSVADASWSEFVRQLGYKTRWYGSKLVKADRFFPSTKTCSKCGTVKLEMSLAQRTFHCECGLVMDRDLNAAINLSRWPAVGRTHETPVRDERPQVENPCSSMKQEPRFQVAL

SEQ ID NO: 13891 - protein, 552 aa, Bifidobacterium sp.
MKTGEIACAVPDLHDYRLYDHRTGEPLDPVEAETLLWLHLDHCRQCQNRMIHDPRNRNLKRGGNAGRGNEWARKNVACTSLPSKFRNLSHQNRVNQTEAARLLLAWREREDIATAIDAIGWEKATYGNVQKRLSRDIDRELFTNVLNSGGHPSLPTVERTQFPYAYSNNNSCGMYVIDQPAGVIRYERMAVYDRFVDVEIYAPHIMRLHPNLTKVSRPTLRWNRDCVTWDVIVFEPKPRKEDVNKVSHVVGFDLNADWHGGISGARLSYNGTVSRELVAGIDTRRQQTVLEELYVQYQRCLKKLDRLMPWQRPHDPDDPQQVAAHPEWRRLYEQSLNLRDKMYRIKTLLDWRYAHDITDHAKPGELIAVEKLSPFDAAGRVEFRHGSQLEKLEHVASKTGQRVVQVNPAHTSATCPWCDTVNKVGKARQYRCAGCRRDIPRDYGSGVNIAKRGARYLGHKNVRPTPPKGHATPKRPPVRHKRPDEKTRELLTQITSGTGKGPESLWAKTTPLEWHIPSTATIENTRNRLALANQRDRAATGLRQKPQPPHSR

SEQ ID NO: 13892 - protein, 363 aa, unknown
  TnpB Polypeptide
MKKGIKFRIYPNKEQENLILQTLGCCRLIYNKGLYMRDKAYKNGEKANYTQTSAMLTHLKNENDFSFLKSVDSIALQQSLRDLDRAYQNFFKKRAKFPQFKSKHNNHQSYRTLNQGNNIHIVGNYLKLPKLGYVKIKQSMEVGHINNVTIEKTPTEKYFAVLNVDFEPKFKQNNGNSIGIDVGLKEFYTDSNGNKIDNPKYLEKSEKKLKREQRRLSRKQKGSKNRNKQRIRVAKVHEKVTNQRNDFLQKESTRLVSENQTICIEDLNVKGMVHNHRLAKSILSVSWSKFFTMLEYKATWYGNTIIRVPTFYPSSQTCSKCGQGNPLVKHLWVREWECPFCHTKHDRDYNASINILNKGLSLA

SEQ ID NO: 13893 - protein, 408 aa, unknown
  TnpB Polypeptide
MQLTQQIKIKVSYQQELILSALSEKCRLIYNFALTERKEAYEQGKKINYIKQQNDLPSIKEKFPEYSWVYSKVLQYTLRTLDADYKSFFALRKKGDSKAQLPHYKGKKFFTTMVYNQSGFKVGKGFVELSHKHPLKTKLRFVIPDKFRFEMVQQVSLYKKGDFYYLSLVYVKNPQKQTINFDFQAFDLGVMKHTAVNTSGRFVEFKNQRPDRYWEKPVAELQSRRDHCKKFSNKWHQLNTLMNDCKRKSSNQLKDFQHKLSRKIVDNTKANTIIIGDLNIKEMCNKKHKGLNKSLHNTGNIARFTRFLTYKAQLLGKRIVEISERKTSKICCLCRKEKAMPLYKRVYECDCGNNIDRDKNSSVNIMLRFLSENALWTSYWQFVSNLRHTGLTIVSHSQEATSSIKVKP

SEQ ID NO: 13894 - protein, 346 aa, unknown
  TnpB Polypeptide
MILTYKVRHDHDFSEELRKARTIAEIAVDSPVLLTTPAVKHIGLNSVIANQVLRKYGRNKQAKKVHSVKLTVPSQGVQCDRKKRTMKITSLRLEFAYGFRNDFAKVNQIEADKRYLYVSVTMNDAEPFVPEGYIGIDVNATGHAAVVAVLATGKVLKLGKKAYYIHKKYREMRRRLQRMGKYRKLKSVKNRESMIVRELNHQMSRKIVDTALEHRCGIRLEDLHGIRGTARTRSSFRYSLHSWSFCQLRQMIEYKARLLGVEVEYINPAYTSKACSMCGSIGDRHRKEFRCPACGHVDHADANAAFNIAKALSGTSQSSADRDAEDGSTDTPRGAMVMNAANARTP

SEQ ID NO: 13895 - protein, 403 aa, Rubrivivax sp.
MLSNLRLNVRYNASEPKRCYQQHSGSHPAGQVRDVADVAEQRITQRKTYKYRVFPTHAQVTKLGATLDICRELYNASLKERRDAYRLERKTVRYIEQANQLPDIKKIREDVAGVHSQVLQDVLKRVEKAFDGFFRRVKAKQKAGLPRFRSHKRYDSFTYAQSGFALTNNKLRLSKIGDVRIKLHRPIEGKIKTLTITRSATGKWYACFSVEVEPQPLPANDRAVGIDVGLSHFATLSTGEQIDNPRFFRTDEKALAKAQRQEKRKAARRIHERIKFRRNNFAHQLSHALVSMFGLIVFEDLNIKGMVRNHCLSKSIQDAAWNQLVNFTRYKAEHAGAMCRQVDPRGTSQGCSACGAVVVKDLSQRIHDCSCGLVLDRDHNAAINILALGLQCVGLRAKEAAHL

SEQ ID NO: 13896 - protein, 462 aa, unknown
  TnpB Polypeptide
MVSGIEKLQYHLVWCVKYRYKLLTPEIAQTLKYFFFNKQSAWKIEIISLSIEPDYIHMLFKIASSQIDINKLVKRIKDSNSHFIRRKFSYLQVYPSLWTASYYLGTTGEVSNKTIENYIDSQGLQEEEIVKRTFVYKMLNPNKKKEHQLNTWLRDFKTRPKGLQSGYQGKFPNQICLRNDLIKIEPSKNISCDYWLTLPGGNGWKPISVGLLGRTLPSDAKIKDSKIIKKDNTFWVHLNIEQRRVIKNNIAPSKIRAVDLGISHPITSILLENNYLKDYQFLGKELKCLLYKRQKRASKLQKYVKKLSKKLRRYTLGIKDWTHKYTREIVDKAKKENACLVVGNIHNITRKWDKKERERNSQFRKKAKPIPYGRIMSQLWYKGTLAGVQVIFQNEAYTSTRCSRCGELGCRTNEWFVCKNCGYTNQADVNGAVNIALAYRWGYNDLARLPGSSQETYDFNRR

SEQ ID NO: 13897 - protein, 399 aa, Actinomadura sp.
VSRYRLCPTPAQEAGLLEHCSHARFVWNLAVEQHAWWTPRRGPAPGYVAQARQLTEARAAFGWLAAGSQTVQQQALRDFAQAMANFFAGTHRRPTWRKAGLHEGFRIVGARGRQWDVRRLSRRTGEVRVPKVGWVRFRWSRPVPPGVRSFRVVRDRAGRWHVAFAHVPAPVPAPGNGVAVGVDRGVAVSAALSTGEISSVPGLRPGEAERLRRLLRRLGRAERGSNRRDRVKAAIARLRARQADRRKDWVEKTSTELARRFDVIAVEDLNVRGMTRSARGTLEAPGTGVRAKTGLNRGILANGWGQLVNRLEHKAPGSLVRVDPAYTSQTCNSCGHRAPDNRESQAVFRCVACGRQGNADVNAARNIRDTAVGRTVAARGGGALARPVNREPQPALLSV

SEQ ID NO: 13898 - protein, 381 aa, Lentzea sp.
VQVKLLPDAVQASALAATLSAVNDAVNWVSGVGFSHHELRASVRDLRKLCYGELKARGLGSQAAQHVIKRAVDACTMLRANIRNGNLGGPSSKRRVKACSKPIRFRPDAAHTFDDRCLSWQHDAGTVSIWTMHGRLKNLRFTGSANQLKTLREHRHGESDLICRDGLWFLIATCDIPEPDVIEPADWIGVDRGITNLASTSDGDNFSGRRLHRYRRWHARKRAELQAKRTRSATRRLKRRARKEARHSRHVNHRIASEIVAVAQRTGRGVALEELGGIRDRVTVARHQRATHSSWPFHQLGEFITYKARRARVPVLVIDARYTSQTCPRCTHVSRSNRPARDHFRCRQCGLAGPADVVAAVNIRNRARRAWVFVNMPAPSP

SEQ ID NO: 13899 - protein, 504 aa, Lentzea sp.
VKVVVQVKLLPDAVQASALAATLSAVNDAVNWVSGVGFSHHELRASVRDLRKLCYGELKARGLGSQAAQHVIKRAVDACTMLRANIRNGNLGGPSSKRRVKACSKPIRFRPDAAHTFDDRCLSWQHDAGTVSIWTMHGRLKNLRFTGSANQLKTLREHRHGESDLICRDGLWFLIATCDIPEPDVIEPADWIGVDRGITNLASTSDGDNFSGRRLHRYRRWHARKRAELQAKRTRSATRRLKRRARKEARHSRHVNHRIASEIVAVAQRTGRGVALEELGGIRDRVTVARHQRATHSSWPFHQLGEFITYKARRARVPVLVIDARYTSQTCPRCTHVSRSNRPARDHFRCRQCGLAGPADVVAAVNIRNRARRAWVFVNMPAPSPDGEGWMRPAHDSQPRTGTRPGLTDRAPRSTRQGREVDTGLQRPTESSGGAFLQRLAWRHAACPGTSPRDRSDHGRSGAGHRRRARGRDGDRGRRHAEEAVIASSLRRSARPVIYHQNRL

SEQ ID NO: 13900 - protein, 413 aa, unknown
  TnpB Polypeptide
MKGGECELIVLRTEQHQINKSHPAWFIIDDYCLRSKNLYNYANYIIRQEFIHNHNWIRYKDIFNLVKDKYDYKNLGSNLGQQTLRLLDKTWVSFFNAIKDWSKHQDKYLGKPKLPKYKNKNGRYFLGIDNIKFFNTNGYIRFSYKPFHCMNNIFRTNIPKTAKLMQCRFIPHANYYTMEIVYQIDVPETTTESDHIAAIDLGVDNFATITNNIGLQPITIKGGVIKSMNQYYNKKKANISSDLMKENSKHWSKRLQKLTDKRYNKIKDYMHKVSKYIIDYCVLYSIDTLVCGYNECWKQESVMNHKSNQTFEYIPYFMFVNQLAYKCQNNGICFITTDESYTSGTSFLDYEEPIKTNYNKSRRIHRGMFKSNTGILINADVNGSYQIMKKVFPNAFANGVEGAGLHPLSMKIA

SEQ ID NO: 13901 - protein, 408 aa, unknown
  TnpB Polypeptide
MQKVIKLQSVELTHKKQLELSDARIEAKRIINKFILPNIDSCEDNGQLQQKVYNDIRKESYLPSQVLLNLIRSSFHLKQKSAETRNIDRITLDYNIPRACKMFMLDDKKLCFAITVKPRHRIVIPIESNGSVIRFQKQIDNGWKMKQIGLTNRNEIIATIEKKKVRKNYKNILGIDTNSNNVSVTALTPQGKIMKQLYLGKNLYDRKAKILKRKAILQSHADKGSSKAQEKLRKLSRKVRNINKNAVGEISKQIHEIAEKYEARIVFERLHKFEANKSKAFNRKVTLIPFHMLTMTTAIRSVDTGVPMGYVDSYHTSKWCSGCGSVNPPHDSSNYAIYRCGNCGLVVNSDRKASLAVAVKKFAERKEYFQFSAKRVPVNALFRGEEDDAIQATENAVALSDPKEAICL

SEQ ID NO: 13902 - protein, 408 aa, Moorea sp.
MRIAYQYRLKPTKEQKAKIDNWLSMLCAQYNYLLADRFSWYEKNRCPVNACPIVCHLPKLRENPDYYSQKKTLPNLKKTHPWYKEIHSQVLQDVVKRVKLAFDRFVKGDSSGRRSGRPRFKKLHRYRTLTYPQMKEGCLKDNLINLPKIGKVKVVLHRSIPDGFKIKTASITKKCDGYYLVLSLEDKTVPVRAASASPKVKPDLNPDLIVGIDVGLKEFLTTSEGETIEVPQYYRNSQKRLKILQKRVSRRKKGGKNRLKAIKQLGRQHKKVADKRKDFHFKTANYLLSKYDVVAHEKLNVKGLAKSRLAKSVLDAGWSSFLTILTSKASNAGLLAVPVSAQNTSQNCSNCGKKVPKKLHVRWHDCPYCGCSLDRDHNAAINIRNRAAGQSVLKAQCLLRDARIGWEA

SEQ ID NO: 13903 - protein, 442 aa, unknown
  TnpB Polypeptide
MQIISSYGVELRKQNIPIRQTLEIYRSAVSYLIGIYVQVWEELAEIPDAKRRFNAAEHLVHTTKKNHACFDFDIRFPKMPSYLRRSAIQHALGTVSSYKTRLDLWEKTDGKSGKPKLVYENHAMPVFYRDVMYREGAEGKDEAYLKLYDGHDWKWSCVRLDHTDMEYLRKCWSGKKASAPILEKRHQKYFLRFSYKEEVTLTKTPVKEQIICSVDLGINTDAVCTIMRADGTVLGRRFIDHPSEKDRMYRTLGRIRRFQREHGSAQTQGRWAYTKRLNTELGKKIAGAIVRYAEENHADVIVFEYLEMQGKISGKKKQKLHLWRKRDIQKCCEHQAHRKGMRVSRICAWNTSRLAYDGSGAVTRDWENHSLCTFQTGKRYNCDLSASYNIGARYFIRELLKPLPATERSLLEAKVPPVKRRTSCVYADLRKLHSEMELLKAA

SEQ ID NO: 13904 - protein, 382 aa, unknown
  TnpB Polypeptide
LNKKHIIKINQSIGICRFLYNSYLAKNKELYEKFKNGEIDKKLSFINANDFDKYINNEIKVLEEFKWINECGSKARKKAIINAEIAYKNFFKGRSKFPKFKKKNNQDVKIYFPKNHKSDWTIERHRIKIPTLGFIELKEKGYIPINAKVVSGTVSMKAGRYYVSVLCEIADSNNYSDINIEGIGVDLGVKDLAIVSNIDNPFKNINKSNKVRKLKKKLKRLQRQVSRKYEMNKNGKKFIKTQNIIKIESKIRIIYQILTDIRINYIHNITNALVKSKPEYIAIEDLDISGMIKNSHLSKAISEQYFYEFRRQLTYKCLWNNIELRIVNRWFPSSKLCSKCGNINKNLKISDRKYICKECGIIIDRDKNASINIKNTKEYIVV

SEQ ID NO: 13905 - protein, 510 aa, Paeniglutamicibacter sp.
MITAHRHQLAANPCKEQALMALFPAFRDTLANLSSLTVRELQAGSPLPKWRILTCLPFNTELSARQVKSAQNQVHAAHVSWLALLEAVVRETITASTLTGIQRTTLYRINSRHAWWATEIILPWSQAVGGELVHVTHAWAQAHPEQCVWVPVEPADLKLARHLAKHLGSRKIRRPDLSRVRTLLLDSIIAKPERPTGATEYSWWVTVATLSRGKPVRIPLKNNSYFENLAAQPGARLAGVIQLHLETTGAGQPAGAAISLLLNTPDAPKRETGIVVGLDFGLANALFATSDGRLLGQAMLHTLKSWDQRLNEIAAEHQSRGLKLRDNPEYRALNQRIKDFVTNEIGRVLNILARDGGDERVMELVVEKLDFRGHGMSRRMNRLLTRTGRACVKARLAALTPKYGILVTEVGSAYTSQECSGCGYTAKSNRRGRHFGCRFCGKKLHCDINAARVIRERRSFPPKDHTSVSQRRNTLQRLDQRHRQRWGLRPATGADPGLAGAPGGQAALAA

SEQ ID NO: 13906 - protein, 403 aa, unknown
  TnpB Polypeptide
LKAVKSIKQQIPENHDMNNMMETFRDMVNHCIRIGLKYNCSTLKRLSLLSYHELHQYDILSSYKLNAISQACGRLSQMKRDIRKGKNVKSPFVKKSYLVNCYGFKINNSLMSIPFEPRQPINILLNNHTVKFLSDPVLKVHSFTLTAFNISICISKEIDMIECTKIVGIDRNLRNVTVGNGELVTFYKTNKLLSIKQNTVYARSGFHRNDHRKKRQYYKSLQQRLQNRTKQYLHKISKNIMDNAVETKSIIVFEDLKGIRKLYRKGNGQGNKYRGKLNGWQFYELQRQIEYKAKWVGIPVVFIDPKRTSKLCPICGDRIQEDKQNRRKLLCINCGKSMDRDVVASMNIAHKAWSRFNHARGDTCEGQSDVFESAMSEPKLSDYDDVVIRILDVSKSVTGFGSR

SEQ ID NO: 13907 - protein, 274 aa, unknown
  TnpB Polypeptide
MSEIKIPTSQRSIIEARIVPKSSCYVIEIVYEKALETTNNQEIAGIDLGVNNLMAVTTNQTGVRPLLIKGRPLKAINTFYNKQRSCLQSQLKLKHNQTQSQKLKNLAHKRNCRVENYLHTASKRVIDWCTQHQIGILVIGHNATWKQSINLGKRNNQQFVNIPHYRLMEMLTYKAQLKGIKVVITEESYTSQSSALDGEALPKYGDKKPLFHGHRIARGLYKTANGRILNADVNGSFNITRKVIPDVLDQGIKGLPFNPVVLDPLRMTGLSAFE

SEQ ID NO: 13908 - protein, 667 aa, Streptomyces sp.
MSSPQRKFRGKNKAPKWTKPDEGTVSVMVLPLAVTDPADLARLEKLFGAMWSIKRAVQRDARAKVDAYWAAKHERDRDGAKAVRQRLDLSREALERCAYKHLEDAGHLKHHATKALAMHIADEAWNGVSRHLFADSTGKRHGRPRVGRRHDFTRIPGRARSHTTENKWETFRLVGTLHGHVMPFTDGGQHTLMQPHRMPKPQMPTGKVATGKVAASGKPSMRKANWWDYTGPLAVVFTGGPDSKRGDLVLPVRIPQGPGQEERVRHFLADPRRWHKVDLVRRRKASAPGGWVYEAHLLILGSGYASPAIRQMRQQAATLERIGGVDGNVSNLSIVSFPASLDPADSTPASSEIVLTEEEKARLEKEAKKKRGRARALERSRRATNTAQYGMSKRQRERAERRAANGLKAKTVTVPGGARDARSDGVPKQAYRRDRLSANYRKMRARQAEAAASAAEYRRHRARAVARDIIATHGPHLTVEDCDIRTWYRLWGKRLSQTTPGMLISALEIECKAAGGRLVRASTWSTALSQHCLCGERVHKTLRDREHKCIACGLVGKRDLVSAALAAFVNLTDPDDPKTAALDSTRSRHAQIIFDQGLEEALGESTTPCQNTPRGAGRVAVPRQHGASAHRTAGRRDRATPDEPRLVRDHAGKPGPRPACSPQLTLW

SEQ ID NO: 13909 - protein, 197 aa, unknown
  TnpB Polypeptide
MHMDTRMQPHEAYKALPAKVSQHVLKQLADAWKAFREAKAAYEKDPSTFTGRPRLPNKHKTEGRNVLIYTMQAVSRGKRSLQRGIIKPSMLPIEVKTQQDPKQIDQVRIVPRNGHYVVEVIYSKAPVQAHVDPSFCVAIDLGVTNVAAITSNRVGFIPRLVNGWTLKAMNQWYNKRMKELNRLAVSTGHIQQNVRCP

SEQ ID NO: 13910 - protein, 363 aa, unknown
  TnpB Polypeptide
MNKYNRTCKINLKFATKYKKKMIADLLKEYRRVVNLYIKKLWVNKGKLDKDTLALIQNTSLSERYKSQALRHALQIVVSTKKSLKANHKRTNIIPTFTGPAKLDSKFIFIDEADLMKDFDLAIKLSTLQKGNRITIPAKRTKVFNKWYEHPNSKLLQGCLLFEDYIILNFEVIEEFKIEGKNIGIDIGKTKIISTSEKEFFGREFDKINNKIKRKKKGSKTKKRALIERDNYFSKVVKSVPLENVKIVVVEDLKDLKKGKKPNRSRAFRKSLRHWNYPEIISRIENKAQENRICLVKVDPRNTSRSCPICKFVAKENRNGEKFKCKSCGFVEDADYVGALNILSKYLFSQESRVPEDHKDILI

SEQ ID NO: 13911 - protein, 395 aa, unknown
  TnpB Polypeptide
VKVRRGYKTELKLNNKQRTACLQHAGAARFAYNWGLNQKKMTMDAKGKIPNAIELHRRLNALKKTDFGWMYEVSKCSPQEALRNLDRAMTNFFEKRGRFPKFKSKKNGIGGFRLTGTIKVSDAHVQLPRLGMLKLKERGYLPTDAKILSATVSERAGRWFVSILVEEDLPEYAGQKDEHDVVGVDLGIKTLATVSDGVTYDNPKPLKTRLRKLRRLNKDVSRKQKGSQNRKKAVRRLARLYLKIGNIRKDTLHKMTTTLTKTKLVIGIEDLNVSGMMKNRCLARSIFDLGLFELRRQLNYKGVWYSCKITTLDRFFPSSKTCSVCGEINEELTLADREWYCQGCGTHHDRDHNASVNLEYAAASSSEAGNACGEDGSGSELVVLNETGFCEAGME

SEQ ID NO: 13912 - protein, 191 aa, Bacillus sp.
  misc_feature (139)..(142): Xaa can be any naturally occurring amino acid
SYIGMDVGLIDFAILSNGTTYKNPKFFQSLEEKLAKAQRVLSRRTRGSSRWNKQRVKVARIHEYMANARKDYLDKISTEIIKNHDVIGIEDLQVSNMLKNHKLAKAISEVSWSQLRTMLEYKAKWYGKQVIIVSKTFAXXXXYQNKDVKNLNLRKWDCPSCRTHHDRDINASINLKNEAVRLLTARTAGLA

SEQ ID NO: 13913 - protein, 420 aa, unknown
  TnpB Polypeptide
MVFYNYYYFGEFMKVNRIEQQEIKKNNSIYKTIDQYCFYSKNVYNQANYIIRQEFINNGNKLSAYDVQKLMQPMDCYKECGSQAAQKTIQLVGKAWESYFKAIKDWKKNPSKYLGMPKLPKYLPKDGRQVYMLKNIQCSLKDGQFRISFKPFGGYTVKTHVEGKLMQCRFVPKADHYVMEIVYEIEVPETENIVTERIAAIDLGVDNLMTITTNCGVNPIIINGKPLKSINQYYNKKISEMRSALKLRNDSDWSNEMQRFTTKRNNQVNDYIQKSTKMVVDFCKNNNIDTLVCGYNSGWKQETNMGKRVNQKFVSIPYLNIVQRLEYKCENEGIKFIKTNESYTSGTSFLDGEEPIEKNYNKDRRIYRGLFRSEKGEYINADVNGSYQIMKKVFPKAFANGIVDAGSHPVVVNIPLQTAK

SEQ ID NO: 13914 - protein, 374 aa, unknown
  TnpB Polypeptide
MYNLCNYTIRQEFFETKKVKKYGDLNKELKHTEAFMELGSNAAQMVTKALCKSWKSFLVSVKDYTIHPEKYLGKPKIPAYKKKDGRFVCTLTNMQTKVKDGYLYFAFKRMKEHNNLIRTKVTGHHLSTRIVPKGGCYIIEIVYDDEKQCKNNLDRNRIASIDLGVNNFVTMVNNIGESSIIINGKGIKSYNQYWNKKVSNLRSIAKTVNGSDWTKQMQNLTNKRYFKMEYFMHCASRWIVNYCVEHNIGTLVIGKNDGWKQKSDMSKIVNQSFTQIPYESFIQKLEYKCVETGIVLVKTEETYTSGTSFLDDELPIKENYNKSRRVHRGLFKSNNGEYINADVNGAFQIMRKVFSNVKADEIVGAYSHPVIINM

SEQ ID NO: 13915 - protein, 427 aa, unknown
  TnpB Polypeptide
MPAARLPQSYGYLFDNKRVRTAYRCRAYPDYTQQQVLARTFGCVRLVWNRTLAARHALWQAERMSTCYAQTDAALTQMKRDPGLAFLAEVSSVPLQQALRHQHRAFTAFFARRARYPRFKSRRGRQTAHYTRSAFTMRGGILRLAKMASPLRFTWSWSEVNLTGLDPAMVIVTREPDGRWYVTFTLDTDAPAPLPETGHAVGVDLGVTDFAVTSDGDKIANPRHLQRRARNLARYQRRLTRKQKGSANRARAAATVARAHRKVRCARQDFLHKASTGLVRSADVIVIEDLAVKNMVRNRRLARAISDCGWGEFRRQLAYKCQRYGRELIVTDRWYPSSKTCSACGYLLAELSLSTRHWTCPACRARHNRDINAAKNILAAGLAVARDAPGDACGADVRHSGSSRVQSAVKQESRSATAGIPVLQGGE

SEQ ID NO: 13916 - protein, 402 aa, Escherichia sp.
VKRLQAFKFQLRPGGQQEREMRRFAGACRFVFNRALALQNENHEAGNKYIPYGKMASWLVEWKNATETQWLKDSPSQPLQQSLKGLERAYKNFFQKRAAFPRFKKRGQNDAFRYPQGVKLDQENSRIFLPKLGWMRYRNSRQVTGVVKNVTVSQSCGKWYISIQTESEVSTPVHPSASMIGLDAGVAKLATLSDGTVFEPVNSFQKNQKTLARLQRQLSRKVKFSNNWQKQKRKIQRLHSCIANIRRDYLHKVTTTVSKNHAMIVIEDLKVSNMSKSAAGTVSQPGRNVRAKSGLNRSILDQGWYEIRRQLAYKQLWRGGQVLAVPPAYTSQRCVCCGHTAKENRLSQSKFRCQVCGYTANADVNGARNILAAGHAVLACGEMVQSGRSLKQEPTEMIQATA

SEQ ID NO: 13917 - protein, 195 aa, unknown
  TnpB Polypeptide
VEDEGIKVSGQGWEGFPQSCFEEEEEENVESKETVAVDINTAEVVGKDDEHYARIPTRLGEVQHWKSLAESSQRKHSKRWRGNKRILRRIRSFHLKAKIMMEDFARKVGKWVVEEAERFGANVVKLESLKDLIKDVDRLPREFRDKLYLMQHRRLQSGSFGRLGSVMVEFVNPSYSSVSCPKCGRKTREVSHSLV

SEQ ID NO: 13918 - protein, 506 aa, unknown
  TnpB Polypeptide
MCERDASRLVNAARVSNTFDARPTGQRNRNFYLCNLCIVWCGNTQEYLYPRRPSRVGRGKPPQPLVVRPRETRRTHRRTLVNYNYRYRLRPSDALEEQLAWTVDTCRQVYNHFLHRLNRTDDTSAYSEQKLLPSLKKWWNDLKSIHSKVLQKVVQRLYDNLSTLRGRKENGYRVGTLNWKAPGEYRSFTYSQSGFKLKNTSGRTTLWLSKLGEIPLTFHRDLPDSTEIKTVTVKQEPTGKWYAILGVETPDDPPANPENPERCIGIDVGILKYAHDTDGTAVESLDLSDERERLERAQRDLSRKQHGSANWEEQRRVVAERHAELKNKRRDFLHKLSNYYATEYDLVAVEDLDAKGLVELPGNSRNRAGAAWGTFLRMLEYKCEREGTHFVAVNPRGTTKECASCGVSTEKPLWVREHSCPACGFEADRDANAAWNILSRGIKKRLGAGRSESTSPEIEDFWCANESQSDSLTPVETALPVDTSVSAKRVVETGSPTLKREPSGER

SEQ ID NO: 13919 - protein, 471 aa, Bacillus sp.
MKKAYFSNRIYKSGLHPKYVEAIGYTLFLWNRAKHFAFQTQVLEKRSGISKRSQSVHMTIKSRFSLNDYYANSAVQEANALLSSQTELQKLYIENKKEQIHAVKKKIKQTKSNLTVLRKIKQSFIKGKPKFNKTSKEQQMGRYFVVQFKNRTDLYYHAYQFEHTYIDPEIKHLQSKLRKLRFRFDRLQKQLDSLTNKVSSAVFGSKKLFQAQHTVEKYKEDHQLWKHDFTQARYQNMLISGRKDARSGNFVFTYNPDTQFLRFITPNGITIEISHLTFPYGQDQVNHAVQTQGDCTNKKKAGKPIGWAIEDHGAYYIFKCVIDGDENPNQNFSKSGGVIGVDCNVDHFAWANINKKGQLIKIGTFSFDLEGKTSGQITKIIESETIALVDLAVKTKKPLVVETLKLTKAKVKNPYGNKKANRIISMFAYRKMILAIQSRAKKMGVAVFEVNPAYTSQMGKMKYMKRFGISI

SEQ ID NO: 13920 - protein, 549 aa, Nocardiopsis sp.
LTGTPRTHRTAWRWSVLLDGRVGVGQQLLELRGEPVPRDRRVGQRAVVVELVVNLATGRGASGDEHGRGQCGTHGQGRCRGGTAPRARTPARGAQDSAHLFVGRGHPVLQGGEDTPSPFSWLSVGFPSRDRGAVVTLCSMARKSVKRAFRYRFYPTPVQAAELSRTFGCVRLVYNRALAERSTAWQQRQERVGYSQTSAMLTEWKRTEELSFLTEVSSVPLQQALRHLHTAFRNFFDRRAKYPRFKSKKKSRASAEYTRSGFCYRDGQLTLAKRAELLDIVWSRPLPEDARPSTVTVSRDAAGRWFVSLLCEDTITSVPAANDAVGVDMGVTSLVALSTGEKITNPRHERRDRARLAKAQRALSRKAKGSANRDRARRKVARVHARITDRRRDFLHKLTTRLVRENQVVVIEDLTVRNLVKNRALARAISDAAWRELRTMLEYKCAWYGRDLVVVDRFFPSSKMCSAPGCAYVHASLPLDTREWTCPGCGVTHDRDVNAANNLKAAGLAASACGAGVRPQRESSRTGRPATKQEGHGATHDEALTSNHR

SEQ ID NO: 13921 - protein, 419 aa, unknown
  TnpB Polypeptide
MYLTIKQQVKHLTKEEYNILRELCRTAKNLTNQTIYNIRQHYFQEKQYLRYEANCYEMKSYENYKLLNANMSQQILKNVDAMFKSFFALIKLAKQGKHDFKHIRLPNYLSKNGYSNLIIGQIRLRKDNFLTIPFSNAFKQKHKGIKKIQIKIPDILKDKKIKQIQIIPKFNARFFEVQYTYEIQEEEIKLNTNNALAIDLGINNLCTCVTNTGKSFIIDGKKLKSINQFFNKYNAKLQSIKDKQNIKRQTKQQFLISRKRKNRVDDYINKTCRYIINYCIINNIGTLVIGYNQSFQCKTNLGRKNNQIFTQLPFGKIREKLEYLCKRYNINYILQEESYTSKASFFDNDDLPIYNADNPQEYEFSGKRVKRGLYQTKEGYRFNADCNGALNILRKSKAVDLSILCYRGELDTPKRIRIY

SEQ ID NO: 13922 - protein, 483 aa, unknown
  TnpB Polypeptide
MNIAYRFRIYPNREQEVLLAKTFGCCRFLYNQMLNDKIQEYEKTKKMLKNTPAMYKKEYPFLKEVDSLALANVQLHLEKAYKNFFRDSKIGFPRFKSKHHSKNSYTTNVVNGNILVESKRIRLPKLKWIAMKKHREPAEGLRLKSVTVSMEPSGKYFASLLYEGYSCENQAADKDYSNAKILGIDYAMQGMAVFSEEIEMEEAGFFRKNEKRLAREQRKLSRCVKGSHNYVRQKKKVARCHEKIRSQRRDYLHKLSRRITDQYDIVAVEDIDMKAMSQCLHFGKSVQDNGYGMFRNMLDYKLAWKGKELVKIDRFFPSSKKCSKCGKIKKELKLSERVYRCSCGNEMDRDRNAAINIREEARDAVMGELRAHFRPEFLNRLDEIIMFKPLTKDNIAHITELMVADINRRLADRQLKIELTDAARDYVTEHGYDPQFGARPLRRFIQKNVETLVARIILEDKVQEGDTITLDLKGDRLDAEIHR

SEQ ID NO: 13923 - protein, 279 aa, Halorubrum sp.
VLHVAANYEVEPNHSCSCESDNVTPIGFDVGESKLLVGCALRDDTPVDPLFVDGGRVRDLRQKQASAEDRLKPRYASKLLDDLVWGRWQDAIEDEIEKASHRAVKYTTQFEKPVIVLEFLEGITDEDIGKYWNRRLGKWLFSRLQSRIEDKAAERGIPVEYVYPHYTSKTCYTCQHLGYRPHQGTFKCTNEACWVSEYQADLNAAANIANRLNPWGESLPVKWVGNDSLRSGGQWQAHEDTSLSEGLSSEKRALDDKVSSSSPAVRAGAEPETSDANTS

SEQ ID NO: 13924 - protein, 416 aa, Halorubrum sp.
MAIQVTRTYVGSIRNHRQVCEGLGSLGDSASKIWNVARWTADRVWDATGEIPDGGVLKSYMKNQSCWKDLNAQSSQKVIEELSDAFQSWFDLRHKDSKANPPDYRKHGDTRPKSTVTFKEDGFKHDPQSNRVRLSKGSNLKEHWSDFLLCEYQTRPDVDLSEVESVQNVRAVWNGDEWELHFVCKVSLETNDSAGDGVAGIDLGIKNLATVAFPNEYVLYPGNSLKQDKHYFTGSEYDTEGENGPSDQSMWARQKLADRETHFYHTLTNAIITECVERSVGTLAVSWPKDVRDSDWGKTGNKKLHTWAFDRIYQYLAYKGEIRGVEVLKENEWDTSKTCSRCGDDTKSNRKHRGLYVCQSCELVANADCNGAENMRQKITPSPHGEDRSNGCVAQPSTHLFDRESGTFNTREQLVS

SEQ ID NO: 13925 - protein, 227 aa, Halorubrum sp.
LYPGNSLKEDKHYFTRAEYDTEGENGPSEKSMWARRKLSDRETHYYHVLTDAIITECVKRGVGTLAVSWPEDVRESDWGKTGNKKLHSWAFDRISQYLEYKGEMRGVAVLKENEWDTSRTCSRCGDDAKSNRVERGLYVCSSEWDTSRTCSRCGDDAKSNRVERGLYVCSSCELVANADCNGAENMRQKITPSPHGEDRSTGCVAQPSTHLFDRESGRFHTREQVVS

SEQ ID NO: 13926 - protein, 433 aa, unknown
  TnpB Polypeptide
MAKTNKDSQKEPNLRVQGQRIKGLSSDDFFLLRQMCAFSNNLYNVALYSVRQHYFATGKYLRYEGNYHKCKGNENYRLLQAGVAQQSLKDVGEAMLSFFAELKLKKAGQYDEKVRMPHYQQKGGLYTLTLSTNAIAIHDGKLLLPMSHTFTKLFGSHKIYIPVPKNLLGEDICEVRIKPVCGGRWFKADFVYKIEQSPQQAEKDSALSVDIGTENLATCIATTGASFIMDGRKAKSINQRWNKRKAHLQAIGDKQAHGKRHGIGRKEAALTDRRNRRTKDILNKTAKYIVNYCLANRIGTIIVGSNKNQKKGICLGKVNNQNFVQLPFSRLRKQLESLCWKYGIRYIEQEESYTSKASFADGDSIPVHKASGKQKYAFSGRRIKRGLYRCADGRLVNADVNGAANILRKSGVAFDRESVLRGLFANPQRIRIA

SEQ ID NO: 13927 - protein, 369 aa, Salmonella sp.
MMLILKAYKFRLEPTPEQSQRLRQLCGCARFVWNLGLAETKRILGSGEKLPSAFELNRMLTVWKKMPEHIFLQDAYTDNLQQKLKDLHAAWKRCFDKKLAAKAPVWKRKNKGRDSIRFVNFEKYCRLENRRVKLPSGLGWVKFRQSQRVNGKIKNATISQLAGQWYISFQVEVETAEPNHTSTTIVGLDAGVTKLATLSDGTVYQPVNSFKASQRKLATLQRQLSRKVKFSSNWQKQKRKVQRLHSHIANIRRDYLHKVTSEISKNHAMIVIEDLKVSNMSKSAKGTAEQHGRNVKAKSGLNRSILDQGWYECAASLSTNSSGVAVRCLRFRQHTQASVARAVVIPRKKIACHKVNLCVRHADIQRTLM

SEQ ID NO: 13928 - protein, 343 aa, Crocosphaera sp.
LEKLFQQTLSDAYSQCLQSVALNLSRAYQNFFDKRASFPRFKSKHGRQSMSYPANVTFEGDYIKLNRKIGKIYCRRHRDFEGTIKTVTISKNSDGKYYASVLVDDGLDKPEASTEGKAIGIDLGLTDFAVTSDGSKFDNPRHLAKHQQNLKRKQQKLSRKQKGSNTRKKARRLVAKVHSKISRCREDFLHKLSRKIVNENQVIAVENLNVKGMVKNHKLAKAISDCGWGMFCTMLKYKAEREGKTYVEVDRFFPSSKTCHVCLNQVESLPLDIRNWTCEHCHTNHDRDINASINIRNEALRILSLGTSDTANGGSVRRLGGKISCLLDATPNEIGSPNYIACN

SEQ ID NO: 13929 - protein, 368 aa, unknown
  TnpB Polypeptide
MIQRAHTIKLKPNRTQEVLLSKTAGTARFAYNWGLAKWKELYEKGEKCDPYMLSRMWTQTRPDWALEVYNGSARKALLNLGGAFRAFFQGFRSHPTFHRKGLKDSFYVSNDKARLYGSKIRLPNIGRVRMMETLRYSDCKIMSYTVRRKADGWYVTISVEIEEDRRTESESFVGVDVGCKHLAVASDGTICDTPGKLKDLERQLRRRQRLLARKEKGSHNRAKARLRLSRTFQRIQNIKQDTVHKFTATVAKNHGTVCLETLDVKSMHTGENKYIRKGVQNSCMSEIHRQLKYKCNNYIEVDKYFPSSKTCSNCHSLKADLDLSDRVYTCRSCGLKIDRDLNAALNLRQEGFRIYTVGHTGSACREVR

SEQ ID NO: 13930 - protein, 368 aa, unknown
  TnpB Polypeptide
VIQRAHKIKLKPNKHQAIMLVKTAGTARFAYNWGLAKWNELYEKGEKCSAYSLISLWKQERPDWALEVGAACLQRPFMHLEGAFKAFFRGVRRHPTFHKKGLRDGFYVPNTHFKLRGNKIQLPKCGLIRMTERPRYEDAKVVSAAVKHQADGWYVVIQVELEEERRTDSNSFVGVDVGCTQLAVASDGTACDSPAKLKDLERQLKRRQRLLSRKAKGSNNRAKARLKVARTWQRINNIKQDTVHKFTALIAKNHGTVCIEKLDVKAMQTGDNALVRKGVQASCMSEILRQLKYKCNNFIEVDRFYPSSKTCSSCGSVNAELTLADRTYHCPSCGYTINRDLNAALNLRNEGLRIYTVGHTGSACGAAR

SEQ ID NO: 13931 - protein, 368 aa, unknown
  TnpB Polypeptide
MIQRAHTIKLKPNKAQAILLSKTAGTARYAYNWGLAKWNELYEKGEKCSAYSLISLWKQERPEWSLEVGAACLQRPFMHLEGAFKAFFQGFRSRPTFHRKGRNDSFYVPNTHFKLVGKKIRLPKVGYVRMTEVLRYSDRRILSAAVRRKADGWYVVIQVELEEDRRTESNSFVGVDVGCKHLAVASDGTICDTPGKLKDLERQLRRRQRLLSRKQRGSKNRQKARLRVSRTFQRIQNIKNDTVHKFTATVAKNHGTVCLETLDVKSMHAGENKYVRKGVQNSCMSEILRQLKYKCNNFIEVDKYFPSSKTCSSCHSLKADLDLSDRVYTCQSCGLKIDRDLNAALNLLDEGIRIYTVGHTGSASGETR

SEQ ID NO: 13932 - protein, 382 aa, unknown
  TnpB Polypeptide
MRVYKFQLKPSKHQEKQLQDTLNLCRFTYNKLLEKLNTQEKINRSEIQHHIIELKKEFPELKNIYSKTLQYECYRLFSNLRGLSKLKKNGNKVGRLRFKGYRWWKTFVMNQSGYKLIKTNRHYDKLHISKIGNINIRTHRVIEGNIKGIIIKRKVNTWEAHIITDGKYIISKGEKEIGIDMGVLNFLHTSNNEKIDNPLYMNKELDKLKSIHIKISKTKKGSKNRKKQCIKLEKVWEDIDNKKKDFFHKVTTHLVTNSKFIAVEKLNIKSMVKNVKGKYYNHRNILDSSWGMFLSMLKVKAESAGIEYVEVYPKNTSKMCCRCSKLQDMPTNIRTYNCSCGHIIDRDYNASINILAKGKGLTFVGEEWLHSLMNQEATSFTA

SEQ ID NO: 13933 - protein, 408 aa, unknown
  TnpB Polypeptide
MLKAIKIRIYPNNEQEHYIANLLGSCRFVYNKLLHYKNESYESSKKSISFAEAGKYLTSLKSDFPFLKEVHSKVLQQSAIDLDKAFNNFFKKISDKPKFKSKRDTKSSCRFPNDAFMGIKGNRISLIKVLKDIHFKCSVRDERILNENQNNVKSLTLSKTRTGKYFISVLIDTELIKSFPETDSAIGIDLGIKDFVITSDGQKFDNLKLNKKNKNKTARLQRWLSRTKKGSKGREKARVKLAKHFEKITNKKEYYLHSVVNQLLNENQIIVIENLNVKGMMKNHKLAASIQDVSWYRFKSILQYKAIWNNKEVIEINRFFPSSKQCGCCGAKNDDLKLNDRFWTCLSCGSEHDRDINAANNILKEGLKLKIGLSSPESTPMDSKPIGSGKSLKKGKEIGKECKVIEIH

SEQ ID NO: 13934 - protein, 373 aa, unknown
  TnpB Polypeptide
MILAKKVRIFPSIEQERKLWQSVGTARFIYNWTLARQEANYKNGGKFISDGDLRKELTILKKTEEFKWLSGVSNNVAKQSVKDGCEAFRRFFKGLADKPRFKSRRRSKPSFYNDNVKLKVKENSILIEKVGWVKTAEQIPMNVKYTNPRISFDGKYWFLAVGIEKEQPVVKLTNESIGIDVGVKDLAICSNGMTFKNINKTKKVKKLEKRLRRLQRRVSCKYLKNKEGSKFVKTSNIIKLEKQIKLLHRKLANIRSNHNHQATNKIVKTKPSRVVVETLNIKGMMRNKHLSKAIAQQGLYEFKRQLQYKCELNGIEFVEADKWYPSSKICSKCGHIKPKLSLSVRTYICEECGCVIDRDYNASINLSRYQLVV

SEQ ID NO: 13935 - protein, 355 aa, Giesbergeria sp.
MIFGVSTSTKTLQLRLKDKHTKVLRQMAREVNQVWNHINEVSAKAARLFHGKPKFLSGYDLQKCTAGYSKCDDVSVGSGTVQRVCVEYATRRKQFKKTRLNWRVSNPKSSKYSLGWIPFKGGHAKYKAGQIHFAGQKLSLWDSYGLSKYELCGGSFTEDSRGRWYFNVAVEVEVQASPGTAAVGIDLGLSASDEKKLHGRWYRQHELVLAKAQRANKKKRVKAIHAKIRNQRKDDMHQFSSKLVQENTAIFVGNVASAKLVKTKMAKSTLDAGWSSLKKMLEYKGHQAGIVFEVVGESYTTQACSCCGSIPASSPKGRAGLGIREWTCSDCGAVHDRDVNAARNILAAGHRRLAV

SEQ ID NO: 13936 - protein, 411 aa, unknown
  TnpB Polypeptide
MKTAYRSLVLKYNLLLLPSGGAEKIPTLLKLQEEFSRWATEWALSGGRAPPPQNNPLKYFARNFLYAGRALDWLRGLKKGLKKNVEVRKMQPPLLFDAQLRLGKERDVSRGVFIDLPLREVRVRKWGSTLALPLTEKAAEWILARVREGGRLALAAVWVGPGSRNAKLHVALIFRREVVSMQARRLLVVDFNALHNGVSYAVVEGDKIITKGVLRPNVSKIAHMQKVVSKLDSVCAKKDKVCDAAMATKSRVWRLLRVWEDEAARKLIRLALQYKAAILVDLPKGKSIMKLKEVYVSEKKIFLNFGRLWESLRGLAEWHGVPCHSARLYSTICPHCERKMSILQGRRVRCACGFEANRDEVPALWAAKLFPKLSSFSSPFPLRRPRPLLFAEVNSLKIRADSGTALPAWED

SEQ ID NO: 13937 - protein, 411 aa, unknown
  TnpB Polypeptide
MSRYRLYPTPTQEEVLLGHCAHARYVWNLAVEQRSWWQPGRPAPGFAEQCRQLSEARAASPWLAAGSVIIQQQALRDFHAAYASWFASLREWRSRSANRPPEERPEAPSPPSWRKRGRSEGFRIVAVDPGDARRLNRRWGVVLVPKLGWVRFRWSRPVPAARSFRVTRDRAGRWHVAFAAVPPAIPAPGNGEVVGVDRGVRVSAALSTGELLTVAGLRPAERRRLQLLERRLARAKPGSNRRRQVKLGINRLKAREADRRRDWTEKVSTDLARRFDLICVEDLDVRAMTRTAKGTLQRPGRGVRQKAGLNRGILASGWGRLVDRLEDKAPGRVQKVAAAYTSQTCNACGHIAWESRESQPIFRCVACGHEAHADVNAARNIAAAGQVVAARGGQGWPRPVNREPSTLGAVA

SEQ ID NO: 13938 - protein, 482 aa, Acidithrix sp.
MAKRKIKKGDDAKANTARKYLLVLSPENSGRMTSWGHTRRAIKNLALAQRQLLWDGRGIRLRAKGQSQSLTEARADFDWMADLPAQAAQAAIKDLDRAYDNWWNPDHPAGPPTFEKRSSKLRFSLPGQAVDVRHIDRKWSEVWIPKLGWQRFRHHRPFNGVVRNATFTFTPGSGWMVSFGIAAKQITAPPNGKPATGVDFGVACSAFLSDEESPRLMTATLTPGEKRRLVGLERRKARQLTWAKRHNNGRYSNRLRHTNSEIARLRAKQARRRNDFTHKLTTDVAKNHGIVGIEDLRVKNMTASAKGTVEAPGTSVAAKAGLNRGILDNAPFERRRQFGYKGPKFGTQIVSVPAPNTSRRCAKCKALDPANRPGCGREFACVACGHQDHADRNAAVNIRAAAEQIYAAQTAGPGGQQHGQAQAKSEPEGRRRFREASSPSGVEYFRLRWSRRKQSGVNNAIEAPPFRAGWCHQCGHTSQGVS

SEQ ID NO: 13939 - protein, 413 aa, unknown
  TnpB Polypeptide
MPQLAHKIKLCPNQEAERYLRRASGVARFSYNWALGAWINKYKSGEKGMNGFSLVKEFNSIKDEAFPWVREVSKWAPQKAIQDLGDAFKRFFQKKAKYPRFKKKGKSKDSFYVGGDHIRLTGKYLKLPLLKKPIKMAQSLRFKGEIKSVVLSRSVNDWFASFSIAIPDESFVYAHACENQDAVGVDLGLKTLVTLSTGEKIENPKPLKKAERKIRVLSRSVSRKKKGSSNRARACLRLALAHRKVAWIRSNVWHQITSKLVKTFRYIEIEDLNVRGMVRNHKLAKSISDASFYEFRRQLEYKSKLSGANVALAGRFYPSSKTCSDCGYVYKELALSEREWYCPVCGAVHGRDDNAAKNLEFVALRYRETLNACGENVIPLAVAAERRRSRRLTSVKQESKQNLNSLSTMLNVS

SEQ ID NO: 13940 - protein, 337 aa, unknown
  TnpB Polypeptide
MILTYKVKHGRDFSRELFLARKVASYAMASKSMSSKDVKHLGLPSAISNQVLRKYSRNKTIKGVRNVKLSVPSQGIKREGDTIRIPCVKLTLPITFPSTFEKVNQVEIGGEYAYISVTFKDPVVHEPMQVIGVDRNSTRHIVVASNISTGKVLKLGKVCHYVHQKYKHIRRGLQKARKLGLVKKIKHRESNIVRNMNHHISKRLVQEAHSTQSVLVLEDLKEIRQRARCRKKQRYTLHSWSFYQLASMIEYKAKKFGVPLAYVEPQYTSQRCSRCGHIDKNNRKGNLFCCLKCGTVEDAGANAGFNIAYLFQQRIPRFSIDSDMLKGSTDTPREATQ

SEQ ID NO: 13941 - protein, 177 aa, unknown
  TnpB Polypeptide
MKIFRLSPSAECTRLREIHGYLALRKRLQCNGSRSANQHLRKASGRERRHVKHVNNVVSKQIVQEAKANGIRVIVLEDLTHIRDRIKAGLRVRTRLHRWPFRELQEMIVHKAAREGIEVVFVDPRYTSQTCSKCKALGKRRKHRFVCSNCGNRAHADVNSACNLRDLGYQWITQGEK

SEQ ID NO: 13942 - protein, 376 aa, Thermus sp.
MSLLSVKCKLIPDASTAEKLSRTVEQFANACNYALQVARQENAWNKFALQRLVYRELRERFGLSANLAVRVIARVGKRKGHKAGGFKATSVDYDQRILSVNVDTETVSLSTVDGRARVPMRIAGYQRHLLRTAKSIQGGTLVRGRDSWYVHLWCEYDDPPAMAPNGFLGVDLGIVNIATDSDGEAYSGKHLNSVRHRYRRLRRKLQKKGTKSAKRLLKKLSGKEKRFANDLNHRISKRIVAKAQRTGRGIALEDLRGIRERVRLRKPQRATLHSWAFHDLGQKLRYKAERSGVALVWVDPANTSRQCPACGHTEKANRPTQALFRCVVCGYSGAADYVAACNIASRAAVIQPNAGVRDAMHGYRATCKPRTSVRGR

SEQ ID NO: 13943 - protein, 202 aa, Shimazuella sp.
VDRDYSLVQDTFSVNTIDGRIKCSYETKGMERFFVDNWKFGTAKVVFRHKKWFLHIPMTKAFSELQDGDVSQVVGIDLGLNFLATTYDSQGKTLFYNGKTIKHKRAKYKALRKQLQQKQTASARRRLQSIGSRENRWMMDINHCITKALVNQYGDHTLFVLEDLQGVRHATEKVKVCNRYISVSWAFYQFRRMLEYKARMNR

SEQ ID NO: 13944 - protein, 341 aa, Caldivirga sp.
VLGKRELRILVRNDRYYIKPINNGEGYLVLKDWGLRVKYAGRIKWSGKQGTLVIKLEDGRWFAYVPITVGEKPARSNPKGYVMGAYEKIRIENPKGNNKAFIDIGLNNLFAVAFNHSDTAILIKGSTIKAEYYWWKREIGTYQAIRDWLRNHGFESWRKYHAFYLHAVYKQHERLRHYYRTAIRFLAKTLWQMGIDEVFIGYPYMVSQNDGNEYNTNVWWYAKIIKWLGEVLEEYGIKLNVVNEYGTSKQCSICNMEHENGRVKRGLYVCETTGIKINADINAARNIAKKAGYEAPIPRKILSYIVTTNGAKPITPKEGATPETPKVKPAQKGREGVIKYK

SEQ ID NO: 13945 - protein, 365 aa, unknown
  TnpB Polypeptide
MQRTIKLKIANQDVKDTVEQYFKAYCFCIDKGMELHTSNKIKLHNATYYPLRELYPTIPSALLQTARDVACENLKAVKMQIKPIPKNKFARFNERTIAFRNGIVSLSTINGRQKFQISLPKFAARYDSWNCKAGTVTLRKGQLWLNMIFNKDIEMREPKTFLGTDRGIKNIAVCSDNQFYNSKRLKSIKGRYKHLKSELQLTGTRSAKRKLKMISGRERRFVRDVNHCLSKEIANKPFDCFVMEDLKNMLRDKGRRFNSKLGSWSFNELGEFVRYKAEELGKPIMKVNPRHTSQICSKCGHTERLNRKGSRFRCRECGYELNADLNASRNIANLGMSQFGRLQVNQPNVAVATPVTSHSTCWVVN

SEQ ID NO: 13946 - protein, 409 aa, unknown
  TnpB Polypeptide
MFLCKKIKIEVSQQDAEALEFMQAKCRGLYNWWVMKLRNGARWNVNQAKKTLHESKQYDPELRYVYGKLLAEVFYRLDGAMQGFFRRVQAGENPGFPRFKPRHQFFTLCYPAMYLEVQGQTIILPTGGGGNWGPKRYENIRAHLTEEPPAHFYEVAVSRDARGNYYCSFVYDDAEQHKDEAHKIGKRRKKRQPRPLRDEGIVAFDLGIKTLATGVNDQGRFYHVGGFKGYRWYNKQLDKIRSKRDTCKKKSRRYLHLSRVYKRVAEHKRRKQRDCLHKASHLIAHQLAERAVVIGDLSQRQMVMKKHEGETPKERRKRQIRNRLVYNDWGLYGFVQMLEYKCLRFGKELYIISERDTTKTCHVCKRKKDMPLWIRTYRCENCGLVMDRDENSAVNIYERFLARPGPHTL

SEQ ID NO: 13947 - protein, 389 aa, unknown
  TnpB Polypeptide
MLIYEYKLDAHKQQYAAIDNAIRIVQFIRNKCIRLWRDERGICNNDLQCYCSMLASQYDFAKCLNSQARQASADRAWFSISRFYEKCKTHTPGKKGYPTFQHDNRSVEYKTTGWKLEPDGRHLTFTDGCGIGRVRLIGSRDIETFPVKQIKRVRIVKRADGYYIQFSIQAERHIEHVPTGKSVGIDMGLNAYYTDSEGQSVANPRYLRKAEKKIKRLSRTHSKCAKKSNNRKKGQKKLAKAHLKVQRQREDFARKTANTLIASHDLIAYEQLQIRNLVKNRRLAKAMSDAAWSAFLRWVNCYGGLHGIPVIAVAPHFTSQDCSACGSSVKKSLSMRTHVCPSCGLVLDRDHNAALNILGKGYRTVGQTGTDALSRVCNASGHEAATHRL

SEQ ID NO: 13948 - protein, 558 aa, Streptomyces sp.
VGGLREVTARFVVPGPSGVAIRAGLKGLTGEDEMALRLVGDLLGSLASRDLKARCAAGLDHDGAQWAQRKRALTGQSSSRWAGSITKTTHDQWALARRGQLAYVQSLEAGVRTIARRLSLTVGAKGAQGLPGGYRSRQEWFAKSRRLHLLQDRLERERTDRASGRVRVVRGGRKLRCNRHNLQAARLTEAEWRVRWEAERWFLQADGESGKRYGNETIRVSPDGEVSIKLPAPLAGLANASKGRYVLACRVGFRHRGEQWADRIAANRAVAYRIHLDVERDRWYLTASWKIPPVRTVPLEAVRSGRLIGVDTNADHLAAWCLDTHGNPVGEPRRFDYDLSGSGSHRDAQVRHALIRLLHWAKRHEGAIAIEDLDFQADTTREKHGRRKRFRKLISGMPTSKLRARLVSMAAELGITVVAVDPAYTSRWGAQHWQKPLTSKNRKTTRHHAAAVAIGRRALGHPIRRRTAPPPQDQSDRAGHRTVQAASGTSGCEETRPRDPGPRTRSVGAGCGAKAGDQGAHNRSEHPAEHEFWYQDSPPLSHEDRYSGVRWRPDMIGA

SEQ ID NO: 13949 - protein, 252 aa, Pleurocapsa sp.
MERSKRANNPSNFYPDFEAKKGRKTITKKGINIKGRPRWNNSKAYYQTAAKKRELDRKKTAYAKSQNRKIVNEILRHGNQIKTENVSVKGWQKRYGKAIKAKSPGFVQSELKRKAESAGGSFQKFSLFKTALSQTHLTGDRIKKSLSQRVHRDQTGVVMHRDLFSAYLARYVNDEDNLLLHFAKQEWKRSESILRSAWQEFQKNCERVSASESRLSHSPSEQFDLKLGIVSQTNQLDYKLTVTPSLNPLNSI

SEQ ID NO: 13950 - protein, 318 aa, unknown
  TnpB Polypeptide
VTFRRHRAIPSSARITGATLSYSQGHWWVALRMQLRRPTPLPTDRPTVGADRGITIPVALSDATFIDHPDWLTAAEKRRMLLLERRCARQRHHRWDTCGKRTPLGVNEAKTSAAITVLRERVARRRRDWQHNLSRYLANTYSAVAMEKLNVVGMSASASGTVAEPGTNVAQKRGLNRAIHAEAWSSLQQKTAYKVDEVGGIFATVRAAGTSTECHHCGSNAPGQRESQALFTCANPRCGWTGNADYNAALNIEHRAFGRATPSALTVGLECCSDVGLTAAARPGYTPGKPTRKGDAAEARRQVSRGCGNNTQAQNAHA

SEQ ID NO: 13951 - protein, 450 aa, Proteobacteria sp.
MISYVQRAYKYRFYPTVEQQLRLEGHFGAARWVWNRALEFRTKAYHRRGESVTGVSFSRLLTRLKRTRRYSWLGDTPATVLTQKLRDQDRAFANFFAGRAKYPRFRKRRIAQSIRFQLDQRRIHRIFDANDRRAVLPRLGSLKLRWSRRPLCPDCTDEPGCAQCPKPKMITVKRDTAGRWFVCFMVEEVLCTADATPVTRCANTPNFIVAVDLGLKNFLTDSLGGTVVPYRALARRLRGLRRAQRVLSRRKPGSGRWHAQRRRVARLHIRVADSRANFLHHVSRRLVDENQVIVTETLNIRGMVRNRRLARAIVDAGWGELLRQIAYKAEWAGRTHLKVDPWFPSTKRCSACHAQLENLTLAVRHWRCAVCGAEHDRDVNAARNLAQEGLRLFKEQRPRGLGRSMRVEGETSGENPAQLGVAPAPVETRTDPCGANAYTELRRNRIADAA

SEQ ID NO: 13952 - protein, 362 aa, Synechococcus sp.
LGDGKYPNFKRKRNRGSAKYTRSGFRLKDGQVFLAKCSGPLPIRWSRPLPEGVQPSSVTVNLNPSGRRYVSILVEDPTINPLPATIKQVGIDLGLNSLMVTDSGREVRNPRHFNRLRKKLEQFQKLLAKKSKGSRNRQKARVKVARVFETISNCRKDLLHKLSTQLIRESQTVVVEDLCIKGMLRSRRYSRSISDASWGEFVRQRSRKFSEAILGIPALHGGEEVNPIPRPSRSRLRWSTSVGRDTPLPATRWNRYTGARSGLRLCLGPWLCEGDTAVVEDRLRAFPLGDAFSLGLPHGASGDLPPHGAKRGFPLGHPPAAPVRVAQQVHRPGRGADLPLSLRHCPQALLCWGLAWVPPMGL

SEQ ID NO: 13953 - protein, 441 aa, Microcoleus sp.
MRSRKRAGDGRMDEETNKFLVLTTDSTCVIMKTIRDKHAMYQSVKARIYPTDAQTEKLSQFFGCARWWWNRALNETTTTYAATGKGLSREGLNALLPNLKKEFVWLGECHSQVLQSVTLNLTKAFINFFEKRAKYPNFKSKHGKQSIQYPQGTKFVDNLIYLPKLGWVKINLRRPLEGEVKTVTISNNPSGQYFAAILTEKDGEYPAPSADGNAIGVDLGITDFAITSTGSKYPNPRHIKKHESNLKRKQRKLSRKVKGSNSRNKARKLVARVHQRISNSRQDFLHKLSHKLVNENQVIVVEDLAVKNMVKNHCLAKAISDCGWSSFVGMLDYKCERSGKILVKVERFFPSSKTCSNCYRRVSSLPLDVRQWTCSNCGTNHDRDVNAAQNLKAEGLRILSLGTSETADGGKVRPNRGRKTSVRHSPSKSEAPTIRASVGGG

SEQ ID NO: 13954 - protein, 457 aa, Microcoleus sp.
MQRWNYKLKPNKAQAALMSEWLVTLRKHRNYCLREREIGWNTNNLDVETPVSYAFGAYCNIESRVEYGSCCPLTCPVVKHGVMSATLTKTNKKLGLCWDSAGGIQSKRTTELRKENQYYERIDSCVLQRNLAKLDAAFVGFWSHKRGFPAYYKASNFKTFEYKPGRCKFQENKVYLPALGWMKYFNSRDFPVGTDIRTVTVMQRGTDWYISVLVDTKTELPKPIERLSVVGIDVGINKLVSLSDGSFIKNIEVTTNFRIARRLTIRDRAASRKQKGSTNRKKAHIKLSSIRHKLAQRRDGYNWQAAIKIVGTADAVAREDLKIKNMVKRAKPKHDGKGGYKRNGASAKTGLNKRILDCGWGDIFQKVAWLASKSGKPVFAVNPRHTSQECPKCGHTDKGNREGEKFVCRACGYAEHADTGASRKIAKKSGKSFPRNQKRLPADSGKVMPWKISSPLL

SEQ ID NO: 13955 - protein, 439 aa, unknown
  TnpB Polypeptide
MLVIKTIRIPVHYSITTHKISILNSLTARTTYGVWTWSELFREHKLKGSYADRRLFHAHVKEQAKLSGAITQCCFDTAAWMWRSYREAHKAWRMEAAIARREGDSKWLRKLLRREPQPPFMNGMQGKVPIWFDSRIGSIEKAKHLKLCPYVARISTLRRGVKLTIPLNPAKHHLDALEQDTVKSFQLVKRYEKYYVHVKVEYEVPTQPVYAVRGIDLGVKRSMASVMSRPNQHLRSSDFSILQDGLKRKRLNRLEKRTAELQQARKWEPLKRIRHKRLHVSEYYDRLAAKQVATTSQNALVVVGYPKGIKYENFKGNGKARLRRTLAHWTYGREIRYIQEECTKVGVPAEAPDEHWSSRTCHRCGSRHTERITQSIFHCWNCELIYNADYNAAINIGSPFLSTATTRRATDDLAYTGDEQAREIVACKPRSPHPFMGGS

SEQ ID NO: 13956 - protein, 460 aa, Uncultured sp.
MELAQHSSKSRRVSEVTRTVVVRSAPLPRRAFKVFVELEGMYRNIVKQLVLYAVNNGITKFTKLKAEKYREVRSLYPQLPSHYAYTACQDAAERAHSFLRMRKMGKARKPYPEVRNVSIWLDDHLWRAEGLTSISMATHRGRVDVSIELTKHFLRYANRGWRLASEAKFKLDRGERRLVLYLTFRKEMSEYRPKDYITVDVNENAEAVLIDGLVYLLETGLSKVTLGYHYRRKSVQERYDKVYGPGSRPARKVFKRLSNNERVLKKEIKWKLAALIVREAVKRQAAIVLERLGKETAKRMIEHIKNPQLRYRISQAAFNGVQRAIEEKAKEYGVPVIYVNPRNTSKVCPIHGTEIIYDGRNRHGVCSKGGETWHRDVVACYNLLLRALGGDGGSAPSRVRALVAVDGGPVPLGPTAAHEPTPIARGAWARWKSLGATSGGGKYEEKRLGTNGNPLSSHKV

SEQ ID NO: 13957 - protein, 419 aa, unknown
  TnpB Polypeptide
MQLTQQIKIESTEEQQKVLWDLSEKCRLIYNLALKERKDNWKTNRDKPKEQRNYITYIDQQNQLPKIKEKYPEYKWVYSKVLQLTLKKLDANFKSFFVLKKNGNKSANPPKFRGKKYFTTMCYNQSGFKVEDGFVELSHRHPSDIDLKFEIPEKFTFEKLYQVSIYQKDNDFFVSIVYEKTRKEYIDNGKYQAFDLGATKHTAVNSEGKFIEFTNKRLDKYWESKIQEVQSKRDHCKKNSKKWKWYDKKLNKMKRKSANQLKDFQHKLSRKIVDNTKANTIIVGKLSVKQLTQINKYEKGLHRSIHNTGNIFRFVRFLTYKAELVGKRIIEINERGTTKECCVCGKKQDMPLHKRIYECDCGNGIDRDKNSAVNILKRFLSQNALWTGDLEKVFCEQSKVKQKFPKLGSENSQEAPCES

SEQ ID NO: 13958 - protein, 371 aa, unknown
  TnpB Polypeptide
MIICRAYKTELRPNNAQRSMFLKCAGAARFVYNWALADRKAVYEAGGKPSMYEQRRRFNALKAEQYPWLSEIPSKAPEEAFAHVEAAFQNFFRRLRNGEKPGYPRFKSRKRGVGSFTLRGHIHIEADRIKLPRIGWVRLKERGYLPQDGACKLLSVCISERAGRWYASAQVEEEVADPIPGDGPVVGVDLGIKTLAVCSDGTAFENPRALANAERKLKRLQRELSRRRKGSKNRAKTKAKLARCHARIANIRSHALHQVSYHLTAKNKPQAVVIEDLNVKGMLNNRSLSKAISDVGMGELRRQIEYKGTWYGVEVLTADRWYASSKTCSACGAVNRALTLSDRTYVCAACGAVIDRDLNAALNLASLARAA

SEQ ID NO: 13959 - protein, 437 aa, Gemmatimonadaceae sp.
MLVREAKLKPFSSAAQFGALDEAIRTAQCVRNRCLKHWMENRGTSKNDLQRLCAVLAQDAEQPWMKKLNAHARQASAEKAWQSVANFYRRCKSGEKEKGFPKFKKHSRSVEYKVSGYKLSDDAQQIKFTDGFEAGSFDLWMDSDARRLIASSKLNRVRVVRRADGYYAQFCLDIERIEAGEYTGSVAGIDLGLKYFIKDSKGSEVECPKYYRKMQKRLRMAQRRLCKKFRRTKKGEKKQRQSSNYHKQRVVVGRIHLKIQRQRKDFALKTARCVVKSNDLVAYEDLNVAGLVRNSHLSKSISDAGWSTFRNWLEYYGKLWSKVVVAVNPAYTTQDCSGCGYRARKSLSTRTHSCSRCGLEMCRDENAALNILKKGMEKAGMEYQNSSEGHSQTGSRVVGTTTPTERTTGKMNTSGLLEQSNNLSVVAEPVRECSDAS

SEQ ID NO: 13960 - protein, 384 aa, Psychrobacter sp.
MPTQILKAHKVRLYPNEDQQIFFAKSFGCSRFIWNKMLGDKIDHYKATKTTLNNTPAQYKKEFEWLKEVDSLALANVQQQLRGAYNKFFKQSSGFPNFKKKGIRDSYTTNNQKGTVAITDSTVKLPKIGHINAKFPDKINGLIKSATINRTPSGRYYVSLLVETIVNALPKTQSNIGIDLGLTDFIVLSDGTKVANPKFLSKLQDKLARAQKILAKRRAIAKADQRKLSESRNYQKQKLKVAKVYEKITNTRKDFLHKLSFNIIKNHDVIAIEDLNVKGMVKNRKLAKAISDSSWSSFTTMLAYKAEWYGKTLVKIDRWYPSSKTCSNCGHLLTKAELPLSVRSWNCPSCLQENDRDLNASINILNQGLLLAKQSKTVGATGLA

SEQ ID NO: 13961 - protein, 397 aa, Lactobacillus sp.
MRSEKTKLIWVVMMLMIRTQKVRLYPNRYMKKVLDSLCDYRRYCWNEGLATWNDMYDLYTIDPSSPHPSAYIVRNELVANKADWQYALSARALQLAVADLGQAWQNFFDKSQPDWGKPTFKSKKAARQGFKTDRAKIVTGKLRLDKPHGVKDWYDIRISKHADLSGTLKVVSIYLENGKYWASLPFEVELEPKLRTGHNSAVDVNVGHLNYTAGVINTLPKRLRKLYQRIKFYQKRLAHKRVVNGNKATKGSRYVAMRAKLQRDYRRVANIQHDIMQKFTTQLVNDYDKIVIEDLSVKAMQMSHVASKGLQRSMFGYFRQILTYKCDWYGKKMILADSQYPSTQRCSKCGHTKSGNDKITLKGNAIHQTKHSEYICYSCGAILDRDKNAVANLLALI

SEQ ID NO: 13962 - protein, 407 aa, Pseudomonas sp.
MQRLQAFKYELMPTGEQQRQMRRFAGSCRFVFNKALALQKERYEQSEKKLGYAGLCKRLTEWRHDPETAWLKDAPTHPLQQVLKDLERAYSNFFAKRADFPRFKKKAQSDSFRYPDPKQVKLDQAKSRIFLPKLGWLRYRNSRDVLGELRNVTVSLSSGKWFVSIQTAREIEQPVPQATSSVGIDMGIARFATLSDGTFYAPLNSFKRHEIALRKAQQSMSRKTKFSNNWKKAKTRVQKVHSRIGNARRDYLHKTTTTISQNHAMVCIEDLQVRNMSKSAAGTTEQSGRNVRAKSGLNRAILDQGWFEFRRQLNYKLAWNGGWLIAVPPRNTSRTCPSCGHVSADNRRTQAQFCCVECGFEENADVVGAINILRAGHARFACEVSGAVMPPAAGTHRSDSGVAQCHA

SEQ ID NO: 13963 - protein, 246 aa, Gloeocapsopsis sp.
VDGLAKSWIELSRHCALLAKEFPFANRLNSMARQAAAERAWSCISRFYDNCRQKIAGKKGYPTFQKDCRSVEYKTSGWKLAPNRKSITFTDQNGIGRLKMKGTRDLNFYQPEQIKRVRLIKRADGYYVQFCVSVDRVEIIEPTHQTIGLDVGLESFYTDSLGSQVENPRFYRLGEQKLKRSQRLVARKVKGSSNRRKARVRLGRVHLKISRQRKDHAVKLARCVITSNDVVVYEDLRIKNMVKTIA

SEQ ID NO: 13964 - protein, 339 aa, unknown
  TnpB Polypeptide
MILTCKIKHHRDFSDELLKAKRVAEYVVAHQPQSAKFSSSDVKQFGLKSVFSNQIIRKYGRDKKIKRVKHVILSHPNQGIKYNEQEQTIYIPPLKLEIKHNIPVVFEKINQIEIDNEYLYVAVTVLEKLEYKTDKWIGVDRNTTGHVVVTGEPNSGKIMKLGKHAHHIHNKYRNIRKQFQKQGKYKKVKQMKNRESRIVRDLNHKISRKLVDTAKENDCGIKLEELKDIRNNKKQAKSFRYSLNSWSFYQLQTMIEYKAKLLGVPIAYIDPAYTSQTCSRCGHIGNRNSKSFECPTCGHVEHADVNAAFNIALSQNIVRFSTESDVLKGNTDVPQVAMA

SEQ ID NO: 13965 - protein, 420 aa, Halobacteriales sp.
MCVGRLLGSVSKTVTKTLQATLATPTTGKEKRLQRLLDTYRDALYDAFDSGANTMSAVNDIVTPYDLPYQAKDALKSYVPKLRDTYNAEELDDEHPARLVNRAATFDHSVERDHGFVWQVPQPGRGTNFWIPLQINPEQESLWFDLLDGDVTAGELRLQRHRTSWELHVTVEYSVEEPTESDDPTYIGFDVGESALITGCALKRDVPRKPTLVSGSRARHLRKEMYTTLKRLQERDAAQWRIDERFDHYQNALTDIVEKASREAVEYARQFEDAVIVLEDLSYIREHLDYGKWMNRRLHNWAFARLQGRIEDKATEAGIRVEYVNAAYTSQTCHACGRLGRRDKQAEFVCPHDDCHVSEFQADINAAVNIARRANPWGESVRWEPGRDDSPRDGSACDSATVHRETSEKSSQMKLAAYSD

SEQ ID NO: 13966 - protein, 495 aa, unknown
  TnpB Polypeptide
MQDTKVKTDINLIQFHKITSRHVLALEADISECDRRELLHMSNIIRVAGNELVAVMKKQYEQLLRTKRYRRLRDMYAKAKKTEDKKKISAITAEMTEMQKSYHVTWEFYRKSMIEINQKYNINSIFALSKAEDVWQAVEKCLFSDGKAIHFKKYGDYPEIRAKQANRGIVISADNGGIRLKIGKTKLRPIINKPKHTKTRKGNTIQVQEPHDIFAESEAEAVLNYLSNPDVVDKTALDLYNKKSIVMDTFRPCFASISFKEIRGKMRVYIHITIEGISKPKYNKDGTRRHQYGKGFIGCDIGPQSIAYTSKEEVGLKNLAERGASIKAREQKEALILRKMGRSKRAMNPENYDDDGTVRKGKKAWKKSNRYKKLHSRYKNICRIAAENRHLAINEEVNHMRALGNVFITEPKNAKKLQKRSKKTERQNKPSVVQKSDGTEQLIYKYKRKKRHGKSIKNRCPGYFQAQAKAKFERTGGVYIEVPVTYRAEPVRPYL

SEQ ID NO: 13967 - protein, 340 aa, Brasilonema sp.
MIQAMYAVKVELKVNNKEQTLLRKHAGFARFVYNYGLALMQGLERDGIAGGYGKKIKAIKKVLTNYTKKQQEFRWMSKLSSKVYQSSLQALESAYNRWGQGISDRPRFKRRKDGESFTVYDGNGKVLLRSGKQIKIPTLGIFRLKEALPCSYCTQTFTISYCAGKWFVSFAVDAEKIPPTYHPEEKVGIDLGVKCFATLSDGTSVESPKPMKKAKIKLAKLQWRNRKKQLGNRRLGVKQSNKAKKYFDSLARQHYAIASQRRDFLHKLTTDISRKYYRIRIEDLNVSGMFANRKLSAAISDLGFYEFRRQLTYKSQVYGTKVELVDTAYCRFMRYSNSSL

SEQ ID NO: 13968 - protein, 411 aa, unknown
  TnpB Polypeptide
MNFTLRYRAYPDKETASEAWRHIEIHRQIRNHAIRDYYAHQPGDRPTAYDQHRKLTEWKQQWPVFSEVSAHAAQQTVSEIHKNIKTQQKRRENGYKIGWLKWQGSGERRSVAYQSEGFDVDHNTGQDGYATLRLSKIGYIQIRAHRELPSADQIKRVVLKKEPTGEWFVCLVTERPDDDLPEKPSPESFDTSDCVGVDLGILSYIHTSDDTSVDMLDLSDEYDRYGREQRKLARKEHRSNNWEKQRQKVAKAKRQIKRKVLDYQHKLTTWLVREYDLVAVEDLDVKPMLETSQNAKNKQDAAWSRFLDLLEHKADLHGTHVVRVEPAGTTKECSSCGVATNKPIWVREHSCPACGHTEDRDLNAAKNILNLGLRKIGAGRSESTPVQTALPTSTPLRVDAKRVVEAGSPEA

SEQ ID NO: 13969 - protein, 461 aa, unknown
  TnpB Polypeptide
MSDNTYPSNTTSRDYKTQFQKKAENAARRASLMDIKVFQLKIQSNHLNQTQKQFLNNIFLEAKWYYNSCIAFGKIEGNKPYKNDCKAKTVTHYDKDKNPIISEYTCLGAASRQDINKQIGIACKSIKSNLKAGNIKHTKGLSFVSEVNSVSFRQFGNSWKFNGTKIKLAGLKKPLKVFGLEQLNIEGIEFANAYLVQRPTGWYVHVTCYVPKQEHKHNYQTVAADFGCETSFTTYIEETNQSRKLNYCFEQSENEKRTQRKLSRRMSKKFSNRTNKGLRLIKKLRKQKQRRSDRKKDAANKLVFWFKQFETVVIQDEMLSNWQRSGHGKKIEQGILGCVKARLKTLSNVFVLDRSLPTSKYCFDCFHKNENLKVWDREFICPNCGCISDRDVHAAQNMIAFYKLIMMVPTEYRDPKRIKLLLIDIEKRVENNSSESIEESVFNCIQELSEKHEATDALASW

SEQ ID NO: 13970 - protein, 426 aa, Streptomyces sp.
MNEVGLDKRQFGHRARLALSPVDVSRADGQAHAARALWNLLHAWWQMMPKAERTLANADAAIRQARKDIDFLAALPAQAAQAVLKTYVQAWKNCWDGRADAPNYKARIRSVMSVDIPQGRDLNISRVHRRWGMVNLPKIGRIRFRWTKDLPVGKRADNDNRITGARLVKDDLGWHIAFRVQTLVSTPEPHPGPAVGVDMGVTLPVALSNGKKFEHGKWLASKEQAKLLRLEQRSAALRQHRKRGEKNSKRLSCVYDQIARLRAKAKRRSHDWQHKTTTTIAATYGTVVVEALQITNMVRSTKGTVDEPGKNVAQKSGLNRSIHAEAWGRMMMMLGYKLTQRGGTFAKVPAPGTSQRCSACGFTTPGSRESQAVFVCKNSDCGWSGNADYNAARNILHLYRMGLALIPAAGRAVVRRTRRVKPAAAR

SEQ ID NO: 13971 - protein, 404 aa, Leptolyngbya sp.
MLIYEFKVKAKLAQYAAIDEAIRTAQFIQNKCLRFWMDGKKVSKYDLNKYCAVLAKEFGFADELNSMARQASAERAWSVISRFFDNCKKQIPGKKGYPKFKKNGRSVEYKTSGWKLSEMRNRITFTDGKNIGTVKLIGSRDLRCYQPSQIKRVRLVRRADGYYAQFGIQVDRTEQLEPTGNAIGLDMGLESFYTDSQGHSEPNPRFYRKGEKRLKKLQRRVSRKQKGSKNRGKARQRLAKHTLKVSRQRKDHAVKLARCVTHSNDVIVYEDLRIKNMVKNHCLAKSISDAGWYQFRMWLEYLGKVHGKITIAVPPHYTSQQCLQCGTVVKKSLSTRTHRCQCGCKLHRDHNAALNILKSGLSTVGHIGTGILEMQNAWGELTSTGIGAILSQQVDSTNQESNVL

SEQ ID NO: 13972 - protein, 367 aa, Okeania sp.
MKSIRTKLKLNNKQKTLMAQHAGYSRWVYNWGLSLWNAAYRDSYQPNARKLREVFTNHTKPLYPWMKSLSSKVYQYALINLGEAFKRFFSFGMLRKQGLGKYPRFKKKGKHDSFTIDNCGKPIELNGWSHKLPFIGMVKTYEPIEATTQKITISRQADDWYLSLAFEFTPTSTEKITDVVGVDLGVKTLATLSTGEVFNSVKPYRKAQNKLAKLQRQVSRKVKHSRNWYKAVIKLAKQHRRVANIRKDALHKLTTYLAKNHGSVVIEDLNVSGMLANHKLAKSIADQGFYEFRRQLEYKCQWYGSELVVVDKFFPSSKTCSNCGHVQDMPLSLRTYDCPDCGLSIDRDLNASINLRNAVGSTVNACG

SEQ ID NO: 13973 - protein, 142 aa, Erysipelotrichaceae sp.
MRQTPSSRRRLKAIGQRENRWMQDVNHQVSKALVESNPKHTLFVLEDLSGVRNATERVRTKDRYVSVSWSFYDLEQKLIYKAKQNQSTVIKVDPRYTSQCCPVCGHIEKGNRNKKIHLFTCKNCGYKYYLEDSQVPDTVTAE

SEQ ID NO: 13974 - protein, 399 aa, Halomonas sp.
MTGYVCDGNDAVKVLEGLIHPTRKRPSVRYAYFSRRYYKFPSYLRRVAIMDAVGQVRSFVTRFDAWRRGERKHPHAKPPRLTASTRTFPSLYGGQCAKVNAGATHAFIKVRQRNDWLWVGFRLKGQCRFRGKGQAKSPLLTFNGRQWKLSLPEQFDPPKPAKGAPDRVLAVDVGINTAATWAVVDAQGTVHARGFLSRTDKDRECRLMNRIRQAAKKHTRHGSRLPLGFCGRDHDRLTRLADNEAHQISRRLVNLALERDCQAVVVENLKGWRPKGGRKRTPMKARFHRWFHRQLVTRLDSKAVEAGLRFVAVYTRGTSSQAFDGSGPVKRDKNNYSQCTFSSGKRYHADLNAAYNIAARGHVVFQGGQRKPTARMRSQMPTHAPRTPVSLSSLWQQSA

SEQ ID NO: 13975 - protein, 395 aa, Halomonas sp.
MKQMLGLKYRLNPTPQQAARLRVLAGHSRFVWNQALAECLAARERGERVPRYGTMAGWITAWKRQDATAFLTEAYTDNLQQKLRDLDTAWQRHFTPGLAADAPRFKKKGKSRDAIRFVNFPKYCRLDHRRVKLPAGLGWVRFRQSRPVVGKITSCTVGLDGGHWHISFQVEIEVAESPRHPATSAVGLDMGVVHFAVDSNGTAYAGRNSFRQIEKRIATAQRQLKHKVRFSQNWKKQKARITRLHQTAANARRDTLHKLSTAISQNHAMVAVEDLRVRNMSASAKGTLATPGNRVKQKAGLNKAILDQGWFEFRRQLGYKQTWRGGLLIAVPARHTSQTCPECGHVAAGNRPSRATFRCQACDHTAHADVVGARNVLARAHEQLSGQGLPVAPVK

SEQ ID NO: 13976 - protein, 316 aa, Halomonas sp.
MAIIRSDTLTLQVASAEQQAALADTLALYRRLVRDLMTVAYTHWPAVGVCDGNEAVKVLEGLIHPTRKRPSVRYAYFSRRYYKFPSYLRRVAIMDAVGQVRSFVTRFDAWRRGERKHPHAKPPRLTASTRTFPSLYGGQCAKVNADATHAFIKVRQRNDWLWMGFRLKGQCRFRGKGQAKSPLLTFNGRQWKLSLPEQFDPPKPAKGAPDRVLAVDVGINTAATWAVVDAQGTVHARGFLSRTDKDREHRLMQRIRRQARRQTRHGSRLPLGFCGNRSFQGVPISACLIRRVVAGSGPPRPSTAGDLPTARGRSCG

SEQ ID NO: 13977 - protein, 522 aa, Salinibacter sp.
MAITTKRKHIENTEVVRGHARAAGEVWTKTAIAWNELNERFGFSLSKKQAEALFAAQSLTENVQEACKEIPVIRWLACRVAEGQWEKGWDLSVPLRPVMERLEFESNPFVGDVMLQAGSQQRQQPIRRFYKHKKAFFKEHLPRWKENGCDPDEKPEPPYRKKRHARTDWVNGRWEYDGDTLRLKTGGGLDEIETDWPYPNPNSVQLVWDDAARKPMLCAQFDSDKQDLPDGFIRERSPKGTGTVGVDLGETYFAAAYDGEDTFILNGGKLRELRSLQRGEMERFNYQIEHKCEKGSNRWWKFVEAKNKRRSSIKNRIEDYLHKMSTRLVEECFARGADTIVFGDLTGIREDIDYGAKMNRRLHQWAFRQFIDLVKYKADRYGMTAYEIKEAYTSSTCPSCGEEVGTNNRRFRCSNCGYEAHRDQMGAVAIRSLFLDKEDEEDLERLSRSRVFEALRAWASGSEATASGPKGSVSEDKTQPSLSESDGSRGTGGAPTSTRATPQLEPPKILGYAPHMDCVFDP

SEQ ID NO: 13978 - protein, 173 aa, Cyanobacteria sp.
IGLSSFYTDSEGNKVDNPRHLRKSEKALKRLQRRVSKKFRRGQPQSNNYKKAKERLGRKHLKVTRQRRDFAVKLARCVVMSSDIVAYEDWKVKNLVKNRALAKSISDAAWSQFTEYLQGGVFGRIVVAVPPEYTSQHCSGCGTRVRKSLSTRTHECPKCKTALDRDQKPRLTF

SEQ ID NO: 13979 - protein, 244 aa, Anaerosalibacter sp.
LYEHRRIPYGKGVKYINPRVSFDGVNWWIAVSIEYPDNIEIPTNEGIGIDVGIEKLAVVSDGNIYKNINKTKEIEKLEKRKKRLQRKVSRKYEKGREGDRYKKTKNIIRLENQLKKLNQRLTNIRHNYSHQITTEIIKRKPGFIVVEDLNVLGMMKNKHLSKAIQYQGFYEFYRQLQYKSEWNNIKFIVADRFFPSSKTCSQCGSYKKNLKLSDRKYICEDCGSILDRDLNASLNLKNYGQEIA

SEQ ID NO: 13980 - protein, 481 aa, unknown
  TnpB Polypeptide
MATAIETRIFRLRHDPQTSERIGYLVSQQRLAYNYAVSVLNRTPAIALRKSPTDPNALLGQMTRWRRSEPRADAPYVIHQTGAQQAYAANGLMRDEREARLERIESGSTLSADHKQHRRTLARRSRKHGTTTLTSLIPPARLDNNAFTIVGARGVVIRTKDPVPADLDIRAFHLVEVRKDKRGVNGALGKRRYALHLQVAVEYPDLPEHADIDSPEDILGIDDGVKKHLAFSNGQDIHYDTSRTYSNTRGMRKKAQGKPRKSKRKAKLLKQANNDSRKSCANRKRVVTGELKRIYAESKPKGIAIEDKSHKDLSRAARGTKGNHGSNIRQKSGLNRSLRDSGLSELLRIAESEAAKLGIRTYEVWASGSSQTCSTCGHRHRDNRKSQAAFRCLSCGYQCNADTNAARIHRNRAYHLACAIADRLNDSGAPTGWRVKSPLSERDTSTKSVYKPKGGSKRHNAVGRGAQASGSATQGQKASEP

SEQ ID NO: 13981 - protein, 382 aa, Escherichia sp.
MRRFAGACRFVFNRALALQNENHEAGNKYIPYGKMASWLVEWKNATETQWLKDSPSQPLQQSLKDLERAYKNFFRKRAAFPRFKKRGQNDAFRYPQGVKLDQENSRIFLAKLGWMRYRNSRQVTGVVKNVTVSQSCGKWYISIQTESEVSTPVHPSASMVGLDAGVAKLATLSDGTVFEPVNSFQKNQKTLARLQRQLSRKVKFSNNWQKQKRKIQRLHSRIANIRRDYLHKVTTTVSKNHAMIVIEDLKVSNMSKSAAGTVSQPGRNVRAKSGLNRSILDQGWYEMRRQLEYKQLWRGGQVLAVPPAYTSQRCACCGHTAKENRLSQSQFRCQVCGYTANADVNGARNILAAGHAVLACGEMVQSGRSLKQEPTEMIQATA

SEQ ID NO: 13982 - protein, 289 aa, unknown
  TnpB Polypeptide
VKEGYMEIIGGVKLKIIGWDRRYDNYENGEARLVYRDNKMILWISKRIPKPQPYQPKDAIAVDINERKIVYGDAKINKEIDTGIDRAHRWKLLAESLQKRYSSPRYPAWRRRGILNRIRSYHRKARNILEDWARKAALEILRLAKELGYAIAREDLKGLINSLRKIENKDHRKKLIMMGYKRLGKWIDWHAKKQGVPLAIVKPNGTSSRCPKCDSKGLEEAGYRRLRCPRCGFEADRDIIGKLNIRKRALKILGISGGVLAPLTAPQMTDVSPNRWGEPMNRPKGTLAP

SEQ ID NO: 13983 - protein, 270 aa, Okeania sp.
MYSCQQVLVGKNPELIAILTFLCEESHKLTNMGIYYARQLYFKSHKTLGKFDLEKVYKKNNHYKVLYSQAAQQILRTVAESFRSYYGLIKAYNEGKISDRPRIPNYRKKGGMATVSYPSQALKLKGNQIRVPLGNTCKRWFGVDSFLIPMPSNLAFSTLKELRILPRNRCFTQEFVYKKEVIVKPQLNQENVLGIDHGVNNWLSCVSNVGTSLIVDGKHPPLWFPSREGIGVGWYNKQVSTIKENKPLGFWSNRLASITEKRNRQIRFGY

SEQ ID NO: 13984 - protein, 370 aa, unknown
  TnpB Polypeptide
  misc_feature (118)..(134): Xaa can be any naturally occurring amino acid
VRKINRAVKIRIYPNAEQRVQIEKTIGCSRFIYNCMLADKIEHYKKEKKMLRNTPARYKKEYPWLKEVDSLALANVQMHLESAFRKFFHEPSAGFPRFKSKKSSRKSYTTNVVNGNIXXXXXXXXXXXXXXXXXRIKLHRLISEKWKLKSVTVSREPSGKYFASLLFCCENQTAEKRPAEKFLGIDFAMHGMCVFSTGERAGYPMFYRNTEKKLAREQRKLSRCQRGSRNYEKQKKRVALCHEKIRNQRKDFQHKLSAGLAENYDAVCVEDLDLKGMAGGLHFGKGIYDNGYGLFLSMLEYKLEERGKYLIKVNRYFASSKICSACGKKKAGLSLSERIYRCECGNKMDRDVNAAVNIMNEGKRIFTECA

SEQ ID NO: 13985 - protein, 394 aa, unknown
  TnpB Polypeptide
MLGMLKGLKYRIYPNNSQKELIVKHIGSSRFVYNLALETKNSAYLGSKHNFSPFDLIKQLPELKKECEWLKEVNSQSLQQSIQNMDIAFKKFFKGSGFPKFKSKHKGRQSFSVPQNVIVENNLLVIPKFKEGIDIVLHRPIKGTIKSATISVTPTGKYFASILVDTNEVIPQKATINKSTTIGIDLGIKDFAITSDGEVIENPKNLRKAQSKLKYVQRKYSKNKGKRTKQRLALLHEKVVNKRKDFLHKTSIKLIRENQTICLEDLNVAGMVKNHNLAQAISDVSWSTFVTMLEYKADWYGKNILRIGRFAPSSKCCSVCGYINKELTLKDREWTCPKCNSVLDRDVNAAINIKSFAFKNHLSGEHTLKNQNELPRLRGVLTSEAHPIASGVGG

SEQ ID NO: 13986 - protein, 411 aa, Cyanobacteria sp.
MAENQTITVACKLKTDSNVSKEIDQTLLAFSSACDWVNSNTPAGLTNKTAMQSLVYHDVRSQFGLSSNLAIQAIRRVCANRKAARDKGKTVKGFFPTSISYDARTFSFREKDLTVSIKTLNGRPRLELSIGNYQRHLLKEAKPTSATLVKRKSGDYYIHIQIDLDTPEVAKNKDPLGVDLGRTDIATTSEGDSWSGKQVTAKRNHHTNMRAILQKKATKGTRSSRRRCRQLQKRLSGKEKRFQSWINHNISRKLIDNAATNKKAIAIEDLTGIRERTNQKPRSKKDKRLGNNWAFYQLRQFLTYKCALAGVELITVNPAYTSQTCSHCHHIGDRKGKRFHCDNCGLKVDADQFFFNGAKNISALGLSINQPGGSGLVCKLGRYKKEYVQVNLFDHSLGLLKTHSSVEDGYA

SEQ ID NO: 13987 - protein, 233 aa, Sulfobacillus sp.
VWSDGWVSSGYGDSFRTQPGWGQDTCAVCRGFWRNRFPRNRKTQSSLQGTICFGTRRWLLDCEEGYHEATLTDQTIEQKGPGIPWSKNMRKTQRRMARLHARIANIRANALHQLTSDLVQRFDVIAIEDLNVAGMLKNHPLARAIADMGFGEFRRQLAYKAAHRGKTVVIVSRWYPISKTCARCGYTVPKMRLSVREWTCPVCHTHHDRDVNAAINLRQVAESSVGGIQPVPA

SEQ ID NO: 13988 - protein, 274 aa, unknown
  TnpB Polypeptide
MNQSGYKLIKTNKHYDKLHISKIGNVNIKCHREIEGNIKGIIIKKKVKGWEVHIITDAKYTISKGKQEIGIDMGVLSFLYTSNNEKVENPLYLNQELDKLKNIHRKISKTKKGSKNRKKQCLKSEKVWEKVDDKKKDFFHKVTTHLVNNSKFISVEKLNIKSMTSNKKNRYYNYRNILDSSWGMFLQMLKFKAESAGIEYVEVEPKNTSKMCCRCGKLQNMPTSIRHYNCSCGFSIDRDRNASINILAKGNGLTFVGEEWMHSLMNQEATSFTA

SEQ ID NO: 13989 - protein, 279 aa, Dorea sp.
MNPRISFDGLNWWISVCVEFPDCKETLNDDGVGIDLGIKDLAVCSDAVKYMNPRISFDGLNWWISVCVEFPDCKETLNDDGVGIDLGIKDLAVCSDAVKYKNINKSQKVKKLEKQKRRLQRSISRSYEKNKKGESYCKTNNVIKKEKLLLKRNHRLTNIRKNYLNQTISEIVNRKPRFICIEDLNVSGMMKNRHLSKAVQEQGFFWFRKQLEYKCSDKGIQLIVADRFYPSSKLCSCCGNIKKDLKLSDREYRCECGNIIDRDFQASINLKGYGERFVS

SEQ ID NO: 13990 - protein, 405 aa, unknown
  TnpB Polypeptide
MLVKAVSFRLEGELSAQARFLLEDFRLAVNRAIRAGLQTRATSRYSLCKLAYKDFRTEHPCMYAKHLVSVFEVATSVLKNHRRSVRKGEADRVPYVKRLFMKTENQAYKLDRERGVIDLPIRAGCHVELRLVMSEYHRGFLDDPSYSLGSLTLFPDRVVIAFRKTEPRPFVPESVVSLDTNERSLDGVFVSGEKGVSVKASFPQVATIQQRHHDRRKRLQNKKSHDRRTSRRLCKREGKREHDRVEYRMHQVANAVIDFAEENKAAIILEDLKGVFKPREDKTLNRRLSMWPRRKLHQFIEYKAQWRGIPVHKVDPRNSSRRCPVCGRLQDSRKGTEFACECGWRLDRHINASLNLLQTAVSKEMVGGLRFDPGALQHDVMMILYDPEKGARSEPNGASCEEAAA

SEQ ID NO: 13991 - protein, 378 aa, Bacteroidetes sp.
MIVRKSYKYWLKLTKKQKSALQEMLDECRWLYNLFLEQRILAYEELEISLSKYQQLMFLPLLKEERPSLTKVHSQVLQDVVVRLDRAFEAFFRRCSKGGEKPGFPRFRGYDRYDSFTYPQSGFEVVGSELKLSKIGPIRMKQHRPIFGAIKTCTLRRDPSGKWYASLSVEQEAQLLVPNEKSVGIDMGIEHWAHLSDGTVVENPRFLKQEEKALAKAQRKLSKFEKRTPGRRKQGKIVAKVHERIRNKRQDFCHKQSKKIVAEYQYICVEELNIKNMVEGSPLGSSLSRSIADASWNQFCRFLAYKAGEAGRKVGMVNPAYTSATCSQCGKMEKKSLSHRQHQCTHCGYSAHRDFNAAQNILAIGLDSLGLSPRSLRL

SEQ ID NO: 13992 - protein, 408 aa, unknown
  TnpB Polypeptide
MQKKSYKFRIYPNRKQEKRLEIALDQACFLYNQLLDIHQQVYLGTKGTLSQFDMNNLLKDFETKQLHSQVKQNIPKRISDAFKHFFRRVRNGETPGFPKFHKRIFYTSITFPQYQQEIYPNNRLYVSKIGMLKIKKHREIEGTIKTLTIKKENDEWYATFSCEDVPIEKVNNNFKSEVEGLDVGIKKFLVCSDEREFDNPKFLRRSEKKLKRLGRRHSKKKKGSKNRKKSIIKLAKQHTKITRQREDFHKKLARQLASEIKYIGIEDLNIRGMVRNHCLAKSISDAGWGSFFSYLEYYKTIFEGDIIEVGRFEPTSQTCSSCGYKQNMSLDKRIFECEDCGLKLDRDLNASLNIKKLTENKLNNTSGQGEINNACGDTVRPCFEFEKIQDKASVVEAGNYREISRRSP

SEQ ID NO: 13993 - protein, 343 aa, unknown
  TnpB Polypeptide
MLCKKVIKCKIVKPTLEKRKALEKEYNNLQIYLHTLDDWGVYSANKQQAERFYKNIIWGRKYPISMRKDLLQIERKNNKLSKYWARIRVKSKRNLWVAIKPHQDIPDDIELCESKLFPKKGEWWLYITIQKEVKPTHVHNILGVDLGIRWSATVCDLRTGQAKFYGRDIREIRGKYFYLRRKTTKNFGDIEKRKVNDKLHKISKQIIEWAKKTNSIIVVGDLKDVRNGNKGRKFNRKISNMPSFKLKQQILYKANWEGIEVHFVGEAYTSKTCHICGQRGTRTNGLFKCSCGCQDNADRNGAINIAKRGLGQVSSLGVVSDQPELMEFANSKNSSEAIQLVGW

SEQ ID NO: 13994 - protein, 417 aa, unknown
  TnpB Polypeptide
MLRAVKIRLYPNKTQEQTLNKVLGSYRFVYNQMLALKQNTYNENKTNLGLTDLSKYFHGTLLKDENYVWLKEQNTKVMKQAIRQMLSAYDGFFKLGKGFPKFKSKHDNNSALFPCEAISKSNTFETKHISLTKSLKNIKFRCSNLYFERLQRYKDNIKSATLSKTKSGNFFLSVLLSMNEKEFKQFRHTDNRVGIDLGIKDFVITSDGEVFENKHFFKRSEDKIKQLQRQLSKKTKGSNNRNKARRKLAKVFEHLSNQRLDYIHFIANSLLKTYDYVFMENLNVQGMLKNHKLAKAIQDLGFYTFKNTLKNKAMLNDKFIIEVDRWFASSKTCHECGYVYKNLSLGEREWTCPMCGEHHDRDLNAAINILIEGNKILVGSRTAELTLVENPTVDDRCENNLKSSGSLKQEMETKLNS

SEQ ID NO: 13995 - protein, 342 aa, Microbispora sp.
VCAWSTTRLWRSGPAPTPTRVAASPTWSPRPCLRRGSVRRSWRSWARCPACRCSKPCGICTRRSRASSPSGPNIPRSSPARSRGRRRSTPAARSAGVRAGCGWRRWTTRWTSCGRVRCRKARSRPRAAGRWFVSLLMEEEIPPMAPIEHAVGVDAGITSLLALSRPIDGLTGEDGKVANPRLERVDRKRLARAQRSLSRKVKGSNNRAKARLRVARVYARISARRRDFLHKLSTRLVRENQAVVIEDLTVRTMVRNHCLARAISDASWRELRSMLEYKTAWYGRELLVVDRWFPSSKLCSACGVLADSMPLNVRTWQCACGATHDRDVNAAKNILAAGLAER

SEQ ID NO: 13996 - protein, 450 aa, unknown
  TnpB Polypeptide
MNNVFTITTELKLNREYNQLVGKYISDYIELFNKIQRLTFQRIENYYIKSGKVTQKDKNIIHAQLKEEFNLTSRAVDAILSNMLGRYESIKELKRFERESLERKILNLEKELVKLKDERTLQRINLKNDPKVFNYTKYKNLKIKIYWKQNRLNTKKQKLKNLSNEIETGKYKVCFGTKNLLKKDYKKFVKKRDSEIYFLGRAGDGACNNNFQVEYSSKTNQFYFRIRKEIDLENEKFVYGKFYFHNKKYTNLLKNLLRTKESSLTYRIKIKDNRAFLQIIYNFKHNKDLCITRNNYGVVGVDFNKGFVSVSETDKYGNLINTFNINYQYSKGNQTSNDFQYIATKLKDYCLNTGKDLVIEKLNFKKKKDGLISKKGKKYNEMLSSLVYSKFDSIITSKCVKNRIFLHKVNPAWTSWIAKQKYCPKMKLNIHSGASYVIARRGMSLTDKIK

SEQ ID NO: 13997 - protein, 376 aa, unknown
  TnpB Polypeptide
MTKNNEKKITRKEIVSNIKEQILLSKNSENDVTFEYQSLFEQIEDFVIAMKSQGLIYKDIREFIELFVETPKVTTVSHNIQYPTLTIPDLDVTEKTVVQEGKAGKYNIVTTELYKEEISRTKVIEESTVTEIIKVPMLSEGSEGSSGVSFVGESYDFTKNGNNKELSVGIDINSSYKDDNIITVAFSDQRRPVTFVCEKYKNYLASLKGSVGFDPTNKNFNNSKTAAVGTFYRKTLNFAISVVQKLKEFGVTRVYLGKSGCMTLNTGNHFMVSVYAQLITACSIHSLEVVVVDEFRTSLADSIANDDFDRGNFSGERSKSNVHNYKSGVGGVVDADVNAAYNILRKGTKGDFRVSPELIKVSFKKKTIQLPEVNYM

SEQ ID NO: 13998 - protein, 383 aa, unknown
  TnpB Polypeptide
MRQVERHLIKPSNDLYTICDDLTFKSKNLYNAGLYQIRQSIFERNKSDKEDKKPVPSWIQLVSEFRKQDQNDMKALPSKVSTNIIKMLGGNISSYYHLLKGYNDKSNKSITNKPKLPGYLHKTEGRYVVEFTNQTFAKKRGENNELILCPRELRISIPTKVDNPKCVKIIPKDGYFFIDVIYEVEERSFRKTHKYAGIDLGVDNLAAVTFSDGTNPLLVKGLKVNDYLSKSAKYLVNYLVSQSIDVLVIGANAGWKQNINIGKRNNQNFANIPFYKFKNKLAYLCEEAGIEVVEQEESYTSKSSFLDNDPIPTYPNTTNISFSGKRVCRGLYKRKNKTINADVNGSLNILKKYLISNAAWNGNVFSDLVEACSTPRKVTVSFD

SEQ ID NO: 13999 - protein, 384 aa, Streptococcus sp.
VLKSFKTEIDPTFAQKSKINRTIGTCRYVYNFYISHNKELYDKNKEFMTGKDFSVWLNNEFLPNNPDKMWIKEVSSKSIKKSIENGYVAFTRFFKHQSNFPKYKKKGKSEVKMYFVKNNPRDCLCERHRINIPTLGWVKIKEKGYLPTSHNGWKIRSGAVSAKAGRYYVSVLVDIPCNCFKSNCESDGVGIDLGVKDFAIISNGMIYKNINKSKAVKKLLKKLQREQRRLSRKYKNLKKGETSQNINSQKLKVQKIHQRLTNIRTDYINKIIAEIVKTKPSYIAIEDLNVSGMMKNKHLSKAIASQKFFEFREKLKWKCLCNGVELRFVNRWYPSSKMCHNCGCIKKDLKLSDRVYKCACGYIADRDFNASLNIRDATTYEIAL

SEQ ID NO: 14000 - protein, 559 aa, unknown
  TnpB Polypeptide
MSRQQLRRIGDPVVAAGPAGVGVRTRLHLTEDEAAAVGEVGAFLGSVYRRELVQRTALGALDRNQHASWRAARKQAITGVASSRWAGAITRAAEDQYRLGMRALTAHVADLRSAVTVLATRCALRPGERSAPPRDVAGGPRRSSRRPVCGYSTAAQRFSKTRRLAAVRTKLAAAEAELEAGRPAITVGGNRLWRTRQHLDAAELTEQQWRHRWDAARMFLTADGESGKAGGNETIRVDEAGRLRIKVPAALKERFGSHLQIAAPVSFGHRGGQWADRIAGRRAVRYDITFDPERGRWYLDASWALAPEPVPDLDELRAGRVLGVDLNADHLAACVLDTSGNPIGEPVTIAVHTAGLRASHRDGRVRAAITTLLDHAHANSCAAVVVENLDFVDARATGRETMGRGKRGKRFRRTVAGIPTRKFRDRLCAMASRREVAVLGVDPAYTSAWGRQHWRKPLQQQTSDPAAVTVHHGAAAAIGRRGLGQPIRRRPAGPRTQQRMRAGTPPARPHRSPGTTRQCESSGPPARPQRRRDMPVHQRTPTASGQHRSGRTGLTPAHY

SEQ ID NO: 14001 - protein, 217 aa, Microcoleaceae sp.
MLLSIKTKLKLNKNQATIMSKHAGIARFTYNWVLATWSELYKDGLKPNKYLLKKFFNHVKPEFTWIKETGICQKITQYAFDNLGESFSRFFSKKGGYPNFKKKEHHDSFTIDAGGKPIPVGGTSIKLPRIGWVKTYEGLPHATCKSITISRTADSWFIAFARKQKHEPTVKSLEVVGVDLGVKTLATFSTGVVFSNPKHYKTHLNKLRRLSKELSRK

SEQ ID NO: 14002 - protein, 318 aa, unknown
  TnpB Polypeptide
MCYAASKLWNVCNYERRRYKELGLEKYPDWYYQKKAHKGDLWYRQLPSQTAQETCKQLDKAWKSFYALKKTGGIKAPNPPRFKQDNIPITYMQMGIRHEKGSDQLRLSLSKDLKSYMEETYGIHEKFLYLENKIFRNMDHIKQLRIYPPEDGKCDLIVIYEIKEPEPLSLNGHYLSIDLGIHNLMTCYDSGNGRSFILGRKYLSLERYFHKEISRVQSIWYAQQVENGIKYPRSSKHIKRIYRKKQNAVKDYLHKVTRWLAEYCKKERISCVIIGDIRNIRKGKVLCLPGNRQCEYILRAVILLPACKFSSRNSRLQM

SEQ ID NO: 14003 - protein, 363 aa, unknown
  TnpB Polypeptide
MFVNKAFKFKLEPTAEQEIMLNKTAGCCRFVYNYFLKLNINQYEKDKTFVFNHQMVTMLPELKKQFSFLSEIFSQSLQTAVRNLSTSFNNFFHKQNAFPTFKKKGRDDSFTCPQKFRIEEEKKRIFIPKVGEIKYRNSRPIEGKVKSITVSCSCGLWYVSVLTEQEIQEKPKTFDSPVGIDVGLKEFAVLSTGEVIPNPRFYRTLEEKLANEQRKLSRKEKYSNNRKKQLKKVQKIHSKIANDRKDFLHKLSTRIVKNHDIIGVEDLCVKGMVKNRHLSKSISDAGWNMFVNFLEYKSLWQSKTLQKVERFYPSSQLCFECGSKQIMPLHLRTYICRDCGTNIDRDFNASKNIELRALQLALA

SEQ ID NO: 14004 - protein, 348 aa, Tissierella sp.
MRQVNQQVLKMLCNDWKSFYKAIKDYNKNPSSYTGRPKPPKYSKKNGRKKVSLSNQICKIKDNKYLRFPKTKLQLNIGKLGKTSGKLMEVRIVPCTSYYELEIVFEVAKEKPEPKETNRVIGIDLGIDNFVTIANNVGLRPTIIKGKIIKSINQYYNKKRAYYMSMLRQGKAPGEGVYYTKRLNRLDEKRNSKIKDFIHKTSRVIINYAIDNDIDTIIIGKNEAWKKNVNIGKANNQKFVAIPYKQLIEMIQYKAIDNNIKVIVTEESYTSKASFLDYDLIPKYGENKNITYIFSGKRVKRGLYRTSTGLFVNADVNGAYNVILKVIPEAFSLRDRGLVTSPQLLSVA

SEQ ID NO: 14005 - protein, 420 aa, unknown
  TnpB Polypeptide
MRAGKPIPFRVGMRASCILVDNNSNIIFKHPQYQNNTMQRTFKFRLYPNLEQEHKLQNNLSVCRWVYNKFVESAKNGFVSRNDCNYYLTELKQSESWLYKYHSKMLQSISTQIDGAQKANLEKAKKGYKTGPLKFCRYHDFRTFTYNQSGFKTENGFLHLSKISRIKIICHRNIPDDSKIKQVTVTKSKSGKWFACMTVDISEPLISIPKISFSRAVGIDMGIKSFAYDSDGCSTPNPLNLKKMLKPLARSQRKISRRKKGSNNRLKAILHMQKIHEKIANRRKDFHHKLSAQYAKNNVVFVEDLKIPNMVKNHKLARSIMDSSWGAFLQKLEYKCKMLVKVPARNTSINCCRCGNKVPKNLAVRIHRCDKCNLVIDRDYNASVNILNKGLNIPQELREYTPVEISKDQGSRKPTCFSCG

SEQ ID NO: 14006 - protein, 483 aa, unknown
  TnpB Polypeptide
MTSSIEDLKFHLVFSTKYRYNLLNEKIATILKNYFIKNQEKFQYKIISLAIESDHVHMLFQLESSEVNLNKLIQRIKGGSSFLIRKKFSYLKRYPSLWTESHFCNSVGNVSQETITNYINLQGIQEKEIVSRTFKYKVLTPTKYKDNVLQTYFQECLLNKRDKTSSAIFQDFPRINRKEDEFGLYIRSQSSKIDSNNSKLAKYWIKIPGSRSQNSIWLGLQGRNLPEDCRVKDSTIRFQKGSYYVYLNIEQDRIIKKASARKILAIDLGMNHPITSVMLQDDHMSYHKFYGNELKNQITRRVKYYSQLQHSGIEEPTSKHQNRIDSLVHEYVNDLIQKAKQEGCSIVVGDLHLSKKFTKGNSNQKTRTKGNRIPYYKIQELLYYKAILNNIPIVFVNETYTSQTCSRCGYVDPNNRKGEQFHCCECGYQNQADLNGAINIGRKLVNLLSSSYPTLRESYSEESIFDAFRNDSGFKPTALAVGR

SEQ ID NO: 14007 - protein, 147 aa, unknown
  TnpB Polypeptide
MYSNAKILGIDYAIQGMAVFSEEIEMEEAGFFRKNEKRLAREQRKLSRCVKESRNYVRQKKKVARCHEKIRSQRRDYLHKLSRRITDQYDIVAVEDIDMKAMGQCLHFGKSVQDNGYGMFQNMLDYKLTWKGKKLVKIDRFFPSSKK

SEQ ID NO: 14008 - protein, 370 aa, unknown
  TnpB Polypeptide
MQTVSSYGVELRKQNIPVRQTLEIYRSAVCYLTEIYEQVWEELAEIPDAKRRFNAAEHLVHTTKKNPARFDFDLRFPKMPSYLRRAAIQHALGSVSSYETRMDLWEKSGEKAGKPRLAYENHAMPVFYRDVMYREEKEGKDEAYLKLYDGHDWKWFCVRLNHTDMEYLRRNWSGKKASAPTLEKRHHKYFLRFSYTEEVTLTKTPVKEQIICSVDLGINTDAVCTIMRADGTVLGRKFINHPSEKDRMYRTLGRIRRFQREHSSAQQRILLPVFSVYGSFLFCFSFHCSQCIYAAALYELYSNAHPAFVFILITLRLRLSLLFLHHSRRSFLLQRWFPPLLRTHRNCPLPRIPLLLRSRSLLPRVPGSRS

SEQ ID NO: 14009 - protein, 293 aa, Proteus sp.
MRSAIRRGGKLDQSNSRISLPKLGWIRYRNSCEVIGEVKNVTVSQSCGNWYVSIQTEYEISEPQHDSTTMVGLDAGITKLATLSDGTVFEPVNSFKTSQKKLATFQRQLSRKVKFSANWQKQKRKIQRLHSHIANIRKDYLHKATTKISKNHAMIAIEDLKVSNMSKSAKGTAEQHGRNVKAKSGLNRAILDQGWHEMRRQLEYKQLWRGGQVLAVPPAYTSQRCACCGHTAKENRLSQSKFECLECGYTENADINGARNILAAGHAVLACGGMVQSDRPLKQEPTEVSQATV

SEQ ID NO: 14010 - protein, 425 aa, Halobacteriales sp.
LQYSPRYRLLPSDGQREALDWTRDTTRQLYNHALHEFNKIPEDTGTLRQRVWQIRDRLPAMKDWWTDLQDVYSTVLQKAVERIRTNINNLGKLKAAGYTVGSLNWKKPRECKSFTYRQSGFELDTKSGPTGRAKLTLKKLAGDTHEISVRLHRDLPDHDAIKEVTLKKEPTGAWYVSFTIETETPEKPAVDALDPDDCVGLDLGVLNFVHDSDGVSVGRLDLSDERERLEREQRSLSRKQHGSNNWHEQRQRVAEVHARMANKKRDFKHKLAAYYTSAYDAVFVENLNVRLMLESDGNARNKAEVGWRDFIQTLKHHGRKRGCHVIEVEPAGTTKECARCNDETDKSLWVREHSCPSCGFELDRDWNAALNVLSRGLAKLGVVHSESTPVETALAVDATTVSAKRVTEAGSPCLKEPPKAASRQG

SEQ ID NO: 14011 - protein, 421 aa, unknown
  TnpB Polypeptide
MILTYCYRIQPSAEQEAVMLHTLELLRRHWNFGLGQRLDWLRRTRCQIDRCSLVSEAIGEIPDRVDYYIQQTDLKQTKVLFPEYKEIWAEAQQVNLQRLDKAWKRWLIPDALGKRGGCPKFKKPGELRSFVYPRINDKRAGAHLSDGVLKLSKIGEMPIVLHRPIPDAFTLKTCTIVRKADGWYCCITMQDETIPEPLPIDTVESVVGIDVGLKEFLVTSTGEVVPIQQTYRKAQRRLARKQKKASRQLKGSNNHKKGLNKVAREHQKIGRVRQQFHYEVAHWLCQTYNLIALEDLNIKGLARTHLAKSIYDAAWGNFAQILEAVGVKSGNWIVKVSPYGTTQNCSSCGKKVPKDLSVRTHECQHCGTVMDRDENAAVNILNKALSIVGLAMPACGRLSGSTPVEAGSLIVKLEAPVIASA

SEQ ID NO: 14012 - protein, 395 aa, Shigella sp.
  misc_feature (264)..(277): Xaa can be any naturally occurring amino acid
MRRFAGACRFVFNRALARQNENHEAGNKYIPYGKMASWLVEWKNATETQWLKDSPSQPLQQSLKDLERAYKNFFRKRAAFPRFKKRGQNDAFRYPQGVKLDQENSRIFLPKLGWMRYRNSRQVTGVVKNVTVSQSCGTWYISIQTESEVSTPAHPSASMVGLDAGVAKLATLSDGTVFEPVNSFQKNQKKLARLQRQLSRKVKFSNNWQKQKRKIQRLHSCIANIRRDYLHKVTTAVSKNHAMIVIEDLKVSNMSKSAAGTVSXXXXXXXXXXXXXXPGRNVRAKSGLNRSILDQGWYEMHRQLEYKQLWRGGQVLAVPPAYTSQRCAYCGHTAKENRLSQSKFRCQVCGYTANADVNGARNILAAGHAVLACGEMVQSGRPLKQEPTEMIQATA

SEQ ID NO: 14013 - protein, 358 aa, Bacillus sp.
VSQTITVQVKLLPTKEQASILSEMSQSYISTINTLVSEMVAEKKSTKKSSKNISAALPSAVKNQAIKDAKSVFKKAKKNKYKVIPVLKKPVCIWNNQNYSFDLTHILMPIMVNGKATKTPIRALLVDKDNRNFDLLKHKLGTLRVTKKTNKWIAQISVTIPPIQGTDLKVMGIDLGLKVPAVAVTDDEKVRFFGNGRQNKYVKRKFRSERKTLGKRKKLNAIRNSKDKEQRWMKDQDHKVSRAIIDFAKENKISVIRLEKLANIRQTASTSRKNEKNLHNWSFYRLAKFIEYKANLEGMKVEYVNPAYTSQTCPKCFEKNKAQDRKYKCKCGFEKHRDLVGAMNIRYAPVIDGNSHSA

SEQ ID NO: 14014 - protein, 316 aa, unknown
  TnpB Polypeptide
MHDERVVRLLNDYRLLVNKAVRYGLQSGVTSKFALCKHLYAQFRCESDMYSKHVVSTFEVAASILKNYRHRARRGLRTKPPFVKRLFLKTENQAFRLDRKAGILRFPLRSREYVWIQLPVNPYHKGMLEDPGLSLGSLTLMPDRIIIAFRKEAPIPFQPEGLLALDTNESSLDGVHARAGKTEYVRARFPEVRHIQSLYFRRRRKLAKKKPHDARIRRRLLHTEGSRERRRVKQRLHILSKGIVAEAAKQRCVLVLEELSIPKLRGRSRRMNRRLSVWPQAELHRQIEYKARWIGVPVLKIDPRNTSRRLPGMWLV

SEQ ID NO: 14015 - protein, 427 aa, Escherichia sp.
MHQENTMLPRRISVSLFIDQSIIWPVKRLQAFKFQLRPGGQQEREMRRFAGACRFVFNRALALQNENHEAGNKYIPYGKMASWLVEWKNATETQWLKDSPSQPLQQSLKVLERAYKNFFLKRAAFPRFKKRGQNDAFRYPQGVKLDQENSRIFLPKLGWMRYRNSRQVTGVVKNVTVSQSCGKWYISIQTESEVSTPVHPSASMVGLDAGVAKLATLSDGTVFEPVNSFQKNQKTPARLQRQLSRKVKFSNNWQKQKRKIQRLHSCIANIRRDYLHKVTTTVSKNHAMIVIEDLKVSNMSKSAAGTVSQPGRNVRAKSGLNRSILDQGWYEMRRQLEYKQLWSGGQVLAVPPAYTSQRCACCGHTAKENRLSQSKFRCQVCGYTANADVNGARNILAAGHAVLACGGMVQSGRPLKQEPTEMIQATA

SEQ ID NO: 14016 - protein, 405 aa, Cyanobacteria sp.
MIVYEMKLEGKNSQYEALDNAIRTGRFVRNSVIRGWMDGEVKSRNDAYKYCKILADNPEFPWAKQLNSMARQAHAERGWACVERFYRNCQKKIKGKKGFPQFKKHTTRASVEYKTSGWKLSEDRKYITFSDGFNAGTFRLWGSRDLHYYQFKQIKRVRVIRRCDGYYAQFLIDYNRKIDKELTGIQRGIDVNLENFYTDSQGVRVENPRFLRKDEKKLKKHQRRLSRTNKGSKNRAKARQRLGKAHLKVSRKRKDWVCKLAQSVIQLSDLVAIEDLQVRNMVRNRNLAKSINDASWSMFRQWLEYFGSIYGVPVIAVAPHWTSIDCSQCGEKVVKALSTRTHKCPHCGYNTSRDENSARNILKKALAQLANTVGHTEINASGENPLWQPLAIDVGKGTRRKRKLS

SEQ ID NO: 14017 - protein, 410 aa, unknown
  TnpB Polypeptide
MLKTFKYRLYPTPQQEKKMTSILDSCRILYNSALIDRQRHYQRTGRELTLTRQESQLLKDKVNYPILNTVHSQVLQDVLFRVKKAYSNFFRRVKEKNGKHGYPRFKFGKRYDSFTYPQYGYAFKIVNRKTLFLSKIGDVPIRMHRPVNGTIKTCVVKRISDGWYASISAEINTPAVVTDVSRPVGIDVGLTPLVTLSDGKTVEHPHYFRGMEKKLARAQRLLSRKVKGSKNYKKQQMKVGIIHKKISDSRNDFLHKLSRSVVDTFTFIAGDSIKITNLVKNNHLSKGIYDAGWSKMLNYIAYKAEEAGKRYVEPPTAGSTQECCLCGTQAHKDLSDRMHICSNIMCGLILPRDRNSALVALKRALNTAGTAGINAWGDLASTLRARIGMQAESLNQEKYSGCIITEKPRP

SEQ ID NO: 14018 - protein, 409 aa, Mycolicibacterium sp.
VEFTDEQAEFAERIGSVSRAVWNTGLAQRREYRRRGAWINYREQAHELVDAKEEHAWLKEVPGHCLQQALIDLDEACRRHGTFRVRWRSTRRWAPSFRFPEGSKMAVEKLNRRTWRVKLPKLGYVKFRGSRSLDGETIRSATVSRDGGRWFVSFLVDDLMTTPEEHLVPGSAVGVDRGVAVAVATSDGDLIDRQFVTAGERRRTVVLQRKLSHTAKNSKNRTKIKAALAKLRTAERHRREDFCAQTAHRLAHANAAVVYEDLKTKQMTRRAKPVEDPDHPGHFLPNGAGSKSGLNRSILGKGWYRFEQSLTSVARYTGTRVVKVPAAFTSQRCSVCRHVDPKSRESQAVFRCIHCLRPAEHADVNAAKNILAAGLAVTACREAATPASVAVTSTQEPAGNREELLLQPV

SEQ ID NO: 14019 - protein, 536 aa, Mycolicibacterium sp.
VRTRLHLTADEAAAVGEIGEFLGSVYRRELASRITVGRMDHKAHAVWRAQRKRAVTAVASSRWAGAITRAVEDQYQLGMRALNAESTDLRAAIAVLEQRCALRPGQTCAPAQDAAGGPRRRSRRPVRGYASAGQRFSKTRRLAALRGRLVATETALAAGRPSITVGGNRLWRTRQNLADAQMSEQQWQDRWDAARMFLTADGESGKAGGNETIRVDESGQLRMKVPAALTDRFGTHLLISNAVAFNHRGDEWGERVRDRRAVRYDITFNPQRGRWYLDASWTITPEPTPTLDQLRAGHVLGVDLNADHLAACALDSSGNPVGEPVTIDVHTAGLRASRRDGRVRAAITNLLNLAEHHQCCAVVVENLDFTDARATGRETLGRATRGKALRRTVAGIPTRRFRDRLTAMAARRAIAVIGVDPAYTSMWGRQHWRKPLQQQTCDPDAVTPHHGAAAAIGRRGLGKPIRRRPAGPRTQQRMRAGTPPARPDQPPGTTRRCESSGTPPRPQRRRGMPVHQRTPTASGQHRSGRTGLTPAH

SEQ ID NO: 14020 - protein, 505 aa, unknown
  TnpB Polypeptide
MGIRMTENNENQAGNGISLSYKYRLYPTPEQEKALAFEFDACRYVYNHFLHLRTESWESTQKTLRRPKLAPGADPNAKHPEYVKDSNGKTVWEEYVNESYDPEAKSMGSIPSKMLTALKNSCLDEDGNLWLKQADSTALGYSTMNLDAAFDNFFRGRKKGQNIGYPRFKRRFDSAQSYKTQGGQLLGTYPDGSPAKLILKGMGKTPVPSPLPEDHPLRTVRWQYVYLPKVGKVRVKVHRIPEGTFVATAVARTASNKYYIAVNVKDAAPKPVPAGHGEVGITFGASHWVTTSDGEQIDLPERMARLQRRKAIAQRDLARKQKGSANYRKQRLKIAKIDEKIADIRKDATHKLTRELVDSYDVIASRGMCLSGMMQHKTEATKNLPKKVQRALNRRTSDGNFSEFNRQLAYKSAWANRAFVEVPNDTPTAQVCSRCGHEELVLAKDLRSKWTCSECGAQHDRKANGAQNVLEAGLDILHDRERAYVTKAKKTRKKKRSESEKREFE

SEQ ID NO: 14021 - protein, 358 aa, unknown
  TnpB Polypeptide
MPILTYKIKHYRNFSEELRKAFLVAKYSIKHKKCRTTKDVRDIGLKACIANQILRKYGANYKAQSVKSVKLTINGYFVKLDKEARTINIPSLKLKLSYQFPNNFAKINQVEVDRTYVYVSVTVPEVKEQKVQDYLGIDRNTTGHCCVAAITKTGKVWKLGKKSQHLHLKYSKMRKKLQSQGRKQKLKQIKRKEANVVRDLNHKISRKIVNIARKNKVGIKMEDLTQIRETTKSSRSFKYSLNSWGFYQLQQMIEYKSRLLGIPLLYVAAPYTSKTCSRCGHLGKRNGKTFTCACGHVDHADSNAAFNISKWEKLPGESYAKPTKYGLSVADRDATEGSTDTPQLERSKLNLVKDLVLV

SEQ ID NO: 14022 - protein, 444 aa, unknown
  TnpB Polypeptide
MRVIQAFRFELAPSREARIALTKHVGAARFAYNWGLTRCLEAKERGKQIPSAVNLHKDWNTWKRANAPWWVEVSKCAPQEAFRDLERAVRTWRQGRANFPRVKRKKALADNKARVTGHIRVTPRHVQLPRIGKVRTKERTDKLLELLQSEKARILSATISREADRWFVSLTCAVERPDPKPREVQGPEDVVGIDVGLKAFAVLSDGTRIEAPKPLEKALRLLKRRSKQLSRKQKKTVGERDPETGEERKRTVFSRNYEQAVLRLARLHRRIRNIRQDFLHKVTTELATAKPVLVVEDLNVRGLARNGSLSRAILDVGWGAFRRMLEYKYAWYGAVLLIAPRNFPSTKRCSGCGWVGPALPLSQRVFHCEACGLEVDRDLNAACNLSAYGLTHLTGPTGSSPGSDACGDPSGGGTAREGRSTSYGSMKQEAARHEFHLSGVRTVK

SEQ ID NO: 14023 - protein, 382 aa, Peptococcaceae sp.
METKQVEKAYVFRLYPTEQQAELISKSIGCARFVYNYFLARRSKYYEETGETLGYTKCSEELTLLKQTKEHLWLNEVDKFALQNSLRNLDTAFVNFFRECQRGNIKQGYPNFKKKHGNRQSYRTNFTNDNIKVDMETCQVKLPKLGWAAFRKNKKQTTFPTEIINATVKRSPSGRFFVSVCCVDQVEILPEIDKCVGVDMGLKQFLILSSGEPIENPRYFRKTGRQLAQAQRRLSRMKKGSKNYIKQRLKVAKLHERIANQRKDFLHKQSTRLVKENQIICLEDLQVKNMILNRKLAKSIQDAGWSDFKRMVAYKSDWYGRTLVQIGKFFPSTKKCGHCGEVNPMLTLSEREWQCPVCKTIHDRDQNAAANILNEGLRILAA

SEQ ID NO: 14024 - protein, 394 aa, unknown
  TnpB Polypeptide
VKVYALKIDESHLNIPQKLWIEKIFLEAKWFFNYAIGRNDLFSLDLKIKNVLVKNKEGNDEWRRLELLSSQMKLGLYSRIIDSIKGLSVLKKKGFQVGRIKHTKNIDSIPLPQFKNTWNIQNGRIRIQGLKKTLPVSGLDQIPENAEFANAILFKKASGYYLHVTAYLPKTERIPTGRDVGLDFGIKDNIVTSDGEKFNIKIPESKKLKSLQKRFSKKAKGSKQRRKVNLKVKKEYERIGNQKKDKVNKIVSHLVKEYDTIYMQDEMIKQWHSGLFGKQVQHSALGAIKARLKNLESVRTISRSFPTTKMCYNCGLINQISLAERTYKCSCGLEEDRDIKAAKTILKVGRLKFSATGRSSTPLEEMTSSQFGSDARLSKLIPMKEEACCSLDNR

SEQ ID NO: 14025 - protein, 433 aa, unknown
  TnpB Polypeptide
MSGTIHRALKVRLYPNKKQETQILKTLGSCRFLYNQMLVERIGIYTKLKDNRGELRLAKYKTEVDYKKDFEWMSDCDSVALQQSRLDLIASYQNFFNSLKGQRKGAKVGFPKFHKKGQKNSYKTLNNNNTIRIDYEKSKVRLPKLGWVNYKSGNRQWIGKICSTTISKTPSGKYFASILFEQELELQGVELRENMKVIGLDMSLQSFYVDNLGNSPNYQKPFRSNQKKLKHYQRKLSKKIKGSKNREKARLKVARVHEKITNSRKDFVSKLSTKLVRENDVIVVENLSLKGMSQALNLGKSVMDLGYSEFVKQLEYKALWNNKTFIRADKWFASSKTCSYCGYKKKDLQLDDREWICSNCGATHNRDQNAGQNLRNYGLRELGLVPTERREFKPVESKTKASGKTEVSLDDEAGILLALDNRKFNKSLTCELP

SEQ ID NO: 14026 - protein, 423 aa, unknown
  TnpB Polypeptide
MGTIHKALKVRVYPSSKQQEILNKTLGSCRAIYNMMLYERIQTYENWKASGDTDARNLYNHKHKTEKEYKEEYEWLKDSVDSQALQQARINLSMAYQNFFKSLSGKRKGAKVGFPKFKKKKIGSSYRTMMTNNNIAIDFENHKVKLPKVGYVNFKDLRTKIEGVIKSATVSRSSTGKYFVSLLIEQELILNGVEVTDELKAKTIGLDMSLEKLFVDNEGNSPAYERLYRKYEPLLKKAQRKMSKKKKGSKNWYKALHKVNLIHERITNKRKDFTQKLSTELVKNHEVIVVEHLSLKGMSQALHLGKSVMDLGYSEFVRQLSYKSLWNNKTFIQADKWFASSKTCSICGYKKTDLQLSDREWECSNCGVDHDRDQNAGINLKNYGLKELGLGQPEIKPVEKELHKDSSMKQEALKSLVSGQFTL

SEQ ID NO: 14027 - protein, 364 aa, Cedecea sp.
MSEMFKTLSLRVKDRHARLLIRMSREVNQVFNLVNEISCNSYKNHSDYGPQVPKWLSAFELQKATSGIQKINNWSIGSSTVQEAIAVHAKSRNKSRRSKLRWRISHGSGRSLGWVPFKSRSVTWSKDSIRFAGYDFKVWDTYGIGNYDLRSGCFSEDRRGRWYLNICVKFDAEQTNATSSIGIDLGLKDVATTSTGMRLSSGGFYRQLQSSLGVSQRARKKSRVRSIHAKIKNRRKDAIHKFTTELVNQNAAIFVGDVSSTKLVKTKMAKSVLDAGWSMLKTQLEYKAIARSVVFEIVNENYSTQACSCCGCISENSPKGRTGLRIREWTCVECGETHDRDINAAMNILAAGHRRLAVGTSVFT

SEQ ID NO: 14028 - protein, 267 aa, Clostridioides sp.
  misc_feature (263)..(263): Xaa can be any naturally occurring amino acid
VIAVEKAYKFRMYPNKKQQELINKTFGCCRFVYNKYLAKRIDVYKNDKETFTYKQCSSDLTNLKKELNWLKEPDKFSLQNVLKDLDNAYEKFFKKKAGFPKFKSKKINRFSYKTNFTNGNIMYCGQHIKLPKLGMVKVRDKQVPKGRILNATISKEPSGRYYVSLCCTDVDIEAFENTNNQIGLDLGIKEFCISSCGEFIENPKYLKKSLNKLAKLQRELSRKTIGSLNRNKARLKVARLQEHIANQRNDFLQKLSTKLIKEXYRKS

SEQ ID NO: 14029 - protein, 434 aa, Achromobacter sp.
MESTVTRHQGFKFELRPSPAQARMLREFAGACRFVYNRTLAMNEERYKAGERKLSYVEAAKLLTGWRADAETPWLQEAPAQVLQQSLRDLEAAYTNFFAKRAGAPRFKKKGLQDHFRVPQKFRLDEGNTRVRLPKVGWIRYRKSRAVLGQVKHVSVSAKAGRWFVSFLTVREVPKPLPTATSAVGIDLGVARFATLSDGTVFPALSSFAAHRDQLRKAQRAMDRKVKFSKNWKKAKARVSRLHARIANCPRDFLHKTSTTISKNHALVVVEDLRVGAMSSSAAGTVDRPGRNVRQKAGLNRVIRDQGWYAFRRFLDYKLAWNGGMLLAVSPRNTSRTCLAYGHVAAGNRVTQALFACVACGFEENADLVGAKNVLRAGDARLAREASDAVRSPAAGTDQSEVHLGSPRMIPDEPTSAPLFGDPNLLCSLNCNTT

SEQ ID NO: 14030 - protein, 362 aa, unknown
  TnpB Polypeptide
MSIQRSHKLLSCVSKTASKPLSVEAERLQRGQSQLEGPKDFRSFTYIQSGFEFDSKNGQPVLSLSKLADIPLIKHRAIPDAETVKEITIKKESTGEWFASFTVGDKETPEKPTDPDRCVGIDVGILKYAHDTDGTAVESLDLSDERERLERAQHDLSQKERGSANWERQRQVVAERHADLKRKRRDFLHKLSNYYATEYDLVAVEGLDAKELVELPETHGIGRERRGERSFECLSTSANAKEHTLPKSIQGTRRKRARLAASRRTSRCGFVNTRVPSCGFEADRDANAAWNILSRGLKNIGVVHSESTPVETALPTDTVVSAKRVIETGSPITRSQRLRVSSQNSESSDDTLKERTASAVSE

SEQ ID NO: 14031 - protein, 193 aa, unknown
  TnpB Polypeptide
MPLRINPEQEDLWHDLVSEDAKAGEIRLQQHRKNWVLHVTVEYPVEEPAADGDATHIGLDIGETALITGCALKDGSPTDPFVCSGSRAKHLRKEMHTTLKRLQERDASEWRTDERFDHYQNALTDIVEKASREAVEYAKQFENPVLVMEDLTYIRERLDYGKYMNRRLHSWAFARLKGASRTRRRKQVFRSST

SEQ ID NO: 14032 - protein, 545 aa, unknown
  TnpB Polypeptide
LAGVNRAMAIRTITLKLHKPSRRKRDIIENAMRSYSSAYQYLLDRAFNEIENISKQYREEKGGYRANKLAKWIDKNISKDLNRFGVEPFKDSLKIDFGMTIAGYLNLREIQQSVRYPIAYVSETEWHQEAQKVLKDFEMGLKSFDECEKEIKRIIEKSSKFKPIFFCRYAVNRDYSLVYDSSCNRYYAKLYLLNVKSADRKIIKANDSKKLWHISKDNRVLENTGRKERYLLFPLSFGKWQEDYLKRAFERPEMFKTARLIKKKDEYYLAVNIEVEEAEKVKTNSFLGVARALSAPVHYCIIDNDMNIIDKAPIACSQTKRERGKDFCINDLHEIANVIVKIALQNKSQVIVESLIEKGDRLKWKESGRETHIPVLNCFSYNRLVDILEYKLKGEGLPPPIKVSPVKIFYTCPKCGLSSDANRFSKELFICTTCGFNTDIESLGSFNLAQKLYEYRAGALKVKIERVGKRCIRFKNDILDLDLYVDVSADYREEFINEINRIIREFYDNIGSCIRNSHFKKKYSLIKKIQEEGDILKLLRIDALK

SEQ ID NO: 14033 - protein, 371 aa, unknown
  TnpB Polypeptide
MLKAYKYRLYPNKQQETQIQKTFGCCRFVYNYMLNYKQELYKTKKEQISKFDCNNYCNRELKKQYKWLKEVDKYALTNTIYNMDSAYQKFFKEHTGYPRFKSKKDNKKSYKTNNNVNKGVATIRIEKNRLRLPKIGMVRIVYSREITGKIKSVIISQDPSGKYFASILFEAEYKPLQKNNSSVGIDLGVKDLLITSDREKFDNIRITKKYEDKLAKEQRKLANKQRGSANYEKQRIKVAKVYEKIRNIRLYNLHQISHKLINENQVIVSENLNIESMRQNHNLAKSISDCSWYELTRQLSYKAEWYGREYIKVDRFFASSQLCNCCGYQNKEVKDLSIRQWICPECGTVHDRDVNAAINILNEGLRLLEIA

SEQ ID NO: 14034 - protein, 289 aa, unknown
  TnpB Polypeptide
MCLFRYRYKHRGEVIYFPKKEGLSPLKTNCKEGSVKQVRFIPKADCYSIEVVYESSVKEQLPDNNRIMSIDLGVNNLASIVTNTNSKPVLIDGRKLKSINQYYNKKRSKIQQQLKKTNGKENSRRLMSLTRKRNNKVKDYLHKASKEIINTCLEDNITTLIVGHNDGWKQESNLGKRNNQNFISIPFDMFISMLRYKSERQGLRFVEVNESHTSKCSSFDLESVEHHDTYVGKRIKRGLFRTKDGILLNADVNGSYNIMRKVKGDAVMPPYTGFGYNPVKKFINKYTLK

SEQ ID NO: 14035 - protein, 421 aa, Thaumarchaeota sp.
VVRLLPNGSQERRLRRLASTSAKLFNEVNYERRQQFFHGEKVDLEGTWDKYYERYKGILGVNAQAVLQKNNEAWSSFFSLLKLKREGKLPPHMRRVGPPKYWKDREGKERKLVLVVRQDRYVVDEQNHILILRDFGLEIEFAGGLRWHGKQGRLEIRHDEARNTWYASIPVEVGVETTRNGNESKHIVRGERKSIRMAEPRGNEAAGVDLGINILASAVTSSGAWLLYRGSRAKEDYFYLSRRIAEVQSKADIARNAGDTEEFRRLNRRKRRLFRKLMRRVAHLYWNLANHLVRGLWELGVSRIYLGYPHDIAQERGNKLTVNMWRYRELMDAIELKAQEYGIRVYEVLEYSTSNHCAIHGTKVARGPRGVVTCPLGHRLHSDLNGALNILRRGVGAIPATLKGPLSFLVDHSGVAPVKGA

SEQ ID NO: 14036 - protein, 410 aa, Thaumarchaeota sp.
MPAVGFRFRAHAGQQTLGALKAQLRLACEIYNALRRTDIDFHRRNGRGLTLTELRQLALDLRKRNEGYQQLYSQVAQEIANRFHNARRRFLEGSARRFPRGKKPHKYYSLTYPQNGWRILGVRDIRAGGRNRKKLIKLRLSHLGVFRVIAHRDFPMDRVRRVAVKLAGSGRLYVSFFVEDYEFPRLPRTGGAVAIDVGVEKLLVTSDGEYFPNPRPYKKALGRLRRLQRELSRKRFLSRNWLRTKARLARAHEHLANLRRDTYMKLGRYFAERYDVVVMEDIDVKQLIGESNRALRRGLQDAALGMMRSIIKYQVGKYGKAFRLVDPRDSSRACARCGFVKHDLALHDRAFECPACGWRVDRDYNASLNILRRAGWEPPAAPVELRPLPAAHGRGQCGAVKQEASPFRAG

SEQ ID NO: 14037 - protein, 407 aa, unknown
  TnpB Polypeptide
MEPSTVIQGATSRLYPTKAQAEKIEQWSGACRFVWNRLLERQEKSYKTEGKFLWRADLQKAVVDIKHTEGFEWLNEVPAHSLLQVCANMDKAFRRFVAARKEGRKCGFPKTKKKFVREAGVYCVNQTTAYLGNNRVKLPKLGVVKCRGWRENDGKLLGGTITRRSGGGWLLSVQHVSPAPKYVEPVVEMIGVDLGIKNLATVYDGCSISTIANKRPLKGAMRALRRSHRAMSRRKKGGANRKKAAIKLATIHRKVSDIRKDAIHQLTHALTAKAEVIKVEDLNVKGLQRGIHSRAISDVGMGAVLRQITYKAAWRRRTVVCVDRFFPSSQTCSGCGTIHKEMKKMLPMLKCKCGTVLDRDSNAAINLFWYGEERRNRTVHRATPTETGDQADILPVPVVEVGMPTLV

SEQ ID NO: 14038 - protein, 424 aa, unknown
  TnpB Polypeptide
METSRHIYTKAVRKTFYAIRTSENFNKSSFNTYLQGSYNITRRTASAIISDAQGRFNSFKELKRYEVNQLKHKINHLEEQLIPKLVKKRNDSSKLLQAGTTVSLTKQRNLRLKIVAKKNKLNHLKQKLVNLNYQIESSKIKLCFGTKKLLKQNYDEFIEQRDNQITFVGGKEEVCCNQNLQLTYNRKNNQFSIKLRKDFEKCKSADIRDKFIYGKVYFNHHKNRIISILKNKNSPLSYKIIKKNGRYYICCTFEIQVDTNDFTTCSDYGAIGLDFNKGFITLSETNQHGHLIQTKFLPYRFRAGNKTKTDLQKIANHVTALAYQTGKNICIENLDFKTKKSKTETRQGKKYNDMIHSLAYRQFIDIIESAAYRNKVTLTKVNPAWTSWLAEKLYCPTMKLNVHVGASYVIARRGQGYKDTVKSL

SEQ ID NO: 14039 - protein, 381 aa, unknown
  TnpB Polypeptide
MKHMELTKTIKLQIYTSKDEKTLLLNSMRTYSDACNYVSNYIYTTRDLSQVSVQKHTYEKCRSEYGLPSQMACNVVRTVIGSYKTNKTNGNDWVECKYNTPQMTLSWNRDYSLNQNKFSVGTLHGRIKVDYAKSNMEQYFDKSIYRFGAANVVYKCGKFFLHISVSHEVEESNLSDICNVVGIDRGINFVVATYDSKHKSGFVSGRAIKQKRAHYSKLRKELQKRQTPSARRRLKTIGQRENRWMQDVNHCISKALVESNPKHTLFVLEDLTGIRNVTERVKTKDRYVSVSWSFYDLEQKLIYKAKQNQSTVIKVDPRYTSQCCPVCGHIEKSNRNKKIHLFTCKNCGYKSNDDRIGAMNLYHMGISYLKEAQVPDTVTVE

SEQ ID NO: 14040 - protein, 441 aa, unknown
  TnpB Polypeptide
LKYTTETRLYSKNNEDVIAYFDEVKEQYNYILRKVYYIIRNNPEIKENFLNTELQSKYNISKRTANSIIKTVQGRINSIKELKKTEVKQSQYRLERISKKLEKLTPMLLDLKLKARENDIKDLTKYRNLKTKVAFLKIRKDKLVNKIRSLNHQLETNSFKITFGTKKLLKQSLEEFLNKRDNWMVFLGSKEEPGCNQTFQLKYVPKTNQFIMKVRKDFKYKNIKGEERYVYGKCFFNNHKKLLKEILQSKNSPLTYRIIQRNNKYYLQCIFEINNCNLSLTNNTQGVIGIDFNKGFVAISQTNKYGHLIGIDKMTYRFGSGNKTKNDLLSIINKLTELALKTGKDVIVEDLNFLKTKSKAIKGESREGRKYNKMLHSLAYRMFLDKIEQICNKRNVGLIKVHPAWTSWIAKNKFCDKMKLNVHTGAAFVIARRGMNIKDVV

SEQ ID NO: 14041 - protein, 423 aa, unknown
  TnpB Polypeptide
MTNITLVAESKLYLKDNLSLYNYFDDYSRLFNFLVRRTVHHLRHKLNDEPEPKYRTRLMLEFGITNRMAKAIIKTAKKQLELLKGPSHYQYNRLCKRKRFLQKKIEKLKLSLNSKRLKRRKLAKVRLFWTQMKLNKVNQLISNGFKIHLTFGTRHLLQTNKTKFLAKRDNQVVYIGDKNETCGNQQFQIYFNSKYNRFDYKLRLDNQWVFGSDKYIFGSFVLKNKKAKVNILNTLSKKRSNPLTYRIIKKDGVLYLQIMYRRGTLNITQNTNGVLGVDFNKGFISVSEINQNGKLQSLTRYNYLHKGKATKTKTSMLDLVSKLVAQAVNVGKDIVIEDLTGLDLNKKQNKTTSKIYNNMINSLKFGLFKRCLLSKAAKEGVLVHTVNPYNTSNIAKASYTNKMKLNVHDAASYVIARRFYQYD

SEQ ID NO: 14042 - protein, 394 aa, unknown
  TnpB Polypeptide
MYERKHFTLHRKAKDMSIVNRAIKYRLYPTKEQEIFFAKKFGCVRKVYNLMLSDKIASYQNTGEPCKVTPAMYKEKYPFLKEVDSLALANAWMNLQAAFSNFFGRKRKKKSGFPKFKSFKRSKRAYTTNNKNGTIAILEDSIKLPKIKAVKAEIHRMPDEKWILKSATISQDRDGKYYASVLFAFEEEKPVYKIDTNNAIGLDYASDGLYVDSNGNVGTSHKYYRESHAKLAKAQRRLSRMKGSKKNEKKSSNYMKQLHKVNKIHRHIANQRKDNLHKLSTEIANRYDVVCVEDLNMKAMSNKGFGNGKATMDNGYGSFVSMLDYKLNERGKYFIKVDKWYPSSQLCHACGTLHPEMKDLKIRTMRCDCGLVIGRDQNAAINILNEGLRILAAQ

SEQ ID NO: 14043 - protein, 427 aa, Microcoleus sp.
MQLAERHIIKSTEHRFIEIDVLAFKSKNLYNAANYIIRQSFVYGWGYINYNEMNRLMKSHQAYKELPAKVSQQILMILDKNWKSFFEAVKAYKNNPTKFSGRPKLPKYKDKVKGRNILVYTIQAISSKELKKGIIKLSGTNILIKTQVKPEKICQIRLVPKCDSYVIEVIYNACTQPESTVENKKELVASIDLGLNNLVALTSNQPGFVPLLINGRPLKSINQFYNKRKAQLQSQLKGNRCSSSRLGRLTRCRHQKVNNYLHHTSRQIINLLASEKIGMLVIGKNPQWKNEINLGKKTNQNFVSIPHSRLIEMLKYKAELVGIKVIEQEESYTSKSNFLNLDPIPVYGNIGSQDVTFSGKRIKRGLYRTSCSRLINADVNASYNILRKAIPNAFSDGIGSCVAQPRRVNPLEVKGKGERLDASHVIS

SEQ ID NO: 14044 - protein, 413 aa, unknown
  TnpB Polypeptide
MPDIVKTMKLHIHADKDVQEAFCALTKRYADTCTAISQYVFDHGFILNSLKLQELVYHSVREEFQLKSQFTISAIKTVTARYKTLKEVLSQRPYRYQNENGNWQYISRTLEWLEKPIVFCRPQADFVRGRDYSFVKNGKQTLLSLNTLGDRIKVTFDIPESFRMYFENREWSFGGGKLVQLLGEWYFHISMTRSAEESFSTDKVRHVVGIDRGLRFLVTAYDEKGKTSFIEGNAILKKRDAFQAVRNEVQSRGTKSAKRVLKRISGRENRWMTDVNHRISKTLVQKYGSDTLFVLEDLTGVSFSEENISNRMKSGKRQLRSWAFYQLEQMLTYKAHERSSEVIKIKPDYTSQRCPKCGRIHKENRHHEIHEYICDCCGYRSNDDRIGAMNIQFLGTLWLSGDANPRFGVRKEK

SEQ ID NO: 14045 - protein, 426 aa, unknown
  TnpB Polypeptide
MRYKAIKTRLKLDKDQKIFLLLLMRASKNLYNEALYNVRQHFFNTGMYLTYENNYHLLKTSENYRTLNSSQAQAVIKKVDEAMKAFFGSIKAKSNQKVRLPRYLDKLGYYSLIDRLVYKPKSNYYNLPRGNFIKRISKYFKLSKKDLHLSNSLNLLDELYITIETPKCIIDKQIKEITIKQKFDGKYIYVIHTYIEEDILEDSNLKTETMGIDLGFNNLATCAVTNAKHLLIDGRKLKSLNQWYHKRMSALSSKRPNQHILTNQMIKLIEKRNNQMIYGINKAARLIINHALTNNVGEIIIGYNKDFKDINLSKQYNQMAKSIPLAKLRDRVVYLAKEYGIITKIINESYTSKASYLDNDVLPELDYKKHTFSGKRVKRGLYISKEGISINADLNAALNILRKGNPKTKKLGYSGVNTRKRTYLFG

SEQ ID NO: 14046 - protein, 382 aa, unknown
  TnpB Polypeptide
MIQKGYKYRIYPNKEQKVFLAKHFGSTRFLYNWGLDAKTKHYTNTKKSISWIELNNKIPELKKEYPWLNEINSQSLQMEMRNLDIAFKNFFRNKKGFPKFKKKHDNHKSFQIPQHYKIEEGILYIPKLKEGIKIIQHRLYEGKEKTLTISKNPSGQYFAIILVETTDNIIEPKTVNEKTTIGIDLGIKDFLVTSNGEKISNPKHLKKSEKKLKKAQRKYSHKTKGSNNKNKSRIKVARTHQKITNQRKDFLHKLSSKIISENQTICIEDLAVSNMVKNHKLAKAISDVSWSEFVRQLNYKANWYGKTIISIGRFDPSTKLCHSCGMLNNNLTLSDRQWTCDCGETHDRDINAAINIKNFGLTKVDYPLLKLNTSGTEEINAC

SEQ ID NO: 14047 - protein, 434 aa, Planktothrix sp.
MFGCQQVLIKPDRDLKAVLEFICGESNKLHNCAIYYARQMYFKADKYVKPFDLNNELKRNPHYSALCAQAAQQVCGAVGESVKSFQGLLKLFNEGGLANRPKFPNYRTKNGLHLIAYPKQALGKKLVDGQIAIPLGRRVQTWFGIKNFLLTMPSNLEYSDIRELRILPRNGCFYAEFVYKVDAVDALLDPLKALGIDSGLNNWLTCVSNVGTSFIVDGLHLKSLNRWYNKQISTLKDGKPPGFWSNRLAAITEKRNRLLRDAVNKAARQVIEHCDKNGIGTVVFGWNKGQKDSANMGAKTNQKFVQIPTARLKDRIKQLCEHYGIQFVETEESYTSKASFVDRDELPTFGEKPEGWQAAGKRIKRGLYRTAQNWYINADCNGAANILRKVSMTLGLDLNGVSRGALTRPTRISFWVTAKKTLIGTGLPSLVASA

SEQ ID NO: 14048 - protein, 444 aa, unknown
  TnpB Polypeptide
LEYVLHYVQRTNVFEIRPLDDDGGEILRTLLDASAALWNEITYDRRQLFFDGDNVWDAAGHLDRYKHVLGYANAQQLLRKNKFAWESFFKFLEDPSFEASPPGYWGNEGDGRDLHTVVRHDQYTLQWGERSRLEIPVGQQLKDEYGLGYHERLRLEVVGEPRWHGDPGQLKIQYDGVTDTYRAHQPVTIDETELDSPLASEEAALDVGANNLVACTTTTGTQYLYRGRQLFERFLETTNEIAAYEAEADGQTSTNRILRLYRRRSERRNHAQDALVRDLLGRLYDEGVSRLYVGDLKGVLGSHWSATVNLKTHEFWAFRRFINRLDMVSSEYGIQLIETSEAWTTQECPNCGERDDTTRKGDTFTCESCGFEGHADLKASRLFLERETGSVGSMARPVRLDWDCHQWRPTSSAAEVGHVTSAEDRTNRSTHDVGNIALGETDVT

SEQ ID NO: 14049 - protein, 470 aa, Streptomyces sp.
MAWLRGQIARIEARLARPLAAKADRRAGLVRGYATRTEWHAKSRRLRALQDRLAVLEADWAEGRAHVVRGGKRLARLRNRLEEEGLTRWEWAERWQAARMFLSADGESGKRCGNETIRITGAGEVSVRLPAALAHLANAPHGRYVLGAAVAFAHRAQEWQDRIAADRAVAYRINHDPVRERWYVTASWQRAAAPTLPLRAAMAHGVVGVDMNADHLAVWRLDAHGNPVGSPRRFHYDLSGGAQHRDAQIRHALTRLLHHTRRCGVRAIAVEDLHFTEGVSRENSHANKRFRRMISRFPTARLRDRLVSMAAEQQVVIVAVDPAYTSRWGAQHWRRPLTTANRETTRHDAAAVAIGRRALGHPIRRRAAPPPRDQGDRAGHRTVQAGSDTRGCEGARPRLPGPRTRSVPPGGAAKASDQRAQDRCGHAAEQGVPRDRNAPQLGLWDLGPHPELGLPDEPSGRVGCRPVPGA

SEQ ID NO: 14050 - protein, 269 aa, Bacillus sp.
QLYSRGDKSKKGNLNMRITVDDCGQGWLEIANPLGRTNGKTKSPRIKVPIMIPYRFYHQITNVVMGKQIGVNPKGKPIIEHQKYSVEIIRKQNEFYVNITFDETEIGRVLDFKETPQSDVIAGIDVNPDRIAVSLCTKQGNFKGSKIFYLHNLNAFLTNKRATIIGQIVQQIKTWLLENNVGGIVLEDLKFQQSHDTDKYSNRNFHQFTYKKMLNSLIRMSLRNGFSVKTVNPAYTSVIGKLKYSQNFGISVHEAAAFTIARRGLELQE

SEQ ID NO: 14051 - protein, 429 aa, Selenihalanaerobacter sp.
MRLSFKFKPKLSHNQLEIIKELSWHCSKLYNTVNYQIKNNEDVKPVYTQLEKQFKSNWHNDYLHSHNRQQALKQLAQDWKSFFNSIKDYKKNPSKYKGKPGPPKFKNMDKDPCQIIFTNLATRVRDNKLLLSLSKAIKSKYDVKSLNFELPLAVQSIVDLETSSISNGHSVGNILQQIRIKQDKLSKEWYLLIIYKVEKVKENTNPNIMAIDLGLDNLATLTFKSNTESYIINGKTIKSKNAYFNKEIARLVSIRMKQLGISKIKDTNQIRNLRLKRRNYVKDYLHKASRKIIELAIQHKASTIVIGDIKNIKQGNNLKSFVQIPIQRLVELIEYKAKLEDIKVVKINESYTSGCSAIDLEKLNKSNYDKSRRIKRGLFKTNEDILINSDQNGSLNILRRYLKDKCILRPIKQARDNGFVDNPERIRIA

SEQ ID NO: 14052 - protein, 363 aa, Escherichia sp.
VKRLQAFKFQLRPGDQQECEMRRFAGACRFVFNRALALQNENHEAGNKYIPYGKMASWLVEWKNATETQWLKDSPSQPLQQSLKDLERAYKNFFRKRAAFPRFKKRGQNDAFRYPQGVKLDQENSRIFLPKLGWMRYRNSRQVTGVVKNVTVSQSCGKWYISIQTESEVSTPVHPSASMVGLDAGVAKLATLSDGTVFEPVNSFQKNQKTLARLQRQLSRKVKFSNNWQKQKRKIQRLHSRIANIRRDYLHKVTTTVSKNHAMIVIEDLKVSNMSKSAAGTVSQPGRNVRAKSGLNRSILDQGWYEMRRQLEYKQLWRGGQVLAVPPALRVLWSYSERKSPVTKSIQMPGMWIYSERRCKRRS

SEQ ID NO: 14053 - protein, 406 aa, unknown
  TnpB Polypeptide
MEQTLTHNIAHTIRLYPTESQETFFKKACGCARVAYNYGLSEYQKIRSEGGKPSILKIKEKFNQEKKTLYPWMYETNKDANQQPFSNLQDAFTRFFKHQSRYPKFKKKGIKDSFYISNQVFKTDNKKFWISKLGWVKGAEELRFHGKIMSATVRRKANYWFVIVSVETDKAFTTCENQAVVGVDLGIKTLATLSDGKVAEVLSPLRARLRQLKRLQRWASRKVKRSSNRHKANQRVAKVHYEVACLRKDVLDKLTTYLCENYQTICIEDLDVKNMLKNHCLALAISDVGWGEFRRQLDYKSLLHGNTVIVADKWFPSSKKCSGCGHVKETLLLSEREYVCEHCGLVIDRDLNAAINLMNYALEKLGVACPELTPVDKRALVYSSSIGVDETILYETGIYQGSETST

SEQ ID NO: 14054 - protein, 273 aa, Escherichia sp.
MASWLVEWKNATETQWLKDSPSQPLQQSLKDLERAYKNFFRKRAAFPRFKKRGQNDAFRYPQGVKLDQENSRIFLPKLGWMRYRNSRQVMGVVKNVTVSQPCGKWYISIQTESEVSTPVHPSASMVGLDAGVAKLATLSDGTVFEPVNSFQKNQKTLARLQRQLSRKVKFSNNWQKQKRKIQRLHSRIANIRRDYLHKVTTTVSKNHVMIVIEDLKVSNMSKSAAGTVSQPGRNVRAISGLNRSILDLGWYEMCRQRTQASVARAVVIQRTPM

SEQ ID NO: 14055 - protein, 368 aa, unknown
  TnpB Polypeptide
MIQRAHTIKLKPNKAQSVLLSKTAGTARFAYNWGLAKWNELYEAGEKCDPYTLSRMWTQERPDWALEVYNGSARKALLNLGGAFKAFFQGFRSHPTFHRKGLNDSFYVSNDKAKLYGSKIRLPNIGRVKMTEELRYSDCKIMSYTVRRKADGWYVTISVEIEEDRRTDSESFVGVDVGCKHLAIASDGTICDTPGKLKDLERQLRRRQRLLSRKAKGSKNRQKARLRVSRTFQRIQNIKQDTVHKFTAHIAKNHGTVCLETLDVKDMKEGENKYVRKGVQNSCMSEILRQLKYKCNNFIEVDKYFPSSKTCSNCHSLKADLDLSERVYKCDNCHIELDRDLNAALNLRQEGLRIYTEGHSGSASGETR

SEQ ID NO: 14056 - protein, 346 aa, unknown
  TnpB Polypeptide
MKKKKRFVSGIEFSKWLNNEYIPNNPEYKWIKNVGSKAVKQSIMNGEKAFKRFFKKQSGFPRFKKKKDQNIKAYFPKNNITDWTIERHRIKIPTLKWVRVKEFAYIPTNAKVISGTVSMKVDRYYVSVLIEVEEIIKPQLNNFGLGIDLGLKEFAVISNSIIKPNINKTKRVKRLEKKLKREQTKLSRKYESLKLRNKKEGGTATRQNIQKQIVKVQKIHQTLSNIRENYLNKTVSELVKTKPSYITIEDLNVKGMMKNRHLSKAISKQGFNIFRVKLKNKCNQNGIELRIVDRWYPSSKLCHECGQIKSDLKLSDREYICDCGYHADRDYNASLNLRDVKTYKIA

SEQ ID NO: 14057 - protein, 392 aa, unknown
  TnpB Polypeptide
VPVNCNKKDYDYLMKCNKYSAKVWNACVKADQKNRKKFNKSLTQSELQFMMKKSVPILLANSINFVIIKYVTARDAMWKSIMAKHENSNKVKLPYKEKKFFNTGWTYQNIKIYKDEKYLTLAKPMILNKQKEQRRQKPIKCHLKNIPNNIVEIELVYRNGLKLAIKYKEENKQHLIQSNNESAIDLGEIHSITSIDNNGNVIIITGRKIRSIKRLRNKELAKLRSRQSKCIKGSKQYKKYSKAMQNLKYDTDNKILDAVHKTTKLYLDYCLQNNISIVYYGDLDDCTRNTKIEGRGSRKTRQKLSQWCYGLIMLQLENKLIRSNIKLIKVKEYWTSKRCPCCGNLNSPKGRNYQCNCGYIMHRDVNGAINILNDNSQYKVTKYNNLKYLRIA

SEQ ID NO: 14058 - protein, 392 aa, Limnoraphis sp.
MEQLLTIVCKIQPTPEQAKKLDSTLGAFAMSCNYINTTVNPKIKNKNRIQAEVYKTVRERFKLSANLAVRACARVASNRKTAALKKRPVKAFKPTSADYDAKIFSYREKDQTVSLSTVAGRERVQLILGNYQTGKLKGKTPTSATLSKHRDGKLYIHIQIKDQPPSPKNTDKCLGVDLGRRDLAVTSDGVNWSGENITKVRDRFSRVRASVQKKGTKGAKRLLKRLSGREKRYQTWVNHNISKQIISRAIETEASVAVEDLTGIRNRTNTQPRSQIERRRSNSWAFYQLRTFLEYKGIKVGVEVVAISPRYTSQTCHKCLHIHPEQGKSYRSGKNFKCGNCGWKGDADLNGAKMISIVGQSVSLPVTRNPLSCSLLDSIHRLVRMPLDLSRG

SEQ ID NO: 14059 - protein, 191 aa, Paenibacillus sp.
VQSYTTKYTNGNIAVEGSCLKLPKLGWIRFAHSRSIEGRILSATVRRNAAGKYFVSIVSEVEIQPLRRVAKEIGIDLGLKEFAVCSDGMRVANPKAFRKFEPKLAMWQRRLARRTKGGSNWRKAKQKVAQIHEMIANVRNDFLHQFTTSLIRENQTIRSSRIIKTGGKWNKEVISFYLINPKIYFALISLK

SEQ ID NO: 14060 - protein, 402 aa, unknown
  TnpB Polypeptide
VSRAAVQCFDGGDRHPGNVRTAYRCRAYPDQAQRALLARTFGCVRVVWNRVLAERHRLYHAEGASMSYAASDAALTAMKKDADLAFLGEVSSVPLQQALRHQHKAFCAFFAKRARYPRFKSRYARQSAHYTRSAFSMRGGVLRLAKMGGPLRFIWSWPEVDVTGLDPTMVVVSREPDGRWYVTFAVDGQLPEPLPATGRAVGVDLGIRDFAVTSDGERIANPRHLERKARNLARYQRRLARCRDGSANGAKAKAKVARAHRKVRSARLDFLHRASTRLVRQNDVIVIEDLNVCGMVRNRHLARVISDCGWGEFRRQLAYKCQRYGRRLVVIDRWYPSSKTCVACGHLLAELSLATRHWICPSCGTRHDRDINAAKNILAAGQAVTACGADVSHPGPLRCNRL

SEQ ID NO: 14061 - protein, 387 aa, unknown
  TnpB Polypeptide
MLKGIKIRLYPNETQKNKLWQMFGNNRFVWNQMLGMAKQRYQNNPSSQFVNRYQMDALLKQLKQEYLFLKDSDSSSLQIVNHNLDQAFKMLFKHRGGYPRFKSRRTAKQAYTGKSTISVVAKRYLKLPKLGVMKSSKTNQLTNCKIKRYTLSLEPTGRYYLSIIVDDPNIKPLEKSGAIVGIDMGVADLAITSDGKKYESFKPAYLEKQAKTWQSKFSKRKHRATIAVRQWNHNHKTIKKELENYHNWQRAKRIKACYQAKIANKRKDYLHKVTTELVKNYDVIVMEDLRTKNLLKNHSLAKSIANASWYEFRTMLEYKCNWYKKKLVIVSPNYTSQICSSCGFHSGKKPLQIREWTCPKCGTHHDRDINAAVNILNKGLEKLRARD

SEQ ID NO: 14062 - protein, 395 aa, unknown
  TnpB Polypeptide
VLAVKTIRQNHHASAELLRLLDEFRRMVNVCIAIGTKENVSSLKTLSLKSYHHLSRDILGYYRLCAISTATRILHNHRKANKKKNHRATVPYARRLMLTTCYGFNGLLRLPVKPREYVYVKLNSHTLQVLSGLNVHSVTFTPDALSISFSKDTVEIEPEGYIGVDRNLDNVTTASANGMVKTFDLSKATGIKSTYRFVKSRFKRNYSRTRAQIFSKYGKKQRNRVLPILHNVSKRIVENAKTRRYGIIMERLTGMRRLFQKDNGQSRNYRAKMNSWSYGELQRQIEYKARWEGVKIIYVPARNTSKRCSICGYKTLESTQRRLWCPHCGAILDRDENAARNIAAGGLRFSPNGPPGEAMVEEREPADETLILKVDGGKLSQRARAISPDEDLTEP

SEQ ID NO: 14063 - protein, 368 aa, unknown
  TnpB Polypeptide
MKIIRSIKCSTKFSTNEKKQKLSFILQEYGRVVNIFIDYFWKNSTQSKFELLKPIVDIPKTWLSFRLRKVAAREALDMISSSKERWKNDTEKLVKPVHKGRTMNVSSAIAELQIPWRTVEFDSWLHLASVGDKISINIPIRFHKHYNMFCLKGKRLNSYIITKDYIQFVFEFETGPKKNGKNCIGIDTGINYLASVSTGQQFGSTIKQKIEKIKNSKPGSKGQLRSKRALRQIIDESAKCIMSLEPDLIVVEKLKDLGKNGKLRRRLSKNIRRSIGTWNWKYWLGRLEQQCEWNRVFFRTVSPCYTSQTCSRCGHVDRRNRDGEMFKCQKCGHADNADINASQNILGRFLTGPYGAGYKPLIKSLVKA

SEQ ID NO: 14064 - protein, 434 aa, Okeania sp.
LYGCQQHLINQSPDVMAVLEYICSEANKLTNCGIYYCRQMLFKAGKFLTRGALDKELKSNIHFKAMRSACAQQTLHSVIESFNSYGKLLKLYREEKLHFRAKPPSYRKKGGMEIVTYLAQWVKLIDGQLKFTLGNQVKAWFGIDHFFLPMPSNLEFNSIKEYRILPRNRCFYIEFVYNQQEIEPVEDNGNVLGIDPGLNNWITGVSNTGKSFIIDGKKVKSQNQRYNKQVAKIKTGKPQGYWDDELAEITEKRNRQMRDNINKAARFIVNWCLANNIANIVFGWNPFNKDGINIGSKNNQEFVQIPTAKLKDRISQLSQQYGINLIETEESYTSQASFLDNDFLPKYGEKPKRWKASGKRVKRGLYQSSDGSLINADCNGASNIMRKVRTQLNLDLTKVCKVVLTLPKRYFLDSLSKKYRKRCEGGLKPLTASA

SEQ ID NO: 14065 - protein, 592 aa, Mycolicibacterium sp.
LACSTPRSVDSPEHPTTSRPGPHRDPELRTLDRAAGRQHLEAWLLGDQVEDQPGPAQCAPCRVAPTAGDHGSRGRRHPRLRIPALPAVHEAGSARRRFTDPRLRRRLAVRRLTALGRHHLVTGIPAMSTPATPVIDAAPTMLRAYRFALDPTPAQEQLLRSHCGAARFAYNHMLSVVKANLDQRAAERTYDIPDQELTPSLSWSFYSLRNLWNEIKRDVAPWWPENSKEAYANGIANLATALSNWSTSRAGQRRGRTVRFPRFKSKRARPSCRFTAGGLGLVEHDRRHIRLPKIGVIRTHESTRKLARRVEAGTARIRSATISFERGRWHVAFSVELPTAHIRSHSRQARAVVGVDLGITHLAVLSTPVPGVSDEHGMVANPDHLEKAQKQLRRLQRQAARRRGRDKRTGATPSARWLRTQAQINRLHARIANARADGLHKLTTAVAERFETIVIEDLNVTGMLANHRIARRISGAGWGELRRQLTYKAHDRGGTLVVADRFYPSSKTCSNCGAVKTKLSLSQRIYHCESCSIIFDRDRNAAANLAALATSATGTSSPSCGATENEPDGNPHKTSIAGSRYRHGKSPEGNAA

SEQ ID NO: 14066 - protein, 402 aa, Escherichia sp.
VKRLQAFKFQLRPGGQQECEMRRLAGACRFVFNRALARQNENHEAGNKYIPYGKMASWLVEWKNATGTQWLKDSPSQPLQQSLKDLERAYKNFFRKRAAFPRFKKRGQNDAFRYPQGVKLDQENSRIFLPKLGWMRYRNSRQVTGVVKNVTVSQSCGKWYISIQTESEVSTPAHPSASMVGLDAGVAKLATLSDGTVFEPVNSFQKNQKTLARLQRQLSRKVKFSNNWQKQKRKIQRLHSCIANIRRDYLHKVTTAVSKNHAMIVIEDLKVSNMSKSAAGTVSQPGRNVRAKSGLNRSVLDQGWYEMRRQLEYKQLWRGGQVLAVPPAYTSQRCAYCGHTAKENRLSQSKFRCQVCGYTANADVNGARNILAAGHAVLACGGMVQSGRPLKQEPTEMIQATA

SEQ ID NO: 14067 - protein, 378 aa, unknown
  TnpB Polypeptide
MLKTFKYRLYPTKKQISSLEAVLEECRYLYNRLLEQRKYAWEIQETSLGYRIQQNLLPAIKTARNLHLAHSQVLQNVAVRVDSAFKAFFRRVKAGEKPGYPRFKGKGWYDSITFPQVPSGCRLKDGRLVISKVGQIKIVMHQEMCGKPKTATIRRSSTGKWYVTFNCEVEPQPLPASDEAVGIDVGLYTFAAFSDETQPIENPRFFREEEKALAKAQRKLSQATKGTPERTSRRRVVSRVHERIRFRRDDFSHQESRKIINHYEVICVEDLPVKGMIHNHCLAKSIADAAWSGFFTMLSYKAESAGRKLVKVNPAYTTQDCHRCGHRQKLTLADRIYKCPCCGLHIDRDLNAAKNILRLGMQSLKPDLSGSLEALCFS

SEQ ID NO: 14068 - protein, 200 aa, unknown
  TnpB Polypeptide
MSSKPNSRRVESRSFDFGLKMFLTCSDGTQIESPQFLKQSLNAIKKANRQHSKKRKGSANRERARLNLVRKHENVVNRHSDWFWKLAHDLTNQFDVLCFETLNLKRIQRLWGRKISDLAFGEFLKILEWVATLKGKEVVFIDQWYPSSKTCSSCGHVLKELDLSVREWRCPFCQSVNGRDENAAKNICAVGASTARVRRC

SEQ ID NO: 14069 - protein, 437 aa, Halobacteriales sp.
MLEVHRTHRANIRNHSQVADSLDRHGWSASKLWNVANYHSRNVWEEIGEIPDHRDLKTELKGHTNYNGLHSQSSQRVLEELAEAFNSWYGSDDERDNPPGYRKENYYDSKGRRVHEEHPRSTVTWKQNGIRHDPKNNRVRLSKGANHKEHPRALEYILVEYEIRPGVTVENLQQVRAVYDQQNERWELHLVCKDEIETPTAPGNETAGVDLGICNFAAVAYSTDEADLYPGNRLKQDGYYFPKEIAKCDDAGGDQATRLHHTWSERRTHFFHSLAKHIVQRCVERGVGRINVGNLEGVREDENGDSKNWGRHGNLDLHGWAFDRFTNILEYKAKVEGIEVVEVSERDTSKTCCVCGREDDSQRVERGLYVCEACDAAFNADVNGAENIRLDLNESNSESPPVFDGDRSTGWLAQPAVYLHDLSSGFQPQAQVGDCKP

SEQ ID NO: 14070 - protein, 383 aa, unknown
  TnpB Polypeptide
VNRNCLKIRLYPDRAQERELETTLETCRLVYNSLVNDRKFQYDIAQVSVGRYTQQAYLPKWKKNHPELKVVYSQVLQDVVHRVELAFKAFFERAAKGEKPGFPRFKGTGQYDSITFTQNDSFKVGDSTVRLAKIGQVKAKVHRKPWGELKTCTVRRINGKWFACICQEVEPEPLPPSAEAVGVDVGLKTFAAFSNGEGDNFFIENPRFFRKDEKALAKAQRKLSKQRRGSKERKKARKVVSRIHERIRNRRHDFCHQNARRIVNRFGVIAVEKLSVKNMLGNQKISHCLAKSIADASWSQFRSILTSKAESAGREVIAVNPAYTSQDCSGCGYRPDGLEGRTKKKLSDRWHLCPMCGLSVDRDTNAAVNILTLGQQSLASVKA

SEQ ID NO: 14071 - protein, 299 aa, Escherichia sp.
MVKNLASVFGDKDQVNLHQENSRIFLPKLGWMRYLNSRQVTGVVKNVTVSQSCGKWYISIQTESEVSTPVHPSASMVGLDAGVAKLATLSDGTVFEPVNSFQKNQKKLARLQRQLSRKVKFSNNWQKQERKIQRLHSRIANTRRDYLHKVTTTISKNHAMIVIEDLKVSNMSKSAAGTVSQPGRNVRAKSGLNRSILDQGWYEMRRQLEYKELWRGGQVLAVPPAYTSQRCACCGHTAKENRPSQSKFECQACGYTANADINGARNILAAGHAVLACGGMVQSGRPLKQEPTEMIHATA

SEQ ID NO: 14072 - protein, 403 aa, unknown
  TnpB Polypeptide
MRKINRTYRFRLYPNKVQTNLLEKHFGCARFVYNYFLDQRKEQYRLTGKSDNYYAQAKNLTELKNQEATAWLRDVSAQTLQFSIRCLEAAYINFFQKRAKFPRFKSKRSKNSFTVPSSSSIADNRLFICKFREGIKCRVHRKIKGKIGKVTISKTPSGKYFASVFTEEEYTTPLKKTNKSVGLDLGLKDLVVTSDGETFNNNRYTRKYEQKLAIAQRHLSRKKKGSKGFENQRLKVARLHEKISNSRADYLHKCSISLVRRYDTICIEDLNIKGMVKNHRLAKSISDASWGSFVAMLTYKAEWNGKNVVKVDRYFPSSQTCSACGHINKQIKDLSIREWECPVCHTHHNRDVNAAINIHNFGFNNISAGTVDYTDGEEVRTNLSKGHSSMKSETNESLIHSSS

SEQ ID NO: 14073 - protein, 454 aa, Natronobacterium sp.
MYYSYKYRLEPSDAQREELDRHRDICRQLYNHTRYRLNEYREDHGELPSMTTLRSELPALKKWWDDLSDVYSKVLQTVVERLFDNLSSLSALKQNGYGVGQLKWKPPREFRSFTYNQSGFKLDEKGGQTVLSLSKLADIPIRLHREIPDVHKSDSSCAAHQKSEISEDDAALKQVTLKKEPTGEWFAAFGVEVDREPPEKPDRLKNVVGIDVGILKYAHDTDGHAVESVDLSDERERLEREQRKLSRKEHGSNNYEKQRRRVAECHADLKNKRRDFLHKLSNYYAQEYDLVAVEDLDAKGLVELDGNSRNRAGAAWGTFLQMLEYKCEREGTHFVAVNPRGTTKECAACGVSTKKPLWVREHACPSCGFTADRDWNAAWNILSRGIKQVGAGRSESTSSESPCDSDGLRKSLCDFRTPVESALPTGTTSVPAKRVVEAGSPICSRARSARSHGP

SEQ ID NO: 14074 - protein, 412 aa, Natronobacterium sp.
MTELTKTLELKLVDPNAHKRKKLRETRDAYQQALQDAFDAGCTTQTEANDVVVNYDLSGYAKNALKKYVPQLTTTYNAGDLHDDHPVRFTNEGLRLDHKPENAIEWYVKIPHHEDYHLWMPAQPNPDQRDWLEALNAGDAEMGESRLLQRNGTWYLHVTATRDVEDCSEASVDEQMPIGVDIGEASLVTVCHRDDYGSPTRPELWADEGKTVRQLRKTYFTATRRLQERGSERLAESFGDHLWTQIDDVFHRVTREVVEYAESVENPVLVLEDLTYIRESMDYGEYMNRRLHGWGFAKLHAQIRYKAVEKGIPVKTVNPRNTSKECHACGKVGYRPKQATFKCTNDDCWMGEYQADVNGAINIADRYLSGESRSREHKNDDDSAEDGARLTAPQDSQADAEIQQETLGTYAS

SEQ ID NO: 14075 - protein, 438 aa, Natronobacterium sp.
MGELTKTLELKLVDPNAHKRQKLRETRDAYQQALQEAFAAGCDTQSATNDVVIEYDLSGYAKNALKKYVPQLHNSYDADELHDDHPVRFTNEGLQLDHQPQNALEWYVKIPHHEDYHLWIPAHANPEHREWLEALYADDAEIGESRLFERDGTWYLHVTVTRNVEDQSEASANERTPPDSSESGEPCLAGLDRTPIGVDIGEASLVTVCHRDENGSPVRPQLWADDGKTVRRLRKTYFTATKRLQKRGSERIADSFGDALWDQIGDVFHRVTHEVVEYAESVENPVLVLEDLTYIRENIDYGEYMNRRLHGWGFAKLHAQIRYKAAERGIPVETVDPRNTSKACHACGEHGSRPRQATFKCLNDDCWVGEYQADVNGAINIADRYRSGESHRRSDREDDSRQKAGADDSATDGDSLTGPQDSHADAETQQVTCGTYAS

SEQ ID NO: 14076 - protein, 397 aa, Euryarchaeota sp.
  misc_feature (379)..(381): Xaa can be any naturally occurring amino acid
MMTVSYKVDGGSGQVFRAYKTELDPNREQSMVLIDHADVARFAWNWGLGRKHEVLDLNKLPTVQIKVPTAIDLHRELVVLKKTSHPWLYGVSKCAPQEALRDLDQAFKNLRESGAGWPKFKSKKWAKRSFRLTGHLVVADNAIKLPRVGWVRLKERGYIPQGLRVKSATVSETIGRWFVSVNVDEEREVVQRKVGPIVGVDFGITKLMTVSDGTIVKNPRPLLHMQRKLRRLQRSRDRKVRGSNNRAKASSKQERLHFRVVNVRKDTLHKATTALAKANSVIVVEDLSVRGMMGNRRLARSVADAAFGEARRQLEYKAALFGNQVIIADRWYPSSKRCSRCHHINGREPEDYASYVCNRCGFRANRDWNASLNLEQWPXXXAYQSREVAGRRAGARQ

SEQ ID NO: 14077 - protein, 436 aa, unknown
  TnpB Polypeptide
MKLTGDSKALENTISIYRNSLCFIIPIVDAHWDEVKDFEYSNQRMMYVEKLIHSTIKSDACYNFDEEFPKFPSYLRRAVLNDALGIVSSYHSNLTNWKKESKGQAPQLGLTHYAYPAYYKKNLFRNFDPVRQTIELKVFKNGDWVFETYKLKTSDYSYYQNHLIGKKQNVPVIQKKGRRFYATFSYEENVPLVPEESINKICAVDLGLGTDAPCSIMDQDGTVYARKFISFSEEHDRLHTQLGRIKRNQKRGSRHNKRLWRKVAGISQDIADKTVKAILDFGNEHGVDVFVLEYLDFKGKNAVKRAHFWRYKRIYKVLAQRAHQYGLRIARVNARNTSRLAFDGSGWSKRGREIKPETPYALMEFPSGKTYNADLNASYNIGARYFIRHILKTVTETQRLALEAKVPQVAKRSTCTLSDLINLRSEFVALASKTQA

SEQ ID NO: 14078 - protein, 351 aa, Ruminococcus sp.
  misc_feature (233)..(343): Xaa can be any naturally occurring amino acid
MVKAIKVMLIPNNVQKTKMFQYAGASRFAYNWALAREKENYEKGDKFISDSELRKEFTKLRHSDEYAWLLNISNNVTKQAIKDACTAYKNFFKGLQKFPRFKSRKRSMPKFYQDNVKIQFSNTHVKLEGFSSSRKANKQKKNWVRLAEHERIPTDVKYMNPRISFDGLNWWISVCVEFPDCKETLNDDGVGIDLGIKDLAVCSDAVKYKNINKSQKVKKLEKQKRRLQRSISXXXXXXXXXXXXXXXXXXXXXXXXXXXXXXXXXXXXXXXXXXXXXXXXXXXXXXXXXXXXXXXXXXXXXXXXXXXXXXXXXXXXXXXXXXXXXXXXXXXXXXXXXXXXXXXQDLSVSKI

SEQ ID NO: 14079 - protein, 418 aa, Ruminococcus sp.
  misc_feature (233)..(384): Xaa can be any naturally occurring amino acid
MVKAIKVMLIPNNVQKTKMFQYAGASRFAYNWALAREKESYEKGDKFISDSELRKEFTKLRHSDEYAWLLNISNNVTKQAIKDACTAYKSFFKGLQKFPRFKSRKRSMPKFYQDNVKIQFSNTHVKLEGFSSSRKANKQKKNWVRLAEHGRIPTDVKYMNPRISFDGLNWWISVCVEFPDCKETLNDDGVGIDLGIKDLAVCSDAAKYKNINKSQKVKKLEKQKRRLQRSISXXXXXXXXXXXXXXXXXXXXXXXXXXXXXXXXXXXXXXXXXXXXXXXXXXXXXXXXXXXXXXXXXXXXXXXXXXXXXXXXXXXXXXXXXXXXXXXXXXXXXXXXXXXXXXXXXXXXXXXXXXXXXXXXXXXXXXXXXXXXXXXXXXXXXXXXWNTNAMIKGSSLLWLIGFIHHQSFAAAVETSKKI

SEQ ID NO: 14080 - protein, 465 aa, Variovorax sp.
MWIGHQRFIRNAKTRERDRVRAEGGVPSDNQAYSHLITSETGFLSDVPSQILRNGAFRFYTGLQRFRAGLGGAPKVKSRYGRQSVLVTSELFRFLPLPYAGRSDRQGWVIELGTKANPIGRLSFQAHRAWEMGKQIVISVEPNGKWFVSFSYEGLALEHARPGQLEPRIERSAEELLYEVQGLADLEQRVWSGDRGVKVPLMGCDGKAWDFSDVQKERMARAEIRRRRYQRRMARSPNVKGTDGKMRASAGYRKLKKRAARQTAYCANVRQDFAHKTSHALVNSDARVFAFEDLQIKNMTAAPRPRQDAAGRWARNGSAAKAGLNAAILRSAWGSVRRFTTYKAKKRNKLVYTLPPAFTSQTCAKCGCCDANNRLDQETFHCVGCGHEANADVNAARVLQWLAIEAILRGELPKSETNKRKRVAFARKRETALELERLEVTSVSGDRQSPVEVQASNDADLRISA

SEQ ID NO: 14081 - protein, 407 aa, Streptomyces sp.
MQLRYSFRLYPNAVQQAALARAFGCARVVFNDAVRARENARAAGEPFPKIGELSTRLITQAKTTPEPSWLGEVSAVVLQQSLRDAETAYRNFFASLGSTRKGPRLGAPRFKSRKDHRQSIRFTANARWKITDAGRLDLPKIGAVKVKSSRALPVTPSSVTVIKDAAGRFFASFVIDTDPATDAERLPQTENTIGIDLGLTHFAVMSDGAKIDSPRSLRRAEKKLKKAQKELSRKQKGSKNRARARLKAARAHAKAADARREFHHQLSTKLISENQGIAVEDLSVAGLARTRLAKSVHDAGWSQFINMLTYKAERYGRTLIKISRFEPTSQICSTCGHRDGPKPLSVRQWTCSACGTLHDRDTNAAINVKTAAGLAASACGAPVRPGAIPAQREETGSHGFPTGNRAA

SEQ ID NO: 14082 - protein, 358 aa, unknown
  TnpB Polypeptide
MRRACKVTTKFITEKKKRALATLLQAYRAAVNFYINSLWIAPGRLDKDTLARLQNTRLSERYKSNALKQALETVVATKRSAHELGKTASCPVFNGSAILDSKFVSIEQGEKSFDLVVKISSLKKGDRITIPTRKTRPINKWLSQDGKFIQGCCFSENHLIIWIECKTEDIKPTGKIIGIDQGVNKLLADSDGAFYGKDFIPLRDKIKRRVPGSKGKLRAIRERENFINRNLNHIPWNDLKILGMEDLKNLKRGKRKDRGKDFRKAMTPWTYRRVLNRAQAKAEENRVRLVLVPPANTSRTCPICRVVSKKSRVGENFRCIACGHTQDADTVGALNVLALTIELTRSVESLVLPEVKSS

SEQ ID NO: 14083 - protein, 374 aa, unknown
  TnpB Polypeptide
MAKHAGYARVAFNFALSSFKAGLDTDEWRSYVDIKREFNAVKYDKFDWCKELSQNASKNAIHNLGDAVTRWKKGQNKFPVYKNRSGKCSYQADNGEGTIEVHKKRINLPKIGWVRMREELRYSGEITKVVISKHNDKWFASITVRRLDSSNYQHQSAMFDDTKAPIGIDVGINTLATCSNGDTYDNPRPLQRYLRKLARANRRFSRRQKGSQNWYKAKKRLSGVHDRIANIRSDAHHQATLRIVRKASAIGIETLNISGMIKNRKIAKALSDSALGGFLTKLKYKADRRGIPIDAADQFFASSKTCSNCGHKKKDLTLSDRTYHCNACGFEADRDLNAAINLCPTSPFNRRHELRGDVKRLWSPCETSFGGSGR

SEQ ID NO: 14084 - protein, 411 aa, unknown
  TnpB Polypeptide
MIDLSEMEQVITAKLKLHLNKEQKQSLLETLAAFNNSMNHLLQVNYNDKSTSVKTIHKNYYHQIRNEFNLPSQLACAATRAVSNIYKTLWTRFKSQKDKAVLNKIPHYNQLTANYTLNRDITIKLENMECSITTIDGRLKNVKLTGWNQHYKQIKQGKLCDPKITYDKRTKIFYLLLPVSLEIQEQKPKQIVGIDAGQRTTLTCVSTTNEIKIYNISEAIRERKAKLSKQRGTLMSKGTRPSRRKLLALKGRERRLISDVSHCISKSVVSDFQGSKLIMEDLTNIRSNTKTYRKDKEQRRQVEQWNFAEMQFKMCYKSILYNGIESIKVNPAYTSQKCPVCLSISSKNRVNGSKEFKCINCGHEEDADIVGSRNILSTGLLVNQPNGSLSVNVRESLRIPGTSSHAKAWSY

SEQ ID NO: 14085 - protein, 443 aa, unknown
  TnpB Polypeptide
VQQVDAVRAEGGSGSHPAILAGRRYRLYLTPAQDEKATRVAGCCRAVYNAALEQRELAWRMRRQAVWGVQQMAELPELKRSDGFEWLAEDGIAQSLQQTLRDLDVAYRRWLRGEGGRPRFKRKAAGESFRLPQGRNLPIRKLNRRWAEVRLPKLGWCRFRLTRPIGGEIRHATVTRDPLGWHVSFCVALNQQPARANGGPPVGVDRGVATTVALSTGELHSCPTLRGGQAERLRKLCRKAGRQETLRRRRPNQQRRRSKRHQRTLDQLAGLRAREARIRYGWLHKLSTELATSHGMIAIEDLRVRNMTRSAKGTLAEPGVKVNAKTGLNRSVLAQGWGELRRQLQYKTVWYGSQLAEVPAQHSSQTCSACGVVHAESRESQARFLCIACGHAEHADVNAARVILARAAQGHEDGGRTWPLQRGEPSRRWPGLRTANHPAGKAA

SEQ ID NO: 14086 - protein, 274 aa, Stygiolobus sp.
MPKEEIVEAKILDYGKLKTIYSSIQFARAYAKIVKDGPPPRDIPKELYYQALQSNEIRYGPLKVINNGNLIKIAEVNALVKSDREGIPLYAIVDFTDGIKVYLAYEKPKTVVGVDIGVRHLFTIVAIRGTTAWKVRYWGNEVIINEMIKILGDPQGLPELKNMRSKIKGIVDEVVKFIDELEPKVVALEDLKLFEGKAGQALRVVEEMLEEKLYNAGIRYRRLSPFNTSKICSKCGYKKGEIMGPLFVCPSCGFKSERDYNAAYNLALQCYYQC

SEQ ID NO: 14087 - protein, 518 aa, Stygiolobus sp.
MPRKRTRKKGLKRTVIVEIIVDERIHDVLLSIANILAMAYNEINYMRRKLFFDKELTPEAMRQTYNEVYRKYADEYKTADGHCLLGSNTLQAVLNLSDDNWRAFFMLLKEKEVLPSWFEVNPPGYSKSGKRRIPFIRLKSRQWELSGDTIIIKGVPAFGLRAVLKIKGRVHWSGERGELMLRYDIDRKKWYAYMQFYGTEKLYSDGWRTVPLPLPGSGIAGIDLGVNNLFAVYGITSDGKHVSALFNGRPLKSIWFYWKHKISMLQSLLSGLRTSRRLRLMHRKAKMQMKNYIDRQIRKLYRWLREHGIGTVVVGLPHDIAHEKGNEYTERIWMYGYILKRLKEVAEEEGMEIRLVPESYTSSTCPLHGKDCGKRILRGLFKCTKLGKVFNADLTAAYNILVRGISITPSPRKRDRGNGLKTQPEAESKKCGSKPPRSGGNSRPLGWGGGQLASETLMYTSSYYAMKYSLLKTCLKRLVGSFVYFQALPLNIVGVDGSPVRAIAMMSEKEIREEIMAF

SEQ ID NO: 14088 - protein, 367 aa, unknown
  TnpB Polypeptide
MTKKSYKFRLYPNEEQKEMFTKTFGCARAIWNMMLADKIKYYEETGEFLNNTPAQYKKEYPWLKEVDSLALANAQLNLQKAYKSFFRSGFGFPRYKAKRYRQSYKTNNQNGTLVVENGKVKLPKIGWVKVRLHRKILGTIKSATISMSTTGKYYISILCEAEISPSQKTGSSVGIDLGLENFAILSTGEKIGNKRFLKGLSKKLAKEQKILSRRASIAKNSGRKLSESRNYQKQRIKVAKIHEKIANKRKDFLDKLSTEIIKNHDVICIEDLSSKNLMKNHKLAKAIGDVSWSEFVRMLEYKADWYGKTISKISRWYPSSQICSDCGYSTGKKALSIREWTCSNCGSHHDRDINASLNILYEGLRLV

SEQ ID NO: 14089 - protein, 413 aa, unknown
  TnpB Polypeptide
VKINRAYRVELDPNNVQRTALLRHAGCARWAYNWGLRRKIEEYETHGKSPGAMALHRDLNALKKTATEDGGVPWMYEVSKCAPQEALRDLDRAFQHFFRRCKQGDKRKGFPRFKSRKRGIGGFRLTGTIKVTEDGRHVQLPKLGLLRVKERGYLPGPDGDGVRILSATVTEQAGHWFVSLAVEQEIADAEQRPTGDTVGVDVGIKTLATVSDGRTFDNPKSLRGAEARLRRLQKAVSRKQRGSNNRKKAVEQLRRQHYRVTCIRRDSIHKATSAITKSASAIGIETLNVKGMMQNRRLSKALSDASLSEFLRQIEYKARWRGAVVVKADRFYPSSKTCSGCGSVKSDLTLGDRTYRCESCGLVIGRDLNAALNLRALAVSSTVTACGEDVRPNPPLGVGDAASLKQEPNSRAA

SEQ ID NO: 14090 - protein, 279 aa, Okeania sp.
MKSIRTKLKLNNQQKTLMAQHAGYSRWCYNWGLSLWNAAYIDGYKPNSRKLREVFTNHTKPLYPWMKNLSSKVYQYAFINLGEAFKRFFQGLGKRPRFKKKGKSDSFTIDNCGKPIELNGWNHKLPFIGIVKTYEPIEATTKKITISRQAGDWYLSCSYEFTPTSTPKTTEVVGVDLGIKTLATLSTGEVFKSIKPYKKAQNRLAKLQRQLSKKVKHSRNWYKAVVKLAKQHRRVANIRKDALDKLTTYLAKNHGTVVIEDLNVSGMLANHKLAKSVSR

SEQ ID NO: 14091 - protein, 441 aa, Okeania sp.
VCDELAFKSKNLYNLANYYCRQHFFRSSKSLDLTKLYHATKDSDAYRSLPTKVSKQIIKCLVATWRGYFQAIKEWSKHPGKFLGKPKIPKYKDKTKGRNVVIYSKESVYKAPLKDGICHLSMSDIKIPVVVETVIEVRIVPATSCYIIEVVYEKTLQPQIHSTSVAGIDLGIDRLVALSTNKPGVKPMLVNGKPLKSVNQLYNKRKAKYQSHLKGNRKTSRKIEALTYHRNRFVENYLHNTSKLVVNYLVTNNIGTVVIGKNENWKQCADIGKKNNQNFTQIPHSKLIQQITYKCQLAGIKVIETEESYTSKTSALDLELPCQQENYVGKRVKRGLFRSATGKVINADINGSICDNQKEIPRGFYCRGNSELCRERLYWLIQYQDKSSDRFSTVFFVRSHRSLDRRSHGEESALIRAAPLLAQLCEAQTPGSDRACAQRYN

SEQ ID NO: 14092 - protein, 411 aa, Okeania sp.
LYRAIKVRIYPNPQQCQKLTQVMGAARWRWNYALNLSNQTYKETGKGLTQIALNQVLPLLKKSEETAWLKECYSQVLQSTTLNLTKAFKNFFEGRAKYPRFKSYHGRQSAQYPQNCQVVENGVKIPQVGVIKASIHRLFDGQLKTVTITKTPTRKYYASLLFDTKQETPEVVVTGKVIGIDLGLKDFCITHNGEKVSKYANPKHFKKHQKNLARKQAKLARNNIGSKSRQKARKLVARVHERISNTRQDFLHKLSRKIVNDNQVVVVENLNIKGMVCNHNLAQAISDVGWGMFINFLDYKLQQKGGLLVKIDRFFPSSKTCSNCLYQISELPLDMREWTCPSCRTHHDRDENVSKNIRSENIRQLYGLGRTAAVRAASRREGGEVRPKGGRKSVLRHSPVSSEAPQRSKLR

SEQ ID NO: 14093 - protein, 408 aa, unknown
  TnpB Polypeptide
MKRLQAYMFELRPDGAQLRDMRRFAGACRFVFNKALAWQKDRYAADNTARFSYVVLANFLPLWKREKETAWLKDSPSQSLQQTLKDLEKGYKNFFARRAGFPRFRKKGQSERFRYPQGYKLDQANSRIFLPKLGWIRYRNSREVQGVVKNVTVSGRHGKWFMSIQTEREVDTPVHPSTTAVGIDMGIARFATLSDASYYAPLNSFRRCENALAKAQRAMSRKQKFSSNWKKAKARVQKIHARIGNARRDYLHKATTTISQNHAMVCIEDLQVRNMSRSAAGTIEAPGKNVRAKSGLNKSILDQGWYEFRRQLDYKLAWNGGQLIAVPPRNTSRTCPRCEHVSNDNRKTQAQFLCVECGLEENADLVGAINVLRAGHARLACADTSPAVEASGQEPTEATQAARAAAAL

SEQ ID NO: 14094 - protein, 446 aa, unknown
  TnpB Polypeptide
VKVTQAYRFALAPSPVQEQLLRSHAGAARFAWNWGLAKCGERHRVEGKWYSGPELHRLWNTEKKADPALAWWRENSKCAYQEAFRDLDRALRGFVKSKRGERKGRRLGFPQFKKRGKCRDSFRFSTGAIRCAGRTVTLPRLGTVKTHESTRKLARRLGAGTARILSATVSRTAQRWFVSFTAEVERSIPDHHAQPGSAIGIDLGVKTLLTGTDDRGNVVIIPGPRPLSTALRKLRRASRTHSRKQPGSANRRKAAARLARIHAKVRNVRADALHKATSMLAARYQTVVAEDLNVAGMARNRRLARVISDQGFGQARRMLGYKTAWNGGTLVLADRFYPSSKICSVCGTVKTKLSLSERTYLCWACGLVIGRDVNAARNLLNLAASGTERLNACGGVVRPGTAGHALVKQEPGTAPAGETGTAAWQRTATGEGTLMRTHPVTVGGQL

SEQ ID NO: 14095 - protein, 362 aa, Bacillus sp.
MQLTIVLELLQPTKRKEAMMFFNVNEVAKNRREIVKELKEGNTKLSSANFKHSRLPSAVKNQNIREVKVLYRLFQKSESKKENLNFEDNQPVCFNNQNFKVDGHMISFPLYDDKVQRFAFPVKKTERFTLLNEYVDNGAEIGKASLFYRRHKWYFAVTIKIETNKSTHQNVMGIDIGLRQLAVASVVNEQGHELNRTFHNGKQVGFIRKKYRSLRRKLGKVKQPKLIKRLGDKEQRWMTDKNHQISRQLINLAVQEQVGVIVMEKLKNIRQTVRSLRRADRSLHNWAFYELQSFIEYKAKLAGMTVVYMNPKYTSQRCSSCGVVKKQQRKRNVYDCTCGHHIHADLNASRNIAQLYNEQQSA

SEQ ID NO: 14096 - protein, 428 aa, unknown
  TnpB Polypeptide
MQLVEQHVISRSDPRYAVIDAAAFASKNLYNAANYELRQAFLHEGCFLSYPQLDKLMQSHEAYRALPAKVAQWVLKGLVKNWQSFKQARESYEHDPSKFLGRPGLPKYKHKSEGRNLLVYTIQALSKKALKRDLIRPSQLSIEVQTRHAAHVEQVRIIPRKGYYVVEVIYEKAVTQAPVNAAYYAGIDLGVNNLVTLASNKPGFQPLVINGRPVKSTNQFYNKRKAKLQQQLGHTGTTKRMERLTTKRNRRIDHYLHTASKRVIEILVREGIGTLVIGKNDGWKQDIEMGKRNNQNFVQIPHARFIHMLTYKAELVGITVLLTEESYTSKASFLDRDPLPAHTNGDEKQYNTFSGRRIERGLYRTSNGRYINADLNGAYNIIRKVAPDAFPQAEGVEDGKGMLASLVVHPVRVAIPLTKPKSRRSIER

SEQ ID NO: 14097 - protein, 371 aa, unknown
  TnpB Polypeptide
MKLSETVKLYLSKEQKDLLVRTMNEYIHTVNRLVSLSVNGTSISKFTSADVMADLPSAMKNQCIRDAKSVVNKYSKAVRKYKLLKKKAEKEKSDVVIREPRVSVLRKPCCFVNNQNFKIDGDYICFPVLVDGKSKRISVSSSMTDKQKQIFSNAKLGTMRIVFKGHKIVAQVVYEAVEPQPSDEGNVMGVDLGIKCPAVSYSSDGSVKFYGNGRKNKYMRRQFNSCRKKLQKAKHIKAVKRSKDKEQRIMKDTDHKISRAIVNTAVSHKVKTIKMEKLANIRSTTRRSRKNNHSLHTWSFYRLAELIEYKAKLAGIKVEYVDPAYTSQRCPVCGHVHHATDRNYTCKCGFHIHRDILGAMNICNSTRYVGG

SEQ ID NO: 14098 - protein, 399 aa, Frankia sp.
LRRTFKFQLRPTARQAVALVVMLDDHRDLYNAALRERRDAYRHPSKTRVRYGDQSAQLKEIRAYDPGQARWSFSSQQATLRRLDRAFTAFFRRVKAGETPGYPRFKGAGWFDTVDWPKDGDGCRWDSQPDNPTQTFVRLQGVGHVKVNQHRPVAGVVKTVSVKREGRRWYVVLSCDGVPAEPLPPTGAVVGVDLGIASLATTSHGRHYGNPQFLERAAGRLADAQRDLSRKKRGSNRRGRAVARVAGLHREVGRQRADLAHKTALGLVRDHDLVAHEALNIKGMVRRAKARPDPDDPGVFLPNGQAAKSGLNRSIHDAGWGVFLGILHAKAESAGRTVVPVPALNTSRTCAECGHCAAGNRTTQAVFACVACGHTAHADVNAAVNILRAGLARQVAQAA

SEQ ID NO: 14099 - protein, 394 aa, Frankia sp.
ISRFRLYPDAAQVEALLAQCGHARYVWNLGHEQRAAYRPGRGPTPGYHEQARQLTEARAEHAWLAAGSQIVQQQALRDLDQAWRNFFNGTHRRPGFRRQGVHEGFRIVGPAASRVRQDNGRWASVLVPKVGWVRFRRSRPVPAAKSYRVRRDRAGRWHIAFAAIPDPIGPPGTGSVVGVDRGVAVSAALSTGELLFCPGLRPGEVKRLRWLQRRAARARRGSNRRGRIKGQIARLKAREADRRRDWVEKTSTGLARRYDVIRVEELNIRGMTRSARGTVAAPGRNVAGKAGLNRGILAHGWGLLVRRLEQKAPGRVERVPAAYTSQRCSACGHTAPGNRESQAVFRCVACGHTAHADVNAAVNIAAGRAVTARGGMALAVPANREPQQHELLFG

SEQ ID NO: 14100 - protein, 500 aa, Frankia sp.
MGAAPADAAKYDGDRKRPHIEARFTRSVNSAELGHRRAEVDADTKHDSFAGFEHRRVEHATPVLRHEDQANVERGEHMPTTSVVVGHLHRSNKVGGMPLVRYRYRAYQSPGQALALARAFGCARVVYNDCIRLRDAAHAAGERLSDAEVQRRVVTLAKRTPERVWLGEVSSVVLVQACQDARRAFGNWFGSLSGRRRGRRVGHPRFRSRKDNRQSIRLTRNGFGVTTRGVRIARVGEVALVWSRELPSVPSSVTVIREADGRYHVSFVVNVVDEPYPVVSGDVGIDLGLGRLATLSTGEVVANPRYLRSKQRRLARAQRALARKRKGSANRRKAVRRVAVLHRKVRETRRDHHHKLAARLVRDNQAVYVEDLAVSGLARSRLARSVHDAGWASLLGLIEEKAARRGRIVVRVGRFFPSSQVCSACGVKDGPKPLAVREWVCPACVTKHDRDLNAARNILFEGRRIVAAGRAETENACGADVRPDPVPAVGVEAGTLRGAA

SEQ ID NO: 14101 - protein, 319 aa, Methanomassiliicoccus sp.
MMRTVKVKLNLDEGQKISLLRTMEAYTDAFDRAAKWGYQNKVKNKFAMHGAIYHSLREDVPTMGASMIQSAMYAACEALRGCRIMKEPQRRKHAAVRYPWKEARVWFESGKVSISSVDGRVRATFVQSDWSRSYSDWTIKASILTYDKEARTFYLGVIVEKKNAPETQPGEVLGIDRGLNNLAVCSNNMFFDSARVNGVRGRYAKNKAELQAKGTRSAKRRLRQQAGRERRFMACENHRISKTIVNTDFSVFALEDLKYINTNRWLNKGMRRKMSGWAYYQLEWDIRYKAEALGKQVILVDATCTSQWCSRCGWIDKAS

SEQ ID NO: 14102 - protein, 365 aa, unknown
  TnpB Polypeptide
MKSTLQLQLFPAADHAARLKVTVERFNQAADWLAGEAFDRKVANKIELQKTHYGQLRERFGLSAQMAVRCIAQVCEAYKRDKAKRPRFRKHAAMPFDQRMMSFKGVDRVSLLALDGRVIVPFVMGKYQAERFTNAKGQADLVLREDCKWFLLVTVDLPEAAPTPSTDFIGVDLGLAVIATDSDGNAHSGKAVEVIRRKHNLQRKRLQKRNTKGAKKKLKRIVGKEARFRKAENHRISKTIVGLARDTSRGIAVEDLTGIRDRTTGWAKDARNRLGGWGFAQLRSFLEYKARLAGVFVMTVDPRYTSQTCSSCGHCCRDNRKSQAKFLCVSCGLSMNADQNAALNIKFKAQAASKTALELAGDSIL

SEQ ID NO: 14103 - protein, 428 aa, Bifidobacterium sp.
MLKGIDVALDPTPTQERLMRQHAGAARFAYNAALAHIKACLDRHEKTGWSYYGLRRWWNGNKDVLAPWWKENSKEAYNTGLEALSNGLTNWWKSKTGQRKGRRVGFPKFKKRTKAKRRFTYTTGVFGIIEGDPYGLKLPRIGRVHCMENMLLRTKGGKVTRMTVSYHGNRWHAALTVDVSETVAPRRKPEGSVGVDLGIKTLATMSDGTVECNERFLRKAQDMLRHEHRALSRKQYGSNRYRKQQSRLGRVENHVANQRRDRLDKLTTRLANTYADIHIEDLNVQGMMGNHKLAKDIADAAFGTIRTMLTYKTAQTGSRLHIIDHWYPSSKTCSNCGAVKATLSLNERTYHCEHCGYTIDRDLNAAINIKNHVAPSAEETVNARGGNVRRDSPRVAVRNPVKREPSSSDRCVGLGVSAGNGGMLTKTN

SEQ ID NO: 14104 - protein, 426 aa, Bifidobacterium sp.
MLEAVKVVLDPTPRQERLLEGHAGAARFAYNLMLSHVRSQLARGGKADWSMYAMRRWWNEWKNEIAPWWAEYSKEAYNSAFESLAAALKNHFDSKTGGRKGKRMGWPRFRSRRRTTPRFVYTTGSFGLVEGDPKRLKLPRVGRVHCMEDIGRRVGDAKVVRMSVSKRAGRWYASLTVERDAPTAPAAPRGGGVGVDLGVRALATLSDGTVVPNPRHMSGSLLRLAHAQRVLSRRREGSNRWRKVRTRVQRIHARIADQRRDGLHKLTDMLTRTYRDISIEDLNVEGMVSNHRLARAVSDCGFAELRRQLAYKSARTGAAIHVIDRWYPSSKTCSNCGTVKAKLSLSERVYHCDKCGLDMDRDLNAAINIMVAGSAPETLNARGGDVRRDRRKPAARTPAKREPSSGASRVRLGAGLGNETMQTTTN

SEQ ID NO: 14105 - protein, 386 aa, Shigella sp.
  misc_feature (332)..(380): Xaa can be any naturally occurring amino acid
VKRLQAFKFQLRPGGQQECEMRRFAGACRFVFNRALARQNENHEAGNKYIPYGKMASWLVEWKNATETQWLKDSPSQPLQQSLKDLERAYKNFFRKRAAFPRFKKRGQNDVFRYPQGVKLDQENSRIFLPKLGWMRYRNSRQVTGVVKNVTVSQSCGTWYISIQTESEVSTPAHPSASMVGLDAGVAKLATLSDGTVFEPVNSFQKNQKKLARLQRQLSRKVKFSNNWQKQKRKIQRLHSCIANIRRDYLHKVTTTVSKNHAMIVIEDLKVSNMSKSAAGTVSQPGRNVRAKSGLNRSILDQGWYEMHRQLEYKQLWRGGQVLAVPPAYTSXXXXXXXXXXXXXXXXXXXXXXXXXXXXXXXXXXXXXXXXXXXXXXXXXIQRTPM

SEQ ID NO: 14106 - protein, 402 aa, Staphylococcus sp.
MKKTENKFYRGITLKVNPTQEQEELMWKHVNHSRFIYNYMLERYWKALDNGKYIDHKNMISILKEIKNDDKYSFLNEVSRKTLVGKIDDLRETLIKYHNHEIRKPKFKSKKRESKRFPIRYDRMHFNKEKHVKVEKLGYLRISNGTYKNNKSVLENESIKPLNPKCYYDGKYWYISFSIEVDNQYKKEKDNTNEVIGIDLGSGKKHVICSNRKIYGNIIYSKKMKRLEKKLADLQKRLSNKYDINHTKTNNVLKLENKIAKVYRKMSNIRKNHVHEITKEIVEKYPKEIIVEDIRVRDLIKDKGYTGQKRKQIQFSNFYMIRQQLQYKCEDRGIKFTVASTYYPSSQICSNCGERKRNALKLQLGDKVFKCNACGYEEDRDINASINLKNYHNSQWLKEQNQ

SEQ ID NO: 14107 - protein, 427 aa, Staphylococcus sp.
MLEEKYKSISIRLLPTKEQEELMWKHVHASRFIYNWGLYTWEDMYKKNEKPSSNKIAKKLKHLKSGKKWLYTISNKTLVKTLQDLEKNYKMYFSGISKLPRYKSKKTSAYTFPIRTDKPNGLNTTPMPYINLKNKTISIEKLGKITLSNSYTRFNIDFSNIYFYSSRVVYDGKYWYVKLNYKVKPRKTRELTNETIGIDLGIKTLATCSNGKSYKNINKSSKVKKLEKKLSRLQRQVSRKYEMNKDYLTGCLLDKNGKPKINKSNGEVIQKYVRRTKNIIKLEREIKLLYRKLKNIRNTHIHTMTKEIVEQLPQEIVIEDLKVNNLRKNKHLSKHINEVKWYEIRRQLIYKCEDRGILLTVANTYYPSSQTCSCCGNRLTKQDKLSLKDRNYKCKECNTNLDRDYNASINLKNYRYSKWYQDNIISQ

SEQ ID NO: 14108 - protein, 425 aa, Halococcus sp.
MSETDEELLRRVMDATASLWNELTYERRQQFFDGETVWETEDYRKRYIGVLGSASAQQAIRKNDQAWKGFFNSDEPDKGLPGYWGNEEDGRDLRWYGRNDQYTIQWGERSRLEIPIGKGLKDEYDLTGRLRLEVRGDPRWGGEQGQLEIQYDEQRDQFRAYQPVEVADSHPRLGAPLADESAALDIGANNLVACTTTTGKQFLYAGRDQFERFRATTREIARLQSKLREGRYTSKRIRRLYRKRIKRRDHMQDALARDLMERLCDEGVSTVYVGALTDVLETHWSVRANEKTHNFWAFRAFIDRLETTAEEFGIEVIERTEAWTSQECPRCGSTERTTRHQDTLTCECGFEGHADLVASKTFLQRHAMVARPMARPVRFEWDAHEWAESSHSHESPKEARTNPQVASGGWGANARRDPTGGIPRL

SEQ ID NO: 14109 - protein, 461 aa, Pelotomaculum sp.
MEKLLTTHQLAKLLNVWPETLRRWEREGKLIPLRTPGGHRRYKESQVLALIGKEITEKGANRCAVYARVSTAKQAEAGNLQRQKERLIAYAVEKGYQIKAVYTEIASGLNENRRELAKLAKTATKGEIEVIVIENKERLARFGYKYLEQYCRSCGVEIDIVELGEEKSPQEELVEDMIAIVTNRISVLIYLAHKPSQKTGLINGRNYRQMVLDYLKTGGAYQVEIIRENSRYYIHVTIEEEIPVPYIPHSGVIGVDTNPDGLGIARADCLGQFKESLWLPQGEWTYARSTRRDNLIGEAAALVVDMAKQLNCALAVEDLKFKNDKSVTAKFNRMSHSFVWSRFLQALERRAAREGVPLAKVPPPFTSIIGILKYQQQYGISNHEAAAYTIARRGLGYGKEKVPKQLIQRFIKERDAFMFLANWKQWSSIKKAAVAAVKKLTKRKVKSLVSWQHYRKQLLAG

SEQ ID NO: 14110 - protein, 523 aa, unknown
  TnpB Polypeptide
MSTIKHDTFTNKGKINNLEPLWSHYSILLNKFIKNMNFNLVKGNDVNKLANPKPYQDDINVLYNNTIRRYNKNLEKGKEQKPLEEVLQDITNNAIVTPLSARYAQCCYQQAYESYTSWTALISNRIKEYLGSSSVDDVLVDGQPLLTTCYRINKNHLWYNNPKLEWAYGDNGELIVPTKKHKPKVKLVVPDEIMKFMRRLVKQARKSISLPNLSKVRTLKLNEKVAKLEVTKNAHHVNYWLKLSTLDKYKTICIPLKNNPYYDRLLATGKRVHFVQIALKEGKLTVSPILAHNKVPLRTNSDELGLDFGMVTMFTTSNGERHGITTFTKLKIWDELLLARTKELQAQGIKLSSDPYYNSLQSRIRSFVKNEIGRILNKLANKGYAVFIVEKLDFRYTNLSKQMNRLISRTYRKTVKEKLARLEETHGITTVEVNAAYTSQECSKCSFVSKKNRKSQSLFKCTCCNHSVNADVNAARNIIKRRSFDVELRTYAREHKVSITRCLILEKLLQKHKCGNHLASCHL

SEQ ID NO: 14111 - protein, 394 aa, unknown
  TnpB Polypeptide
MLTATKIRIYPNTIQAEALAKAFGCARWLWNNSLSKTQTVYRETGKGLSQFALNNRLPELKKEYPWLAETHSQVLQAVSLNMSRAFVNFFERRAKYPKFKSKHGKQSIQYPQGVKLVDGCKIFLPKIGNVKAVIHREIVGTVKTVTVSLNRAGQYFASVLAEDGIVNPKVSFDGKIIGVDVGLAHIAVTSDGFKFENPKHLARAAKNLKRKQQKLSRKEKGSNNRNKAKLLVAKAHGHVACARKDFLHKLSRHIVDENQVIAVEDLNVKGMMANHCLSKAIGDASWNMLTSFLKYKAAKVGKGFIEVNRFFPSSKMCSCCMHAQASMPLNIRSWRCDKCGTLHDRDVNAAQNIRQEAQRMIAAGIAGTANGGTVRLGKGRKSSVLVRAVEVGSL

SEQ ID NO: 14112 - protein, 457 aa, Frankia sp.
VSATVQAYRFALDPTPAQFAAMSRHAGAARFAFNWGLSRVKAAVEQRAAEASYGVPEAERTPVPWTMPTLRREWNRAKGDVAPWWSECSKEAYSAGLDRLARGLKAFSDSRTGRRKGRRVGFPRFKKRGRARDGFRYTTGAYGPAGDRHVTLPRVGRVKVHEPMTALTARLADGRARLLGATVSRTAGCWYVSFTVEVERPVPAGPSRRQRRGDAVGVDLGVKHLAVLSTGEMVDNPKHLAASLRKLRRVSRAYARSKRGSAGRRQRAARLAKIHARVANQRRDGLHKLTTRLATSHDVIVIEDLNVAGMVRNRRLARAVSDTGMAEVRRQLTYKTTWYGSRLVVADRWYPSSRTCSACGWRNPSLTLSDRTFVCKDCGLSMDRDLNASYNLRALTGAGVAGYPDVPVTSNARGADRKTHLGGQVAVKREPGTATAGQTGTLAPRGTTAEQVSANAH

SEQ ID NO: 14113 - protein, 212 aa, Burkholderia sp.
MAGRKGVQLTGSFARCPMCRPAPIRSGVGIDLGLKDFATLSTGEKLPNDRFGRRAAEKLANAQRARKHKRHIAKLHAKVANARADFQHKVALDLVRRFDYIAVGNVSAAKLARTRMAKSVYDASWSSFRNKLRYKAMAHGATFEEVDERGSTQSCSACGSQDSTARPKGIAGLRVREWACSDCGVEHDRDTNAALNILRCGRASPGVGILSF

SEQ ID NO: 14114 - protein, 433 aa, unknown
  TnpB Polypeptide
MVDMGYRFRIYPNRRQRLLIERTFGCTRWVWNHFLNKRQVEYEETGRNSRAFRQMKDLPKLKDANPWLREVDSVSLQAVIQHLDRAYDNFYRRVASKKKGGYKGTTGYPRFKGKHNRHQSYTTKNVGHTVYVADDKHVRLPKLGMVKTRVSRPVTGVVKSATVSRNPAGEYYVTIKCAGVHKSMAPAKGDAIGIDLGLKDYCITSEGVKHPNHRYLKQSEKRLRHAKRKLSRKPKGGNNREKQRIKVARLEQKVARQRRDTLDKLSTMLVRRHPIICMETLMPKNMVKNHRLAKHVSDAAWGEFARMLDYKAGWYGCKVVHVDRFYPSSQLCHDCGYLPGGQEPRCARMDMPAMRRVPRPGCQRGQQPARRGAEDTRPARNGRIEHNRTKVGRDTSKPNACGDPVSPSRTRRQPVDETRIPRLRPWGVSKTLS

SEQ ID NO: 14115 - protein, 383 aa, Thermoactinospora sp.
MKLVVQVKLLPDAATEAALRETLALCNRAANHASRRAFATGAKGKTSVQRLVYGELKAMGLSAQPAIHTARKVAGAYATLKANLKAGHYGPEGSKRRAKAEKTPARFRKDAAQPFDDRCLSWQLDAQTVSIWTARGRSGRIPFACSPAQLEMLRAYRRGESDLVFRGGAWYLYATCEVPEPEVYEPDGFLGADLGIANIATTSDGVRHAGRQLNQVRHRNRRLRSRLQAKGTKSAKRLLRKLSGREARFAADVNHRIAKSIVTEAQRTCRGIALEDLGGIRDRVRLRKPQRVTLHSWSFHQLGSFISYKAQRAGVPVVYVDAAYTSKGCSACGHISKKNRPDQATFACTSCGFAEHADVNAARNIAARGVAGWAVSHAADDAA

SEQ ID NO: 14116 - protein, 231 aa, Pleurocapsa sp.
LVNDPTVKPLHPTIKNIGLDAGLTSLITTSDGEKITNPKHFNNKYRKLRAAQKTLSRRQKGSKNREKARIAVARIQAKIADSRKDFLHKLTAQLVRENQVIAVEDLAMPNMVKNRSLARSISDAGWGELVRQLEYKCQWYGRELVKIDRFFPSSKRCGNCGFVIDKLPLSIREWSCPECGTTHDRDINASRNILAAGLVVTVCGSSVRPDRHSSKGQLSKTRKGRKQKPKS

SEQ ID NO: 14117 - protein, 365 aa, Pleurocapsa sp.
MAARRKKVITRTYRVFLSDVNVGKQEILKDFVFKCKDITQYFVDLFWQRQDFTGKLADLPTVHKAVKRFEITTRLSQALAKQAKEVVRSQYKKPIKRKPNLKNQIVTLYYHFVTIEKGQGSFDWVVKFIGSGAPRLIVPVKSTKPLNQKLQDGWNMSKTLRLGIKRGRLYIDFLVEKEIPLPKTEGVVVGMDSNYKNGLVFSDGQTTGNSLYKRIQQFGKRQKHTKVEAKSMIGAAFKQIDFSQIKTVVVEDLKKVKHDQRGTFSRVFNRRLSHWLYKYSETLLQRKCEELGIEVIRKNPWKTSQFCRQCFRWDRRNRKGDKFLCVNCGHAEHADFNASKNLELLGLLGFYGIHDLQSSKCQSFE

SEQ ID NO: 14118 - protein, 413 aa, Pleurocapsa sp.
MLVFEAKLEGEEQQYRLLDEAIRTARFVRNSCLRYWMDNRNIGRYELSAYCAVLGKEFAWAGKLNSMARQASAERAWSAIARFFDNCKKNKPGKKGYPRFKKEQTHGSVEYKTTGWKLSECRRYITFSDGFEAGTFKMWGTRDLHFYQLKQYKRVRVVRRADGYYVQFCIDQERLEKREPTSKTIGLDVGLNYFYTDSDGNTVANPRHLRKSEKSLKRLQRRFSKTEKRSKNRAKFRKKLARKHLKVSRQRKDFAVKLARCVIQSNDLVAYEDLKVRNLVRNRHLAKSISDAAWTTFRTWVEYFGKVFGVVTVAVPPHYTSQNCSNCGEVVRKSLSVRTHVCTHCGHTQDRDWNAARNILEKGLSTVGHIGTHASGDIDLCLGGETPQSKPSRGKRKPKEQSLESPARFGTPN

SEQ ID NO: 14119 - protein, 373 aa, Pleurocapsa sp.
VFVLEAKLRGSTKQLAVIDEMIRTAGFIRNSCIRHWIDNRGVGQYDLSALRAVLARKYEWAKKLNSQARQASAERAWQSIKRFYDNCKNPSVKKKGYPRFKKSRSVEYKTTGYKLSPDRQSLAFTDGFKAGSFRMIGAFDLNYYQPEQIKRVRVVRRADGYYAQFCLAIDRLEAVEPTEQVIALDVGLMHFYTDNRGNQVENPRHLKKSEQSLKRLQRRVSRKVKGSNKRKKAINKLGRKHLKVSRQRQDFAVKLARCVVKSNDLVVFEKLMVRNLVKNRRLAKSISDAAWRQFFEWLEYYGQVFGKIVIAVPPQYTSQECSSCHRLIKKSLSERTHVGECGCMLDRDENASRNLLAKGLEIISRGALPNFEF

SEQ ID NO: 14120 - protein, 240 aa, Pleurocapsa sp.
VEYKTSGWKLSKTRKQITVTDKKGIGELKLKGTWDLNFYQPGQIKRVRLVRRIDGHYAQFSVSVDNKVETQPTGKTIGLKISRQREERAKRVARCVIQSNDLVAYEDLRIKNLVKNHCLAKSINDAGWDQFRKWLEYFGLKFGRITVAVNPAYTSQECSHCGAVVKKSLSTRTHVCKCGFVMDRDWNAAINNILKLALSTVGHTGTWILDPNASGDSTSTHAGEILSEQVGSQNEESSPL

SEQ ID NO: 14121 - protein, 386 aa, Pleurocapsa sp.
LFKACLYHRKTEYQRFGNSISYYDQQNILPDFKECWPEYKELGAQALQATVKGVDYAFQRFFRGLSGYPKFKSARHDRGRTYPGISGWKAHTSGDNGYLELSNLGQIQMRGKARTWGTPTTCTIIWKPGKWYASITVNCEPKRETSTGAIGLDFGTHHAIACSDGTIIAPPKFLAKTQQKIKQLSKRLRRKRAPNFKKKIKASKRWRKARKQISRLQSKVTNQRQDWQHQVATQIGKSNSLVATEKLNIKGMTRKANKGSQRKHQKTGLNSSLLDVGIGNLTSLIRSKLSECSGVFVEVPLKIAPSQTCPRCGYKKKKELAERVHHCENCNFTAARDVAASMVMLNYALGLGTSLSNADAEPLSKTPQHCGGFRKVQQVKRQKPRR

SEQ ID NO: 14122 - protein, 273 aa, Pleurocapsa sp.
MKARYQYRIYPTDQQRLELSKLFGCCRVVWNDALALIKSTPKGEKWSSSAELQKICITQAKKTEERKWLAEVSNIPLQQSIQDLGIALKNSFEYCKGKRKGWRVGFPRLKKKLNQQSARFRKGGFSIKAGKVYLSKIGNIKTKWSRPLPSEPSSVTVIKNCTGRYFLSFVVEIRPITVEPKNQGVGVDLGLETLATLSTGEKVKEPETSALDRKIRKGKRKLARATKGSKRYEKLRIAVARTESRRRNIRRDFNQKLATRLVRENSVVVLKER

SEQ ID NO: 14123 - protein, 160 aa, Pleurocapsa sp.
MRERRFQAWVNHNISKTIIRQALKDNALVAIEDLTGIREQTNKNPRTKRERRLSNSWSFYQLRSFLEYKGIRYGVEVLAVPPQYTSRTCHRCLHIGLRSGKSFKCINSACLWHSDADWNGSLNIAAIGASVSRLGGSGYLCCSLNRDDSGLLKATWLQPA

SEQ ID NO: 14124 - protein, 377 aa, Pleurocapsa sp.
VQETFRVFADACEYVNQEVPQKLTNELAMQSLVYQDVRARFGLSSQLAIHAIRRVSGNRKTAKQKGKPVKEFRPTSVTYDARTFSFRESDWTVSLTMVRKRERFRLHIGNYQRGLLKGQKPKTATFSLNADGEYYLNIQLESTPEPPKKTKKVLGVDLGRTDIAVTSDGDSFSGKDVTNVRNHHARVRASLQQKASRGTRSTRRRARRLLQRLSGKERRFQRHTNHVISKRIVQHGKTNNQVIALEDLTGIRESANEMPRTKKERRLSNSWAFYQLRQFLTYKAVKNSVKLILVNPASQTCHKCLHIHPVRGESYRSGKRFACGHCGWVGDADLNGAKNLEAMGCSINTPGGSELLSCSLSYSASGLLKTPSAYAVG

SEQ ID NO: 14125 - protein, 296 aa, Pleurocapsa sp.
LRHLQTAFSNFFAGRARYPNFKKKRSGGSAEFTKSAFRWKEGQVYLAKCSEPLAIKWSRQLPSGCEPTTITVRLEPSGRWFVSLRINDPIDQTMQPVDSAVGLDVGVSSFLTLSAGEKIANPKAFDKHYQRKAQKSLSRKQKGSRNRDKARLKVARLQAKISDSRLDHLHKLTTRLIRENQTIVVENLAVKNMVKNPKLARAISDAVWGEMVRQLEYKAKWYGRDLVKIDRWFPGSKRCGSCGHIVEKLPLNVREWDCPNCGTHHDRDINASRNILAVGHTVAVCGANVKPDRHKS

SEQ ID NO: 14126 - protein, 148 aa, Pleurocapsa sp.
VATEKLNIKGMTVRAKKGSKRKAQKTGLNRSLLDVGIGNILSLIKYKLDEGQGVFVEVPTHQVAPSQTCPVCGHKKKKELSERVHQCSNCGYICDRDVAAAQVMLNYAKGLGTSLYNRGVEASTSTPTFCGGFKQASTMRRQKPRLRS

SEQ ID NO: 14127 - protein, 294 aa, Pleurocapsa sp.
MPSNINFAELKELRILPRNKCFYAELVYKKEVPTPEVDKQNVLGIDPGLNNWLTCVSNVGTSFIIDGKYIKSMNRWYNKQVSTIKDGKPQGFWSNKLAAITETRNRQVRDGINKAARLVINHCLENQIGAVIFGWNKGNKREIKLGKKNNSEFVLIPTARLKDRIEQLCREYGIQFIETEESYTSQASFLDGDYLPTYGEKPDDWKPSGKRTKLGLYRTANNWYINADANGAANAIRKVSMTLGIDLSGVSRAILTSPHRIKLWSANKLKTWSDGLSSRHETTLLEFALIHGAE

SEQ ID NO: 14128 - protein, 384 aa, Pleurocapsa sp.
MTQALFVRCKLIVPVEFRHQIDETLSGFAAACNYILDVAKQEKCWHTTKLHHKVYKATREQTGLKANHVCQAIRRVIGNAKAVKQIHKFRPTSISLDARTFKYVEEKQQVGITLKSGRVNFGLAIGGYQVALLRGQVPTSATLSKTRGGDYYINIVVEIPTQPTGKTPKVLEVDLGIRDTATTSTGKFWDGKQLRETRAKYSRVRASIQSKRSKASKRLLRRLSGKERRMMAWVNHNISKQLVNDGSKLVAAIAFEDLTGIRQRAIVRKSQLREHNSWAFYQLRLFTEYKAAVAGIPIVLVDPRYTSKTCNCCKVIGNRDGKVFRCLNLNCGWTGDADHNGALNISALGAAVNQPGISTMFCSLEQTVLGIKPSRYNPAGCSGG

SEQ ID NO: 14129 - protein, 406 aa, Pleurocapsa sp.
VYNYAWRQLKDWMASRAGSVDRCSLEKEYIIPADEPFPSYHRQQNNLLKAKKQFPHLGKVHSQVWQTTIRRLHHTWEAFLKRGHGFPRFKKFGQFKSFVFPQFKDNPINGFTIKLPKIGEVPINLHRPIPYGFRVNQVRVLSKVSGIQWYVVVTIESDVSVPDAPVHGRAIGIDLGLERFLTVSDGSFRDRPKFFKSMQSQLKLLQRSSARKQKGSQNWEKAQTKVARMHHRIANRRKDFHLKTAHQLCDQAPTIFAEDLSAKGLTRGMLRKDCVDAAFGQFLSLIEWVCWKRGVYFAKVNPNGTSQVCPHCLATVSKGLEIREHHCLECGYQTHRDHAAAEMVWRRGLENVVAQGLWGTETACQVGLSGVYDLDKWRGAGMPNCEVGRAIAVPVGSASGGCHAIS

SEQ ID NO: 14130 - protein, 389 aa, Pleurocapsa sp.
MKQTLTLVCKLKPTPEQAPQIEAMLQAFADGCNFANESVNPKVTNKVTIQAQTYGQLRSRFGLSANQAVRVCARVAANRKTAKLKGKSVKTFKPTSADYDARIFAFREKDWSVSLTLLGHREQIELDVGKYQSGKLKGRKPTSATLCKHRDGQFYIHIQVSDETPQPIKSNHVIGVDFGRRDIAVTSDGKKWDGKPIEKVRDKFSKTRALLLAKVSKGTRTTRRRVRKILKRLSGRERCYQAWLNHNISKRIIETAKSQSAMVAIENLTGIRDRTNQQPRNKTERRRSNSWAFYQLRTFVEYKGLKEGIGVVAVNPAYTSRTCHVCNHLGLRSEKRFKCGNCGWHGDADVNGAINISKLGAAFVSLPGGSNLSFSLNRDDSGLLKAPPF

SEQ ID NO: 14131 - protein, 410 aa, Pleurocapsa sp.
MEKAYRYRVYPTTEQEQILRRTIGCVRLVFNKALAARTEAWYEKQQRVDYVQTSAMLTQWKKVDDLQFLNEVSCVPLQQGLRHLQTAFANFFAGRAKYPNFKKKRSGGSAEFTKSAFRWKDGQLYLAKCSEPLPIKWSRQLPKGCEPSTITVKLDPSGRWFVSLRINDPKDETMRERDSAVGLDVGISSLVTLSTGEKIANPKAFGAHYRKLRRAQKSLSRKQKGSRNRERARLKVARIHAKISDTRTDHLHKLTTQLIRENQTIVVEDLAVKNMVKNPKLARAISDAAWGELVRQLEYKAKWYGRNLVKIDRWFPSSKRCGNCGHVVDKLPLNVREWDCPNCGAHHDRDLNAAENILAVGHPVTVCGANIRPDRHESKGGAVSAVVRQTLKAPWQLRKTRKGKKQKPKS

SEQ ID NO: 14132 - protein, 404 aa, Pleurocapsa sp.
LYKAIKVRIYPTSEQSQKLGQIMGAARWWWNYALNLCNETYKETGKGLTQIALNKVLRELKKSEDTAWLGECYSQVLQSTTLNLTKAFKNFFEKRAKYPRFKSYHDKQSAQYPQNCQVIDSGIKVPQVGVVKASIHRLFEGDLKTVTLTKTPTGKYYASLLFDTKQETPKVVVTGKVIGIDLGVKDFAITHDGSKTSKYNNPRHIKKHEKNLARKQLLLARKKKGSKSRDKAKKLVARVRERISNARRDFLHKLSRKIVDDNQVVVVENLNIKGMVRLRSLAKAISDVSWGMFVNFLDYKLKDKGGLLLEIDRFFPSSKTCSECLYQMVEMPLEIREWICPSCGTHHDRDENAAKNIRAEGIRQLSVLGIRTAAEGGEVRPKGGRKSVLRHSPVNSEAHTIASA

SEQ ID NO: 14133 - protein, 229 aa, Pleurocapsa sp.
MEQVLTIVGKLKPSIEIAQEIEATLFAFADACNYANEQVKSSITSKTTIQNMVYQTIREKFGLSANLAVRACARVGANRKTAKLKNKPVKKFAPTSADYDARIFTYREKDESVSLSLKSGRFHILLDIGNYQRGKLKGRKPTSAQLCKHRDGKYYIHIQIKDEPPKLINSDRVIGVDFGRTDIAVTSDNQKWSGKQITTVRDKYSQIRASLQKKHRKAQEAVGVDADGL

SEQ ID NO: 14134 - protein, 201 aa, unknown
  TnpB Polypeptide
VEIHCDENEGNSVLGIDLGLKIPAVAITDSNKIKFFGNGRENKYKKRVARSKRKALSKAKNMKALRNRSNKEQRWMKDKDHKVSREIVKFAKQNNVKVIRMEELSGIRQTARTSRKNAKNLHTWSFYRLARFIEYKASLAGIEVIYVNPRYTSQTCPVCGARNHASDRKYMCPCGFKTHRDILGAMNIVTAPVIGGNSLSA

SEQ ID NO: 14135 - protein, 374 aa, unknown
  TnpB Polypeptide
MNISIKYRLCPNEEQKVYFAKTFGCCRKIYNLMLSDKIDLYKTSKTFGRHTPAMYKDSYPYLKEVDSLALANVQIHLQTAFRNCFSKKRKSKNGFPKFKSAKRSRKSYTTNNQNGTVDIGNNCIRLPKVGKVKAVIHRQPEEDWTIKSATVSQDSTGSYYASVLFEYEKEIVQISKNSTSAVGLDYKSDGLYMDSNGNKAMVHKYYRESHKKLAKEQRKLSRKTGYRKKENKSNNYLKQLRKINSIHRHIANQRLDSLHKKSTEIANQYDIVCIEDLNMKAIGNKGFGNGKATFDNGYGRFINMLEYKLKLRGKYLVRIDKWFPSSQICNCCGSIKKLSLNDRVYRCDCGYTGDRDHNAAINILNEGLRILQVS

SEQ ID NO: 14136 - protein, 417 aa, unknown
  TnpB Polypeptide
MMIKLQKTIKIKIGRLSKRKQNILDILIRKNTKAINFCLQKIKKGKYITHNLVYKDLRKLNLPATVIHGCRAKSVEIIKSYYNRKNKKKFPELKNSRVRYDNQVVKLRHTNNKLYPEFVSLLYKAGISGKNCKSRNRIELPLILNSNYQKGIIQQIGENYKLGSSELVKKRDNYFIHITYSKEIEIPIPDESFSPVGVDIGISNLAVSVAQSSINFFSGKRINWKNEFFRKRRARLQQDFAMQEIKRLKGRQTSYNNFYINNISSDIIKQAKQEKEPVIILENLKRILEITKVNKKQRMRLHSWIFRKLQRTIQYKANWEGIPVVYIDPYHSSQICSKCGELNKRNKHTYKCKKCGFECNSDYNAGRNLQQLFLAKCQKEKASINNASNYVKPEFTKTTKDNIVRNLTQLEMGVRIL

SEQ ID NO: 14137 - protein, 376 aa, Peptococcaceae sp.
MKTYCFKLYQSKRNRKLHRSINIAGSIYNHLIALHKRYYRLYGKSLSATKLQKHITKLKKQKRFAYWNLLGSQAIQDIAQRIDKGYKLFFRNHKLHIRSAPPTFKKVKRYRSFTLKQAGYWLLDRDRIWIMEREYKYFKSREIEGEIKTLTVKRDTLGDIYIYLTCETEESPVEPRSGKSVGFDFGLKTFLKASDGNDVLSPLFFKQGMKEIRSRNKALPRKKKGSSNRKKAKLDLARAHKRIANQRKNYHFKLAKELADEYALICIEDLNMKAMQMLWGRKISDLGFSQFVNILKYQCSKTGSTVVEIPRFYPSSKTCSSCGYVLDELPLRVWEWACPSCGVVHDRDFNAAKNIHKVGTSTFVGEGVRPASAGIL

SEQ ID NO: 14138 - protein, 431 aa, Vulcanisaeta sp.
LESDPLNKWKYHVLREIEEYQRNMVNEMIEVILSEDLPTTRKKLHDRFYNYYKEKYPFLPSRVIEGAYIVAGRIVKSFRRRVKKGLARRDKPEYKRVIITIPNMVNWRFNRVSISVFTHKGWVEIPLRITKQLIRYLYEGWRVSHELKLRLVGRRALVWLTFEKEVDVEVKDGNYVSIDVNENNITVAVFEGFKLKELRRYETGLGKIVINYSIRRKEITKGHSTKDELIKKKLRRLRERERKMDVLRKTVKRITELARDLKTKVIVGKFSSNAKEKMEKDKGSKLRHRIHQWSVVKFVEMLKAQPIEVVEVSESYTSSINPLNGKKLKKSKQVVERIVKVFNPYLMTGTAHEGRGIKVFKITARYLESGKVLLERDCIAALNLVKKVDGRVVVFPSTSPNDLRVTVYDPLRGVPVAELKVIKSKEKLRHG

SEQ ID NO: 14139 - protein, 361 aa, unknown
  TnpB Polypeptide
MYRAHKIRIDCTREQHSLLMQTAGCARYAYNWGLDKWGKMYEAWKADASQEKPDRYSVARQWTQEKPEWANKTSRSPVDYSFINLGTAFKNFSRRKTKYPKKHKRSQGISFQVAPDKAAIVDNQLRLPNIDYVKLRETPRFQGKITGYTVQYIASHWYVTIAFDCPDVPKEAPESVVGIDVGLQHPAVASDGTKLELPIEKLQKLEVKKRRAQRALSRSKRNSNARKRKRTKLQRIQQKITNIRQDAAHKFTTTVSKNHATVVTEDLDISELQKKAPARSVRRAYNSSLMGTILWQISYKAVHHIKAPKYFPSTKRCSTCGHVKEAMPPNVRTYHCDHCGTHLDRDENAARNLMLQPWVTR

SEQ ID NO: 14140 - protein, 449 aa, Lachnospiraceae sp.
MKLTATYSVKLNKNGISHAMKDTVDIYRKAVDFYIFVINGEWDAAFCMITTQKAAVNTAEALSVATKKRPVVKYDFGTGFYKFPSYLRRAVIAEAFGKVSSYRSNLANWESADPRTRGAGPGFPKAGFVYPAMYRDNCYVRVDNYTAQIKAFVRNTWDWITVCLRKTDVDYILHHCQNRKECVPTLQKRGKCWYLDFPFQQDCKLHNKEIFNQTIVAVDLGINSCCVCSVMRSDGTVPGRRFLRLPGEYDSLTRKVSHIKYAQRHGSRKVHRLWKLADGVNDDIAVKTAQFIIDTAVQYSADTIVFEHLDLNGRKRGSKRQRLHLWKAKRVQAVVIEKAHALSMRISRINAWGTSCLAFDGSGRILRGSESSKTNGHYRLCEFQTGKVYNCDLNASYNIGSRYFVREILKSLPVTEGQRIRAKVPGCAKRSTCTLSTLISLDAELYAAV

SEQ ID NO: 14141 - protein, 422 aa, Streptosporangium sp.
VEKVKQTRAHVARLELSTAQVAVLDGQAHTARTLWNLLHEYFTFRQGRFATLKECDTAIRAARHEIDWIGQLPAQAAQAVLKTYRQAWANFFNPDHPAKRPTFKARFGSRPAVDVPQARDLQIKRINRRWGAVNLPKVGRVRFRWTKDLPGVTKGGPTGRVTGARLVKDAFGWQIVFRTETMTAPVMETHPGPAVGIDRGITVALALSDQTTREHGPWLTGGEREHLRRLEKKSARQRAARTPGQRTSHRLTRTYDQIARLRATAKRRAVNWQHQTTTELADTFSVIVVEDLKIANMVRSAKGTIEQPGRNVTQKAGLNRAITGEAWGRTVALLEYKTRDRGGLVVKVPAPGTSQTCHQCGHRDAASRDGTRFSCANPACGWVGHADTNAAINIRNAAGTAVSGRGDLGAARSARRQPPRAA

SEQ ID NO: 14142 - protein, 435 aa, unknown
  TnpB Polypeptide
MTQVLRVECIELPFHPTLSKLCHQVKNLYNRANYLIKTSLKKQNKLLGYYDLNTFLRMEQCYRVLPAHTAQHTLKLLCRNWKAYFQALKEWKKNPNLFFSIPRPPNYKPKDGEVVAIFSNQQARIRNGWLVLPKKVGYYYKTRLTVSTKLREVRIIPRRVGYTIELVYLKTIPDIKKNAKRKGAIDLGGVNLVTFVDNLGNQPIVIKDHGKGIKSIIQYNMKKQKQLREKYVQQQKKNLKKQQRLVYGQSYYRSRERYRKKLKNALHHLTKYLVDLWVDRNLHEVVIGYNPNWKQQVNLGKKVTQMFVTIPFLKIINQLKYKGEECGIQVELVPENYPSKSSFLDNEFPQKRVKYAGKRSPRGLFTSAQGYKINADVNAAYNILVKSDPEALPTRGVNGVGGYVMYPRRVCVDPPGMTHTSSIKQAQPCLVKMPT

SEQ ID NO: 14143 - protein, 438 aa, Thermoplasmata sp.
LKVLRTEQIWIKGDEKLQKLCHISKNLYNEANYIVRQEFFKTGKRIGYNKLNKLLKKSENYRALPAQTAQQILRALDRNWKSFFNAMKEWREHPEKFNERPRPPKYKKKDGVFMLILTNQQVKVKEGELIFPKVVGLKLKTRIKEGIREVRIIPKGVGYVVEIVYGKEENTIERDKSRVAGIDLGLRNLVTIANNIGEAPIVVKGGVVKSINQFFNKEKARLQRIYAKQGIKTSKRLKRLSVKRERKLKDFLHKVSKFVAEWCASHNIGRLVIGYNKEWKQEVNLGKRNNQNFVQIPFWTLIQQIKYKVEERGTEVILVEEDYTSKCSFLDNEPIEHRDEHAGRRIRGLFKTERGTIINADVNAAYNIIRKAIPKAFEADGIEGVGLHPVRWTKDEIAQSILGRKAQNAQPFSHSASEEDKEVEEFFESVLKMFGHVA

SEQ ID NO: 14144 - protein, 322 aa, Moraxella sp.
MLKAYKYRIYPNSEQALLIEKHFGCSRFVFNWALALQQRYYAMFGKSLSRSKIQSQLVKKKKTGKFAWLNEVNSQSLLNALLNVHTAFTNFFKSRAKFPRFKSKKIPRKSYQCPQHCTINFKQGIINLPKIKGIKTVFSREFVGNIKTVTISIKTVTISKTATGKYYASVLVENTDILPTPTTIEPSLTVGIDLGISHLLNLSDGSKFDNPKHLAKASQRLAIQQKIFARKQKQSKNHQKQKLAVARIHEKVRHQRLDIHHKITHKLICENQATSYAIEDLAVKNMVKNRKLAKAIHDVGLGQFVTLLTYKANWYGKSELVW

SEQ ID NO: 14145 - protein, 376 aa, Bacterium sp.
MLLTYMMRTINARIPIDDDLLKTLELGTLAYQTALNVGYSKKIKNKITLQNEIYHSFREEHPELPSVLVQTASHKAGETLKAIKWRRLPITKRLSLRYSPRCFTFYKEENEISVSTVNGRRRYSIQIPKWATDKYPIFTVKNICISYHKKICTLHLMIDVPDVPKSEIKTYVGVDRGIKNIAVCSDNTFFNSKHLKNIKGKYQHLRSELQSRGTRSAKKRLKSIAGRERRFVSNTNRIIAKEIVDKADCVILEDLSKIKKRPGRKSKTFRKSLGGWSYYELQQFIEQRAELCGKSVRYIDPSYTSQECSRCGFTDKSNRHGSSFHCKKCGFDLNADLNASRNIVSRGTLLDTGCCHTPECSDGNIRDKPTPSGVGI

SEQ ID NO: 14146 - protein, 405 aa, Actinomadura sp.
MPAPTAPRSRGQGQGVWWEHDGPLALVYAGGPDGHRGDLVVPVRLPQGAGQWPHLLHTLSDPETFHKVDLVRHQDPAEPGGWVYEAHLMVLAPAYVPASTAGRRAQAPTGRRGGVDGNVSNLAVVSVPDEPVIAGAASPGAAVVSSKVATASDERDRIARRERKRRRRQRALERSRRASNTAQYELGKRQRKRQRRRQAAGLSPRQVTVPGGPRIARADGTPRRSHRHDTLSSTYRRLRARDAAAAQRITQSRRTRARRTAGQIVAVHGPNLVIEDCDIRGWFRLWGRACARFTPGMLITALDHECANTGGRLLRAATRTTALSQHCPCGHRVPKTLRVRTHHCPTQDGGCGLTGDRDLVSAALAAFTHLHDSDDPSTARVDYQTSRRVLCAAGPGLPGALTEMM

SEQ ID NO: 14147 - protein, 334 aa, unknown
  TnpB Polypeptide
VTNQIVADSGSYTTKVWHGRAWLHLQSLERGQRIAIPLKGDRLPSGTLRIILQDNGQVAVHHALDETQACSTKPGGSGTVGVDKGYTEAYTDSDGERHGEGLGDLLSQESDARKVKGQRRHKLRDLEEKHQAKGHTRKADNIRRHNLGRQKWNRRRTRHHRQVRDHLCQAAHAVVDKAGTIACEDLSLSMKSTKVRHKDTNRRLNGWVKGVMADTLTSISRRRGSALALVNPAYTSQIDSRTGLLQGHRRRDRFYCLDGVVLDADTNAACNILARLYDAEITLYMPYRDVRALLAERTRLSVGTARSGLELRGLATVPPSTESEVPATVPNSAV

SEQ ID NO: 14148 - protein, 432 aa, unknown
  TnpB Polypeptide
MRWVEKHWIKENHELYSVCDDLTFKAKNLYNAGLYRVRQYIFERNSCDGADKPSVLTWVELVSQFRKEQQSDMLSLPSKVSTNILKSLGSNIHSYYQLLRCFHDKSNLRVTTEPKLPRYLHKTKGRYMVEFTNQTFSKQRGNNGELILCPKDLNLTIPTRVQNPKCVRIIPKLGAFVIDVIYEVSEVPLKRTGNYAAIDLGVDNLASVTFSNGVNPLLVKGSKLKSINQGYNRLIAKAQSKLPTNQRTSKNIHRLWRNRELKLQAELHKLTSFLSLYFDEMSIEKVFIGKNTGWKQGVFLGKKTNQTFVNIPFNTFIAQLTYKCESRGIEVVEQEESYTSKASFVDQDDIPIHGCTDTEGQPQFSGVRVRRGLYKTKQGFLLNADVNGSYNILVKGLTTLGNSMDKTLVSYHTRSLRGCSNLSNLDLMSKCM

SEQ ID NO: 14149 - protein, 397 aa, unknown
  TnpB Polypeptide
MCYASYKLWNVCNYERLHYKELGLDAYPDWYYQKKAHKDDIWYKNLPSQTAQEVCKLLDKSWKSFYKLTETHGIANPHPPKFKHSKMPVTYMQNGIVHMAGSDTVRLSVSKQMKDYMSRTYEISENYIYLKNLIFKSTDHIKQIKIYPPVNGNCDIIVIYEIEDIDMLPDNGRYLSIDLGLHNMTTCYNSFSGETFIIGRKYLSLCHYYNKEIARVQSQWNRIQSSTGVRYPKSSRHISKLYVKKNNAVNDYLHKITRYIADYCCDNNINTVVIGDITNIRDGKDYGSMTNQKFHSLPYKKIYIMLKYKLALYGINFIMQKEAYSSQTSPLAATVCKQNANKSNRVKRGLYIDGGYSWNADSVGAFNILRLYFQSQKIDTRLDPVSILSPEIIKVAA

SEQ ID NO: 14150 - protein, 228 aa, unknown
  TnpB Polypeptide
VDTPTAVAPTGTLSYDDANGWVFKYDLPIIQNKVVGVDMGTRFFAVTYDGEHTNFLHGANTPLQHEMGTYSKLHQKLKKKGTRSARKRLKAISDSWREQLNVRIKKTVKDILNDAEPDTVFILERLTTPHNLDKRLVTADIGNMSAAIFALFNQALREEAKKSGHMVLYTSASGTSARCPACGIFKKRNRKHDTHSYQCPCGFRSNDDRVAAMNIRERGISHLVERFV

SEQ ID NO: 14151 - protein, 329 aa, Oscillatoriales sp.
MLVFEAKLEGKSEQYERLDEAIRTARFIRNSCIRYWMDTKGVGRYDLSAYCVVLAKEFPWATKLNSMARQASAERAWSSIARFFDNCKKAKPGKKGFPRFKKHSSHGSVEYKTCGWKLSEDRRSINFSDGFKAGCFKLWGSRDLHEYQLNQIKRVRVVCRADGYYVQFCIDAERNEKREPTRKTIGLDVGLTHFYTDSDGNTVENPRHLRKSEKSLKRLNRRLSRTKKGSKNRDKARNRLNKKHLKVSRRRKDFAVKLARCVVQSNDLVAYEDLQVKNMVKNKKLSKSISDAAWTTFRNWIEYFGKVFGVSCSTFKLHYLCARPHTVRG

SEQ ID NO: 14152 - protein, 296 aa, unknown
  TnpB Polypeptide
VQSGFKVEGDKVTLSLGTSREDGVKQVSFRISHRPGIKYKRVRDLSITYDKVSGRIEARLVVEVEARENNGAGKVAVDLGETVMMACAFDDGTVLLYSGRLIKAVRRYWQKVRANLKQNSRRWKRIAHREKKQVEHLLHAATSHLIAECVQKGVKEIAIGNLNGIRESIAYGDRLNQRLHAWPYRKLANMLKYKGALVGILVRDDVDEENTSITCHACAQVAASNRRHRGLYACSCGWRAQADVNGALNIFERAFQVSPVKGSSGRVARPAVVSYRLGWHGVAEPKRKGKFLRASA

SEQ ID NO: 14153 - protein, 144 aa, unknown
  TnpB Polypeptide
LVRENQTIAVEDLAVRNIVKNHKLARSISDAAWGELTRQLEYKCQWYGRTLVKIDRWFPSSKLCGNCGHIIDKLPLSIREWTCPKCGVVHDRDLNAAHNILTAGLAVLAGNSEEACGANVRPDRHGSKGQLRNSSNGKKQKLKS

SEQ ID NO: 14154 - protein, 387 aa, unknown
  TnpB Polypeptide
VAVVRNIQVKLAIPEEHHSVVDATFDEFQRVTEPVIDYGWNDDPDDIIINKNTLNEATYHDIRETSPLTGGHVQSARNLAANALSNCKDLLEDGKDTSKPAFKGTVVTYNSNTITYNDDHCTISTVDGRIRAEYVFPHDYEGTPFEEYWNGDEWEKREATLHKRNGDYYLHVAVEHVDNTDSSDEKTEKGVVLGVDLNVDGYLAVTSTGAFLGNADELNHKRDEYERRRGNLQQTGTRSAHLTIQSIGDRFAEWSRHRIHDVSNGIIREAVENDCTHISFERLTWIWTRISNASKFQQWAFREIQRQVEYKAEENGIEVDTVVPQYTSKRCSHGECRFTHKDNRDGDEFECLNVEKNCIRITMRRGTWRGVLSRTGSSLGLDGLPVN

SEQ ID NO: 14155 - protein, 330 aa, unknown
  TnpB Polypeptide
LIRNDRYEVDEGRRVIYLKDFKLALGFKGRLKWRGKQGRLEITYDEARRSWYAFISVEVENNARAEGRLRASIDLGIVNLATVYVEDGTWYLFKGGGVLSQYESYSKRIARAQKVLARHGQRGSRRLRLLYDKRRRFLRHALNSMVRRIMEELKGKGVGEVVVGYPKEISRDHGNKLTVNFWNYSYIIRRLEEVGEELGIKVIEVSEADTSRTCSLCGEAHNGGRIRRGLFRCPRTGRVINADLNAAINILRLHIPESLGPRGWGRPLARDRGNGPKARPAAYRWTSGAGWALTAPTSYEVMKVKAVSREPMSRPKGALALQGGEEVSYG

SEQ ID NO: 14156 - protein, 371 aa, Actinomadura sp.
MGRTVKRAFRYRFYPTPEQAALLARTFGCVRLVWNMALVERTRRYKDEGTPTSYGEAAKWLTAWKRDPALDFLCEVSNVPLQQALRHQQAAFNNFFSGRAGYPRLKSRRKSRASATFANNAFTYREGRLKLAKMDDPLDIRWSRPLPPEVDPTTVTVSRDAGGRWFVSILCEDSIARLPPSDRMVGIDAGITSLVTLSTGEKIANPRHERRDRERLAKAQRHLSRKARGSKNWEKARHRVARAYGRISDRRLDFLHKLSTRLVRENQTLCIEDLHIRNMVKNRAMARVISDAAWHELRSLLAYKADWYGRRLVTVDRWYPSSKLCSTTGCDYINDTVPLGVRSWTCPACRAVHDRDVNAAKNILAAGLAER

SEQ ID NO: 14157 - protein, 367 aa, unknown
  TnpB Polypeptide
MVSRKGYQFRIYPNKKQEIFFTKTFGCVRFLYNHMLDDKIKYYEETKKMKQTTPASYKKDHPFLKEVDSLALANAQLHLEAAFKKFFKETDIGFPKWKSKHQAKQSYTTNMVNGNIRLFSTIQNQTTYLRLPKAGDVRIHMHRIPQGILKAVTISKQQDRYIATCLFEYENKVESKEVVHVLGLDYSQKHLYVDSEGQVCDYPHFYCASEKRLAREQRKLSKMVKGSNNYKKQRNKVAKLHAHVAQQRKDFLHKESRKIANSWDMVVVEDIDMKAMSQALKLGKNLMDNGFGILRNYLRYKLEDEGKRFIKVDKWYASTQLCNHCGAKNKIGLNERTYQCPICGYIENRDINAAKNIRDEGIRLHRS

SEQ ID NO: 14158 - protein, 315 aa, unknown
  TnpB Polypeptide
LLIKKTIFNLQDNYKRHLNSGISNPKYRSKYGKNSYTINIIHSNKTIDYKNIKLDLENKLIKLPNLGNLEIRGYRNLKQIEGRIINYTISREKNGKYYIAVLYELSDIQKVTPETIVGLDLGIKKLITLSSGKTYENNRYITKYEEKIKREQKNLSRKQKGSKNYYKNIKKLNGLYIKLSNNRRYYNHKITKEITENYDIISTESLTISKMIMDKEHHLSKAISDATFNEILEQLEYKAKERGKYFYKISPYYPSSQICSVCNNIDKKYKNLDERMYECNRCYSKLDRDFNASVNIMFEGLKLHIMAPMKNLSTR

SEQ ID NO: 14159 - protein, 214 aa, unknown
  TnpB Polypeptide
MVEDSATRTVPIKLDVDESAAGLLHQTTDYFLDAANYVVNVAWEPDWKITSKTKLHDLTYYDVRDDSPLPANLVQAARNRAAEAVKGVVERWKDGKKASKPYFTSRFASYDARTVTVNADHCTLATIDGRVTADFVLPDEQRDTPHSAYLFNDDYDVKGATLHYDTVEDCFYLHVRTKPTVENDNAGTGDAKHVSVLGVDLGITNIATTSTGRF

SEQ ID NO: 14160 - protein, 410 aa, Photorhabdus sp.
MPMLILKAYKFRLEPTVAQSQRLRQLCGCARFIWNYGLAETQRILGSGGRLPSAFELNRMLTGWKKMPEHAFLQAAYTDNLQQKLKDLHGAWQRCFDKTLAAKAPVFKRKNDGRDSVRFVNFEKYCRLESRRVKLPAGLGWMKFRPSRDVSGKIKNATLSQQAGHWFISLQVEIDVPAPQHQSTSIVGLDAGVAKLATLSDGTIFEPVTRFKTRQRQLARLQRHLSRKVKFSANWQKQKRKIQRLHAHIANIRRDYLHKTTTTISKNHAMIVIEDLKVKNMSKSAAGTLALPGRNVRAKSSLNRSILDQGWYEMRRQLEYKQRWRGGQVLAVPPAYTSQRCACCGYTAKANRRSQSQFVCQECGYTANADINGARNILAAGHAVLACGGRVQSGRPLKQEPDTERSAVTH

SEQ ID NO: 14161 - protein, 402 aa, Shigella sp.
VKRLQAFKFQLRPAGQQEREMRRFAGACRFVFNRALARQNENHEAGNKYIPYGKMASWLVEWKNATETQWLKDSPSQPLQQSLKDLERAYKNFFRKRAAFPRFKKRGQNDAFRYPQGVKLDQENSRIFLPKLGWMRYRNSRQVTGVVKNVTVSQSCGKWYISIQTESEVSTPVHPPASMVGLDAGVAKLATLSDGTVFEPVNSFQKNQKKLARLQRQLSRKVKFSNNWQKQKRKIQRLHSCTANIRRDYLHKVTTTVSKNHAMIVIEDLKVSNMSTSAAGTVSQPGRNVRAKSGLNRSILDQGWYEMRRQLAYKQLWRGGQVLAVPPAYTSQRCACCGHTAKENRLSQSKFRCQVCGYTANADVNGARNILAAGHAVLACGGMVQSGRPLKQEPTEMIQATA

SEQ ID NO: 14162 - protein, 382 aa, unknown
  TnpB Polypeptide
MNVKTYNIELQMTEATRNHWMSLLAQTRDAFNTCANMVTSAKTSLSLVSVHSQCYDVLREQFPQVPSQGIIRVQKSVLSMLRSMRGNKHKDASVPQMKSLVLQLDKRLYSNLSINGISLSNGIPQKREKCTFVLYDKVRELFSTCVPKDPTIFARNGRLFLSVPFEVQSLPCKDDTAIGIDLGMKRFFVTSEGKSFVDKEYLKERRRLRYLKRCLQSKGTHSSKRHLQKLSHKERNISKNQVEKACNVLLRSTSASILVLEDLAKIKVKTSKSKEGFKKTRHNNALSQAPFYLFKERLTHKAQLVGKRVETVSPAFTSQTDSRTNKRDGIRQGCNYICSDGVVLDADWNAAVNIALRANHPLSSSQLPLSGRVQSITQSSET

SEQ ID NO: 14163 - protein, 253 aa, unknown
  TnpB Polypeptide
VGLFLSNLSCTSRDDGIAKPEITSEGKAVGIDLGLIDFVVTSDGSKFHNPKHLKRHANNLKRKQQKLSKKTKGSKTRIKARRMVAKVHGKIARVREDFLHKLSRKLVNENQVVVVENLAVKNMMKNHTLAKAISDAGWGKFCTMLKYKAEFDGKTYLEIDRFFPSSLLCSNTLLPIQKMDLSVRSFDCPHCHQRHDRDVNAAINIRNEGLRLLALGISATANRGSVNPKGSGRKKSTNSEVSPAEIGSLPHTA

SEQ ID NO: 14164 - protein, 424 aa, Thioalkalivibrio sp.
MVQRKVTYRLYPTAAQLAALEHQRWVHCLLWNEALAERRRAWGERQASLGFSAQCKRLTEWRRQSKLLRGINAQSGQVTLKRLDLAFQHFFRRVKNGETPGFPRFKPLHRFKGWGYKTHGDGWRLMTNERMKHGTLRLGGIGKVAIRGKPRTPGTPKTCEIIQRGRRWYASITLDCAPERQRGDQLGGLDWGLETFATVATPAGTETIDNPRCLAGTLEKIRQVQRDISRKEEAAKKASGKTRRFPVSNRLQRAYERLRGLHRKVANQRNNFLHQTTTQLVGQFAALGLEALNIRNMTASGGQHKRGLNRCILDAAGGAFHQRLGYKAEEAGTWAMEAPTRQLKPSQTCHACGRQEKKPLSQRRHECPCGASCSRDENAARVLMAWAEQQLSGREPAEAWRVVRPNHPPDDPARPEKRETHAIV

SEQ ID NO: 14165 - protein, 550 aa, unknown
  TnpB Polypeptide
VAKTQTLSFPMRLPDAMQAEALRLLDASTIAINQIITDLWPQLDLFAADRTGPAWKQVEKQVLHRSGHGSRQERCEMEQAGRILRAQASRKQVFHTILPLLSEGLIWPAEGERQARKDHRQIKEQVRALRAQMQDAGEEADAFMAMTNVIEQACNRYLHTETFPGTYEDLQLVPVLSAEQLTFAGDDGRSAGQTYRARTEVSHCCDVQTRQEQKNASLWLKLRSPDEQGKWAWGEWSEEIPLPPTVFSYLWQGATAQAPTLRAIKSDDASRVAVLDVILEAPAKYVSPLEQESRVLGWDWGIRSLITVSVLEKPEGDEPYRQVSRPVFLDTGGIDGRQARLRREIDRLKACRERYDTPIKQTLSTHAEQHTPLPADFPRWQERVSAYSARIKQCWKKYERRNRELAHLASNLLILLAFVYDCRLICGEDLTTLKTEGRGRGVRGRFRNWRNNTTVRGELWRVLKYKCHLLGMRTRQVEPRGTTHTCPHCLTPVKGHHLSGEQSPTSTGNGSMPNVSLAPEREVKDQSMTPREGERWFQQTGVSLRAISTW

SEQ ID NO: 14166 - protein, 136 aa, Amphibacillus sp.
LYTTKHTNGNIAIEGDKIKRPKLGLVRFAKSKEVEGRILNATVRRNPSGKYFVSLLVETDVQPLPKTNKEVGIDVGLKDFAILSNGKVFENPKFLRNMEQKLIREQRILSRRVKGSSNWNKQRVKVARIHERIANA

SEQ ID NO: 14167 - protein, 197 aa, unknown
  TnpB Polypeptide
LGIKDFAICSDGKVFKNINKTCKVRKIEKELKREQRKQSRKYLVCKKSGKKLYECKNFQKQKLVISKLFFRLNCIRNDYINKIVSEITKTKLNYITIEDLKVSNMMKNKHLSKAISNQKFYEFRMKLLNKCKENNIELRLVDTFYPSSKLCSNCGHKKHNLKLKDRIYKCDNCGIEMDRDFNASLNLKNAENYKILA

SEQ ID NO: 14168 - protein, 442 aa, Ktedonobacter sp.
MGLSMSRKPEKTPEQDKQKRKRKKKTKQTITRAVTPIRLIEANVGKLAALDKLMAVYLPLCQQYVTWFSRAERVPDRYTDPVFESDLSERLHRVAIQQAAGIAKSFRTNRQAAYDASLENLADYTAAKAQALASGKPLDMERKEPEWHEWNLPELRVPCIQANANVVVVEKSEDTTFDYWLRISTLDKGNPLRVPVKLASYHKQALEGRTLNGSTTLHKRNGVWWLTLSFDEDVPLQTATSAPCVGVDVGIANFITTSTGKQYGTFHGKLARRQKRDREKRRRKAKLRACLKKKGVENLPSTSSATGQRLSRHVRQEINRAVNLLLEEHQDARIIYEDLWRISLSNLLGRLPNAEGPRTRSRLLTPRRSVLVAISLTARIEPISRRSAVGSVATAITLITMPRSISRVAIEMQNCRPARRKSRSKHSCCDDMRCGSRYTGSP

SEQ ID NO: 14169 - protein, 378 aa, unknown
  TnpB Polypeptide
MLVPNNHQCTRLFQFAGTARFAYNWALRKEIDAHEADEKFISNFDLRKEFTVLRNSAEYAWLRTISNNVTKQAIKDCVDAYQKFFKKLSGRPKFKSKRHGDFSFYQDTDKIRITATHVKLEAIATNKKRNKQSLNWFRLAEQGRIPLNVKYNQPRITFDGLNWWLSVAVEFADPKSAENCNEGIGIDLGIKNLATCSDGTVYPNINRTAKVRNLKKKQRRLQRSISRKYTMNKKGESYSKTRNIIKSEKKLLRLHHRLANIRQNYRHQITSFIIGRKPNPIVLEDLNVRGIMSNRHLAKAVQEQGFYEFRRQIEYKAAWAGLRVVIADRFYPSSKTCIACGHVKKNLRLSERIYHCEHCDNEIDRDWQAAINLKRYAS

SEQ ID NO: 14170 - protein, 523 aa, unknown
  TnpB Polypeptide
MFVSLQFKLELKKEDKEKLIKLMRKQSSAIRVAYSMLKELEKEKAKNPHAQIYQRLRQLFPELPTKYIDSAIYKAKQYPTDKPVVFGGKRLFEKLCKNHFTGKLRERLKKQWREIRQGTLISIGSKEDKGNRLMRFEDLDEQLHLRITIGNREFIYAKVLREPSNNKDKWITFMIMLLESKQTKSFFPYTVELKLRSGEVYGSVSFEIPTPEVKYTKENGVIAIDTNASPIHLAIAEVSKTGELLSYQTISLHHLIGLSQNGKDHQEWILAHKIVDLAIEKGKAIAVENLKKLKKGMRGDGKAKLRKRLHQWNAKKFLQKLKRVAMLKGVEVIEVNPAYTSVIGMLKYAPQLSIDKDIAGAYVIGRRALGFKEDMPENYEKLLKDKAYLEFALKRYEEREKELRELIEKESNEYKRNALKSELRSVENAKELLTNLIQSLQSESSSCKGANGRNPKQRETKKVSQSAWQVLRVAILFPILGRIPPRDLSPLKPVLVEGAWDRVRHSNGLVPLEAGGTVPIRDF

SEQ ID NO: 14171 - protein, 462 aa, unknown
  TnpB Polypeptide
MIKSSKVKQDKERKGYKFRLIVPNSDIERQLTKIVGSCRFVWNKALALVKQDDEDYRTMVQMSKMNSGDDTGIARFFKFNPYNQLSALLTEWKQQPETEFLKESYSKSLQIVLEELGQAVAEAKSKTNPKRYPVFKKRGVKDSFSWNGTIKHDVENGRIFIPKIGMWLGYTKSRDVLGVVKNVTISNQAGYWYVSLQTERQLSQVNPEWVNANRAIGIDVGIAKAVSASDAISFEYQGKQISSNQLESINPLREHQTKLAKLQKDLARKTKFSRNWNKQKAKISKLHSKIANIRNDFVHKVTTAISKSYAYVVVEALKVKNMSKSAKGTADKHGKMVKQKSGLNKSILDQGWGMFRQFLAYKLKYNYGTELIEVNPQYTSQKCSGCGHIHADNRKNQASFRCVKCGLSMNADLNASLNIKAAGLAVLACGVDGMPSIQNATMKQEPTELASFRVSDVGILAL

SEQ ID NO: 14172 - protein, 407 aa, unknown
  TnpB Polypeptide
MLLSRREVFSPTEEQKIILGHMGYAAFKLWNVANYEKRNYKELGMSQYPNWYDQKKRLKENFFYKNLPSQTAQDVLQQLEEAWKSFFMLLKSKGVENPNPPRFRKKKMDITFLKDAIRQEEGKIRLTIPKQLKTYLKSQEVDANYLYLKTKRFSDIHIKEIQIKFDEKRYTAIAVYEEAEVPIQEDNGHYLAIDMGLKNTLTCYDSEGKTFLINGLLNTTHYFDKQIAGYQGISDRQQSSIGIKYPKKSKKVRSLYRRKKNKVTDFIHKTTRYVAEYCLAEHITTVVIGDMKGIRKENNLGRINQQLHSFPYEQIFQKLEYKLKRYGIRMIRQKESYSSQCSPKSDKVGKAFAQKHNRKYRGLYVDGTDIYNADCVGAYNILRLYLQKNKLPFPEAVGLNCPQKVFV

SEQ ID NO: 14173 - protein, 453 aa, unknown
  TnpB Polypeptide
VAARFAVPEGWSVQAFSFALDPGPGQLQLLSRQFSGRRKAFNWAVRQLKNDIEAYHAGTAAPDAAPPSFYGLRQQWNLAKNDECADRETGEVWWPQISKEAFADGIRGAVDAYWRWQKSREGAIAGKRVGFPRFKRKGRDDDRFTITTGTMRVNPDRRSVSLPKVGTVRTCENTRRLQRLIAIGRARILAVTVRRKGTRIFAIFRVLVSRRVSAPARPDSVAGVDVGVRRLATVAAPDGTILEVAENPRALDRHLAGLRRACRARSRRKEGSIRYREANREIARLHRRIADIRADAISKLTTRLAKTHGTVVVETLNAAGMLAQKGLPGARARRRNLADASLGQIRRHLAYKQAWYGCRLVEADRFYPSSQICSACSLQTAIGWAEQWDCPGCGTHHHRDDNAAVNLARYPAPGWQAVGPVGSRVKRRADRKTGHRPAGGDEAPNPNPDRGAA

SEQ ID NO: 14174 - protein, 396 aa, Nocardia sp.
VQLRYNFRVYPTPGQRIALGQAFGCARVVYNDGLRARREAFESGQRIGDAELSTRLTEAKNTRERAWLSEVSSVVLQQALADLNSAYRNFFASVTGKRKGGKVAPPRFRSRKDNRQAIRFTRNARFVVTAAGKLRLPKIGDVPVRWSRELPSAPSSVTIIRDAAGRYFASFVVDVDPRPLPSVDSELGIDLGLSTFAVGSDGKMITSPRFLRQAERRLRKAQKALSRKDKGSKNRAKARRKVARAHAKVADTRRDWAHKQSTMIIRDNQAVYVEDLCIKGLARTRLAKSVHDAGWGMFVRMLEEKAARYGRQFSKVDRWFPSTRMCSVCGAIGEKQPLHVREWTCTCGTAHDRDLNAAINILAAGRAESSTPVELVSVSTPVERPAVKQEPAGSAA

SEQ ID NO: 14175 - protein, 396 aa, unknown
  TnpB Polypeptide
LVKESEPYKDLGSNVGQGTLRILDKAWKSFFKAIKDWSKNPSKYLGKPKLPKYRQKDGRFILSLDSNKVKLKDEYVYFAWKPFKQFNHRFRTNAKERILQCRFIPKASHYVMEIVYEIEVSDYTNSSDRVAAIDIGVDNFITMVNNIGENPIAVKGGVIKSINQFYNKRKAEIQSELKKINKQDWSKQLQKLTDKRYEMIKYQMHCISKYVIDWCVLCGIDTLIVGHNDEWKQKNKGMQNFTYIPYEMFIQMLSYKCENNGIKFVETEERYTSGTLMSSLLLLPEIETLNRMNLLPKIESESPFNSIIQPNLNDAGWTDEVSCLHNWHVLGSLLNEIERQGSYTNRLNYIISKIVSASEIYRTINERGFQLDAKSGGSHLNMWLGAISDFRTQAGI

SEQ ID NO: 14176 - protein, 425 aa, unknown
  TnpB Polypeptide
LVRHNVVTSYRSYQERVKVANGESSKYVSQGWKRTANATPPSYGEGYVNLGSVDELYALVENDPFADGEIVLKMVIQGAWYRLIFDFDNKRFTEGKVARPLIKVQGGEPVFIFTVVTDNPVVQFSGDYVIGVDVGINAYATVVVREVATGRIVYETTLSQRVHSLWNSVRASEQQVRDLKAKAVTLLCDRQARMAALDEAQFHREAASRKKRELAILAAQEIVDLSHMWGNAVVAVEDLGWVANTMQNGRWNRGALVQWLTHYVSQNGGWVVAVNPANTSQQCHECGQRVSHPTHELSVCPEHGTMDRDVNAATNIAARAVPRVTKARATRAKNRKIQPQAPLRTPPARTSLKYPGRDRTKNTPTPRRKNLCRAAREVILPVRPARVQAHSLDARVLADQGTRGTLGTVQAALKQGCVTYKCMLL

SEQ ID NO: 14177 - protein, 379 aa, unknown
  TnpB Polypeptide
MANKAMKYRAYPTTEQAIMFIKTFGCCRKVYNLMLNDKIKSYKATGKFASVTPARYKKDYPFLKEVDSLALANVQLNLQSAFRNCFSKSRKKKFGFPKYKSAKRSRKAYTTNNQKGTVAIIDNNYIKLPKVGKVKAVIHRIPDNNWNIKSATISQESDGKYYISILFEFDNIISPYVADTTNAVGLDYASDGLYIDDKGNTGTNHKYYRESHKKLAKAQRRLSRMQGSRKYEVKSNNYRKQLRKVNKIHRHIVNQRLDNLHKLSTEIANQYDVVCVESLNMRSMANKGFGNGKATLDNGYGMFLSMLEYKLSDRNKYFVKINKWFPSSQICHCCGMSHPEMKDLAIRIMKCDCGLTMGRDQNAAINILQEGLRLLTEVA

SEQ ID NO: 14178 - protein, 387 aa, unknown
  TnpB Polypeptide
MSAVQVRYRYRAYPTAGQRQMLARTFGCARVVFNDALRLREELHEAGEKLSDSQVQARVITLAKQTPEREWLNEVASVALVQACQDARRAYRNWFDSMSGVRKGRRVGKPRFRRKSNRQSIRLTRNGFSLRDDGRVYLAKIGDVRVRWSRPLPSRPSSVTVIREPDGRYYLSFVVEREAQTLPAVDHETGIDLGLDRLIVTSDGEIVANPRFLRKRLRKLARLQRAASRKQKGSANRRKANRRVAVAHRKVRDARLDHAHKTALRLIRDNQTVYAEDLAVSGLARTRLAKSVHDAGWSQLLRLIAEKAGYYGRTFRQIGRFVPSSQMCSACGRLDGPKPLSVRSWACPCGAVHDRDVNAAQNILAVGQTERLNARGAPVRPPLEAVA

SEQ ID NO: 14179 - protein, 435 aa, Okeania sp.
LKARYKYRIYPNHIQTTKLNQLFGCCRYVWNQSLAHCNQLYAKGDKKPSYTDLTKQFITSAKKELIWLKNVASTPLQQSLKDLDQAYKNFFDSCKGKRKSIKAKPPKFKSRKSRQAARFVGANYKVGQDKIYLPKVGKIKIVWSRPLASQPTSVTIIKDSANRYFASFVVETNSEFMPKTNNSIGIDLGISTFATLSNGDKINAPKPLQKNLKKLAKFQHKFTRTEVGSKRREKARVRVAKLHGKIQDIRTDFLHKLSTDLVKKYDTIVLEDLNVSGMVKNRKLAKAISDLGWRKFRTLTESKCDKYGKEFRVINRWEPTTRKCSHCGFKGSKKKLNVREWTCLNCGTFHDRDINAAVNILNTPIIETVTQPITKVETIKAEVLETPVQLSIFEVVAEGQPETVKRTRRRPKTGSKSADSNDVSTRPEFKQLRLF

SEQ ID NO: 14180 - protein, 428 aa, unknown
  TnpB Polypeptide
MSKKRKKRKIDYRTYVIAKHHKCDMLDSLSLLGGDIYADTVRLVRKTKDEEDRWLKASEVKSELKNRGYPCQSHSVQAIVDDYFFALGSYFQRVKKDKTSRPPYKTRKYHSFRWRASGIKYEDAKLRLSMGEGREYLWIEIGEEYHDKVPSEIGLVYNINDYTYEFHATYEVNDVQTVKKVTESKQEKKISAVDLGEIHPITSYDGEVATIYNGRMHRHIVQYRNKFLAEINRALSFTKRYSRKWKRLKSAKRRVLLKISNQLKDMRHKITSRYVSTCVVSGVQTIVIGDVAHIRRSAKYSKKSNQKIHQWPFSIVEHMTTYKAEAIGIEVTKENEAYTSQECPSCRHRKKPSGRTYKCSKCGWEGHRDAVGASNIFRKHKASGSRDLVIIVGNLAIPEGVRFHPHLRRLDSWSPHAGLISSKRSTRT

SEQ ID NO: 14181 - protein, 256 aa, unknown
  TnpB Polypeptide
MTKAGMIRAVFPRRPQNGWKLKRVTVEKARTGRYYAYVLYESLVQSPEPVLPVPERTLGLKYSLRHFYVDDQGNRADPPRWLKQSQEKLVHLQRRLNRMQPGSKNYEEAVLKYRLLHEHIANQRRDFLHKESRRIANAWDAVCVRGDDLGAMTDTLIQAGSAVKEAGFGMFREMLCYKLARQGKAFIQVDRYLPTTRSCSACGLTRDALHARDYRRSGWVCPECGAVHDREVNAAKNIKARGLEQFFDLQGQDRSA

SEQ ID NO: 14182 - protein, 368 aa, Ruminococcus sp.
VRKINWAVKIRIYPNAEQRVQIEKTIGCSRFIYNCMLADKMEYYKKEKKMLRNTPASYKKEYPWLKEVDSLALANVQMHLENAFHKFFREPSAGFPRFKSKKSSRKSYTTNVVNGNIFLEGKYLKLPKMTAVRIKLHRPISEKWKLKSVTVSREPSGNYFASLLFCCENQTAEKRPAERFIGIDFAMHGMCVFSTGKRAKYPMFYRNTEKKLAWEQRKLSRCQKGSRNYKKQKKRVALCHEKIRNQRKDFQHKLSARLVENYDAVCVEDLNLKGMAGELHLGKGVHDNGYGLFLSMLEYKLEERGKYLIKVNRYFASSKICSVCGKKKEKLSLSERIYYCECGHRMDRDVNAAVNIMNEGKRIFAECA

SEQ ID NO: 14183 - protein, 225 aa, Okeania sp.
MVKPNNCWYYEVSKCAPQYALRYLSLAWKRCFSKISAMPKFKKKGRDDSFTLDGSISVGFSHIKLPRIGWIKTYELLPNNVTPKSVTISKKADRWFVSFKVETIPQNTDKSVDVVGVDLGIKSLATLSTGEVFVGVKSYRKLEAKLSRLQYLNRHKTKFSCNWKKAQLKIAKLHSKIANIRKDTLHKLTTYLAKNHSQIVIEDLNVSGMMSNHKLAKAALVYGIL

SEQ ID NO: 14184 - protein, 238 aa, Filamentous sp.
LSDSEIKFPGNLGTMRAKIHRDCVGKLKTVTVSRMPDGRYYASLLMDDGIEKPESSSEGKAVGVDLGLIDFAVTSDGSKFNNPKHLKKHERNLKRKQRKLSRKKDKTTNKRRRAKVALAKVHSKISRVREDFLHKLSRKIVNENQVIVLEDIAVKNMVKNHCLAKSISDAGWGMFQTMLKYKTEQDGKIYLEIGRFFPSSHLCNTTLLPIPKMDLSVRSFLCPHCHKHHDRDLTYSPA

SEQ ID NO: 14185 - protein, 428 aa, Halorubrum sp.
MHYNYKYRLNPSEAFEEKLLYHVDTCRQLYNHVLHRLNEADDIPARYEVQGQLPDLKTWWDDLGDIHSKVLQMVVKRVYDNLSTLKAQKENGRAVGMLKWKPPREYRSLTYNQSGFKLKNTSGRPTLWLSKIGEIPIHLHRDTPKNATIKQVTVKQESTGEWFATLGIDVDEATPEKPENPEQVVGIDVGILKYVHDTDGTAVESPDFSDERERLEHAQRDLSRKKHGSANWEKQRRVVAERHADLKRKRRDFLHKLSNYYATEYDLVAVEDLDAKALVELPGNSRNRAGAAWGTFLRMLEYKCEREGTHFVAVNPSGTTKECASCGVSTEKPLWVREHSCPSCGFEADRDANAAWNILSCGLEDVGVVHSESTSPEISDFWCANESLRDSLTPVETELPVDTSVSAKCVVETGSPTLKERTAKAVSE

SEQ ID NO: 14186 - protein, 424 aa, Halorubrum sp.
MKRANTFDVIPQSSEDEELLRRLLDASAALWNEINYERREHYEDPDQDVWEISEYRGRYGGTLGASTVQQIERKNREAWRSFFSLKKKGEANGKPGFWGNAEEGRELRTYIRNTSYSVKWGKYSRLEILVGQDLKDEYGLGHRERLRLEVWGEPNWKEYDKQGRLELCWDEQARSFRAFQPVTIDTSRLAHPLASEEAALDLGANNLVACTTITGQQYLYEGRDMFERFRETTREIARLQSLLEDGRYSSHRIRSLYRRRTRRRDHAQDALARDLIERLHSEGISTVYVGALTDVLDTHWSVESNAKTHNFWAFRQFIDRLACTAEEYGISVEVRSEAWTSQECPQCGSTERTTRHRDTLTCPCGFEGHADLTASETFLRRQTDVARSMARPVRLKWNDHEWSESPRSCSNEERTNPQVASVGR

SEQ ID NO: 14187 - protein, 423 aa, Desertifilum sp.
MTLIVNYCYRIYPDSTQEQTMLHWLEISRQVYNYALREIKDWVNSRSGSWDRCSLEREYIIPADQSFPTYYAQQNALPKAKKEFPLLGKAPSQVLQTTIRRLHEAWNYFQNRGFGFPRFKKFGQIKSMLFPQFKTHPITGWQIALPKVGKIPINLHRPIPDGFVVKQARVLRKADRWEVVLTIESDVSIPEAQPYGDALGIDLGLEQFLTTSDKEFIARPRFLTSLYRELKLLQRKYARTKPGSKNRQKACIRVAKFHNHITNVRKDWQFKLANHLCTKDGIGMIFVEDLNLKAMSRGMLRKHTLDAAFGQFLNLLEWVAKKHQVYFLRVNPNGTLQTCPQCRTHTGKKELQMRVHQCGECGDQTDRDRAASEVIRLRGLELMSTQGLCGIENAYAVGLPGTDESQSRSETKSRKRKTRNAQQ

SEQ ID NO: 14188 - protein, 434 aa, Actinomadura sp.
MVKRQFGHRVRLVLPPDQVAALNAQAHAARALWNLLHDWWTMMPRRLRSLAAAEAAIRQARSDIDWLAVLPAQAAQAVLKTYMKAWRNCWEGRAEAPAFKARLRTVMSVDIPQGRDLHVKRVHRRWGMVNIPKMGRVRFRWTKNLPVGKHANTGNRITGARLVKDALGWHLAFRIQVLEVEPEPHAGPEVGIDVGVNISLALSDGNHHSHGRPARTKDARTDRDKWLNDNEKARLLELECRAAHRKSFGKPGQGTSRRLQRTYDQIARLRARAKRRAVDWQHKTTTLLADQYSVIVVEDLHIPAMVASARGTLQEPGRNVAQKAGLNRSITQEAWGRTLVMLTYKTAQRGGALRKVPAPGTSLRCSACGLTSPGSRRSQARFACKNTGCGWEGNADHNAARNILHLYQTGHPLVPAAGRAVVRRARRVKPATAR

SEQ ID NO: 14189 - protein, 256 aa, Actinomadura sp.
VKLVVQIKLMPTPDQAEALAATLHVCNMAADFVSRDAFQRRVFSRVGLQKLLYRDVKALGLSAQPAIHVIRKAADAYATLRAQMEAGLLGGARSVRRTKAESKPITFRPDAAQAFDDRCLSWQMDARTVSIWTTGGRMRDLAFAGEPSQLKTLADHRKGESDLVRRDGKWFLLATCEVPEAPLNHDPVDWVGVDRGIANLATTSDGDNYQGRGLQRYRRRMARVRAELQAKGTKSARRKLKQRARRESRHARSHEP

SEQ ID NO: 14190 - protein, 504 aa, unknown
  TnpB Polypeptide
MSDTITLTYQTRAVLEDVASGILSECASLFNTVERSLYAERAKGKTTASCKNSFLKKYQITARQFNACRVSVEGKVAACQAGQELAVVTLKQQIESLDKKIRQLEKKPSKHSILDQKKRRKGILSTRLTVLEKDIKQGCVHLCFGGKKLFRAQFHLEKNNFSSHQEWKAAWESQRNCEFFVLGSKDETGGNQTCTAKIEGDGKLTLRLRLPDALTEKYGKYLEIKNVHFKYAMEAILSALNNPNGQALSYRFKKDKKSWRIFLSTDLKKVDAVSIEGNGVIGIDLNADHIAYVETDRFGNPIDRGVIPWISYGKRKGQLKALTGNICKELVEKATATKKTLVIEKLDFKKKKSTLKESSSKFSRLLSGFAYRLFFSCLIARGFKNGIAVQQVNPAYTSIIGRVNYAKRYGLSIHLAAALAIARRHQKFSEIPCSSHGEIPDGKGGHVAFVLPARNRAKHVWHFWGQVKKKLSTVLVAHFRAIKNRSLSPLNPTLETNNSLLLLV

SEQ ID NO: 14191 - protein, 513 aa, unknown
  TnpB Polypeptide
MVYRTLMLQLYRPSGRKRDLMDRALLRYSRALQMLMSRYESQIDALARSGERITQKGLLAMIDRKTAKDLNEFRVQPFKDSLKIEFAALAAAYIRQKRGNPGARYPLVYLDAARYRAAVARCIDRLDGGEIGRRTFTSECTRLIGRVGRLRPLYFGRYAVNRDYCLLYDEFKDRFYAKLYLLNAADGLRGRTAAGGLSLCYVAEGLPPMTDPSGKKRYIVVPLAFGKSQEADLKRALEEPRLLHTARLTKRDGRYYLMVNIACEPGPALAAESTMGVSRDPSGGVAYTVCGPGGEILKQGRIAERAGPDLTYLLCKRIAAVALENRSRVILESNGGKNDRMPVRGEAEGAAVSNRRYAALAAILKYKLPEKGLPPPIEVSANGLFLTCPRCAKRTAQNRISDELFACVECGYASEEEWIGSENLAGRLLKYRRDKVPLTVEKQDDTLLFYNKNLGFRCVLPQNVTDYRPMYDELDRYLRSLDGTFQENPRKYAVWKKLRRSPSLRDAVRLVVK

SEQ ID NO: 14192 - protein, 352 aa, Henriciella sp.
MKQTKTLRVRVKDNHSAQLRRMARSVNLVWNYVNELSERSIRERDVFLSAFDLQKYVQGVNQELGLHSHTPVQVCKEYATRRKQFKRRRLAWRKSYGARRSLGWVPINTGMAQWKNGGVYHNGTVFKVWDSWGLADYKFRSSSFSEDARGLWYFNVVVEFEARPSEGAASVGIDLGCKDAATVSDGTKETGRWYRGIETDLATAQRARKKKRVAAIHAKAANRRKDAMHKLSRKLVDANAAIFVGNVSSKAMSQTRNAKSALDAGWGMLKTMLSYKCDHAGIVFEEVNEAFTTQRCSCCGVIPDSSPKGMGALGIREWECGSCGAVHDRDVNAARNILALGHERLAGGMPVL

SEQ ID NO: 14193 - protein, 402 aa, Actinoplanes sp.
IVSRAVKRAFRYRFYPSPGQAAELARTFGCVRKVYNLALSARTEAWTLRQERVSYNATSALLTGWKKTEELAFLNEVSCVPLQQALRHLQVAFTNFFAKRARYPRFKSRKRSPKSAEYTASGFRYRDGLLTLAKMTEPLAMVWSRPLPEGVSPSTVTISQDPAGRWFVSLLCDDVIGETTAGGAVGVDAGLDHLLTLNTGEKIANPRHERADRERLARAQRNLARKEKGSRNRAKARLEVARIHARIADRRRDHLHKLTTRLVRDNQTIVIEDLTVRNMVKNHRLARAISDAAWRQFRTMVEYKAEWHGRDVVVVDRWFPSSKLCSVCGALAETMPLNVRSWTCRCGIVHDRDVNAARNILAEGLSVAACGAGGRPQRESSRMRQPVMKQETRRVTAGVLRL

SEQ ID NO: 14194 - protein, 406 aa, unknown
  TnpB Polypeptide
MRVRVTARVKAVTPNPQPILSFLKAYRDWTQYVVDQIWGLDHIPSMKELHRRFYKLLRKQGFRAHHCHKIERRAREVVKATKKNNGSKPVLRKLTARLDYQDYKLDVNSKTLRIAVLNNEWIELKLQWYSYLDKYFNGEWKLKEILVSYRVDNIWVYFTFEKEVVFKQPRTIMGIDINFDNITYTIIDLRGNLVTMGAIPFNGLKRALAYKVIVEKIQRKYSRRWRYVKGIREAIRKHSRRARNILLDSCHFISRKVAEIAKEYNAMIVLEDLNKLRERVNGTKKFNKKLSLWTYHRIQSYIHYKALIEGLPITYVSPRNTSKTSPLGGELKFINYKWIILPNGHVVTRDIVASWNLALRGLKLLTRDVGSCGFMDSLNAPDQMQTQEGMREKPVQVSKILIVTKR

SEQ ID NO: 14195 - protein, 142 aa, unknown
  TnpB Polypeptide
VLFLSFLDYIYLAISCVVAGDIRNIRREKDLGHRTNQKFHSLPYNRIYIMLEYKLKRYGIRFIKQEESYTSQCSPLSPKVEKRYAEPSKRKERGLYRDGNRTYNADAVGAYNILRKYHSVSGVKRELSVTGLKTPEIIKVAV

SEQ ID NO: 14196 - protein, 256 aa, Campylobacter sp.
MQISHDEYNKTHKIKNLNNQSIGIDLGIKEFVCLSNGLMIKAPKPLNKLTRLLVKRQRRLSKKQHAKTKQEAINGVKKSNNYLKESKKLAKLHSKIANIRSDFLHKLSSIIIKNFDYIGLESLNVKGMIKNHKLAKSLVDVSFYEFNRQLEYKANYMQKEIHRVDKFYPSSKTCCVCGNIKQDLTLKDRIYKCKSCGNIIDRDLNASINLHKFVNETVGIVNSEFTPMDLTALLDDLAINQIVTSKVEVGIQQKFY

SEQ ID NO: 14197 - protein, 292 aa, unknown
  TnpB Polypeptide
LNIVIFTNQQCKLRDNQIHFPKMVGLSKLNTTVDNLQQVRIIPKYQHFVIEVVYKKEVSNEKLTHDNVLGIDLGLNNLATLVSNQPEVNPMLINGKPLKSINQYFNKKKAKLMSFIGDKGTSNSIGLLSKKRNQKIDDYLHKASRNIIDYAVETSSGLIIIGENKHWKQEINIGKKNNQNFVSIPYDKFKAMIEYKAEEFGIDVIFTEESYTSKSSHLDNDPLPVYTEGESHKFTGKRISRGLYQWSKGIINADLNGAIGIIKKVVPEALDSLIELRNRGAGFAPFKVVNIF

SEQ ID NO: 14198 - protein, 439 aa, Natronorubrum sp.
MLEVHRTHRAKILNHSQVAEMLDQHGWSASKLWNVANYHSRKVWEDTGEIPGHGDLKDELKGHTKYKGLHSQSSQRVLEELAEAFNSWYGKRKSDDRANPPGYRKKNYYDDEGRRVHEEHPRSTVTWKQNGIKHDTKNNRVRLSKGGNHKEHPKAWEYILVEYETRPGVEVENLQQVRAVYDMAKTRWELHLVCKDEIETPNAPGNETVGIDLGISNFAAVAYSTEEADLYPGNRLKQDGYYFPKEIAKCDDSGGDKATRLHHKWSERRTHFFHSLAKHIVQRCVEKDVGRINVGDLEGVRKDEDGESKNWGKHGNLDLHGWAFDRFTNILSYKAKVEGIEVIEVSERNTSKTCCVCGREGDSQRVERGLYVCESCDAAFNADVNGAENIRLDLNQSNSESSASLGEDRSTGWLAQPGVYLHDLSSGFQPQEQVVDCKP

SEQ ID NO: 14199 - protein, 517 aa, unknown
  TnpB Polypeptide
MTDACFKSLEINLMIQATYQTRLPDELVPFAERMSLLMSDVERHLYQDLKAGRALKDLKREYQLRFGINARQFNSVHSVLKGKIRSRKECHKLQIKELKSRISDLKKRIKSLTKTLSEAPDACPIKRKGYTIKQWTRFRIHQKKRRIACLERKLEKLTATEPSIIFGGRKLWNTQFNLEENGYRNHDEWLTDWQRHRNSQFFFVGSKDETAGCQICQLSLDGSIKIRVPKSLEIYYGSYVTASGIDFNYGQDDVLAALENEQSLSYRIARKDEKWYLFVTTERPEVPSIAESRNGAIGVDLNPGVVGWAYCDAEGNLKAKGQFPVNLQDKTSAQTEAILGDVCAQLVTLASTWECPIVVEKLDFSQKKVSMREQGVRYSRMLSNFAYSKFDQMLLSRCDRFGVKLMHRNPAYSSVIGMTKFMSMYGLSSDTAAALVLARRGLRLSERIPSRTARELQVDSSRQVWSHWNAVKKGMPWSRHSLFTSRVANSESVVKLTVEALGESGDCGQANGGTSDP

SEQ ID NO: 14200 - protein, 492 aa, unknown
  TnpB Polypeptide
MPTYILELKLHTKRESDLRYLENYFREVARISNTVRRFAIRQLELLSRDPAYKTLLAEYRQLEKGKEKTEVSHQLSVMVSSYGLTKYGLQKSALELRRHFTYVHADVYQKVCDSVWKGVEKVLYQDGKQIHFKRWEDFLSFEGKKNSTGIIYQDGKVYINCTSKRPKGGIILSVILPKNQGSDHWKYEMTCLCDPTKYCRIVRKKFSTGWRYYVQLVQEGIPPQKHPHGTGRIGVDIGTSTVATVSDTACHLEVLGGNIATKEKEIRRIQRKLDRSKRATNPQNYKPDGTIKKGKKRWTYSRRYRKLRDQLRALRRKRAAALRQWQEQFTNTLLEEGDTVYVEKMNFKGLQKLAKRTEKREDGRYKRKKRFGHSIQNRAPAQFLSILERKLSYTDGQYLEVETQTFKASQYDHVTDTYQKKKLSRRCHTVKGVWVQRDLYSAFLLKNANDTLTHADRTLCLQTYALFQQLHDTCILALKTCNRKLPASFGIK

SEQ ID NO: 14201 - protein, 390 aa, unknown
  TnpB Polypeptide
MFKSFKYKILPTKDQAELINKHIGCTRFVFNLALECKQMAYTGNKINLSCFDLQNQLPDLKKECVWLKKINSQSLQQSIINLDDAFKRFFKKQADFPKFKKKSNAKQSFNMPQNVLVKNNKLVIPKFKKGIKIILHRKLKGSIRQATISKTPTGKYFVSIMCNIGEVVQPKLQIKENTTIGIDLGIKSFLVTSDGQEFDNPKFLRKAQSKLKFTQSKYSKYKGKKTKNRLVILHERVANQRKDFLNKLSSKLISENQTICIEDLTINNMVKNHKLAQSINDCGWGMFIAMLKYKAEWYGKNLLQIGKFEPSSKACSCCGSINQTLTLKDREWVCTNCGTIHNRDINAAINIKLFALNNYLSVECRLENRNELPRINKGVMTYEAQSSLLN

SEQ ID NO: 14202 - protein, 402 aa, Chlorogloea sp.
MIVREAKLINGTKEQYQLFDDAIRTAQFIRNKAVRYWMDNRKVGKADLYKLCKDLAKEFAFALKLNSAARQASAERAWASISSFYTRCKKGEKKKGYPKFKKHCRSVEYKVSGWKLSEDCKTIAFTDGFGIGSLSIYCNNQTREDLYRLKINRVRVVCKADGYYAQFCFDADRKEYGEYTGNVVGLDLGLKYFTKDQNDNAVIYPQFLRKSERRLKKAQKRLSKKFELGKKPQSNNYHKARKRLGRVHLKIQRQRKDWAIKQARCVVHKCDVIVYEDLKIKNMVKNHHLAKSITDASWYQFTQWLEYYGKIWDKAVVAVSPNYTSQDCSNCGHRVKKSLSTRTHSCSSCGVEVCRDPNAAINILTKGMKVLGQEWQNSTQGHWESASREGKLGEKTASTIDE

SEQ ID NO: 14203 - protein, 324 aa, unknown
  TnpB Polypeptide
MLVKGVAFYLASELPFEAKSLLEDFRLAVNNAVRAGLQARVTSRNALCRIAYKDFREQHPRMYAQHLVSAFEVAGGVLKNHRARIRKCVASRVPYVKRLMMKAENQAFKLDRKTGIIDLPIRAGCHVELRLIVSQYHRKYLDDMSLTLGSLTVLPDRVVVAFRKDAPKPFVPESALSLDTNERSLDGVFVEGGVAKAIKAEFPEIAIIQQRHHDRRRRLQKKKAHDRRTSRALCRREGAREHHRIDYRLHQVANSVLKFAEERKSAIVLEDLKGFKSKGGKELNRRLSLWPRRKLHRTIEYKAKWKGIPVTKVNPRNSSRTCPI

SEQ ID NO: 14204 - protein, 410 aa, Halorubrum sp.
  misc_feature (83)..(83): Xaa can be any naturally occurring amino acid
  misc_feature (265)..(265): Xaa can be any naturally occurring amino acid
MRRSRRRFTVETLTSTLRPISRRRRSSDRKTRTQIPSNPLSFETTCSMCPTTKRQFSRRGGSKSPSTTPNGDAETPSGVLLTXWVKVPVYDSERGRGNSIWCPAHVPRKDEQLVRESDVRDSELVRRDGDWYVHLVVKQSVTVADEYDDVLAIDMGARWVATCAFLSDRKTTFYGEEVRHIREHYKQLRKSIGKAKPRQGQQVVERIGDVEARKVDDRLHKIARQIVADAEERRAVIVVGDLGGIREDNDKGRYVNDKTHKMPFXVIVVGDLGGIREDNDKGRYVNDKTHKMPFARLLNYIEYKAHEVGIDVKLVEEYDTSKTCNRCACEGVRETQGRFECPECGLDDNADKNGALNIGKRALGKFSKPLSEAGAVLAQPETQVIVQRDDEPANLPLLVDSTPSGGTPRL

SEQ ID NO: 14205 - protein, 410 aa, Streptomyces sp.
VTVVQLRYSFRLYPDTGQQTALAKAFGCARVVFNDAVRAREDARKAEQPFPTAGQLSTRLITEAKRTVQRSWLGEVSVVVLQQSLRDAESAYRNFFASLKGTRKGPRAGPPRFKSRKDTRQSIRFTANARWKITNSGRLNLPKIGAVKVKWSRTLPTAPTSVTVIKDAAGRYFASFVIDTDPQADAERMPTTDRTLGIDLGLTHFVVLSDGTKIDSPRFLRRAEKKLKKTQKGLSRKQKGSKNREKARLKVARAHAKVADARHDFHHQLSTKLISENQGIAVEDLSVRGLARTRLAKSVHDAGWASFVNMLEYKAQRYGRTLIKVGRFEPTSQICSTCGVNDGPKPLDVREWTCAACGTVHDRDTNAAINVKTAAGLAVSACGAPLRPGAIPAQREETESPGFPTEPRAA

SEQ ID NO: 14206 - protein, 567 aa, Bacillus sp.
MKRAYFSKRIYKDSLSTEYVDSISHALLFFNRAKHFAYQRLVLEKRSGSSRSDESLFLRVKKRFALNDYYANSAIQEAKAIMTSQDELTKLYSKNKEAQIKSTKKKIKQIKSRLTVLQKIKASFIKGKPTFNKTSREQKRGNFFIVQFKKQTDIYYHKYQFEHEYLDVQVKYLKSRLGRLLFRVDRLEKQLHSLKTKTKSVVFGSKKLFKAQFTVGKYKHNRVLWLKDFEQARYHQFLVSGRKDAKHGNFVFVYDQHEHTLHFQTPNGVPVALDGVSFPYGQEKINQAIQTQFTCQNKKKFGKPVAWSVEDHQDYYIIKCLIDEEESVNKNYSKADGLIGVDCNMDHFAVTSINQKGQLTDSFSLNLDIVGKTSGQITKIIEAEAIILVDCAVRCNKPIAVEKLNTTTSKVKNKYGHKKANLYMSMFAYKKMLSAIKNRAEKMGVAVFEVNPAYTSQIGKIKYMKRLGISIHEAASYVIARRAMGYKEKLPPVLHSLLPEKKVGLHHWAQWKWASDSLSGIHTNSFYQIELFDLDKFVQTEQFFPSGALTDLEEKSLAKLKSRKSVS

SEQ ID NO: 14207 - protein, 373 aa, unknown
  TnpB Polypeptide
MAYRVMQSQVARGNYIFDYCDRNAEYAKLLYNAALFRIRQIFTGYDKEKRSDNETQVFSEVALLEDQFPSIHVKKVISYCHLEKLMRVTDNPDFLAGLPMQSAQNVLKQAVQDFKDWLKALSDYKKHPEKYLGRPRMPRYKRSGVTTFTLSNQDAVLYFTDHGTLLKLPLVPERLYLPNLSNKAVLKEVKVIPFYDRYIISLTLEEPEVPLRHDLPYLCSVDFGIDNFAAIVCNDGSSKLYKGGAVLSDCQWFHKSRAAAISIITKGHDRYTASSRKLNSISVNHHNFINDQCHKISRDIIRFCMEHRAGTIILGENKFWKQNTSMGAQNNQVFVSMPFSLLKNMITYKAEREGIAVITQEESYTSHQFTTQC

SEQ ID NO: 14208 - protein, 325 aa, unknown
  TnpB Polypeptide
LLKELKEIFFILKQHKKYLNVLMNLIIVSLKENQRDHLSLKRSDCFNSFVFKQGGFTLNGNILTINKGKKRFKFSYSRAYEGNVKQIRIVRETCYRFSLIIVTDYNPANSYRKTYDGASVGLDFGLKTYLTKSDGNKIGSPLFFKQYQNKIRKLNRKFSNAKKGSNNRKRRLFELQQAYRKINDFRSDFQWKLAHELCKRYDYIFIEDLNIEGMKRLWGKKVSDLSHSSFINKLTYIASKYGVIVHKIDKWYPSSKTCECGFVNKNLSLRDRTWCCPKCESINDRDVLAARNILRKGISELESKSNSSDSNIGVSCVCIQESHLL

SEQ ID NO: 14209 - protein, 606 aa, unknown
  TnpB Polypeptide
MLCHLHYYDQVTQPKSLGYRAPHCEDGNAKEESAPSARRADTGDLTRMFSQDVPPSPSQDKKNVENTTPTAASARQNKRTISNDKLKPSKKRTRNTKSSRTSGPASTLSVRDSYGWWTKSCEDVSKKLWSPTEIDCAALPTNSSSGFVRSTEPLSWSRIDSYAPQSKSSQRISWPLYMSSRAGTTEPEDTPKSLVRCQKIRLRPTTKQAQKLREWMKAARDTYNSGLRLIKDGKAKPSLLLKKLVVTRRKEDGLKARQMKQTPADIRSRAVMDLLDAFKTAQAGFKARKLRERTQKSRWRKRKKKEKNLGRRRWRKRVAYHINYKSKRLTRDSFGFEGEKSMDIKDGELFLFATRKKFGMQEGIKMSEQPGQPIDACCRIQYVFGRWYLLLPYKAEKEDACLGDGRIGALDPGVRTFQAFYSEDECGEIAPDTEKVALAMTKKISGIRELIDILKKIGGHRLKINRLTKAWYRANARASNLASDLHFKTIKFLFGRFDVIIAPRLGVASMLRRDSNLSTKTKVTMRFQQHGAFDNRLKMKAESCGKIILDLEEHGTSLTCSSCGQANRKLGSAKIFKCPRCNFQADRDINSSKNHLSKALVGKKIY

SEQ ID NO: 14210 - protein, 412 aa, unknown
  TnpB Polypeptide
MENWLEMLCSQYNYRLAQRFNWYDETRCRVDACPLICSIVSVEEIFKDIPVERIGSQGYVDWKALQKGNLPQTKVERPWYADIYSQVLQDCVLRVDKTFERYIFGNKNGRRSGRPRFKPRSRYRSFTFPQIKQDCIESNRITLPKIGDVRIVLHRPLPNGFKIKTATVIHKADGWYVTLSLQDDTVPILSPNIDFTKVVGIDVGLKDFLVASDNEVVPIPQFARKTEKRRKLLNKSLSRKKSKGTKRRRNAGKKLSKHYQKVARQRKDFHYNIAKRLLFKYDVIAHEDLNIKGLAKTKLSKSILDAGWGNFIEIVSRKAESAGKTTVAVNPNRTTQNCSNCGTKVPKTLKDRVHSCTCGLEICRDLNAAINIRKLAEGHPVSKARGDLSVSRSRKREAEPVKPTPHYVTALG

SEQ ID NO: 14211 - protein, 269 aa, unknown
  TnpB Polypeptide
MISYKYNIYHSKKTKYLDKMFRECCFVWNHALALQRRYYRLFGKYIPVGKMQKHFSKRINRNLLHSQTVQEILQRLDSAYNRFFKKLAKRPPKFKSPEKFNSFVFKQGGNNRRRRLFELQQTYRKINNLRSDFQWKLAHDLCKQYDYIFIEDLNIEGMKRLWGKKVSDLSHSSFINKLTYVASKYEVTIHKIDKWYPSSKTCECGCINKGLSLRDRTWVCPACGAVNDRDILAARNILRKGISELESKSNSSDSNIGVSCVGIQESHSL

SEQ ID NO: 14212 - protein, 219 aa, unknown
  TnpB Polypeptide
MYQVERHVIKDNRYEEICHKSGLLYNYCLYAFRQGVFTGNYIKEYELSTKLGKENQYDFRNLPCHVSRNVIKQVSENIKSWIRAKKEYEKHPDKFQRRPKLPDYKNGKKLNIVVFDELSCRIKEDGCVHFVKNIIKPIRTKVKPDELIQIRIIPEATCFIVEIVYERKETDLGLDKDNFLSIDLGLNNLCACVSNVVESFIINGKIAKSVNQWYNKKKS

SEQ ID NO: 14213 - protein, 341 aa, unknown
  TnpB Polypeptide
MDLWEKSGEKVGKPRLAYENHAMPVFYRDVMYREEKEGKDEAYLKLYDGHDWKWFCVRLNHTDMEYLRKNWSGKKASAPTLEKRHHKYFLRFSYTEEVTLTKTPVKEQIICSVDLGINTDAVCTIMRADGTVLGRKFINHPSEKDRMYRTLGRIRRFQREHGSAQSRGRWAYTKRLNIELGRKIAGAIVKNAEENHADVIVFEYLEMQGKISGKKKQKLHLWRKRDIQKRCEHQAHRKGMRVSRVCAWNTSRLAYDGSGSVSRDLKNHSLCVFQTGKRYNCDLSASYNIGARYFIRELLKSLPVTERSLLEAKVPPVKRRTSCVYADLKELHLQMEILKAA

SEQ ID NO: 14214 - protein, 380 aa, unknown
  TnpB Polypeptide
MIIHKAYKIRIYPNTVQKEMIEKTFGCTRFVYNYFLSERKEKYEKEKKSINAYKQLLELTELKRNYLWLKEVDSIALQTCIFNLDKAFENFYHGKGYPKFRAKGKHDSYQTEIRINEYKGIIYESIRIDFKKRKITLPKLKQVKFKGYRNIKYINGKIKSATISKEVNKYFASVLVEIPFIKPQVNPASIVGLDLGIKDFIVTSNGEKLKNQVKNYEKRLKGLQKGLSRCKAGSKNRYKMKLKIQRLYLKIKNARKHMIYKLANKILKEDDIIAVENLDVKNMYKTHSIAKHLNKVPMGDFLRVLKYKAEWLGKKVIEINRYYPSSQICNRCDYKNKEVKDLSVRKWTCPSCGMEHDRDFNASINIMFEGIKIYMKSLTI

SEQ ID NO: 14215 - protein, 396 aa, unknown
  TnpB Polypeptide
MRRTLRCKLEVKDNDKKLLLNTLFIYSSACNYLIKIAIDNKIYRRYALHKKAYYDIRQRFNLPSQLDITSIWKVIETLKANKRKSIPKFSQHSAIRLNYPRNFSFNYPNISFTSLKGRTTAKIIAAYSYLLDELLNGDWQITESHLCYDRTKDVFYFNLGLKKKTPQIQKGINPVGVDLGIKRIAVTSNNKFFDNKKILHIKHRYNYLKSKLQSQGTKSAKRHLKKLSGKIRRFQKDVNHQISKYLLRIIKEIPNGILVFEKLTYIRNTAKVKRRQRCDHSRWAFKELQTFTAYKAEGIGIPVAFVNPKGTSHQCSKCGSINTIRKGLHFTCHKCGLKLDADLNAARNIASRYILEAKAVCQPANRSTRYNGLSSGSTQRTRTQGSYKPCNSLRSS

SEQ ID NO: 14216 - protein, 385 aa, unknown
  TnpB Polypeptide
VYRFKLEPTSQQYSDLCRLAGARRFIWNWGLARRREHYAEHKKTLKYASQNLELTALKNAEETKWLRQVDSQALQESLRDLEKSFTNFFEKRAGFPKFKKKRKSRDAFRIPQRVKIDGERIYCPKVGWIRLRLSQPVTVPTKSATFKRDACGDWFVTLVAEHEVEGQISLPLKAVEIDLGLKTFATFSGNEPDILIPKFFRKAERVLRKAQRIVSRREKGSTRRQKAKLRVARIHRKVARQRSDFLHKTTTALIANHDLICIEDLSVKGLAKTKLGKSILDAAFGEFRRQVEYKAAWRGKLVSVIGRFYPSSKLHRICGALKSNLTLSDREWICDGCCVLIKRDKNAAENILTEGLRLVAAGQADTQNAHGASVRLATRERQASK

SEQ ID NO: 14217 - protein, 404 aa, unknown
  TnpB Polypeptide
MIRHQGFVFELKPNNVEKTRLRRFAGCSRFVWNEVLALNELRFERGEKPMNYNDSAAYLKFLKAENAWLCDVHSQPLQQSLMDLWKSYTNFFDSKLAAQKPRFKKKSLPIGIRFPQGFKIANKAIYLPKVGWIPYIQSRKIIGLPKSITISQRAGKWFASILTEREVEDVSHPVKSTVGIDLGVKIFAACSSGEKFEGSNAFDKLGRKLAHVQRELSRRVKFSKNWRKTKQKISRFHLKIANTRKDMLHKASSSISKNHAIVIIEDLRIGNMTKSASGTVDEPGINVAQKRGLNRRILDQGWGIFAEQLEYKCAWNGGLLVRVNPRNSSRECSKCHHISKENRKTQALFMCVNCGFEKNADFNAADIIEYRGLELLSGRDTSEVPVERSKNAVKQKSRGDRKVA

SEQ ID NO: 14218 - protein, 398 aa, unknown
  TnpB Polypeptide
VEKPQYYSITVKKMNILTRHSDWLVKTQELYNQILEFYYNLYLDTFQDGRPGSMEALRTLEKLTIPGRDRQPVQYPLPWQKVPLYFRRAAINSAIAATSSYLSREKQKIRSTSFTESVTCYKGMYRDFEGNAITLKVWTGEKWLWNRIKLRGNTIPEEGQMMSPSIVLKKTGPELHIPWKTFVKDGRTAKERMAEGTNLCSVRFTNTDTFAVCCILDEQGNQLAVHTCRGGDAYRHRCKLLETRIQKSRPNTVGDNSPQPNRKYYMHLKNLSEHYAHQVSREILNFCKENQAGIIVLPDYDQNFTRMAMVKSGNFSPLHLSSKIRTNLQYKAWAEGILVLETRTDGLKDKCAICGGKVRRKGNEFLCENGHQGNRFLNDARNLGRKCQDSFFRGSRTK

SEQ ID NO: 14219 - protein, 335 aa, unknown
  TnpB Polypeptide
  misc_feature (88)..(88): Xaa can be any naturally occurring amino acid
  misc_feature (94)..(94): Xaa can be any naturally occurring amino acid
  misc_feature (96)..(96): Xaa can be any naturally occurring amino acid
  misc_feature (100)..(100): Xaa can be any naturally occurring amino acid
  misc_feature (271)..(272): Xaa can be any naturally occurring amino acid
  misc_feature (281)..(281): Xaa can be any naturally occurring amino acid
  misc_feature (287)..(287): Xaa can be any naturally occurring amino acid
MSRLTFKIKHDRDFSYELLIAKQIAEHAIIQEKSITSKDVKHFGLNSAISNQIIRKYQRNKKLKNVHSVKLTVPGQCIKLKENMVSVXCGLNLXIXLYEXVEKVNQIEVDNKYLYVCCTISDKPTMTVSDYVGVDRNATSHIAVCAVGSKIIKLGKRAPHINKKYSNIRTKAQRRRNYSFVKKLKDRESRITKDINHQISRKIVDTAYYNKMGIKLENLKGVNKKKTRSKKLNATKSNWSFYQLQQFIEYKAKLLGVPVVFIDPAYTSQRXXCCGFLGVRXKKKFVXTNCGHIDHADANAAFNIARSSQVVLAKDRDLVKSGTGDAQLDMVQNAN

SEQ ID NO: 14220 - protein, 410 aa, Streptomyces sp.
VIVMQLRYAFRLYPDAAQQASLARAFGCARVVFNDAVRAREDARTAGRPFPTAGQLSRKLITEAKQSKERSWLGEVSAVVLQQSLRDVEAAYRNFFASLTGTRKGPKLGAPRFKSRKDHRQSIRFTANARWSITGSGRLNLPKIGAVKVKWSRTLPTTPSSVTVIKDAVGRFFASFVIDTDPAVDAERMPETENTIGIDLGLTHFAVLSDGTKIDSPRFLRRAEKKLKKAQRELSRKQKGSKNRAKARQKVARAHAEVADARREFHHQLSTKLIAENQGIAVEDLSVAGLARTRLAKSVHDAGWSQFIDMLTYKAARYGRTLIKISRFEPTSQTCSTCGHRDGPKPLNVWEWTCMACGTVHDRDTNAAINVKTAAGLAVSACGAPVGPEPVLAQREETGSHGFKTGNCAA

SEQ ID NO: 14221 - protein, 401 aa, unknown
  TnpB Polypeptide
MYYMNMTTLTIRVRLRPNPEQKKVLDETTLQYTESFNRVCIAGWPKKRVNGVELHHETYASERESTDLQSQLVCSARVKATEALASVRALKRKGKKVSVPKSKRCAVRYDARSSQLWFDRNLASLSTVAGRLRINFVVPEIYRTRLDWKQGSIDLVKDGKGRFWLHVVMQKHFEPVALTGGVVGVDLGVVRPAVTSDAQFLGDRRWREIEERTFRLRRNLQAKGTRSARRHLRKLGRRVNRFRKDCDHVLSRRIVDSVEKGTTIALEDLTNIRDNVKSRKKQRRRLHGWSFNRLQTFLGYKAELAGVAIAYVDPRYTSQKCSKCGHTEKANRRTQSEFGCRKCGFTLNADLNAARNIRANHLASPAMSGTSGPPIDRPIVTGTLQQCDSPSYKPPALAGGS

SEQ ID NO: 14222 - protein, 435 aa, Oscillatoriales sp.
LFDARRLHAYLYNACISHRQTEYKHNHKSISYFDQQNLLPAFKAEWEEFAALNSQALQATVKRVDLAYQAFFQRLRGKPKFKSIRNYSGWGYPAKSGWKVDSTGKHGTVTLNDLGVTVKMRGKMRNHEEDWSYPTTLTIVYKPSNRQWFASFTVEVAEPKPKFGSESKLNYESIVTYDLGTETALTLFDGTEFEEIENPRFTQKNDEKVRKTAKQKRRKRAPKKGVKASRRWKKVNKRESKLKAKVARQRKDWQHKVTSDIARRYDIGVTEKLNTKGMTRKAKKGSKRKAQKIGLNRSILSVGFGTLNKMISYKIERKGGLILELPTKQIKPSQRCPKCGAIHKEWAELSNRYHVCSDCKFEVPRDRGSVMVMYNVATNQQPGFGTNLVSLGCLSSTSKTRKYTGSMKQLGQKKRQKSSQVDVGVLETPTVYTVG

SEQ ID NO: 14223 - protein, 552 aa, unknown
  TnpB Polypeptide
MLRTYKLKHSINQGKQSKILTLLKEYRKVSDEITNRQWRYFYENGRFNRDLEVNFIKSRLSKRYRQTAQYQVVAQLESYLGNRQNEFRDYIKSSNFDKETKVKLYYINKYKNWFSQSIKMQNREIDEEIIKLSRRVIKNIFKKNRKPNLKFCNMALDAKVMEITPNGIKKVKKSKKLKDENGELILNKSGNPKVKTYTQKQDRKQSSFDYWIKLSTLEKGKKIYLPLSTNSYFKGIDGEISNFIQINFQQDIDKIDGERPLATRHQTEYNNYKINFCLIKNIEQEQYQPKIDKLALDLGLNNLFATNIGELYGRNFSRLLKEYDKIITLLAQNRQKQKLKTVSKKYKKLINRIKAYLKNEINRVINALIQNNRPKEIIVERLNFTSPKLSKKLNRMLSNFGKSIIEEKFESIKEKYGIVITEVNPAYTSQECSRCGYVEKKNRKRQAKFICGFCGKKQNADINSSKNILARSSSHLKDIFAKRAFILDKTVTNFIERHLVVLLYIFRNKDLGKSSSYTLSKIKNKNNLCYNSLANTLTSNPYLTNYLKGNFL

SEQ ID NO: 14224 - protein, 461 aa, Micromonospora sp.
VKTTQAYRYALDLTLRQERVVLGHAGAARLAHNWALDRVRAVMGQRAAERSYGVAEEHLTPVLRWSLPALRKAWNAAKDEIAPWWREYSKEAFNTGLDALARGLKNWSESRSGARKGRPVGFPRRKTRRRSTPSVRFTTGAIHVEPDRKHVVLPRLGRLKLHESARKLARRLDAGTARILSATVRCEGGRWHVSFTCEVVRAARSPTRPGSVVGVDLGLTHLAVLSTGEQIPNPRHLMAATLRMRRLARTVSRRVGPDRRVGRDASKRWERASQRLRRAHRRVANLRRDGLHNLTTRLAREHATIVVEGLNVIGMLRNRRLARYIADAGFAELRRHLHYKTEWNGGQLIVADRWFPSSKTCSGCGTVRTKLALSERTYTCTICGLTLDRDLNAARNLAALAREVIDDRSGRESLNGRRADRRTPPAGLVAVKRLPGAAPADKSGTVSPQGGTTDRALARAR

SEQ ID NO: 14225 - protein, 402 aa, Escherichia sp.
VKRLQAFKFQLRPGGQQECEMRRFAGACRFVFNRALARQNENHEAGNKYIPYGKMASWLVEWKNATETQWLKDSPSQPLQQSLKDLERAYKNFFRKRAAFPRFKKRGQNDAFRYPQGVKLDQENSRIFLPKLGWMRYRNSRQVTGVVKNVTVSQSCGKWYISIQTESEVSTPAHPSASMVGLDAGVAKLATLSDGTVFEPVNSFQKNQKTLARLQRQLSCKVKFSNNWQKQKRKIQRLHSCIANIRRDYLHKVTTAVSKNHAMIVIEDLKVSNMSKSAAGTVSQPGRNVRAKSGLNRSILDQGWYEMHRQLEYKQLWRGGQVLAVPPAYTSQRCACCGHTAKENRLSQSKFRCQVCGYTANADVNGARNILAAGHAVLACGEMVQSGRPLKQEPTEMIQATA

SEQ ID NO: 14226 - protein, 401 aa, Nocardia sp.
VTTPVKRAFKYRFRPTAAQAAELERTFGCVRKVYNLALDARATAWQRGERVNYNATSAMLTEWKRSDAFDYLNEVSCVPLQQSLRHLQTAFTSFWDKRTSYPRFKSRKKSRASAEYTKSGFRWRDGKLTLAKMAAPLDIVWSRPLPDGVEPSTVTVSRDSAGRWFVSLLCKDPTVEPLPKRKTTIGIDAGVTHLLTLSTGEKITNPRHELRDRERLAKAQRALARKQKGSANRAKARVKVARIHARIADRRHDHLHKLSTRLVRENQTLVIEDLAVGNMVRNRKLSRAISDAAWSHFRSMLEYKADWYGRKVIRVDRWFPSSKLCSTCGALQDTMPLNMREWTCACGATHDRDINAANNILAAGLAASVCGDDVRPQRNPPSGQSSVKQKTQPVRGEVLAL

SEQ ID NO: 14227 - protein, 592 aa, unknown
  TnpB Polypeptide
MIRCLDVLLCDKWLAKHPEQKKALENIFTMAELFRDFISIGGRNRDGKKVKTIKAVFDDELLEFDMVLPYSMQKSIRKQLKGNRKGILGYKSVKNDEDKNAPLNSDLSFDPGFVNKEDVDVKKDKPLSITNKRPIVGYKRYNSPYLPTKPDIYRFRSIPLNIYIPNIYGSEVLNQIDIDEYIKRKEKKPLIIETDKHIYIISRPREKVLEKFAITKGVFFIHKVTIQQKDGVTKKVYHLSPVFYDGSSTHSFNKQLGFVWLAGVNGPIKCRGLKRLPRRIKRRNAYLIKRGRNFYLRIVYEIDTERLKRNRINKYRAKRVALDFGLGKSNHITLSNGVQIYLNSYKLERLEKKISGLQSKISKMKKGSRAWRRLYKRMSDLLIKYSSIKIAAFCKILNVLKGYDEVAFQDDSLKDIAKNSKKKAKKEEKEAGKKQEESKVDCKNTEKKNDNSTPTARSKSFGREVRRYGLGYLKRLLKSSFIKTIAIERFERTSKICSFCGFQKDDLSLNDRVFKCDACGVVLDRDLNAARNIYKKAFGVDTVPTPTKRELRALCLAIKRVLGRSTQTDTQKAVCFSFRILPVVYELPDKGS

SEQ ID NO: 14228 - protein, 387 aa, Limnoraphis sp.
MVTRRITYRLYPNRRQETQLHWARRMHCCLYNAAVTNRKTQYQRFNHSVDYFEQQNSLPEFKKVWTEYKKLGSHTLQATLKRVDFAFKRFFKGLGKYPKFKSSRHYSGWDYPNKQSWRLTSNNGINGYLNLRDLNITIQMRGKARTWGIPKTCTIFWRSNKWYASIAVECCPVRQTGKGAIGLDFGSKVAIATSNGDLIESPKFLEQSQDKITQLSKKLRRKRRPEKRKVKASRRWKKYQEQISKTKRKVANQRQDWTHKVAAQIVSGNSLVATEKLNLKGMTRKAKKGSKRKRQKTGLNRNLLDVAIGMLRESIKYKVVEAGGIFLEAPTQQLKPTQRCNNCWELTPKTLNDRVHICSHCGHTEDRDINAAQVCLSWGLRVWNEPL

SEQ ID NO: 14229 - protein, 383 aa, unknown
  TnpB Polypeptide
MFRRTFKYRLYPNKKQETALEHQLNEARSLYNAALQERHDAWQEHGISLNYYDQANQLKEIRDNGNLELANFSACQDVLRRIDNTFKAFFRRLKAGEKAGYPRFKSKNRFDSYTFPTWADGCHLTDDGRLKIQGVGVIKLKMHRPIAGEIKTLTLKREAGRWYACFSVVIDTNNHMPSPNAIGIDVGLSSFAALSNGQLIANPHNLKMGLRKLRRCQRKVARRKKGGNNRHKAVILLQKAHAHIHNQRSDFQHKLSRQLADNYGFIAVEDLNIAALSRSMLAQSVSDAAWGSFLAKLAYKVEETGGQLVKVNPNGTSQACSQCGCLPDIPKTLSDRIHNCPHCGLVIDRDINAARNILRRGLRLWDITWGVAPSVFQEAVCFS

SEQ ID NO: 14230 - protein, 313 aa, unknown
  TnpB Polypeptide
LARPQAGSSGRPAAVQEEGSLPRAVPAGRCDPRRAEVSGAATDRPSPNKGGDQQVRGRILSATCRREADRWYVALTVEVVRPDPARIPGPVVGVDRGISAFAVCSDGSRVESPWALAHGLRGLRRRSRQVTRKQPGSANRRKAVLALARQHRRIRNQRVDALHKATTSLARAKSVIVLEDLHVAGLIRNRRLARAIADQGWAEFQRQLAYKCQWYGSRLLVAPRYFPSSKTCSRCGLVKATLPLEVRVFCCDECGLMIDRDVNAARNLAQLANNGLVAASSVETQNACGGGSAGPADSGLVKLPSAKQERTSI

SEQ ID NO: 14231 - protein, 340 aa, unknown
  TnpB Polypeptide
MYLTSKIILHPTPQQEITLKSLISIYKNEVNECLGKFISNKKIIWIPYSTLNRHLPWESKKEVIKEASKIFRDGLRRKSDSQNTHFKGDYCKWHCDSFTLDSKLNLQVGQQSRLIVEFYADDYQKQLLSSGYLTSLKIEKTNKKWYCYIKILKPDPQPYGEHVMGIDLGIKVPAVAATSTGKIRFFGNGRQVRYICTSQTSRLSKLMRNKNYGLIRKMDHKWGNRLLSIDHQISKSIIDFALRENIRMILLEDLNFIQKKSDSGKKISSWSYMRLKSFLEYKANKNGIKIQIINPYNTSKRCPNCSRINISTSRGYKCSCGYKNHRDVVGAINICNYNLS

SEQ ID NO: 14232 - protein, 553 aa, Prochloron sp.
MSNQNSPPSSSQLMSELFFDGKKREGAKPSKPHRENEGIMLNPTPQSAKKSESQSFTRGFVPESNDLSLIDKLPPSATYTPQQKSSATLESNSTSKEKNLQPYWKESCFEISQELLSHTKIDWQDLVSTNINGAGSSLTAQSWFSTRKTYLQQHKWLKTSSPSDSASVVDYMGSENIKLRSKKIKIYPSSELKKDWNKWLAACRYCFNQAIAYQKENGSIGKRKLRDIVMQSELPEWVQETPCHIKQNAIFDAHQAYSKSKNCKFRSCKAPRQTIKFNNSNYTKGKWYSRLTKGKDFESSEPIPSSSAYATQIIKTKCGDWFAVFLEEVKPSNNNVDGIIAIDPGVRTFLTGFDGRAFVEIGAGDIGKITRLCQHLDLLMSKIGKSKSKRQRQKMRKAAARSRRRIRNLIDECHRQAASWLSKNHSYILLPTFETRQMTKKKKRKIRSKTARQMLTWSHYRFKQVLKNRAELSGCQVIDVTEEFTSKTCTKCGHIHTKLGGKKVFKCPECGHEINRDFNGALGILLKALRDTSVTFSSDAIVVKGDFVSFCTA

SEQ ID NO: 14233 - protein, 445 aa, unknown
  TnpB Polypeptide
MRRTKKNRNRAHKALRFRLYPDDEQKLLIERTFHGTRKVYNALLENAFITYTLTGEYNVLTQAYVKSIPGLEWLKSLDSLALANAECNLKQAFSNHFKNPAHFDLPRFKKRKREHQGSYTTNHVNGNIIVQKNALKLPKLGFVDMVRHRPLPTGYVLKSVTVSRSHSKKYFASILMVSDDIQVDPVEPRSFFGMDFKMNGLFVGTEDIEDFQYPNFIAKHSHRLVKAQRNMSRCVEGSNNWEKSRLRVARIHEEIADQRRDHLQKLSTRLADRYDCIAIEDLNIKAMARRKKDPRFFSFGKSIANNSWAMFVEMLEYKMRQRGKHLIKVGRRFPSSKLCSVCGTKYKELRLQDRKWTCPHCHARHDRDHNAAINIRREGIRIFFSDLSDPSNSHERTGGRREVKPVEKNVRRQFPCSDSSEYCFRRADADSMKQEKEAPTSAKWE

SEQ ID NO: 14234 - protein, 390 aa, Symploca sp.
MTQKAFKYRFYPTPEQEQLLRKTLGCTRLVYNRALAARTQGWYERQERIGYKQTSAMLTHWKKQPELGFLNEVSCVPLQQGLRHLQQAFSNFFGGRTKYPNFKKKRNGGSAEFTKSAFRYKDGNIYLAKCSEPLPIRWSRKLPNGVMPSTVTVSLTPSGRWYVSLLVDVDIQPLPKLSKNVGIDLGITSLIATSDGNKVANPKAFKAKYRKLKKAQKALSRKQIGSRNHEKARLKVTRVHAEIVDTRTDFIHKLTTQLIRDNQVIVVEDLAVKNMVNNHKLANSISDASWSKFVGQLEYKSEWYGRELIKIDRWFPSSKRCSNCGYIIEKMPLNIREWECPECSAKHDRDVNASVNILAAGLAVSVCGATVRPEQSKSVRAGAMKQKPKL

SEQ ID NO: 14235 - protein, 615 aa, unknown
  TnpB Polypeptide
MRQIMITTPYAAMSTDALMSMNSDEVMSSADKQLLKQIHKQSSRHVLKLESTLSAKDICQLFKVSNRIRLAGNELTNKMRKNLNRLTRTKQYRNLLELYGKADNPADKKNYAQQLKQMQENENVTWDFCRKTMQTLQVNYKIDAVLALTKAEAVWKGVETCLYRNGKTIHFTEEGVYPALIAKQINRCIILTAKDGSLQFKYGSMVFGAKINDTFEQEEADAVIHYLTNKSQMDKAAIDCYKDNGSCISTYRPCYVSLVPQIIRGKRRIYIHICIEGTPKVKRNKNGQPRHALGQGVVGEDLGPRSIAITHKDGVFLENIRCVGKKPEAVQEEIANLQSAIARSLIATNPQNFNDDGSMKSGNLIWKVSNNCKKKISQFKDCCRRKSINIHLGINQLVNYIRSLGDTLIIEENNASALAKRGRSIVKSNANSNTSCAVALNTNGAQSNAQQQSSAIKSNSNGSNQAQSVITIQSFDKQDFNYSLIGEYRVKLMKRFGRSIYKYCMGYVWAHAQQKFLNTGGQFIIVPRNYRASQYDHTADTYTKRKLSDRMITLSDGTVVQRDCYSSFLLYCYSFDSKAIDKDKCNVEFARFLKNEQDLIAYIKAHKINVFNSGI

SEQ ID NO: 14236 - protein, 312 aa, unknown
  TnpB Polypeptide
MANRAYKFRIYPNNEQMILFARTFGCVRMVYNHWLNRRIRQYKKNKTNITYTVCAKEMAEMKKTEEYAFLREVDSISLQQSLRHLDTAFQNFFKRPKTGFPRFKSKKNHKNSYSTICINGNITISDGYLKLPKIGQVRLKQHRSVPKGYRLKSVTISQTPGGRYYASILFEYEDQIPEKEMHSFLGLDFSMHGLYRDSNGNEPAYPGYYRNAEKRLAREQRRLSKMQKGSNNRRKQRIKVAKLHEKVSNQRKDFLHKQSRQITNAYDCVCIEDLDMKAMSRSLKLGKSVSDNGWGMFTAFLKYKLEEQGKNL

SEQ ID NO: 14237 - protein, 385 aa, unknown
  TnpB Polypeptide
MLTAYKFRLYPTQEQEEFFFQCFGAKRFIWNKALDLCKTRLYNGDYVPSFFELNKMLTLWKKADEWSFLRDAPKDIMQITLDDLSKAFGAMFKGQRREPRFKKKYDTYQSFTVIASAWVKDNVVKIPKLKEPVKFRRSQRVKGKVKRVTVSFDGFQWFVSILADAADVIKPSKGKTCGLDIGVKRLATLSDGTFVSPIHFTKDIQKLEKHQRSMSRKIKGSARWSKAKSRVQKAYRRISNRRKDYLHKASTAIADEYSTIFIEDLNIKNMSKSAKGTADLPGKNVAQKRGLNKAILSQGWYMFFEMLSYKTEQRGGKVLKVDPKFTSQICSNCGYKSKENRESQSMFKCKKCGNTQNADHNAAKNIYARGLRVNAQGKGSYNELD

SEQ ID NO: 14238 - protein, 392 aa, unknown
  TnpB Polypeptide
MKKMLKSYKTEINPTQEQKKKINKTIGTGRFIYNFYIAHNKELYSKEEKFMTAQSFSVWLNNDFLPKNPDYLWIKAVSSKSVKRSMENAYTAFNKFFKRQSKFPRFKKKNKSDVKMYFVKNNSKDCICERHRIKIPTLGWVRLKEKGYIPTTKDGYIIKSGTISNKAGRYYVSVLINMPDIETPQLNNFGLGIDLGIKKFIVTSNGVVKKNINKTAKLRKLEKQLKRKQRSLSRKYEDLKKRNNKMKGEATRQNIQKHILKVQKLHQRIENIRTDYINKCVNEIVKTKPSYITIEDLNVKGMMKNRHLSKSVASQKFYEFRTKLEAKCKRLKIELRIVDRWYPSSKLCHECGCIKKDLKLSDREYICKCGYHADRDYNASLNLRDALSYKIV

SEQ ID NO: 14239 - protein, 401 aa, unknown
  TnpB Polypeptide
VLGFKYRVYPSQKQIIRLNRQMFLAKEMYNLLLEKSKQYYKETGKTFSQFDMNKCITQLKRKRQEFSEVHSQVLQNISKRISDAYKAFFRRAKEKKEGKKVNVGFPKVKRFVFSLTYPSMLGFGLKNTGKIYLSKIGDIPIVLHKFPKGEGKIKTCIIKYYPSGKWYVSFLVEFLKRKFKNNKKEQVGIDVGLKDFATLSNGEKTKPPKFFNKAEKRIKFLQRRLSRKKKGSKNRRKAKFKLTKAHEKVTNQRSDFLHKLSTKQVNSYSKIAIEKLSIQNMQKNHYLAKSIADASWGEYTQMLHYKAWSAGCEVIEVDPRNTTKICSCCGNIQEMPLSKRIYNCPVCGHKEDRDINAAKNILARATVGLTESYACGDLSSTLLAMEEQDISLKQELYGVRK

SEQ ID NO: 14240 - protein, 365 aa, Ruminococcus sp.
MNKAYKFRIYPNEEQRILIAKTFGCVRFIYNKMLGDKIEYYHQTQKKLNNTPAQYKTEFEWLKEVDSLALANAQMNLQKAYNNFFSNPKKYGFPNFKSKHRSQKSYTTNNQKGSVKIENGYIQLPKTGLVKIKQHRNIPDYYKIKSVTISQNASGKYFASVLFEYEEEIGEKELESFIGLDFSMYELYVDSNGNLPQFPRYYRLSEKKLKREQRKLSKMVKGSKNREKQRIKVAKLHEKVANQRKDFLHKQSRQIANAYDCVCIENLNMQAMAQSLNFGKSVSDNGWGMFTSFLKYKLEELGKRLVKIDKFFASSQICSVCGYQNPNTKNLSVREWTCPCCQTHHNRDINAAINIRNEGMRIALA

SEQ ID NO: 14241 - protein, 392 aa, unknown
  TnpB Polypeptide
MIKAYKYRLYPTEQQAVLIDKHIGCCRFIYNLALETKNMSFSSNRKNLSVFELMRQTTQLKNDLVWLKEVDSQSLQQSLLDLDRSFTNFFKGYSEFPKFKSKKNNNTFRNPHGNFVTIKNGLLIQPKFRKGIKIVVDRPHKGEIRSTTISRTPTGKYFVSVLCDTKQSLPSKAKVTDKTSVGIDLGIKSYIVTSDGVVVDNPKHLKASAARLKVLQRRASKKKKGSKNSKKSYYRISLLHEKVANQRKDFLQKLSSELIRDNQTLCLEDLNISGMVKNHKLAGSISDAGWGMFVQMCKYKAEWYGKNILQIPTFEPSTKICSNCGATNHSLTLADREWTCVCGSKHDRDINAAINIKNYCLKNSSLGKRSAPLEMLAIAKSMKKEVSNNKSL

SEQ ID NO: 14242 - protein, 361 aa, unknown
  TnpB Polypeptide
MAYAGNKINLTCFDLINQLPDLKEQCIWLKEVNSQSLQHSITHLDAAFTKFFKGQADFPKFKKKASRQSFNIPQGVIVDFENNKLISPKFKKKGIEIVLHRKFKGSVRQATISRTPTGKYFASILVDTLDKEIAPKKVKEQTTLGIDLGIKSFLVTSDGEEIKNPKYLLKAQSRLKFVQRKYSKKKGKRTKHRIAILHEKVANQRRDFLQKTSTQLIKNHDSIALEDLNISGMVKNHKLAQAITDVSWGAFVTILEYKAKWYGKNILRIGRFEPSSKICSSCGGKNTELTLAIREWTCKDCGSIHDRDVNAAINIKNFALRNHLSVGRRLKNQNELPTLVGVMTSEAPSPLGKRVVHFTGL

SEQ ID NO: 14243 - protein, 375 aa, Acidaminobacter sp.
MLAHKAYRFRIYPNEAQKVLIVKTIGCSRFVFNHFLSAWNKAYEKTGRGLTYNTCAAQMTLLKGEKAYEWLREVDSIALQSSLKCLEDAYKRFFRKQNDRPRFKSKKNKVQSYTTKFTNGNIGIVGNKIKLPKLGLVKFAKSREVEGRILSATIRRHPSGKYFVSILTEVEMHELQKTGSVCGIDVGIKHFAKVSDHTERENPKCFRKYEAELAKAQRVLSRRVKHSKNWEKQRVKVAKIHEKITNARKDNLHKFSYEIIKNHDVIGIEDLQVSNLLRNHKMAKSIADASWSYFISMLEYKAKWYGKQVVKVGRNFPSSQLCSNCGYKNKDVKDLAVRDWICPECGIVHDRDLNASINIKNEALRLLTVGATGLS

SEQ ID NO: 14244 - protein, 432 aa, unknown
  TnpB Polypeptide
MNFGQAIFGRLLTTSEQQAVSVQKRSKATSKGLNTSADGVRRVEGSGKCVRTACVRLELLDPAAHEKLAATQRLYAQVCNFVVPTVAADRTKRLWQRFTLHHAVYDKIKAKFPDLGSQYACNVIRSVSAAYKTELANHPAQLKSEDKKLKTLVFRHPSVHVDKNTLTFFPDGTVSISTISGRIRARLCPGPFQKELLASGKRKECNLVLHPRRGRKEAFWELHIAVESQGCSGEEHLKNLKADEIMGIDVGENNIAAVSTGRIWKAGALKDKRDRYMSQRKRLQRNGSQSARQHLKKASGRERRHVTHVNNVVSKEIVQEAAKRGIKLIALEDLTHIRDHIKAGKRIRSRLHRWSFRELQEMIVYKAAAAGIRCVFLDPRYTSQTCSQCGAPGKRHKHGFRCSQCGHLAHSDLNASRNLQGLCRQLSAQGLM

SEQ ID NO: 14245 - protein, 392 aa, unknown
  TnpB Polypeptide
MRTLQKSFKTEIAPTPAQMRKINQTIGVCRFVYNLYIAENKKEYKETKQFVSGMTFSKWLNNEYIPSHPEVRWIKEVSSKSVKKSIMNGDGAFKKFFKKRAGFPNFKKKNKSDVKMYFVKNNKADCECQRHRIKIPTLGWVKLKEKGFIPTTKDGYTISSGTISKKADRYYISVIIDVPDILKANMQSEGIGIDLGIKDFAVLSDGKVMKNINKTAEVRKIEKRLKRAQRGLSRKYESLKKRKKEEKGDTTQQNIQKQILKVQKLHHQLDNIRTDYIDKCVWDVVKTKPAYIVIEDLNVSGMMKNRHLSKAVAAQKFYEFRVKLTAKCKEYGIELRIVDRFYPSSKTCHHCGAIKNDLKLSDRTYKCTCGYEADRDFNASLNLRDAKTYKLA

SEQ ID NO: 14246 - protein, 357 aa, Paenibacillus sp.
LLKAYKYRIYPTGKQQQYLAKVFGCVRFIYNKMLADKIEHYKKTETMLKNTPATYKKEFDWLKEVDSLALANAQLNLDKAYKNFFRDQSVGFPKFKSKKTNSHSYTTNNQKGTISVEGDYIKLPKLKSRIRIKLHRPFVGLIKSCTVSKTPSGKYDASLLVETDIQPMPKLANKMGIDLGLKVFAMTSEGEIIDNPKHLRKSEKRLAKLQKDLSRKKKGSNNRHKDRLKVAKLHEKIANQRQDFLHKVSSKMISENQVFVMEDLRVKNMMQNHKLAKAISEVSWSLFRSMLEYKANWYGRDLMIAPKNYASSQLCSCCGYKNADVKNLGLREWTCPSCNVHHDRDVNAANNLLKLAL

SEQ ID NO: 14247 - protein, 326 aa, Euryarchaeota sp.
MLAFKSVTQPYSPSPLIKDLMKRYIDAINLCIDIAIEKNITSRNSLSNEAYKIISRYNLPSYYYVEIINKAIALVKNYRKRLRKGQKVSKPRVGKLTLSSYYGFKIDGEYLIIPTSNEKYRRSYEKIELNNYVRGKISNVEVRSFTISEGRLSLTIGKEVSLIECNNTVGVDRNIRNITVGNEYHYKRYDVSEVVKIKNRYRKKVSHFKRNDRRIRKKIEEKYGRRSSSRVNQILHKISKDIVKDAIKNNEAIVLENIKGIRNITKKGDYKGKDYRFLFNNAFPYGKLEFQIKYKCAWEGLPVIELSRKDTMNTSRTCSVCGSLSK

SEQ ID NO: 14248 - protein, 471 aa, Mycolicibacterium sp.
VRDPVAIHERSVDDSRRGRPQVRAYRFALDPTPLQEEQLRSHCGAQRFAYNWGLRLVKANLEQRAAERTYGIGETDLTPALNWSAYAMRKSWNRLKSELAPWWAENSKEAYSSGLANLAAALNNWAASQSGTRNGRPMRFPRFKTRKSHMSCRFTTGAFGLTDRDRRHVKLPRIGLVRTHESTRKLARRIACGSSRIRSATISFSRGRWFVSFSVDFSDLRAPLPDSPAVVGVDLGIHNLAVLSAPVPGISDADGVVANPRQYELALKKLRRLQRMAARRTGPDRRSGRTPSRRWIRAKARVDRLHTRIANRRTETLHQLTSALAERFGVVVVEDLYIAGMLCNRRLARQIAAASWGELRRQLTYKTDWRGGCLQVANRFYPSSKTCSGCGAVKTNLRLSERIFLCDVCGMSMDRDRNAARNLAALADQIAGGTSSPSCGATQNEPAGNPLKNGHYGHGYGHGKSLEDNVA

SEQ ID NO: 14249 - protein, 821 aa, unknown
  TnpB Polypeptide
MEYDVDIPPSDKISTRGYKHRINQLFRPKQVERIDEAVRYVHAIMGNATLLIKYRLIKLVHDSQDRDVAPLILNETQILNAIRAVQNRPHHPQSTASTSTSMKKRKTRKTHDSSSTPHNESPNEVPTESALVKRRRVTQKHVTAPTISTFVPGPIDTQLNDRRLLLESWILDYGEMTSSCLDIVPLSERGKDLSVSHMLGLAAKQYASSVMSNIRYHFRSYVCCALGIVLRSKACVSEGVRHFDDITSQRKKYWKREFGKAYDDVLEHRYDTQMRTCEDLKGLVNRHRPHLVPSLPERVRRIDTDLDSSTRPYVYLAYMIRISDFIERAGLVSCKRRRLLSPLPLKTSFIPSHYSIDTTTISHLLLDDVKGFKCYFEDGSQRRGKTFPLPGLKDKASICASLDKLAGRKTSPDDEEAYKDALWTFLANFKNRRTKVLNPITCQMTTKEGTLRFAHSISTDGYSVTLICNNERVRGRHHTYQSGASRRKKKETSKGDDEEISKAFKGEFPLLNVETVDEIVTYFRDIGCIDSKRFVGGDPGKGVLLALMDEFRKKLTYTSKQRKHETDGGNRRTRRRVKTLKDGSKRTLERGFVSSITQRSKASTKRLDVGNVTFPSLSNGSVPRTLSYVTTRALEAEMRRTRATPKTVNLSWLRFYVALRETSRVGFEATYWRKMYRAMRFTGWCKRKGSVERFVDRIREKYGNDENKQVVILYGNWGRRPNLRHQAPTPGIGLRRLIHSSKGITTVTVHEAYTSSYDPVTLREVEEVRGTHALLREEQDITNPFQKRGCFWSRDVLGALNILRKGRHILSSRSPHPIFGG

SEQ ID NO: 14250 - protein, 556 aa, Bacillus sp.
VKKAFFSKRIYKTDLSHEMVDTLTETIETFNRLKRFAFQTIVREKRWSRKLHTDSLHLVLKRNYQLNDYYTNSAVQEAKSLFTGLMELQKIYEKQTQEKLGKLKKKLKQERTKLINLRKIKQSCVKGKLMFPKNTRFARHNKIVSLSRKEDTLIWLNKYLFEHQYLDVQIKRIQAKIGRLTHRQYRLKQKLASYKTHIPSAVFGSKKLFRSQFTIEEFVQNHDKWKTFFSRARNKQLILSGRKDAKHGNFVFQYVMEKQELWMTTSTGKTLMFPAVIFPYGQEIIEGVITNQLQCKNKKKNGKPIAWSVEDHGEYYIVKCLVDVPENPNTNYSKADGVIGVDCNLEHFAWANVTKDGNYKGSGSLHFSILGKSTGQITKIIEVEAIRLVDLAERYNKPIVIENLDTTQSKTGDRYGNKRANRMKSMFAYEKMTSAILRRADKRDVAVFQVNPAYTSIAGKMKYMRKFGISIHQSSAFTIGRRGLGYKEKVPGVLHPYIPNKDAHHWIHWHQLNNRLDIRTHHFYQLYDVDQPKKALQIERLDVFESEKKKLTKLFA

SEQ ID NO: 14251 - protein, 271 aa, Methylocaldum sp.
MIIAHKIALDPNNAQATYFARAAGTARFAYNWALAEWQRQYDAWKADNTLPKPSQAALRRQLNAIKREQFPWMLDVTKNAPQMAIIQLGEAFKNFFAGRAKYPKFRKKGVHDRFTLTNDQFTVEGSRIRIPNLGWVRSHKSLRFNGKILSATVSRVADRWFVSIAVDTEDPPKRKAESQGVVGVDLGVSALATLSTGEPPIPGPKPHKALLNRLRRLSRSLSRKQKGSNNRQKARRGWRGFTPASPTSGPMPCTSSRPISRAGSTPSASRT

SEQ ID NO: 14252 - protein, 531 aa, Rhodococcus sp.
MSTDARTASGLRKIEAAFVVPPPTGVRIRTRLHPSTAEEAALERIAVFLGGLYRQALASRIRLGRVDAKDQSTWRTDEKRRLTALSSSRWAGALTRTALDSYHQGIRNLAAEAQSLRAAIETIGARMHAPVAGRAPEPDVRPKAKRVRGYATEAERFAKSRRAAVLAHRRAVVTARLEEGHPRIVAGGGRLWRTRQHLDRAGMSVPEWEQRWTGERMFLTADGESGKRCGNETIRVTPEGVLTVKVPAAVVAEVGIGRLTITAPVSLSTHRGDEWADRIVQNRAVRYDLHRDGRGRWYLDASWGYPDAPTVPLAALQARRTLGVDLNDGHVDAAVIDPHGNLVGAPRRLDYRIDGTGTHRDAQVRHVVTRLLHAATDAGCASISIENLGFADARATGRETMGRGKGGKRFRRTVSGLPTAKFRQRLVAMAATAGIAVIAVDPAYTSRWGRQHWLPALQASDPTMDGHRAAAVVIGRRSLGFRARRKPVGPCTRRRTRAGRPTGTAGYEKQASRWRVTGGPRAWDAAGPPDP

SEQ ID NO: 14253 - protein, 464 aa, unknown
  TnpB Polypeptide
VVYRTARCGLRATAGQRRRLFGLLRSAGDVWCCVLELNAWRRCRQDPPLARYQELCRELASAGPGTFGELDSTGARSVLRRYSDAWFAAAKRRAASDKTARFPRRRRGLVPVRWYAGTFTLDGRRLRLPVARGCPPLVVRLDRDPPYPAAQVRSVTVLCEAGRLWVDVTAEVPVATYPDGEGPDPGRVAGVDLGVIHPYAAAGPDGELLLVSGRAIRAECRQHLHDARARRRAVARRAPKPGQRGSRRWRQHQRRQRAAEARHRRRVRQAQHEAARTVIGWAVAGKIGTLAVGDPRGVLSLDAGRRHNQRVRAWRIGHLIRALCDKAQASGITVKLVDERGTSSTCPGCARRVPKPAGRVFSCPHCGQAGHRDLVAAANIAARAGGGTIPALAGAGITHRRAGTHLPGVHPARRAPRRRSHRGPPHGLLAGTGPPRQPVQGWRGVARVTARSLEIHPSIYRQVH

SEQ ID NO: 14254 - protein, 212 aa, Okeania sp.
LSFVVEIQPEVLPKTDNSVGIDLGIKTFATFSDGTKVDAPKPLKKRIKKLRKLSKSLSHKTKGSKRYEKARIRVAKFHAKLKDTRTDFLHKLSTKIICENQTVVLEDLNVSGMVKNRKLSRAISDLGWRTFRTFLEGKAEKYGRYFKVISRWEPTSQTCSSCGFKGGKLDLKVREWECLNCGSKHDRDENAAINILVAPWAFGDEKRTWRQV

SEQ ID NO: 14255 - protein, 455 aa, unknown
  TnpB Polypeptide
MKKEEKNLKIKTNIKDTISRHSKMTCKTFEVKVVSNKLNNLQKEQINQLFKEAKWFRNAYITNNEINAKAKTVLVKVGKNFEERKLELLGSQIKQSIIKEVETERKALFTKKKKGMKVGKLKCKPFCNAIELKQFGKTYRIKNDYINVQNIKKGIRIKGLKQIPEEVDICNAKFVRRASGLYFYITCYVPKRKEESKHQSIGIDFGIKNNLTLSNGEKFNICVKESKATKILSTKINKALIKNGRTKSKNHYKRVSKLRRSYEKENRKKRDLVNKIVSYILSYDFIAIQDEMIHNWQSSVFGKEIQHSNIGLIKAKLRKNSKVYIVDKSFPSTQICPVCGKLNKHTLKDRNYCCKYCGYYHKNRDEKAAQSILDYAISSMERRSRSLVENTSSTTNMSLDSKKTSMKQEAHYLGSSHKIFEGRKIMTYQNSENVPATKSQIRNVIDELNLLEAAL

SEQ ID NO: 14256 - protein, 421 aa, Cyanobacteria sp.
MITLTYAYRINATPDQAALINQTLEVCRKVWNYALRERKDWINSRKCRVDTCSIGSEYIIPADAPYPGKVFQEKALTVAKRSNEELKSINAQVLQQVLRKLDIAFEDMKRKGNGFPRFKKFGRMRSFVYPQMLKDPLGQGWVKLPQLGKVDVIMHRPVPSGFELKQARIVKKASGYYVILSLQLDVNAPETPASGHPLGIDVGLEKFLATSDGELIKRPKFFKALARKLKLLQRRLKHKKNATKNKAKLALKIARADEQIQGTRKDFHFKLAHHLCDQAGMIFAEQLNLKGMAKGMLGKYTLDAGWGQFLELLSWVCWKRGVYFAKVEAAGTSQTCPECNAHVSKNLSVRVHECSECGYRTDRDVAAAQAIRNRGVSAAGQTVDEIACGRDASGAGLPSLDGTGRDRKILEAILGCPSHNL

SEQ ID NO: 14257 - protein, 317 aa, Halobacteriales sp.
ETGERSRLEIPVGQDLKEEYGLGYHDRLRLEVAGNPKWDGEQGRLELYYDEVDAAFRAIQPVSVDDSRQDSPLASEEAALDVGANNLVACTTTTGQQYLYEGRDLFARFRETTEEIARLQSKLREGRHSSQRIRRLYRKRTRRRDHAQDALVRELMERLYDEGVATVYVGDLTDVLSAYWSAEVNEKTHQFWAYRSFIDRLATTAEEYDITVEVESEAYTTAECPVCGERDDTDRNGDAFRCSCGYEGHADLDASRTFLERHAGTNLEVGSMARPVCLKWDDHNWSESARSPERASLNEERTNRSTGDGKLASVGTA

SEQ ID NO: 14258 - protein, 358 aa, unknown
  TnpB Polypeptide
MIAILDSCRWLYNQFLEQRKTLWETQKKGISCYGQIAELPKFVAENPSLENVYSQTKQNIAVRIDLAFQAFFRRCKAGEKPGYPRFRGKGWYNSFTYPQANNSFKLTENDTRIYLSKVGNVKIKLHRKLQGVMKTCVVKRNPTDKWYVCISCDEVVSKKVNASKKQVGIDVGLKTFATLSDGGAIENPRFFKQSEKALAKAQRKLSKQIKGTQARARVKQVVGRVHEKIANRRDDFTHQESRRIVNAYGTIAIEDLNIKNMIVKGQFSAIRKGIADVAWSEFGKRLAYKAENAGRQFVAVNPAYTSQDCSGCGNRQKMKLSDRTYVCPVCGIKMDRDLNAAKNILSVGLHTLATQKVA

SEQ ID NO: 14259 - protein, 404 aa, Streptomyces sp.
MIRAYKFLMRPTVGQAIALGEMLRDHCALYNGALQERRDAYRHPSKTTIRYGTQSAQLKEIRAFDPERQGRWSFSSQQATLRRLDKAFAAFFRRVKSGDAPGYPRFRGVGWFDTVDFPRDGDGCRWDATPHDPVTRVRLQGVGHVKVHQHRAVIGKVKTVSVKREGRKWFVVLTAEQAQPEPLPPTGSVVGIDLGIANFLADSNGGFVPNPCHGREAAAKLEAAQQALARFPRRGPHNRTANHRRAVERVAELHGKIRRQRLDHAHKTALAMVREHDLIAHEDLKIRNMSKAPAPKPDPDRPGRFLPNGAASKAGLNRSIADAGWGVFLTILHAKAESAGREVIAVDPRNTSRRCPECGLIAKENRPTQEKFHCVSCGHQAHADTVGATNVLRAGLVRRDANPA

SEQ ID NO: 14260 - protein, 429 aa, Brasilonema sp.
VLTLTYEYKANPTKEQINLIEHTLDVCRKVWNFALRERKDWINSRSGPVNACSLVSEYIIPADEPYPNYNAQAKSLTLAKKQYPELKTVNAQVLQQVLRKLETAFIDMKRKGMGFPRFKNRYRMRSYVYPQLGEGQILKGNQIKLPQIGWMEYVKSREIPDGFTVKQVRVVRKASGYFLMLTLECNVDVPDIVPAGHPVGLDLGLDKFVATSDGALIEHPRFLQTLHRKLKLLQRRLKNKQKGSRNRHKLNKKIARLHQRISDTRKDWQFKLTHKLCDDIGMIFVEDIDFRVWAKGMFCKHTLDAGFGQFVSILQRVCWKRGVYFAKVNKDYTSQVCPQCDAHTGKKELKDRIHSCPECGYTTHRDVAAAQVIRNRGASAVGGSPDLRHLAWINALGRSVDQIACGDGLTGTGNSLVKSQRSRKKGGEA

SEQ ID NO: 14261 - protein, 365 aa, unknown
  TnpB Polypeptide
MQKGVKFRIYLNMEQQNLINQTLGCCRLIYNKCLAMRNEAYENGNKIGYSQTSAMLTGLKRMEEFAFLKEVDSIALQQSLRDLDRGFVNFFQKRAAHPTYKSKHNHHQSYRTVNQDDNIHIAGKYMKLPKLGFVKIRQSMEVGKINHVTIERTPTNKYFAVLNVEFEPQPRPNNGGRIGIDVGIKEFYSDSNGTVVSNPKYLERSMRKLIREQRKLSRKPKGSNNRTKQRVKVALVHEKITNQRNDFLQKESTKRIRENQTICIEDLKVKNMMRNHKLAQHISSASWSKFFGMLVYKAAWYGNDVIKIPTMYPSSQTCSCCGYKNPLVKNLAVCIWECPDCHSIHDRDTNAGINILNKGLQMQWA

SEQ ID NO: 14262 - protein, 534 aa, unknown
  TnpB Polypeptide
MVDDADAEVLVALGEHLASLAGADLARRCAEGRLDAKGAAVSRRARKQALTSSCSSRWAGAITRTSDDAWCLAERNLVAEARSLRARTGRIRARLGVAVGARRGKTAGYGSAAERFAKGRRLQALQARLAHLDAEVQAGRMSVCRGGGRLARARHHLDEAGLDEACWRRRWQAARWFITADGEADKTWGNETIRWHPDQHWLEIKLPASLAQLANSRHGRYRCSGLVPFPYRGDDVAAQAAGGAVRYDISYDPEQARWYLDASWKTPVAQGQPGLDELRRGRVLAVDLNAGHLAAVIVDPSGNAVGAPVTLPLELAGLATSTRDGHLRAAISELLAMAKAHSCRCIVIEDIDFAEARSAGREHAGRRPSRGRRGRSFRRLVAGIPTARFRDRLVQMVYNAGVAVIAVDPAYTSKWGAEHWLSTLRDISPEASGHHAAALVIGRRGLGQRARRRERCDSTRPEDRQKRATDSAERPKPAPAGLSEPRTGKPGYGKARGQPLQWQRTQPADPHPRPTRTPKTVRGAPRSTVPSATS

SEQ ID NO: 14263 - protein, 403 aa, Microcoleus sp.
MYQNYKFRIYPTAEQQTYFAGAFGCCRWFWNYSLNLCQQTYKDTGKGLSRGAIQGLLPSLKKEYTWLKSAYSQSLQVVALNLSTAYKNFFDKRAGFPSFKSKHGRQSVSYPQNVKVGDSFIKLPIVGEVHCRIHRPLEGTIKTVTISQNTDGKYYASISVDRGQETPESDASGKAIGLDVGLNDFCVTSDGSKYVNPKHLKKHSRNLKRKQQKLNQKQKGSNTRQKAKKLVAKVHSKIKRVREDFLHKLSRKIVDENQVIAVENLNIKGMVCNHCLAKAISDAGWGMFGTMLKYKAQILGKVYIEVDRFFPSSKTCNNCLHKVSSMPLNVRHWDCPKCHSRNDRDVNAAKNIRDEALRILALGTSATANGRNVSQPGKISVLLDAVPLEVGSSRHSGIPPDDE

SEQ ID NO: 14264 - protein, 387 aa, unknown
  TnpB Polypeptide
MVKAIKVMLIPNNVQKTKMFQYAGASRFAYNWALAREKENYEKGGKFISDSELRKEFTKLRHSDEYAWLLNISNNVTKQAIKDACTAYKNFFKGLQKFPRFKSRKRSMPKFYQDNVKIRFSNTHVKFEGFSSGRKANKQKMNWVRLAEHGRIPTDAKYRNPRVSFDGLNWWISVCVEFPDCRDRSNHDGIGIDLGIKDLAICSDGNTYKNINKSQTVKKLEKCKRRLQRSVSRKYEHNKKGGSYCKTNNIVKKEKLLLKVNHRLANIRKDYLNQTTSEIVNRKPRFICIEDLNVSGMIKNRHLSKAVQNQGFFEFRKQLEYKCNDRGIQLIVADRSYPSSKRCSCCGKIKKDLRLSDRTYKCECGNVIDRDFQASLNIKAYGEQFAS

SEQ ID NO: 14265 - protein, 229 aa, unknown
  TnpB Polypeptide
LGWVELHYRNNRLLHRYLYSGWKLAEELKLKLSGRKIVVYLTFTKSFEVEYGPGNVVAVDVNENNVTVPVFRNNILADVYRVETSLGRMVIAYAERRMRITEGNSTKKREVRGKLRRLHKRGRKLDTLRKADGFIERLAIENKAVVVIGHINRKAEEDMERDKNAKLRHRIHQWCVSTLIKLLEENPVHIAKVSEKGFSSTDPPTRSKVKSYTPMMIRIAVNGLKGLRC

SEQ ID NO: 14266 - protein, 389 aa, unknown
  TnpB Polypeptide
VGSKVNHEKRTQYTVIKILLHPTAGQAELMEKTFGCCRYLWNKMLADTEEFYAATDLHFIPTPAKYKKEAPFLAEVDSQALSTVHQNLRKAYLNFFRAPSAFGRPQFKTKKAHKDSFTVYCRQYCTGPSIRLSEHGIQMPKLGFIRATVHRKPLHWWSLRFVTINRTASGKYSCSVTFGYDAVQPEKIVPTQERTIGLNYSLTRFYVDSNGNSPALSRQLNQSKEKLARMQQKLSRMEFGSKNYLEQQQKIRLLHERMTNQRRDFIHKESRRITNAWDAVCVRDTDLIELSQKLKQGGVMDRGFGRFREHLKYKLERQSKEYIVVDRLSPAAKTCHRCGHVNDKLTSRERVWTCPACGASITREVNTAQNIRDMGLIQFHEQTKETSAA

SEQ ID NO: 14267 - protein, 437 aa, Rhodococcus sp.
VQLRYKFRLYPTPGQQLALARAFGCARVVFNDALRARIDAHEAGLPFPTDGQLSRRIITEAKKAPERAWLCEVSSVVLQQALADLNAGYRNFFASLNGTRKGRKFAPPRFRSRKDNRQSIRFTRNAGFKICDGGKLSLPKIGKVEIKLSRELPTEPSSVTIIKDASGRYFASFVVQHADERLPEVESEVGIDLGLTAFAVLSDGTVVENPRLLRRAECRIARAQREVARKQKGSNNRRKAVRKVARLHARVADARRDFHHQTSTSIIRDNQAVYMENLAVNGLARTRLAKSVHDAGWSAFASMLEYKAIRYGRTFHRIDRWFPSTRMCSTCGTVGERKPLNVRAWTCGCGSVHDRDHNAAKNILAAGHAERLNACGARVRPTAMSAQRGEAGTHRGSRPAAVENPDPRVEEDVKMTFSGRKRRRSWGGEYHFEVRAT

SEQ ID NO: 14268 - protein, 145 aa, Microcoleus sp.
MLGQVLKKVDWSSIKILSIEDLKKVKQGKRGTFSRLFNRRLSHWLYRTLVQFLERKCEEEGIQLVVKDPFKTSQFCSNCNRWDRRNRKGDRFRCVHCGYLAHADHNAAHNRRAFRRGGSLWSPFLLKFKKSKFWITIDVNSSSAK

SEQ ID NO: 14269 - protein, 405 aa, Gammaproteobacteria sp.
MKRKITYRLYPNQQQTARLFELLGFHQRVYHAALEERIRVYREQGKSLSFADQCKALTVWRQKDFGLKEMNAQSLQVTLKRLDLAFQAFFRRVKAGEKPGFPRFKSLQRFSGWGYKTHGDGFRLISNETMKHGELRLSGVGHIQIRGKARTPGEVKTAEILHKAGKWYVSVTVECEPKRCCGNKAIGLDWGLEKFLVSHDSQAKTNSIENPRFIKKLLPKLKALQQSISRKKKESCNRKKAVQVLSNFHAKIARRRRHFHHELSSQIVKENGVIATEALSVKSMTAKGGANKKGLNREILSTAPTQFHSLLKSKAEEAGAMWIEIPTREVKPSQTCHRCQSQIKKTLSERWHHCDCGASCDRDENAARVILNWALNWVSGQELAEVRSRSCFTALKHETHTIPLY

SEQ ID NO: 14270 - protein, 485 aa, Streptomyces sp.
VKKFRPQPGFVVQAYRFALDPNATQERALRSHCGAARAAYNWAVGWVTASWWQRRAEESYGIAEDELTPWRPWSLPSLRKAFNEAKHADPRFASWWEENSKEAYSTGLANASAAFDNYAKSKNARRKGRKMGTPRFKSKRKARLSCRFTTGTIRVDGDGQHVTLPRLGTLRTHEPTAKLLTRVQAGTARILSATVRHERGRWFASFQVEVKQDITRVTRPDAAVGIDLGVKTLAVLADSTGEIRAVANPKHHDQVLKKLRRTSRTVSRRQGPDRRTGRKPSKRWEKANAARNRVHYRVTNLRANALHKLTTAVAAEYGTVVVEDLNVAGMLRNRRLARRIADAGFGEIRRQLDYKTRQRHATRTIVASRWYPSSKTCSGCGAEKAKLPLHVRTYECDACGLVIDRDDNAALNLAALAAACTTGTGVAGDQDTAPAVSNPRGADQKTRATRRSRKATAGRAGGATLPHPRQTETRDRTQAEALTLW

SEQ ID NO: 14271 - protein, 379 aa, Aneurinibacillus sp.
MIKAIKIRLKPTKEQEVLMFKSAGIARFAYNWGLAKQEENYRKGIKSSIKDSRKEFNQLKKTDEYKWLNEVSAQVSQQAFEDLKAAYKKFFDKNGGKPKFKSKKRDQPKFYARYDAIKFTKNNGLFYVQIEKIGKIQYKSNYDIPQLAKYINPRVSFDGKYWYLSLGFEHGTNKSKLDNVSVGIDLGIKDLATVSHIDKPIKNINKTAKVRKIKKKLKRLQRKVSRKYEKNKDGNKYNKTKNISKLEREIKLVHRRLINIRLNHIHQATNLIVKTKPSRVVMEYLNIQGMMKNKHVSKAIQEQKLYEFKRQMKYKCEFNGIDFVEADKWYPSSKMCSCCGIVKKDLKLSDRTYVCDKCGLIEDRDKNASINLANYQVAN

SEQ ID NO: 14272 - protein, 381 aa, unknown
  TnpB Polypeptide
MKAIKVKIYPSKNKKVLIEKHFGCCRVIYNYGLERKIKTYTETKKSLSVYVIQKEIPKLRKEKVWLGEVNAQSLQQSLVDLDSAFSHFFKKNNSFPKFKSRKNPKQSFRVPQSFEISKDRKAIKIPKLKWIKFRDKFNVPKDVEFRNVTVSRDGNEYFASICYDDKKVIPELKKITEKKTLGIDLGTRDLAIFSDGTKIENPRHFKKYQDKLALEQQKLSKKINRETKSYQKQKEKVQKIYKKIRNTRKDFLHKLTTSIVENQNYTSYAMEDLAVKQLEQENFTPMSRAIGDAGWRMLRTMMEYKCKDGGKNLLVIGRFEASSKTCSVCGNVYQELGRDEKEWTCSKCLTHHDRDINAARNIKQFALIKSLGKDFSERKRA

SEQ ID NO: 14273 - protein, 349 aa, Acidimicrobiaceae sp.
  misc_feature (341)..(347): Xaa can be any naturally occurring amino acid
VTTPVLERTSTSTESVSTRAYVYAIDPSAEQANHLRSHIGGSRYAYNTLLGLVKDNWDGNRAKKDAGIEVAQANWVDTSHFGLLNLWAEHRDELAPWWAENGSSTYNDATQRLAKAIGNWRKGRAKFPTFKSKGQGGSVRFMGPAVRLVDSHHARISRIGEVKTYESTRKLFRHLERGTGRIVAATVTQRCGKWQVSFTVEVTRQVPATRAPGKIVGVDVGIMTLYTGATADGVHVLDVDNPRHFVRAQKKLARAQRIAARRQGPGPGKVPSKRWRKANGRVQKVHAGVANARKNLIHETTSMLAKSYDVIVIENLNIKGMVKNPSLAKHIADAGWGEFGXXXXXXXVS

SEQ ID NO: 14274 - protein, 429 aa, Roseinatronobacter sp.
MPLDASSLLDQEKPVKRLLTAHRIALDPRKEQSELFTQCAGIARFSWNWALDRWQKAYAARKLGSSLPSLSEAALRRDLNAIKAQEFPWMLRAPKGVPQQAVKNLGSAFKAFFEGRARYPNFKARGRCRDSFRPDNGPGTFRIDGKRLKLPRIGWVRMHEALRFGADLNPVMKSVIISREADRWFAAISVEIDHHAADLTGLPSCGVDLGITHLATLSDGRKVAGPKSLRKNLKRLARLQKAHARKMKGGKNRARSRLRVARLHARIRNIRHDSLHKLTTMLSSEYSAIAIEDLNVRGMMANRRLSRAISDMGFFEFRRQLTYKVARSGGRLVVADRFFASSKTCYHCKEKVESLPLSVRFWACASCGALNDRDLNASMNLRNLAGSEGSDACPVTACGVKGADAERGLDVKPVTVKQELEYDQEKSDP

SEQ ID NO: 14275 - protein, 332 aa, Halobiforma sp.
LIPQRISNTDCKCENTVEYRRTAVIKLDTPEGADPLLRETVEQFKHCANTASKWCWHGRRQIPPESGCQPETRVVSGDDDGYHVTSKAKAERALYDQLRDETDLTANLVQKGIRRAVEAVKSGVERLKRGENTSQPYFSADSAVYDKRSATFHRDHVSLSTVDGRVECDYTLPDDSETPPTKYVSDENFEFRMAHLQYRDGDWYLHASMRKVEADEEASESEPKHRTVLGVDLGVNNLAVASTGRFWSADEFNHWRREYEKRRGLLQQCGSRYAHENIESVGQKEYGRFEIYLHTVANEIIEEAVENNCSHIVFEDLTHIRENIPEATWQHV

SEQ ID NO: 14276 - protein, 267 aa, Tissierella sp.
LIIKLNQRYIYPKISYTHFHGLENRIKIKLPKLKWIDSKVHREFDGEIKSATISQNPSGRYFVSILVDEKIKELPKTNKEIGFDLGLSQFLIENNGNKIPNPKHLSKNERKLAKLQRQLAKKQKYSKNRNKMRMKVARLHEKITDIRKDFLHKLSSQIINENQVIVSEDINISGILKNHKLAKVISDASWFEFTRQLEYKANWYGRTYIKIDRFYPSSQICSICGAKNIELKDLKIREWTCENCGSHHNRDINASRNILKEGKRMLA

SEQ ID NO: 14277 - protein, 398 aa, unknown
  TnpB Polypeptide
MKANKYKLKLTEEQKGKLAIQFGCARWVYNNALNRKQEAYKKDKSNLSRYQLQSLLVIMKKDPETDWLKQAHSQVLQSALLHLDNAFRNFFSKRARFPRFKTKYGKQSCQYPQGVKIQDNLIFLPKIGWVKAIIHREAIGTIKTVTISKDATGDYFASVLLEDGVEKPKKVTHIETHIGLDMGIIDFITTSHDEKVSNPRFFNKQLKNLRYKQKQLSRKTQGSVRYAKAALLVAKSHQKVKNARNDFQHKLSFNLANNNHVVSIEDINMRGLSKNRKLARHLLDLGWHDFTLKLKYKQEDRGHYLVKIGRFFASSKTCHCCGNKLSELPLGIREWHCPSCDVVHDRDGNAAKNVDNQGILKIKAEGLTVSARGGIVNLSAMSRKLMLVKREAPFIAQA

SEQ ID NO: 14278 - protein, 410 aa, unknown
  TnpB Polypeptide
MEQSPKKPFVKGYKYRIYPTDEQKHFLAKTFGACRFLYNKVLADTQREHQAYVFAKENGTLTDTIKEPNLSSNALAYRVSTHRNNPETAWLQETSSVALQQALIHLGGAYERYFKSLKSVRKGRFSKPTFKKKVERQSFNLMGNGFRLKDHQLYIAKLDTPLKVIWSRELPSYPTSLAISKTPSGEYYISFTCEYTPQKTAGETNVGIDLGIKTYATLSTGDKLENPRWLQNHLKSLKRHQQSLSRKTKGSKNRTKSRIKVAKLHQKVTNARHDWQHKATRTLVNNSHVIGVEALAVANMIRNRKLSKAIQDAAWSSFFQKLQYKVVESQHATLIYMSTFYPSSHICSLTGKQLERKLLLDERTWDCPFCGNTHDRDLNAAANIENKAMELYATLPVSKSHHGEVAVVAG

SEQ ID NO: 14279 - protein, 395 aa, unknown
  TnpB Polypeptide
MLKSFKYKLLPTLDQKVLFNKHFGCSRFVFNYFLNERKEEYLQNKKSLNFYDNAAALTTLKKSEEFSWLKEVNSQTLQTTLKNLDGAYNNFFKFNKGFPKFKSKKGKNSFTVPQYVKVVRSSLVLPKFKEPIKFIEHRKLEGVIKYCTISKTSTEEYFVSILVETEHNPFKKTGRVVGIDLGIKDFVITSDNKKYKNNRYTKTYQRRLKRNQQDLSRKIKGSNNYSKQKLKLAKTYKKITNSRLDNLHKVSTELIKNYDIVILEDLNVKGMVKNPKLAKHISDVSWSHFTTILEYKAKWNHKRIVKVGRFFPSSKTCNVCGHIHQSMTLSIREWKCPNCQTVLDRDINAAKNILAEGMRILSDGTSDYRSGEELRPGLPGTLYEASKVLEEILEA

SEQ ID NO: 14280 - protein, 370 aa, unknown
  TnpB Polypeptide
MWQHIGASRFIWNYMLASQERNYQAGGEYLSAFSLMKLLTPLKKEEEYEWLKSVGNHTLTTVCRDLDKAYQLFFHKQKGHPKFKSRKRSKPSFPVRSTVYFTDGCVQIAKLGKVIYQTNYDIPQGRGHKFSDPRVSYLGGKWLLMFGMERENQAPVLTDKSMGIDLGIKDLATVSFGGEQFVFHNINKSHRVRQLERRMKHHQRNASRKRRINGVRSQSVRLAKEDAKAASIYRKLTNIRRNYIHQTTHTLVSMLPKRITMEDLNVTAMMKNHCLAKAIAEQCFAEFIRQMRYKSAWNGIEFQQALRIYPSSKTCSCCGNIKRDLKLKDRTYVCDICGLSIDRDYNAALNLERYDSNTKRAVGPGASLCP

SEQ ID NO: 14281 - protein, 402 aa, Cylindrospermum sp.
MLKVVKVRLYPDIQQQQSLAQAFGSCRWLWNYCLNLMNQTYIETGKGLSRYEVKKIIPQLKKEHEWLSLTYSQCLQQVCLNLGVAFNNFFENRAKYPRFKSKHGKQSIQYPQNVKVADNCVTLPKIGDVTAIIHRPIEGKVKTVTISKNGSNQYFAAILFDDGQDKPLSNAEGKAIGIDLGLTHFAVTSDGSKFDNPRILNKHEKNLKLKQQQLSRKQQGSINRSKSRKKVARVHRKITNCRDDFLHKLSRRIVNENQVIVVENLNIKGMMQNHCLAKSIHQVGWGMFCTMLKYKAEMEGKIYLEVDRFFKSSKTCHVCLNQVGSLPLALRFWTCENCQTQHDRDVNASINLRDEGLRILTSGTGDKACRPDVSRSQGGRKKSTTTLSVGQEAHTVPSGQCG

SEQ ID NO: 14282 - protein, 423 aa, Cylindrospermum sp.
VIVLEYKVKGKQTQCNAIDDAIRTTQFIRNKAIRYWMDAPHELKVDRFALNKYSTELRKEFHFVAELNSMAVQSAAERGWSAISRFYDNCKSNKPGKKGLPKFQKDCRSVEYKTSGWKLHPTKRRIAFTDKKGIGELKLLGKWDIQSYSIKDIKRVRLIRRADGYYAQFCVGINVKDIQPKTGSDIGLDVGIESFYADSNGYQEPNPKFLRKAESKIKHSQRQIFQKVKGSSGRRKARKLYAKKHLKVSRQRNEHAKRIARNVCRSNDVVAYVGASPCRRLDLRVSNMVKNHCLAKSISDASWYLFRQWIEYFAAKFDKLAIPVTPQYTSQKCSSCGVIVKKSLSTRTHVCSCGCELHRDTNAAINILNLAKAREGHSRSNANGLVTSTLLGENLVEQVTRVKLESSVSLDLRVSISLLPIIP

SEQ ID NO: 14283 - protein, 395 aa, Cylindrospermum sp.
VRTSYQYRLKPTKRQAEIIDNTLDMLRCQYNYQLAQRFDWYEQNRCSIDRCSLVVCHIPELKDKPNRFSQQATLTQLKKDRPWYKSIHSQVLQEVSKKVELAFDKWLKGDCNGKKSGKPRFKGKGQYKTFTYPQFKKEHFQNNQITLSKIGTVKVIVHRQIPNGFDIKTMSVTKKADGYYVTLSLEAQTVPTVKPDFDAKNIVGIDVGLIDFYVASDNTRIAAPKYLRKAERKLKSAQRKVSRRQKGSNRRKKAINKLSKQHKKVADTRKDFHFKTAKSLLDKYDVIAVEKLNIKGLAKSRLAKSVNDAGWGQFISILTVRADNAGLKVVAINPSGTSQECSNCGSKVIKPLSQRMHNCPNCNISLCRDLNASIIIKNRGTHDLKAQIMSSTKSL

SEQ ID NO: 14284 - protein, 385 aa, Cylindrospermum sp.
VQKIRLYPSKELHKVWKGWLAQYRYYYNETISLLRCFHGVERVSAEALDKMLQRLENIPDWVKSIPGHQRQEACFEAYDAFNRAKKDGGSAKFKSVKSTSQTIQFKVGNFRNGTWYCQKTKGLKFTTINQAVPDECFYGTELIYRRGKWFGCFPCVAEVLTTGSERVIALDPGNRTFLTGFDGENVLEIGKGDIGRIQRLCQHLDRLISRAAQVKACLRRKMRMAANRVRDRIQNLIKDLHNKATNLLVNSYKIIFLPTFDSSQMVLKNQRGKKRKINSKSVRQMLTLSHHRFEQHLKQAALKKGVLVVLCNESYTSKTCGNCGHIHHKLGGSKTLKCPHCGTIISRDVNGARNILLRALQATAFTVTHDSIVLSDSSELTGSYS

SEQ ID NO: 14285 - protein, 410 aa, Cylindrospermum sp.
MLVFEAKLEGTNEQYRKLDEAIRTARFVRNSCVRYWMDNQGIGKYELSAYCAVLAANTDFPFAAKLNSMARQASAERAWSAIARFFDNCKKGKPGKKGYPKFKKEQTHGSVEYKTSGWKLSVDRRYITFSDGFKAGSFKLWGTRDLHFYQLKQVKRARVVRRADGYYCQFCIDHQRVERREPTGKTIGIDVGLNHFYTDSNGETVANPRHLRKSEKSLKRLQRRMSKTKKGSRNRIKFRNKLARKHLKVSRQRKDFAIKTARCVVRSNDLVAYVGASPCRRLDLMVRNMIKNHHLAKSISDVSWSLFREWVEYFGKVFGVVTVAVPPHYTSQNCSNCGEVVKKTLSTRTHVCPHCGHTQDRDQNAARNILEKGLSTAGHVGTNASGETDQYLGEETPPSKSTRGKRKSQE

SEQ ID NO: 14286 - protein, 410 aa, Cylindrospermum sp.
LLHKAVQVRIYPSKEQKTQLAQAFGCARWWWNYALNKSIETYKETGKGLNRAALNAFLPILKKAEDTIWLGDCYSQVLQATTLNLTTAYKNFFDKRAGFPKFKSKHGKQSIQYPQNVKIVDGNIKIPGNIGIVKAKIHRPVEGKIKTVTVCKTPSGKYFVSILTEVEGENPTITFGKIYGIDLGLKHFAVVTDGEKVSQYDNPKHLAKYENNLKRKQKKLARKQKGSKSRNKYRQVVAKVYERISNSRQDFLHKLSYKLVSDSQAVIVESLHVLGMVRNHNLAKSISDAGWGTFTNFLAYKLECKGGKLVEIDRWFPSSKLCSNCFYQVSEMPLDVREWTCPHCGTHHDRDGNAAINIRAEGIRLIKAEGSAVSAVGGGIRPKFGRKSKLRHSPVSTEADTVLGTPSQCG

SEQ ID NO: 14287 - protein, 414 aa, Cylindrospermum sp.
MLVFEAKLEGTNEQYQSLNEAIRTARFVRNASLRYWMDNKGIGRYDLSKFCAVLAANHKFPWVSKLNSMARQASAERAWSAIARFFDNCQKNKRGKKGYPQFKKEQTHGSVEYKTCGWKLSVDRKYITFSDGFKAGTFKLWGTRDLHFYQLKQFKRVRVVRRADGYYCQFCIDHERVEKREPTGKTIGIDVGLNHFYTDSNGETVANPRHLRKSEKSLKRLQRRMSKTKKGSKNRIKFRNKLARKHLKVSRQRKDFAIKTARCVVRSNDLVAYEDLMVQNLIKNHHLAKSISDVSWSLFREWVEYFGKVFGVVTVAVPPNFTSQNCSNCGEIVKKSLSSRTHVCPHCGHTQDRDHNAARNILEKGLSTAGHVGTNASGDIDLCLGGETPPSKPSRGKRKPKERSLESPAISGKD

SEQ ID NO: 14288 - protein, 443 aa, Cylindrospermum sp.
MLLVAKKQKSIGVQQVLLSPDNETKALLEYLCQQSGKLYNSGVYFARQTFFKTGKLLTGKFDLVYEPTVSKTLVAQSMPSTPMQQTLMSVAEGFKSFKELRSLYLQGNLHFLPKLPNYLKSAKLFKVAYPNSGGQKPTLVNGQLRFSLGLTVKRWFGVSEFFLPMPSNLDYSKVKEFTILPKNGAFYLEMSYQIEGHEPELDINQALSIDLGTADNLAACVDTLGNSLLIDARVMKAMNQLWNKKVSTRKEGKPESYWDNWLDRVTRKRNHQMRDGINKAAKLIINHCLKYGIGTLLIGWNEGFKSNANMGKINNQKFVQMPLGKLKTRLMQLCDLHGIRFQETEEAYTSIASFLDGDSLPKYGEKPVGWKASGERIKRGLYKSGNSSIVNADLNGSANILRKVASNLSLDLGLLGRRCLTNAARVRLWILPKYTLSAESQRL

SEQ ID NO: 14289 - protein, 597 aa, Cylindrospermum sp.
MYLQESLLPDWESAPKHSKGGFKTGKSKASSPKGDNEDITSIQLSLFDAVIPQMNEPYLYMPEFQAAVRKTTSLNRLSFFSLVTPTQKSLLTSEVDSTSEEKVFKPYWTEFSQTLVNLLSLPTKIGFVALGSILSHGSVLGSKLRYWFSTRRTSAQNGKWSKISLPLSMSSVADCTDSESTKNKLLKTVSYRVYPTKELEFIWKKWVAAVRKVYNISIAYLNENQGFSKVSKKGGKMGFRTMLKGSGLIPQWCWDLNVSKILDNASMEAYKAWAETAKNPKIKGTGKDKKPHPHAGLKIAKFRSIRDQKLTIQFDPSAYKNGRWMVSTTKHLPHPEFRGQNFCILTDGASELTYNKGRWFAHFPVELEQTVSVTNKVIALDPGVRTFMTGFNGSDFLEFGNGDFNKIAKLCSHLDKLKSRHDLSVGHKFKRLRYKIRQSMERLRIRIKNLRYECHKQVGSYLAKKYDVIVLPTFETSQMIVKKKRKLKNKTARAMMTWAFYQFSQTLEHLCNRYGSKLVRITEEYTSKTCTKCGHVHRKLGSSKNFICPSCGYKIPRDFNGAVGIFLKAMWDTTFTDSVGDVVLDVHDISNVVECLG

SEQ ID NO: 14290 - protein, 455 aa, Cylindrospermum sp.
VLQAKEVKGDKNLMALRRATFRLYPNKEVSLMLSYHRQLHKDLYNSAISNRITAYKKFGKSVSYFEQQNCLPDFKEVWTEYKQINSQALQATLKRVDFAFQRFFKGLAKYPRFKSIRHYSGWTYPSFTGWKLHSTGDNGYLELSKIGQIQMRGKARLWGQPKTLDIVYRNGKWYASITLEVDENLLKNSRQTASGIIAIDLGCNDAIAWSNGEENGLVPAPRFFRIAEQENKRLSKIKRRKRSPSFQKKIKASRRWKKAQKQISKLHRKVANQRQNWVHQETARIISGNSTVVTEKLEVKNMTSKAKKVQRKKQKAGLNKSILDVGMGMIRDTLKAKLDDVGGVFVEVPTRKVRPSQTCPQCGYQEKKSLAERIHVCQNCGYTQQRDIASAEVMLLCLNNKLPGLGTSLVDVDDSSSTSNTNKRKNAGSMKQLGRMKRQKSQLTDGYAETPSSTK

SEQ ID NO: 14291 - protein, 479 aa, Cylindrospermum sp.
MRTSYQYKIKPTKEQAEKIDKTLEMLRCQYNYLLAQRFDWYEQNRSSVDRCSLICYLPELKDKPNYYSQKASLTQLKLDRPWYKNIHSQVLQEVPKKVEITFDRWLKGDVNGKKSGRPRFKGIGQYKTFTFPQFKQHHFVNSKIRLSKIGDVKVIVHRQIPDRFDIKTVSVTKKADGYYVTLSLEDKAVPTIKPDFNDVNIVGIDVGLIDFIVTSDNDRIAAPRYLRSSEGKLKSAQRRVSRRKKGSNRRKKAIKKLGIQHKKVSDTRKDFHFKTANALLKKYAVVAVEKLNIKGLAQTRLAKSINDAGWGQFMSILSNKAENAGLKVIAVNPNGTSQECSSCGHKVKKPLSQRMHNCPVCYTSLCRDLNAAINIKNRGDYQADLSYCFETDKPRPDLCIEVVITSGSPIKLQKYKLMQVPEVWFWEDGTLEVYCLREQEYEKVVQSELLPDLDLSLLNRCLLLSSPLEAIREFRRGIS

SEQ ID NO: 14292 - protein, 425 aa, Cylindrospermum sp.
VEVRHKAVLVRLYPTTEQVQQLAQAFGCARWWWNYALNKSIETYKETGKGLSRVALNALLPSLKKAEDTVWLADCYSQVLQATTLNLTTAYKNFFEKRAGFPLFKSKHRKQSIQYPQYVKIVDGNVKLPGNVGIVKAKIHRPIEGKIKTVTVSKTPSGKYFASILTEIEGDFPTTSEAATARLGVPGIKQVACKIYGIDLGLKHFAVVTDGEKVSKYDNPKHLAKHEKNLKRKQQKLARKLQGSNSRSKYRKVVAKVYERVSNSRQDFLHKLSYKLVSDSQAVIVENLHVKGMVRNHNLAKSISDAGWATFTNFLAYKLERNGGKLVEIDRWFPSSRLCSHCFTSVGEMPLAVREWTCPHCGTHHDRDGNAAINIRAEGIRMLKAEGSAVSAVGGQISPKLGRKSKLRHSPVITEAQTSALGKSE

SEQ ID NO: 14293 - protein, 455 aa, Cylindrospermum sp.
MIWISTKLWKVEPVAKVKKIIGVQQVLLSPNNEIKALLEYLCQQAGKLYNNGVYFARQIFFKTGTLLTGKFDLAFEPSVSKTLTAQSLPSTPMQQTLMSVAEAFKSFKELRNLYIKGQLHFKPKAPDYLKGSKLFKVAYPNSGGQKPTLVDGQLRFSLGLTVKRWFGVSEFFLPMPSNIDYSKVKEFTILPKNGAFYLEMSYEIALQKHDIDINQALSIDLGTADNLAACVDTLGNSLLIDARGMKAMNQLWNKKVSTRQETKPENYWDNWLDRVTRKRNHQMRDGINKAAKLIINHCLNYSIGTLVIGWNQGFKANANMGRFNNQKFVQMPLGKLKDRLKQLCDLHGIRFQETEEAYTSKASYLDGDSLPQYGEKPLGWKASGRRIERGLYRSENGSIVNADLNGAANILRKVASNLSLDLGLLGRRSLTTVARVRLWKLPKFTLSAESQRLQP

SEQ ID NO: 14294 - protein, 411 aa, Cylindrospermum sp.
LTAKDGQVKTAHQYKLRPTKQQAIEIDRWLSMLCAQYNFLLADRFDWYECNRSPINACPLVCHIPELRDSPDYYSQKKTLPHLKKTHPWYREIYSQVLQDIVKRVKLTFDRFLQGDSNGRRSGRPRFKPRERYRTFTYPQMKDGCLQDNMITLPMFGIVKVILHRPIPEGFKIKTASVTKKADGYYLTLSLEDTTVPVLKPDLNPDSITGIDLGLKAFLTTSEGDAISIPQHYRKSQKRLRVIQKRISRRKKGSNRRKKAINQVAKQHKKVADKRRDFQFKTANHLLKKYDVIVHEDLNIKGLTRSMLALSVHDAGWSSFLSILTTKAGNAGLLVIAVNPSGTSLDCSSCGVKVPKKLHERWHDCPNCECRLDRDHNAAINIKNRAVGHSVLKAKSLLSNSRIVLEAHTYS

SEQ ID NO: 14295 - protein, 412 aa, Cylindrospermum sp.
MKLVERHIITKNHPFWSEIDHKAFLSKNLFNYANYHYRQYFFKYHQKLNFNQLYHQLSQTDDYKALPTKVSKQIIRRLDSAWISYFAAVKAWKQKKEKFLGQPKIPQYKDKTKGRNILPYPDESISKKALKKGICHLSMSEIQIPTSQQEIIEARIVPKSSCYLIEIVYEKMEETTNNQQIAGIDLGVNNLMAVTTNQTGVAPILIKGRPIKAINTFYNKQRSWLQFQLKIPHNQTNSQRLKNLTHKRNCRVENYLHTASRKVIDWCVQHQIGILVIGHNATWKQEINLGRKNNQQFVSIPHDRLREMLTYKAQLKGIKVIITEESYTSQASALDGDKLPKYGDKKPQFTGKRIARGLYKTGDSRLINADINGSFNIIKKVIPDVFDQGIKGLPFNPVVLDPLRMTRLSNFE

SEQ ID NO: 14296 - protein, 440 aa, Cylindrospermum sp.
LYVYAIVCIGRNQGQKVKISYQYKIKPTKEQAEKINKTLEMLRCQYNYLLAQRLDWYEMNRSPIDRCPLICHLPELKEQPNYYNQKASLVQLKLDRPWYKDIHSQVLQEVPKKVELAFDRWLKGDVNGKKSGRPRFKGQGQYKTFTYTQFKRHHFVNNKITLSKIGDIKVIVHRPIPVGEACPKGLGFEIKTVSVTKKADGYYITLSLDDKSVPIVKPDFNPDNIVGIDLGLIDFYVASDDSRIKAPKYLRKAERLLKSLQRLVSRRKKGSNRRKKALKKLGKQHKKVADTRKDFHFKTAKLLLDKYDVIAVEKLNIKGLVKTKLAKSINDAGWSQFLTILSNKAANAGLKVIAVNPNGTSLECSNCGSKVIKPLSQRMHNCPVCHTSLCRDLNAAINIKNRGTHGLKAQSMSGLGVVEKPTLTCKGVCGVRHSKQIKND

SEQ ID NO: 14297 - protein, 255 aa, Cylindrospermum sp.
MDWIKLLHSIIVAVIYEQASNQNNLNLNAIANLGIGLDNLVIITSIQAKTQPLLLNPRPLKSVHQLFNKQIAKRQDKTPNFYTRKIPQLCTNSKPKMNDYLDKNSRFIIEYLVVSNISILVIGKKFNCIPKINLGSRNDQNFVQVLPAGFVDFIAYKAGGERVNFIQQEESSTFHSNFCVVMAFQFIISKPKLNINSATSKFPLELYCYACGVVLLIHVNGFCNIMKRAIPNAFAKGIGAVVVQQIRITPGQLVA

SEQ ID NO: 14298 - protein, 404 aa, Mycobacterium sp.
MQMRYRYRIEPTPAQQAILARVFGCARVVFNDALRERDEAYQAGEKLSDSEIQRRVITAAKRTEERGWLAEVPSVALVQSVNDSRRAWRNFFDSAAGKRRGRRVGRPRFKSRKDHRQSFRLTRNGFSIRDNGGLIVAKVGEVRVRWSRELPSTPSSVTIIREPDGHFYASFVVDVPATPLPPVDREIGVDVGIARLATIAATDGARSDIANPKHLGRKLRKLRRLEREKSRRQKGSANRAKSRRKVAVAHNEVARARRDYHHKQALALVRDNQAIHVEDLNIAGMVRNRRLARAIHDAGWGQFVKIIGEKADRYGRTVNTVSRWLASSKTCSTPDCGHRLDELPLQIRTWTCPQCHTVHDRDYNAAKIILAAGRAERLNACGAPVSSQLVAAVGVEAGSTPTAA

SEQ ID NO: 14299 - protein, 395 aa, unknown
  TnpB Polypeptide
MPLKTHKIALNPNNKQRVWFAQQCGYARFAYNHALSDFKAGLDNDEFLSTSKLNERFNVAKKEHGWTKEQDQVVANKSIFVNLSAAIAHWVSKRAKFPKYKKRGKRDSFTTNNQFVQVVGKRIKLPKIGWVKMFQALRWSGKIMKVTISRTAHRWFVSITVDTEDTEAVANLAIHPVIGIDVGINSLSTLSDGTKYDNPSPLKRYERTVAKEARRLSKRTNGAKNWINQKWKVARIHYRIACIRNDAHHKAATDIVNKTSAIGIETLKIKNMLKNRKLAKALSDSALGGFLQKLKTKAAARGIPVTEASQFYASSKTCSSCGHTKDNLVLSERTYHCGQCDVSIDRDVNAAINLRNVAVGHTETENACGVQVRPQSEAGETEARKAVWQQQLLPI

SEQ ID NO: 14300 - protein, 546 aa, unknown
  TnpB Polypeptide
MDDWVTKGFKGFNYHNDFLVPVRLTWFQKHRIISIFKRVVFIPFCLIQFQMSLNKIGEKGKMAIEKQIFIYTVKLKTNHYHHEQFAKRFRMADDIYKTTLREILKRNRKMKKDPRYKKAYQLPKGRERNAILKELAIDYAMRGNFEFSKFANDYRNARNYDTYLPSDVAIKLGARAWSAFEKVMFAKGAHRVNLHGELLSFEGMHDSGLTIRKGQFIVGTRAVKVSCPVIYESDEYEETVLRAKTKYNRLVRRFENGKWNYYAQMVLEGELPIKHASDLTGVVGIDIGTSTVALSSHYQTELEELAKGIEIDEPEVRRLSRKLDRQRRANNPHKFNDDGTIKRGVREPWNDSKGYLETKTKLHEIKRKQSERRKLAHKTLANKIVKMGSSFVVEQMSFKGLAARAKETTVNEETGRIRSKKRFGATIAHRAPSMLIEQIRYKANYQGKAFIKANTFEVKASQLDHTTGEYTKVSLDTRAKEIGGHLVQRDLYSAFLLQHVKLDGETVDLDACSEDFDIFLRNQKETMENLRTTLSSTGQSKFNQQS

SEQ ID NO: 14301 - protein, 382 aa, Escherichia sp.
MRRFAGACRFVFNRALARQNENHEAGNKYIPYGKMASWLVEWKNATETQWLKDSPSQPLQQSLKDLERAYKNFFRKRAAFPRFKKRGQNDAFRYPQGVKLDQENSRIFLPKLGWMRYRNSRQVTGVVKNVTVSQSCGKWYISIQTESEVSTPVHPSASMIGLDAGVAKLATLSDGTVFEPVNSFQKNQKTLARLQRQLSRKVKFSNNWQKQKRKIQRLHSCIANIRRDYLHKVTTTVSKNHAMIVIEDLKVSNMSKSAAGTVSQPGRNVRAKSGLNRSILDQGWYEMRRQLEYKQLWRGGQVLAVPPAYTSQRCACCGHTAKENRLSQSKFRCQACGYTANADVNGARNILAAGHAVLACGEMVQSGRSLKQEPTEMIQATA

SEQ ID NO: 14302 - protein, 340 aa, unknown
  TnpB Polypeptide
MVANRAYKFRIYPNDEQKILFAKTFGCVRMVYNHWLDRKIRQYEENKTNVTYTICAKEMAAMKKTEEYRFLKEIDSIALQQSLRHLDTAFQNFFKQPKTGFPRFKSKKRNKNSYSTVCINGNITISNGYLKLPKIGQVRLKQHRIIPDEYRLKSVTVSQTPSGKYYASILFEYEDQVQEKELQKFLGLDFSMHELYRDSNGKEPAYPRYYRNAEKKLAREQRKLSKMQKGSNNRNKQRLKVAKLHEKVSNQRKDFLHKQSRQITNAYDCVCIEDLDMRAISRSLNFGKSVSDNGWGMFTTFLKYKLEEEGKKLVKVADFLQAARPVLFVVTRMLKRKILR

SEQ ID NO: 14303 - protein, 412 aa, Halobacteriales sp.
PNGTLPYAPDKGDYHIHELSVEDTALVVTLNAPESLSPDSHHDWTAHELHFPVYDRFREMLNNGEVKAPTLHASDYGYTLDVPVDIPETDCETVEGRVLSVDLGVKKQVTCVPVQQDDGLTQVAPPTFIDHPGKNKPFRLKSDAEGINDRLAELRRHGNAHTDHFDHLLAEYRRTRRKERRLRQQIQHDVANGLVWLAVDSHCEQIVFESLGQMESPDTDGAAAWSISSWARGELLDLVAYKAELFGIEIETVNLWETSRYCPRCGERGRTVKAPDDYTECRHGGHFHCPGCGYECDRDVVGAVNVGRKHLAEVKMEEANPAAYTEAGKHASFPSPQGARSTGVQSATDHLEQDSASGRQTQLPQFRAPSLTVKWREADTGGLHESPSRDTGLRRPSGSVTQHILASATDCD

SEQ ID NO: 14304 - protein, 513 aa, unknown
  TnpB Polypeptide
MSATAWTTWIPLSIFSAPPGRPSKLGSKPTCGSGSLDRLSRPYRQLPYIRSTAADCGGQRITSGSRRDRLHRRRGRRRRGRAAPRIHPIGGEETRPFRVERNRRSYCQGAVPAQTVGARWDNCEVKLVVQVKLLPTLEQARALEATLTACNALATSISAIAHEKRVASAFELHHLTYHQSAGSGVSAQPRIRAIKKVADAYKTLRANLQAGRYGRSGSARRAKVEGKPVVFRPDAAQPFDDRCLSWQHEAKTVSIWTITGRMRGLTYTGLPAHLELLATHRQGESDLIRRGRNWFLIATIDLPDVAPADPTSGFVGVDLGIENIAVTHNPTTGEHRDWSGKAIKDRRHKNRLLRTKLQKKGTKSAKRLLKARSRKETRFAADINHQISKTIVAEAKRTGCGIAVEDLTGIRQRVRLRKPQRATHSSWAFAQLGSFLTYKAARQGVLLLQVDPAYTSQQCSACGHIDRKNRPNQAEFCCQKCGFSLGADRNASINISMRGQDQYVAAVNQPNAA

SEQ ID NO: 14305 - protein, 456 aa, unknown
  TnpB Polypeptide
LKRTKDTFKLNYQYRIVPDKQQACQLNNWLHKLCRIHNLMLEKRFNWWECNRRPVNACSIFVTHLPELKDPPTYYSQKRVPHWSREAFKHLYKGIHSQVIQEAIKRVEDAFNRFVAGDSNGKRSGKPRFKSLRRYRIFSIPQLKPDCLTVFPNPHRRKNGSTRRDIAYINLPKIGQVKLIYHRPIPEGFTIKAALVSRRADGWYICLTLEDKTVPSLKSPEIEATEENSLGLDVGLEKFWTASDGEVEPIQQHYRKSESKLTKLANRKDSKPHQSASRRKLAKKISKHHQRLQRKRKQFHYESATKLVSRDEQVFFVEDIKPGNLSRKNKPKQDENGKYLPNGQSAKSGLNKSINDAGWSQFLSILTYKAAKAGKSVVKVKPHDTSQICSCCNRDQEKDLSVRIHECLCGLILDRDWNAAINIKKVGLGIFPTIKRPKRSRKTTTKEAYTVPVGSV

SEQ ID NO: 14306 - protein, 198 aa, Escherichia sp.
  misc_feature (194)..(197): Xaa can be any naturally occurring amino acid
LQQSLKELERAYKNFFRKRAAFPRFKKRGQNDAFRYPQGVKLDQENSRIFLPKLGWMRYLNSRQVTGVVKNVTVSQSCGKWYISIQTESEVSTPVHPSASMVGLDAGVAKLATLSDGTVFEPVNSFQKNQKKLARLQRQLSRKVKFSNNWQKQKRKIQRLHSCTANIRRDYLHKVTTTVSKNHAMIVIEDLKVXXXXE

SEQ ID NO: 14307 - protein, 194 aa, Escherichia sp.
  misc_feature (194)..(194): Xaa can be any naturally occurring amino acid
LQQSLKELERAYKNFFRKRAAFPRFKKRGQNDAFRYPQGVKLDQENSRIFLPKLGWMRYLNSRQVTGVVKNVTVSQSCGKWYISIQTESEVSTPVHPSASMVGLDAGVAKLATLSDGTVFEPVNSFQKNQKKLARLQRQLSRKVKFSNNWQKQKRKIQRLHSCTANIRRDYLHKVTTTVSKNHAMIVIEDLKVX

SEQ ID NO: 14308 - protein, 360 aa, Moorea sp.
VIILEFKAKGKESQYSAIDEAIRTVKFIRNSCIRLWIDNKGTGKNDLSKYSKILAKEFPFANELNSTARQAAAERAWSSIARFFDNCKKKIPGKKGFPKFQKRARSVEYKKSGWKLYPDKKSITFTDKKGIGKLKLKGTWDLWRFDKKQINRVRIVKQADGYYVQFCVAVNVKEDVEHTGEMIGLDVGLKDFYTDSNGHSEPNPRFYRKGEKRLKFYQRRVSRKKKGSANRRKAINKLGRQHLKISRQREEHAKRLARCVIRSNDLVAYEDLRVKNLVKNHCLAKSINDAGWYQFRKWLEYFGVKFGRITVAVNPAYTSQICSECGEVVKSHYLLGLISANAAVNWTETTMPPLISAIEP

SEQ ID NO: 14309 - protein, 373 aa, Pleurocapsa sp.
MLKAYKYRFYPTRGQAEMLSKQFGCSRFVYNWALNEKVQAYQRTGKSPTRYELDKRLTTLKKELPWLTEVASQPLQQAIIHLERAFTKFFKEKKGFPKFHSKHTHNSASYPQGVRVDFESNRITIPKLGKVKAKLSRGFEGQIRTCTVNRNAAGHYHISVLVEVENQDAAPTLETQETAVGVDLGIKHFAVLSTGERIENPRHLSHALARLQVLSRRHSRTKKGGANREKARRKLARAHQRVTDCRNDFLHKESTKLIREFDTVCLETLNVAGMVKNHRLARYISDASWGRFGEFLEYKAGWYGKHVRCIGRFEPSSKLCACGTIKRELRLSDRVWTCASCGAIHDRDVLAAQNIKRFAFIAPRDTREGLREA

SEQ ID NO: 14310 - protein, 397 aa, unknown
  TnpB Polypeptide
MKIIRAYKTELDLNDHQRTACAKHAGAARWAYNWGLARKKEAFEAGLKTPTAIDLHRELNVLKHTEISWMYEVSKTAPQEALRNLDRAFDHFFRRVKLQKQGKLKGKVGFPKFKSKKKGIGNFQVWGAIHVHQKSIQLPRLGILRLKESNYLPVEDIRILNATVSESAGRWYVSLQCEAKIPDPVISDKPVCGVDLGIKTMATVSDGKVFENPKALRSNLVKIKRLQRTVSRRMKGSANRKKAVPLLAKAHLRVAIIRKDSIHQVTSQLATLAPARSAGETKSIVVLEDLNVSGMVKNHHLAQAISDVGFSEFRRQMRYKGQWYGCEIILADRFYPSSKICHVCGYKLEELNLKVRKWECPSCGTHHDRDLNAANNLESLAPKLPRVPREVTPVEKT

SEQ ID NO: 14311 - protein, 372 aa, Clostridioides sp.
VVVVEKAYKFRMYPNKKQQELINKTFGCCRFVYNKYLAKRIDVYKNNKETFTYKQCSSDLTNLKKELKWLKEPDKFSLQNALKDLDNAYKKFFKEKAGFPKFKSKKINRFSYKTNFTNGNIMYCGQYIKLPKLGMVKVRDKQVPQGRILNATISKEPSGRYYVSLCCTNVDIEVFENTNNQIGLDLGIKEFCISSCGDFIENPKYLKKSLNKLAKLQRELSRKTIGSLNRNKARLEVAGLQEHIANQRKDFLQKLSTKLIKENDIICIEDLQVKNMIRNRKLSRLISDVSWSEFVRQLKYKANWHGRQIVKVGKFFASSQICNKCGYKNEEMKDLNIREWICPSCNETHDRDINASINILKEGLRLITIQNK

SEQ ID NO: 14312 - protein, 462 aa, unknown
  TnpB Polypeptide
MATATATVHQAYRFALDPTPRQQGRLASAVGGARFAYNWGLELVKRRLDERAAGQEVQVPWTLAGLRREWNRAKYQAAPWWSRNSKEAYSSGLDALARALKNFTDAKQGRRKGAKVGFPKPKRKGRSRDACRFTTGPIRVEPDRHHVVLPRLGRIRTHESTRKLARRLEQGTARILSATISRQGGRWFVSFTCQVQRAIGGPRRPAARIGVDVGLCHLAVLSDGRRVPNPAPLRQAQQRLRRRNRQLARRRGPLAPDGSRREPSKRWQQTSRRLAQTHAKIANQRRNRLHHLTSALAGTYGMVVVEHLHIAGMLKNRRLAGRIADAGWAELRRQLAYKTAWAGGTLVQADPFYPSSKTCSGCGHVKAKLPLSERTYRCERCGLVCDRDENAARNLAALVVTQTGGEVVAGSGPETRNARGVDLRPGPAGQTAVNREAGTGRRPGKTGTVGAQAPTAQITDTP

SEQ ID NO: 14313 - protein, 621 aa, Lactobacillus sp.
  misc_feature (312)..(401): Xaa can be any naturally occurring amino acid
  misc_feature (513)..(616): Xaa can be any naturally occurring amino acid
MLFQAKEMKFMAFKTKLAEHEIQLGTRQYRIYPEGEQIAWIWQLFGANRFVWNQFVAAFEARYEANPELKFPKIGVLKSWLPLMRKEYEWLKRVNSTSLQFTVERFSDDMWAFLTKKQVKQGKPRFKSRKYYCQTATIKNVKYQTKTGAQAQIAVLSPHHLRIGKKNGITLRTSSLHNLRNVRIQKAVISYRQDLDRYYISFSVVKDKRQLAQYQVKSKKTGKAVGIDVGLGKEWLVTSDGKRFGVPDTFKLEKAMLKRQSHCDRNRTAIEKRAARFNHEHEEKIDKYDYANWQKLRKTKSKYQLKIRNIRXXXXXXXXXXXXXXXXXXXXXXXXXXXXXXXXXXXXXXXXXXXXXXXXXXXXXXXXXXXXXXXXXXXXXXXXXXXXXXXXXXXXXXXXXXKVKNLLGNHKLAHNIANASWGMFRRLLAYKCEWYGKKLIVVKPQYTSRICSECGKKNPRFAHMKTRDWLAIREWYCPYCHAHHDRDVNASKNILARAVGLGSKISKIQAGAXXXXXXXXXXXXXXXXXXXXXXXXXXXXXXXXXXXXXXXXXXXXXXXXXXXXXXXXXXXXXXXXXXXXXXXXXXXXXXXXXXXXXXXXXXXXXXXXXXXXXXXXLFDGW

SEQ ID NO: 14314 - protein, 424 aa, Azotobacter sp.
MNMVRLAIELTQLNLEVLANLSEQVFQRLKMLRRKHTPSALGNKDQMGVQLENAVSSCANCCVFFHGPNILDGMKQTKTLQVRVRDKHAPLLRQMARSVNFVWNYLNELSQRSIRERGVFLSAYDMDRYTKGAGKELALHSQTLQEVSREYVTRRVQFKRNRLAWRKSGGARRSLGWTPFKAGAASWKNGQVYHNGHYFKVWDSYGLSQYPFRSGSFSEDGRGRWYFNVVVEVDVAVPLGQDAIGIDLGLKDVATCSDGTRLENSRFYGGMEDKLATAQRAHRNSRVRAIHAKIANRRKDALHKFSRSLVNRHGTIIVGDVSSAKLAQTRMAKSVLDAGWGQLKTMLAYKCAHAGIVFKEVGEAYTTRTCSSCGSLSGPQGVNGLRIREWTCSACDVTHDRDVNAARNILAAGHGRPGVGIHGL

SEQ ID NO: 14315 - protein, 492 aa, Micromonosporaceae sp.
LDDHRAGSDARSRSLVRQGTSEAFAVVCGQPVQGLHLACAAGGVSASAVEAADLVVSVLLCRDGGRGQRRDGAAVYRNPVRESGQAVRRSFKFRLRPTCKQVQALETMLADHRELYNAALQERRDAYRKRGITVSYGMQSAQLKDIRKELAEQARWSFSSQQATLRRLNLAMQAFFRRVKAGQTPGSPRFKGARWFDTVVWPSDGDGCRWDSTSDKTATRVYLQGVGHVRVHRHRQVAGTVKTISVKREGSAWYVVLSCDDVPANPLPPTGNATGIDVGVTEFAALADGTLIGNPGWWKQAEDQLTQAQRAHSLRYPKTAPRSARKTRSAQQVAKVHRALARKRLDFHHKLALDLVRGFDTLCHEALNIAGMVRAPKPKPDPDTPGVFLPNQAAAKAGLNKRILDAAWAQFLTILAAKAENAGRLTVAVNARHSSQTCHECRYVDPASRNGIVFRCTRCGYEDHADVNAARNHLRAGLVLIQAASQDGSPRL

SEQ ID NO: 14316 - protein, 409 aa, Richelia sp.
VRTAYQYKLRPTKKQAAEIDRWLSMLCAQYNYLLADRFNWFEQNRSPINSCPLVCHLPQLRDNPDYYSQKKTLPQLKKTHPWYSEVYSQVLQDVVKRVKVTFDRFLNGDRNGKRSGKPRFKPRSRYRTLTYPQLKEGCLQGSLINLPMLGKIQTILHRSIPDGFKIKTASVTKKADGYYLTLSLEDKTVPEIKPDFDPESITGIDVGLKDFLTTSEGETVAIPQHYRKAQKRLRVIQKRVSRRKKGSNRRQKAIKQLGKKHKKVADKRKDFHFKTANYLLSKYDVVAHEELNVKGLARTRLAKSVLDAGWSSFLSILANKAEKAGLLVIPVSAHNTSQDCSNCGEKVPKKLHERWHDCPHCGSSLDRDHNAAINVKNRAEGHPVLKAQRLLSNSRIGCEACTIPVLRLV

SEQ ID NO: 14317 - protein, 363 aa, Richelia sp.
VFAIKRALKLNNREATLMAKHAGFRRVVFNLGLSLRTQMYGERKFTDSKVIDEIKKVLTNHVKKQPEYAWMNQLSSRVYQNALIDLKEAFSRYREGKASHPTFASRRDGQSFTVDSSNGKVLLKSGNTIKIPTLGTFRLDEPLECGFVSQTFTISKEGNRWFVSFCVDAERCSVQQPESSVGIDLGVKSFATMSNSQVFDAPKPLKQAKTKLAKLQRKASKQRAGSNNQRKTLSKIGRLHARIACIRKDFLHKLTTYLATTFKSIKIEDLNVKGLLANHKLAGAIADLGFYEFRRQLEYKCQMYGTLLVVVDRWFPSSKICSNCGHKKEMPLQVRTYDCPTCGVSIDRDLNASLNILNWEPSA

SEQ ID NO: 14318 - protein, 449 aa, unknown
  TnpB Polypeptide
MKSIAKSIYKHLFVLYNILTEGGENMKLTLRYNITKIDKKQKEIIEEIMWHATKVYNMVLYELREEKRKIDVNKSINIIQTEIYKEERKNNWHSKYMHSHTLQQVIINVIQNYKSYIKAKEDYEKRKNKYRGKPKEPRYKQGRKQEIVFTKYAIRKEKNRIKLSISKEIQEKFKSRSINFLIPKRLKKLINFESIKMIKIVKKEEELEMEIIYERKEKEERKGTNIMSIDIGINNIVACTNKENSKSMLVSGREAKSKNKYIQEKIRKLQQINKKAKENREKEKVKNTKRIEKMWKYRKNYMNTYMHKVSKMVIEYAKENKCVEIVIGDLKRIKEGMKGNKSFVQMPLKELVRKIEYKAKLEGIKVNKVGEEYTSGVSAIDKEEIKKENYNKKRRISRGIYISKEGKKINADINGSLNILRKYIKKSSPNQEIAMDNGREQRPLKKRVA

SEQ ID NO: 14319 - protein, 437 aa, unknown
  TnpB Polypeptide
MYETAIAPFQYNNIYSLAGEKTAQLVGWMNRLLFTGFTFTVGSPSLNSSVRLLATMNRTYKFRLYPTTSQQATLTQWLTTCRRVYNTSLAERRDAWTTEQRSVTYIEQANQLTDAKKINPFLTAVHSQVLQDVLRRLDKTFKHFFRRIKKGEKAGYPRFKGQYRYDSFTYPQSGFVLEEKKLRLSKIGSINIKLHRPIPSEGEIKTCTITREVDHWYACFSVALPDPAFDSSQRAIQKAIGVDVGLKSLLTLNNGDTIDNPRWLRNSEKKLAKVQRRKDRKVKGSHNRYKQNKKVAQVHRKIRNQRKDFHHKLSRKLVDTYDLIVYEQLRITNMVKNHHVAKSISDAGWGQLMCFTEYKAEEAGTLVEYVSAYHSTQRCSRCGQLVPKTLATRIHSCPYCGLVLARDHNSAITVLHRSTHYLEARSLSGQELSVEPV

SEQ ID NO: 14320 - protein, 381 aa, unknown
  TnpB Polypeptide
MLFLEAKWLYNHLLARLTVFEVDYKLSAVPVKVKDRFELRQLSHVSSHMKQSLITRTRDNIRGLARLKEHGRKIGGLKFKSRVDSIPLKQYGNTYRILNAKYLKIQGIRQQLRVNGLAQIPRGSELANATLIQRHGDYYVAITSYQAKEQNTAEPPPVKTVGIDFGLKTQLTLSDGITIRYAIPLSLNKRLRKLHQQLSRQQYRSHNWYHTRRQLEKAYATLNNIKQDIKNKLVHYLQARYGVVCYQDENIKGWQRLWGRKILSTALGGIIRTLEVKVQTPIKVDRWFPSTKTCSRCGNIREIGLDERVYVCPVCGLVIDRDFNSSHNIEHEGLKQVPTGRRDVKPVETESSTVASLEYLNGIPYVTASSVVEAGSLTASA

SEQ ID NO: 14321 - protein, 432 aa, unknown
  TnpB Polypeptide
VSQVITAVPTAPSKNQTIKATLKATKARRTQQRCRVFELKLDRSHLNQHTHVQLQRLFLEAKWLYNHILSQPNVCGMDYKLAAVQVKVKDSFELRELRHLSSHMKQSLIRRTIDNIKGLARLKAKGHAIGRLNYKSEVKSIPLKQYGNTYRILNGKYIKIQGIAQHLWVNGLAQIPADSELANATLIQRHGDYFVAITTYQARKHPPPPSKTVGIDFGIKTQLTLSDGIAIQYAIPISTKLRRLHQQLSRCQYRSQNWYKALHKLEKAYVKVNNIKKDVRNKLVHYLHTRYGVVCYQDEHVKAWQRLWGRKILSTGIGGIIRTLEEKVHTPIQVDRWFPSTKTCSCCGNIRDIGLDERVYVCPVCGLVMDRDHNSSVNIENEGLTQLLPTGRRDVKPVETESSTVTSLEYLNGIPYVTASSVSEAGSLTASA

SEQ ID NO: 14322 - protein, 426 aa, Haloferax sp.
MAKQAVTRTYTASIRNQQQVSDDLDSLGFSASKLWNVGRWTCDRVWSEIGHIPGHNELTSYLKSHERYDDLHSQSSQQVLQELAEAFNGWYTKRRNGDTRANPPKYRKHNDEHPRSTVTFKAAGFKLDTKYERVRLSKGSNLKDYWSDFILCEYQTRPDVDLSTVESVQQVRAVWTGDEWELHFVCKVEIEVAESPGEKTVGVDLGINNFAALAYEDGHSELYPLNCLKQDDYYFSKRIARCDDSDSEQANRLNQKKSARRTHYFHTLSKHIVERCVGEGVGTIVVGNLSGIREDEENDESENWGKHGNLDLHSWAFDRFTSMLEYKAEMEGIVVERVSERDTSKSCSCCGRKRDANRVERGLYVCDGCGMVANADVNGAENIRQKVSPSLACDGGDRSNGWLAQPSTYLFDSESGCFAPREQATS

SEQ ID NO: 14323 - protein, 418 aa, unknown
  TnpB Polypeptide
MKTKQHRTHKIRLYPDAQQRAKLLRVEELTRVVYNWAVLLIYNWYEDLDAHKRTDRPSLTKLGRLLTKYKQEPDMHWLYEAPMTALIKSVVRAWRAFHNLYRHGANPPKLHGLRCNGSFDINNTKAYITGKKLTMHKIGTIKMAEAFRYDARPLSYTIIRNGLGKAAQWWVAIECETMVEQTHKYNDSIGVDVGVTHLATCSDGRVYDMPSLTSKRLTVDNLYAILKRKKPGSNNYRRALHKLDIAHRRLRDTMRTATHKISSTIASLHHTIVIEGMNIKEIMTKKPNLPQMRRAINVSGMGRLLLQLKYKAADLIVADKWFASTQTCCVCGAKHKMKLNDRIYKCPDCGNEIDRDLNACINMQWYGEKVKKARAAKEKLLSSDDGTLIDGWSASNNDPASDGLTKSACTDTLDAVTV

SEQ ID NO: 14324 - protein, 347 aa, unknown
  TnpB Polypeptide
MLKASGLIPEWCKNLGVSKLLDNASMSAYTAWYATARNPKFIGKGEEKLPHPQAGKKIARFRSVRDAKLTLQFDPTGYNNGRWMISATKHLPKPEFKGHNFCVITDRATELTYAKGRWEAHFVIDAEFEVNQTQRLIALDPGVRTFLTGFNGNEFLEFGSGDFQRIARLCLHLDTLKSRHDKALGRNFKRLRYKLRIAMRQVRTRIKNLRSECHKQVASYLAKNYDVIVLPTFETSQMVVKTRRKLRNKTARAMMTWAFYQFSQTLQHLCNRYGSKLVRITEEYTSKTCTKCGHVHKKLGSSKIFKCPECGYEIPRDFNGALGIFLKALWDTTVFSINNAGHVVLDF

SEQ ID NO: 14325 - protein, 364 aa, unknown
  TnpB Polypeptide
MKTQTKTLKVRIKDKHADVLNRMAFECNQVWNAANETSAEFSWVPVPEVGYMNMQTSGFDLMKELKGIRNDRDMIIGAGTVQEVIAVHAKARKQFKKNKLRWRSSGGARRALGWVPFKSGAAVWVNGQIRFCGIHFKCWDSYGLSQYNFRSGSFSQDARGRWYFNIVVQVEVEERIAGNGQIGIDLGLKTTATCSNGDTLERQNCYRNSEAKLGKAQRANKKKQIQTIHAKIKNRRADAIHKFSNKLVKENSLIVVGNVSASGLAKTKMAKSVLDAGWAMLKIQLDYKSKGMQGVFIEVNEAYSTQACSCCGTISANSPKGRAGLGIREWSCPDCGTTHDRDINAAKNILRLGHQSLAVGIPVL

SEQ ID NO: 14326 - protein, 409 aa, unknown
  TnpB Polypeptide
LTHLKQQKLHETYAAFKGVASFTFQTVQVSKPHTYTALHHMVYADNKRRRIASQLVEEAQRYGWQRRKIADRIEHPTVRFDRRLFSWKRTRRGHPVLSVRTNHQRLGLPIQQDGAYVRLQEHLADDWVATSVLMTCRYRFLVLLKKPPPTPRVTENVVGVDQNSNGVAVTVMNRRSGRILKQLYLGRDISLRQIRYENRRAVLQEYRDEKGHRGKAGLKLRRLSGRQRNYVRTNTWLLAKQLTDLARQHDAGIAIERLYKLRREKGQLSPKSRRKTNRIPYGFFRHALAHKSAQLGIPIVEVSAQYTSQTCPRCGHISRQNRRNWRYFKCVCCGFEGNADRVASVNICRKATQATCPVTKGQILPTGASVSRLDMQDEEASWQHPTPQSCRLLTLVTEKLTRVVVHQSL

SEQ ID NO: 14327 - protein, 141 aa, Acinetobacter sp.
LGLKDLATCSHGVKLKAPKIYRQYERKLSIAQRAKNKKCVRAIHARIKNIRQNMLHKFSHELVTKHAAIFVGNVNAKALAQTKLSKSVLDASWTTLRTMLKYKCENAGVWYAEVNEAYTTQTCSCCGSRCSSPKGRRQDLE

SEQ ID NO: 14328 - protein, 332 aa, unknown
  TnpB Polypeptide
LSEKLNETALFLNGRLIGTHALRDLETAYTNFFRVFEDRIQLPHLGTLGLKERSYIPTSGVKVLSATVCERAGKWFVSVLVEEDVPEPIEASGQPIGVDLGISSLAVCSDGRPPIRNPKVLHSNLRQLKRAQRHLSRCKKGSKNRQKAREQVARLHARIAHIREDALHQATSSITHAPLTPSERISLKTHLASLLPIPKTKKQVKKLIHCCTQANAPLRPQVIVLEDLHVDGMKRNRKLARAISDVGMGEFRRQIEYNSVWNGEMLLLADRFFPSSKTCSCCGWKWEEMELSDRLFLCQNPQCTFFTVPQDRDRNASENLALVAEDYLASLR

SEQ ID NO: 14329 - protein, 474 aa, Hamadaea sp.
MPRRRDAVRVVHRTARIGVRATPGQAQRCFGLLRSAGDVWACVLAVNDWRRRHGGPMLVSYQELCRELAAAGPGTFGELSTTGARSVLRRYSDAWFSAAKRRKAGEIEVRFPRRRRSLMQVRFYHGTFTLTPDGRVRIPVAAGCPPLWIRLARTVPYPPEQVRSITLVYDGGRLWLDVTAEVPIATYADGAGPDADRVAGVDLGIIHPYAVAGSDGAALLVSGRAVRAEHFLHLKDVKQRRRTVAARAPQPGKRRSRRWRKFLRRQRRVEGRHRRRVRQAQHEAARQVIDWAVEQRIGTLTVGDPRGVLAKDAGRWHNLRIRQWQIGRSLRILQDKAELAGIVVHLVDERGTSSTCPTCRSRVPKPKGRTLDCPQCGFAGHRDLVAAATIATRTPGGVTTTAAEIGVVTHRRTGRHLPGAGTLRRDPRRHPPATASGSLGQARPDPPPVGSRSPHQRGARNQPRSPGQRFAQSH

SEQ ID NO: 14330 - protein, 404 aa, unknown
  TnpB Polypeptide
LIKAYKTELKLTKEQERKVRADQGVLRFLYNAYIAYNQERHKLSQKGEFPKGEKVFVSGNNFDKYVNNVLANEKPWIKNVGAKARKRVILSAEGAYKRFMRGEGGFPRWKKRSGEQPGIYFPKNNENDLKTWWHKIMVPTYKHLRLKEFGYLPVTGSGDEFSAINVVIKSNAGRYYLSLTVEIDEKSCYNRDLEGAYVHKEGGLGIDLGVKDLAILSDGEMFENINKSKEVRWLDKKLRREQRRLSRKILAKKKRGKCASAQNLDKQRRKVQKVYQRIQNIRENHENQVVAAIVRKNPKFVTLEDLCVKWMLKNRHLSRHVAAERFSTFRSKLERKCANRGIEVRVVSRFYPSSKLCHECGWKYAELKLKEREWTCQSCGHHHDRDLNAALNLRDATEFSLVEA

SEQ ID NO: 14331 - protein, 369 aa, unknown
  TnpB Polypeptide
VLTYKAYRYRIYPTNEQEKLIVKTFGCARFVFNYFLALTEHTYEETGKTVTHRERSAMLPKLRNGERTKFLKEVDSIALQAALEDLDDGYKRFFTGQNQKPKFKEKADFVQSYTTKLSKGKNYIRIEGDKVRLPKLGFVKMKNTREPLGRIINVTVRRKASGHFFASVLVEEKICALPKTGSSIGIDLGLKEFAILSTGEKVENPRFYRVQEEKLAKAQRILSRRERRAKARGVINEKIANQRKDFAQKLSTVLVKNHDLICIEDLKAKNLLKNHCLAKSIQDAGWRLFVALLEYKCRWYGKKLSRISQWFPSSQLCSSCGAHTGKKPLSVREWRCPECGVHHDRDLNAALNILREGTRVALEKARVSS

SEQ ID NO: 14332 - protein, 352 aa, unknown
  TnpB Polypeptide
MIRAIPVTLKFITKTKQRKIEALIDAYRHCVNQYLQLFETHKPKLDKKTLDLVQNVKLSQRYKSNALKQSIGIHKGCIKKKKTIPKFKGFPILDAKFVSIEQGEKSFDLAIRLSSLSSGNKLTLLTKSHKRFNYWLKQGTLKQSCELRSNKLILFVEVKDQAWKNGKKLGIDLGMNKLISTNEGEFLGTKFKDVNDKILRKKKNSNAYKRSLKERDNYINQVVNQLPFSDLGVLCYENLSNMKSGKSKLRQWKAFRIKQQHWTYRKVITRIIEKCQENRVRPVYVDPRNTSRTCPSCGNVDAANRKLEKFCCLTCDYKQDADLVGATNILNKGNAWLESLESSNSKSDYAIK

SEQ ID NO: 14333 - protein, 396 aa, unknown
  TnpB Polypeptide
MKAYKYRIYPTKEQAIAIDQQIETCRQLYNKLLALKKDAYKKDKISLSRKDLHKQVKGNKEVHSQVSQNVTDRIDKAYGNFFARIKRGEKEKGFPRFKKYGTYQSITLPQIVNPKKIGKKTYFPKIGWLNVKYHRPITGTPKTLTIKKAKSGKYFITIACAGAISEKIELGKGEVGIDLGLNHFVATSDGEFFDHPKPAKQISKKRKLLARQFSKTKKRSENRNKARVKLARVDEKVANTRNDFGWKLCRILIEKYGTIYAEDLNVRNMVKNHHLAGAITDVSWSDFTNKLSFKAESAGGKVVKVNPRNTSQQCSECGKIVWKTLAIRTHKCPNCGLEIDRDVNSALNMLSKGKIRLERPELTPVGDEASTDGISPKQASSMKQEAIASTGDGISC

SEQ ID NO: 14334 - protein, 324 aa, unknown
  TnpB Polypeptide
MTHRSRPTSCKPHETEPQKPSKVSLNAGKTAKKASKPYFTSRFASYDARTVTVNADHCTLATIDGRVTADFVLPDEQRDTPHSAYLFNDDYDVKGPHFTTIQLRTVSTSTCGQSPPWRMITPAQAMPSTSPSLVSTSASQTSQPPQPDVSGRRRTQPLASRIRKSRGDLQQTGTRWAHENVQRVGRKQTGRFEQILHTISNELVEEALENDCTHMVFEQLNGIRERLPHAKAVHKWAFHRLYEYVTYKAESEGLVVRQINPAYTSQRCSKCGFTHEDNRPHNNGQDEFGCLKCGYDVHADYNAAKNIGLKYLRDQQSLDVEAHP

SEQ ID NO: 14335 - protein, 391 aa, unknown
  TnpB Polypeptide
MTKNYKCIKIEIKPTSEQIEKINNTIGTGRYLYNLYIAYNKQIYENEKRFVTGFEFSKYINNVYIKENSDKTWIKDVSSKANTYSIMNAEKAFKRFFKKLSNFPKFKKKTASVQSCYFPKNNKTDFEFYRHKIKIPTLKFVRLKEYGHIPKNANIKSGTIVKTAGKYFLSLLIDVSDIKCKINNNNNADGLGIDLGIKDFAVCSNGKVFKNINKNCKIIRIEKRLKRQQRKLSRKYLSCKNLKKKLYESKNFQKQKLKISKIFYKLNCIRNDYINKVVNEITKAKLKYITIEDLKISNMIKNRHLSKAISSQKFYKFKIKLTEKCKEHNIELRMVDKFYPSSKTCSRCGNIKKDLKLKDRIYKCLNCGMELDRDYNASINLKNVKTYIILT

SEQ ID NO: 14336 - protein, 462 aa, unknown
  TnpB Polypeptide
MGYATRTTKLLLDLGERRQGGANTGKRTFLDETVALLNTARAFYIDFFLTHADKLSERVSFYSEEHQEMRERAISTNELLTWAECHTVETKEHPHPWPTWNFSQAFPDMPFVYRRSVIKDAIGKARSYLSNLSNWQKTSKKKGKPGVPGAYNHPTLYEGAISLELDGPDQRETFVRLKVYTGTCWTWANYPVLYSRYFEQRRTEAEWEQQSPKLVLRPKFAELHCSQTKKVKAKKVKESKQDPSLVTVAVDLNVKNLAVITVRQHGRILETVFVTDHGLDQHRYQHMKRISKKQWLSGSPIKGEHSNQQLWQHVRRMNTDAAHKTARAVAKVCARYPGCVLLFERLRKIKPKGGGKSRRMNRTQANQLRGKINQYSREKAFAEGIVTVEVNPHGTSQYCSRCGAKGERFSFRGGKRIKERWGKLFWCSQCRYEANADFNASVNVHHSFFQQFHWKPRVQRSG

SEQ ID NO: 14337 - protein, 423 aa, unknown
  TnpB Polypeptide
MNPTPEQVEYLKRACGTRRFIYNWGREQWEKQYQAYKLEQETVPEAERMLRPPNANALKAQFHAIREQEYPWTYDVTKCVVEGAFSDLGQAYANFFAGRGNYPNYKKKGKSHESFYLSTDKFTVGSHWIAIPGLGRFILDGRKQEKDRGKLRRKLGTVNLAETLRFVEEGHATVPSKKRNRRKQVVCEEVKILGATVSCEAGHWYVSIQVEIKRERPSTPERVVGVDVGLKQAAVVSDGRRLENQKPLALHLKKLGKLQRKLSKKQKTKDPETKRTVFSNNYQKQRLKVARKHQQIANIRRDVQHKFTTELARTCGAIGIEDLNILGMMANRNLARAIADAAMGQLLQFLKNKVASAGGNLFIASRWFPSTKRCSCCGHVKKRMPLKHRTYQCHACGLVIDRDLNAALNLAWVANEMLRQLHA

SEQ ID NO: 14338 - protein, 353 aa, unknown
  TnpB Polypeptide
MILTYKYRIKDRSAKKTLRRHAYAVNQVWNYCCAQQLDVQARYRAGEKPRKWATHYDLQKLCKGVSKILNLNQQSVGEVCRQFAVARDKIKRAPNFRSSFGAKRSLGWIPFQNQGRQIEGNTITYFRKRYRFWEGGRPLPENAKGGYFVEDSLGRWYVCFHVEVEQRIGGDAAIGIDLGLKSFVTLSDGRRIGAPQYYRQYEQRIAKSQRANNQRKSRRLWIKIQNCRQDFLHKLSTELAARYSLIVVGNVNAKQLAQTRMAKSVLDASWSTFRTMLKYKSVGYEEVNESFTTVTCSACGARSGPKGQKGLRIREWICDECGAVHDRDHNSAKNILARSAAGPVEGSRGRVAQ

SEQ ID NO: 14339 - protein, 413 aa, unknown
  TnpB Polypeptide
MLLKDQMLFKGVVFRLDSGLPADARFLLEDFRLAVNNAIRAGLQARVTSRTALARLAYKDLREEHPKMYSQHLVSALGVATGILRNHRRVVRKGAARNIPYVRRLMMKAENQAYKLDRESGVIDLPIRAGCHVKLGLVVSQYHRKYLDDMTLTLGSLTLLPDRVIIAFRKEAPLAYTPESALSLDTNERSLDGVLVKGDGGVVVKADYRDVAVIQQRHHDRRRKLQKKKKSHDRRLARFLCRGEGAREHRRVDNRMHQVANAVLSFAEGGRSAVVLEDLKGFRPKRGKDLNRRLSMWPRRKLHQMIEYKASWKGIPIIKVDPRYSSRTCPVCGKIQDSRMGTEFKCDCGWHLDRHINASLNLLQTAISKGLEVAGGLRFDPGAFQHDVMMILYEPAMAARSEPNGTSHAVAMS

SEQ ID NO: 14340 - protein, 380 aa, Sporolactobacillus sp.
MKRQLDQLFNYHRYCWNLALETWNTLYELHLIDKESNKRPNEYIVRNELVAHKEDWQYGLSARVLQQSVASLSKAWKNFFNPQMPHHDRPKFKSKKLSKKSFTTDRAKIKNGKLMLDKPRGINILWYGIKMAESPRFEGQIKKATVVEEADGLYACLSIDTNDNELSEGKDVAGVDVNIGHFNYNDGKTISTLPDHLIKLYERITHYQRLLARKRVSNPNQFRSTNYRKVRTKLKRSYQRIARIQEDLLKKFVHQLSNDYHTICIEDLDVNRMKMNKRLAKNIHRSMFRKFRDMIQYKSEWMGNRFVVADRYYPSTQRCSHCGHVKTGADKMTLQGDTIYHEHHTYRCYECGTVMNRDENAVNNLIHYAVGLTTEGAQST

SEQ ID NO: 14341 - protein, 205 aa, unknown
  TnpB Polypeptide
VKYDTRTITLFDDGTVSLSTTASRVRCDLALPDDDDGYQRQYLDSDEWSPTESTLTARDGDYFLHIGFRRHKNDAERNTAEDGTVLGVDVGIENPAGTASFVSGRELTHNLREFEKVRAGLQQTGTRSAHRRLEQSSGRELRYICDVLHRASNAIVNEALRFECDVIAFKELTNIRVRTGASWGNKWAFRTLYEQVEYRSEAEEI

SEQ ID NO: 14342 - protein, 408 aa, Streptomyces sp.
MQLRYSFRLYPNGSQRAALARAFGCARVVFNDALRAREDARAAGLPFITASELSKHLTAAKKTSERGWLTEVSSVILQQSLRDLDTAYRNFFDSLKGKRPKMGPPRFKSKRDSRQAIRFTANAGWKITPGSKLRLPKIGDLTVKWSRTLPSTPSTVTVIKDSAGRYFASFVVKTGPQEVLPTTTPQIGMDLGLGHFAVLSDGTKIDSPRFLRRAEKQLKKVQRSLSRKAKGSANRNKARLRFARAHARVADARREFHHQLSTKLIRENQAIAVEDLAVKGLARTRLAKSVHDAGWSQFVTMLEYKARRYGRTFVRIGRFEPTSQVCSACGVKDGPKPLHIRQWTCQACGTVLDRDTNAAVNVAKAAGLAVTACGAQIRPVPVPAQRDETGTHPKPHPTTVRQAGIALL

SEQ ID NO: 14343 - protein, 410 aa, Streptomyces sp.
VVIVQLRYQYRIALTPGQRIRAARVFGCRRVVWNDALAVQKLRKASNKLLGNPKARLAEGPYQPVPKNAELGKTLITAAKKSAEREFLSDAPVGVMQQTLRDLDGAWKAHEDSKTGNRRGPKVAPPRFKSKKDNRQTARFTRSDRFSVTDGGRLRLPKIGEVRVKWSRDLPSAPSSVTLIKDCSGRYWVSFVVETDPAADMLPPTDRDQGIDLGLDRFAVLADGSQIASPKYLRRAEKKLKKRQRELSRKKKGSSNRDKARIKVARAHAKVADSRRNFHHQWSHKLTRENQAVFTETLNVRGGLARTRLAKSVHDAGWAQFVTFCEYKAIRRGRSSAKVARDFPSSQICSACGYCDGPKPLHIRAWTCANCGTRHDRDWNAGRNVLHEGRRIRAADTTAPPTPGPGASRR

SEQ ID NO: 14344 - protein, 380 aa, Micromonospora sp.
VGERVVKRAYRYRFYPSPDQAEQLARTFGCVRYVYNRALAERSRVWIQEQRRVTHAEADRWLTGWKREPETAWLAEPSKGPLQATLRNLQAAYVNFWNKRAKYPTFKKKGKTTDSATYFRNCFTYRDGKITLAKQDQPLRIVWSRPLPHTAVPSQVTVSRNSRGQYHISILVETTVHEGPATDAAVGIDLGIASLVTLSTGKKIANPRHERRDSEKLSRAQRTLSRKKKGSANRAKARAKVAKICGRIWDRRRDALHKLSTKIIRENQTVVIEDLSVRNMIRNHSLSRAISDAAWSELRRQLEYKAAWYGREVIAIDRFYPSSKTCSACGAIAEKLPLNVREWTCRCGARHDRDINAARAILAAGLAVSACGDGVRPPRS

SEQ ID NO: 14345 - protein, 383 aa, Nocardia sp.
MLGMASRVVKRAYKYRFYPTADQVEQFARTFGCVRYVYNRALAERSAAWTLEQRRVTYVDTAKSLTDWKRQTDTEWLSEVSNVPLQQALRHLQGAFDKFWRKQTAYPKFKKKGKTRDSATYMNNAFSYRDGRIKLAKQAEPLNIRWSRPLPEGAQPSQVTVSLDSAGRYHISILVEETIAEYAATDSTLGVDAGITSVYAFSTGEKISNPRHEKFDRARVVKAQRVLSKKDKGSKNRAKARLKVARVHARIADRRRDHLHKLSTRLVRENQVIAIEDLSVRNMVRNHSLARAISDASWSEFRSMLEYKADWYGRTVVAVDRFYPSSKTCSVCGRIVERMPLNIREWECRCGAVHDRDVNAARNILAAGLAVQACGDGVRPPRS

SEQ ID NO: 14346 - protein, 716 aa, Streptomyces sp.
MSAELYESASAFDAAPHARRFRGKNKKKRWRRAKDAELAVIRLPLDVHDPGTRHRTEDLYSAMWSVKRALQRDARDAVDAYWAGDVRRATDPQAWRLKLGLSRDGMERRAYRHMENSRHLAHHVTKALVMHQADEVFETSVSRHLFADASGRRHGRPKVGRWWDYTRIPGRARSHTAVRKWETFRLHGTLAGHLDAYRHRTLDRTVTTPEQAAALPPEVRVLEQPHQMPTPARPTGRVTTGEVTAKGTPKTRTATWWDHTGPLAVVFTGGADSSRGDLVLPVRLPSGSGRWPRLVHFLNNPDTWHKIDLVRRRDTSAPGGWAYEAQLMVLAGGYASPATKARRQATAALERAGGIDGNVSNLSVVSFPATFDPADGGVEATRIEPSDEELASLAKARRKERGRRRALDRSRRASNPAQYRPSKRQQACADRRQAAGLPARTVAVPRGARAANKAGIPKQAYRRDTLSAGYQLNRARLAEAAATAAAAKDHRARHIAADITADHGANLVVEDCDIRTWYRRWGKALQATTPGRLIAAIGRECEKAGGRMLRASTFTTKLSQTCFCGATVTKTLADRIHACLSCGLIGDRDTVSGALCAHVRLTDPDDPNTGRLDQAQARHTQILFHEGLQEALSSQPQRGARPARGRTHAAAHTRGHPGRGPLLDAMPPPGTGPTLNETRPARKRHKAHVGATGCTDSTPPRRASSVQTSGGHHSIT

SEQ ID NO: 14347 - protein, 429 aa, Herbidospora sp.
VQLRYNFRLYPTAGQRESLARAFGCARTVFNDGLRLRHEAREQGLPYVSDGDLSKRLITEAKKTPERAWLGEVSAVLLQQALADLNTAYRNFFASATGRRKGPQMAPPRFRSRKDSRQSIRFTKNAKFKVTPAGRLRLPKIGDVPVRWSRRLPSQPSSVTVTKDTAGRYFASFVVQTSDEPLPEVSSEVGVDLGLTHFLVTSDGRKVDNPRFLRRAERRLRKAQQSLARKEKGSQNRKKAVVKVARAHAKVADARRDHAHKLSTQLIRDNQAVYVENLSVSGLARTRLAKSVHDAGWSQFTTMLAYKATLHGRTFARIDRWFPSSRRCSACGVIAGRMPLDVREWTCGCGVTHDRDHNAAKNILAAGRAERRNACGDQAGPDSGPAPVVEAGTHSTLPASAALQGRIPPVRREGCQDAGHALEDRDGRS

SEQ ID NO: 14348 - protein, 382 aa, unknown
  TnpB Polypeptide
MSLIKRSYKYRMYPNKTQEELLAKTFGCVRVVWNACVDSFNSYNKETNPNPKFPTKADLVIDKPWLNEISAATLQQKQRDFIEFSKQYFNKNRKEKFGEPNYKNKHGDQSFRLPFPKFKVVDNKVRIEKIGWIRIVIDRKILDNARFISCTVSKNRAGQYFVSVLVEAEQYHKQKTGKTVGVDLGIKTLATLSDGIIVENPHFLRENQAKLKRMQRHLSRKKLGSNRRKKCKLKVSRLHRDIANKRSWYMHNLTTMLVNDYDVICIEDLNTSGMLKNHKLASSVSDASFSMFRNQLEYKCQWYGKELVVIDRFYPSSKICSRCGWKNKDLKLSDRTFICKDCGLEIDRDLNAAINIQAVGVDAAQRTQSNRVAGCVEASKME

SEQ ID NO: 14349 - protein, 359 aa, Bacillus sp.
  misc_feature (243)..(276): Xaa can be any naturally occurring amino acid
MMINKAYKFRIYPNKAQATLINKTIGCSRFVFNYFLSLWDNAYQETGKGLTYGTCSAKLPAMKKEFVWLKEVDSIAIQSSVRNLADAYTRFFKKQNSAPRFKSKKNNVQSYTTKQTNENIAVVGNKMKLPKLGLVRFAKSREVKGRILNATVRRNPSGRYFVSLLVETEVQELPKTNSYIGMDVGLKDFAILSDGTTYKNPKFFQSIEEKLAKAQRVLSRRLKGSSRWNKQRVKVARIHEYMXXXXXXXXXXXXXXXXXXXXXXXXXXXXXXXXXXQFRTMLEYKAKWYGKQIIVVSKTFASSQLCSCCGYQNKDVKNLNLRKWDCPSCRTHHDRDINASINLKNEAIRLLTARTVEIA

SEQ ID NO: 14350 - protein, 243 aa, Bacillus sp.
  misc_feature (243)..(243): Xaa can be any naturally occurring amino acid
MMINKAYKFRIYPHKAQATLINKTIGCSRFVFNYFLSLWDNAYQEIGKGLTYGTCSAKLPAMKKEFVWLKEVDSIAIQSSVHNLADAYTRFFKKQNSAPCFKSKKNNVQSYTTKQTNENIAVVGNKMKLPKLGLVRFAKSREVKGRILNATVRRNPSGRYFVSLLVETEVQELPKTNSYIGMDVGLKDFAILSDGTTYKNPKFFRSMEEKLAKAQRVLSRRLKGSSRWNKQRVKVARIHEYMX

SEQ ID NO: 14351 - protein, 293 aa, Bacillus sp.
  misc_feature (243)..(276): Xaa can be any naturally occurring amino acid
MMINKAYKFRIYPHKAQATLINKTIGCSRFVFNYFLSLWDNAYQEIGKGLTYGTCSAKLPAMKKEFVWLKEVDSIAIQSSVHNLADAYTRFFKKQNSAPCFKSKKNNVQSYTTKQTNENIAVVGNKMKLPKLGLVRFAKSREVKGRILNATVRRNPSGRYFVSLLVETEVQELPKTNSYIGMDVGLKDFAILSDGTTYKNPKFFRSMEEKLAKAQRVLSRRLKGSSRWNKQRVKVARIHEYMXXXXXXXXXXXXXXXXXXXXXXXXXXXXXXXXXXALLVVHIMIGILTQVSI

SEQ ID NO: 14352 - protein, 487 aa, Diaphorobacter sp.
MTTIQSGVRFVAHPEPWQAAMLTHWIGCQRHIYNQKVEEDRLFASQRRLALRHDPQAQINTPIDRLYAQFKDGVLTPWLSEVPSQVLREGTYRWHTAKQRQLKGLARMPRRRHRRNFNSVLLTSDLFEFTADGRLCIGAGKFFVGELKFKAHREFVHPKMLSISSTGGRWYVSFSFEHEVKDILRAPHELAYELQGLSDEDLQGKTIGVDRNVKDNCLATSCGTFHALERVNLERIQRKELGAKRHQRRLARARKGSANRRKLIQKLARKKAYKAQVLQDFAHKTSHVLAESGARLITFEDLKIQNMVRRPRARQDAKGLWLKNGAAAKAGLNKAILSSAWGRVASFTEYKAARRNVIVAYVPPHHTSQQCSSCGHTAPGNRQGALFHCQRCGHTEHADSNASKNIDARGIALLRSGVLSREPKASRRVAVKRRTEIKSAGSVRPGVSVERQQDAASCPRAGSAHGAMKQKAQAVRPDAPTTAPKGV

SEQ ID NO: 14353 - protein, 459 aa, Streptomyces sp.
VKVTRIAYSKNLNARKYEQLAEQAQRLGRVRSLVWRKYGALAGVGVSDRTIRDQWMKDCTAEAFGVLATDWKETLRDAVADIKANREAAKALVRQAIRRHTRDEAERKRLFTALKRDRWMDDPYLSRLMRKHWKHGRNRTENQIVVRSDLYRTFTLTESGDIWLAVPSLVRRQLIAIPLNTTVAPTGTLRLILRDGRVEVHYQIEDSTLKSSQRPCGTAKIGVDKGYSEVLTDSDGNHHGLELGDLLRTESDSRNAKNVRRAKIQAVADKARASGDSAKADRISQNNLGTIKRNRRHHAFEARVRSVTFTAVHAVVDKAEHIVAEDLTRPFLSRKKLGKKTNRRLAAWTKGVTAEALNSLSERRGSALTLVNAAYTSQVVPCCRILGMRKGDRLHCTRCGAVWQADHAGAINVLERDSDPDITLYTPHTRVKQIIQERADRRRTRLPVQDSSTPVRRAN

SEQ ID NO: 14354 - protein, 441 aa, Prochloron sp.
MNRCEIFWVCAAKISQIPLTNDRINIIITNPPMIIAYQYRLRPNKEQIATIETWLELLRKQYNYRLFERFSWWSDNRNSINACPLNTPIPQLRDNPDYYSQKRDLVNTKQKFPEYKQIHSQVLQDCIKRVKLAFERWWKVDNNGKRLGKPRFKGKGRYRSFTFPQIKQDCIQGKWIKFPKIGRVKLIQHRFIPDGFKIKTATISRKADGYYVTLSLEDKSIPMFTADLKPTLENTLGIDMGLKDFLVTSEGESVDVPQYYRKSQKRLKLLQKRLSRCQKGSKRRVKAVKAVGKQHKKIADKRKDFHFKTANKLLLESEVIAHEDLNIRGLAKSRLSKSINDAGWGQFLTILSVKAEKAGQLIIAVNPSGTSQDCSNCGEKVPKKLSERVHSCPHCKIVIDRDENAAINIKNRAVGHSVFKARGVRRDTGKKKREAHTIPSG

SEQ ID NO: 14355 - protein, 403 aa, unknown
  TnpB Polypeptide
MFQSRKVRLKPNKAQAEFFRQNFGASRFIYNWGLEQLNKHWEENKDKEKKDRTKCPTMYELRKELIFLKNTSDEYAWLKEIDSQSITYAFERLDKAFKGFFSGVSKHPKFKSKRDSKQTYTTNGKKSLGLINDNHLRLPKIGSVKFYNRNYLPEVEYKRATISTDGDYFYCSVLFEASPKELPTPIHESVGIDLGVKTLVTTSHGTTFHLKRNRRLERRLKRAQRVVSRRKKDSNRRNRARTHLRSLYRKISNQRKDFIHKTTSTLVSENQVIRMEDLNTKGMMKNHHLAASIAHASFYEIKRQLTYKCEWYGRSFQLVSRFYPSSQLCSHCGARNKEMKNLSRRTFVCHTCGFSLDRDLNAAINIDNFCTHPEWETGRSSANDRGDSSSTKKRYSLSSVANR

SEQ ID NO: 14356 - protein, 435 aa, Thiospirillum sp.
LKTIVRPVRFDLQRVIINAIIHCMTKLITTQRAYQFRYYPTAEQVTALNQYFGAARWVWNACLAWRSHAYKVQNEKVTGVDFSRELTFLKTLESLAWLKATPATVYAQVLRDQDKAFANFFAKRAKYPRFKKRTHAPAIRFALDHRVIKNNYCAGQLLKLPGLGVLNIRWSRLPTGIPKMITVRRDSCGHYFVAFSCEETIAQLPANTNSTGIDVGLKDVIVTKQGYKSGNPRYLRRYQRRLKSAQRRLSRKQKGSHRWQQQRVKVARIHAKIHNCRQDFLHKHTTQLVRQYGAISIEDLNIKGLVKNRHLAKSMHDAALGELRRQFEYKTAWYGRDLFIADRFAPTSKTCSKCKAVMSIMPLRIRYWICPVCGAFHDRDVNAATEVEDYATGGRPECYAHRGQQAPSAQQLTLPGMLVPIEVRIKPARQTDCHG

SEQ ID NO: 14357 - protein, 401 aa, Archaeon sp.
MQIKAYKFRLYPSALQQKQIIKQFVVCKEVHNIVLEQSLNAQVFNRRDLYTIVKDIKTTCPSYYYLVHSQALQNVADRLSKSFASTFRRAKERANGAKVKLGFPRFKSHIRSMTYPQSGFRFVNERKISISKLGNIPIVLHRIPKGTMKTLTIKRNAAGQWFATFCCELPEKHLAPLSPLDEAIGLDVGINKFAALSNTEIIQNPRYLMKSEQKLIRLQRNLSRKKKGSKNRLKARFHLALQHLKIRNQRYDFLHQTSTKLIRRYRHIVVEDLRIKNLVKHPNLAKHIHDASWGNFVRMLSYKAVAGGGFLEQVDPRYTSSTCCNCLARNKMPLNKRVLTCHVCDFVCDRDVNAAVNIFNRRAGRARTHTPADRVTSASSPKLVSELNEPGTIVGNTTLSS

SEQ ID NO: 14358 - protein, 407 aa, unknown
  TnpB Polypeptide
MQVLTYVYRLQPSRAQHAALRLILDGQRQLYNAALQERVDAWRRGVSIGMNDQTKSLTEIRGFDEAYGQVPYNLSKWTLKRLDDAMKGFFKRAKAKGGKAGFPRFRPASRWSSFGFHQIGGLRLMRDRLLFSSGLVGGLKVKLHRPLPEGSVIKSANFTCRDGRWQVALTVSMPIAAHDNAIPVGVDVGIEHLATSSNGIHHINRRSGDRRAKVVRRAQRALSRCKRGSRRRRKVAAALRRVQRRLHNDRSTHLHQVANAIVAEGALVFVEDLKLKNLTRSARGTRDEPGTNVRAKSGLNRALLDAAPGRLISFLRYKAERAGGMVIEVDPKGTSQLCSSCGITVAKPLSMRRHRCACGADLQRDHNAAINILQRGLAAHGAARRPGELNVADCGVRAPRNADPLAA

SEQ ID NO: 14359 - protein, 247 aa, Bacillus sp.
MFEVKQNETINYSKADGIIGVDSNVDHFAVSNINAKGQLVSSCALKFDIEGKYSNQITKIIEAKAIELVEIARQANKPIAIEKLNTTTSKASNAYGNRKANRKMSLFAYRKMGTAIKSRADKMGVAVFEVNPAYTSQIGKMKYMKRYGISIHESASYVIGRRAMRFKEKLPPVLFALLPEKMACRHHWAQWGYATKCLKEIRTHAYYRSELCDVDKFHETNELFAPGALTALEQMGLSKLKSRKPIA

SEQ ID NO: 14360 - protein, 380 aa, unknown
  TnpB Polypeptide
MRANVTAKVRINPTKQIIRTIKAYTKALQFCVDYAWKHKIRNNIKLHHKIYYSIRKKFKLPSQIAVACLKQACGMVKKAKSKPIIKRASVRYNFPRSANLKGDILVLRLLKSRQEFKFTIPDCYKEYFNWDVKESLLRMDKKGRCFFLFTFSKEINATEQNISSQNIVLGIDLGVNNLAVCSDSRFYNSAKVKQVKRKFKYLRSKLQAKGTRSANRLLRKVSGRETRYMAWVNHNISKSIVSGFKGNKIVMENLKGIRKQNRGRIMNYWINNWSFFQLQNFIQYKAERRGIEVVRVKPNYTSQICHRCGQLGSRSKGCFVCSHCGLSDFNSDLNASRNLAHPRLVERQGAVTHPHSRSDDVEGTFLSVIEAELMAKSPTL

SEQ ID NO: 14361 - protein, 400 aa, unknown
  TnpB Polypeptide
MMLVERHIIRFGSKQAKRAEVLCHLCKNLYNVANYILRQTFIAKEKLPSQFDLINQLSRERQVDYIALPPHVAQQVVMQVRQAWNGFFASLKEYGQHPEKYKARPRLPRYKDKDGVSLAVFTNQQSTIKNGILTFAKKAALLPVKTAVSKHQQVRIVPQATCFVVEILYEKPDVQADVEASNVLSIDCGLSNFATCISNVGAKPFVLNGKPLKSINQFFNKARATAMSAVGNRGTSKRVQRLTLKRNCKVQDYIHKCSAYIRTYCLEHRIGTVIIGKNPDWKQNINLGDKTNQNFVSVPFDTFIRQLRYKLEHVGIRLECTEESYTSKIDHLAFEPLQKQEQYKGKRVKRGLFQSSVGTLLNADVNGAIGIARKVVGDVFVKELLDRGSAVLPVQKITFA

SEQ ID NO: 14362 - protein, 460 aa, unknown
  TnpB Polypeptide
VKITSSYKVQIKQYRHIFDDTVRIYRDAVDFLISVCLENWNEISALDGMLLRKSYVENLIHKTKEHPHPKYEFDAVFYKFPSYLRRDAIACAIGKVSSHKSSLSNWEASDMTTRGAEPGIPKAGFEFPCMYKTVMYQRTDEYSCKVKVWIRNTWDWISLQLRKSDVDYIRRHCADRKECAPVLQKRGKRWFLRFCFEEQQTLSDTDVFDQRIVAVDLGLNHCCVCSVMRSDGTIIGRHFLRLPEEYDCLKRKTDHIRRAQSHGSRRVGRLWRFANGVNDAIAVKTAQFIIDIAVLYQADVIVMEHLNFQNTTDKTSKRKKKSRSMRLHLWKAQTVQDIVENKAHRLGIHIARVCAWGTSRLAFDGSGKVLRGKDSTKTNNNYSLCEFQNGKIYHCDLNASYNIGARYFIREIRKSIPVTEWQCIAAKVPECMKRSTCTLSTLRNLCSALYEPSYNGTAIA

SEQ ID NO: 14363 - protein, 289 aa, Moorea sp.
MKVLEFKVKGKKTQYAAIDEAIRTGQFVRNKCIRYWMDNKGVGQKDLYRHNTWLRAEYAFVKDLNSHACQASVERAYSSIARFYDKCKKQVPGKKGYPKFKKFSRFGVADAARTVEYKTSGWKLSGDAKSINFLDKKGIGKLKLKGTWELWRYDLKLIKRVRLVRRADGYYVQFCIKIDTKESLEPAHTNVGLDVGLKEFYTDSKGGVEPNPRFYRKGEKKLKFYQRRVSRKKKGSSNRKKAINRLGRTHLKISRQREEHAKRLARCVIHSNDVVAYVRAACRKARLKG

SEQ ID NO: 14364 - protein, 439 aa, Lyngbya sp.
VPFLNGSGYFYPMMASIDYEAVSQVLIVFEFKAKGKDSQYQAIDEAIRSYKFIRNSCLRYWMDNKKVGKYDLNKYCKVLAKQYPFANKLNSQARQSAAECSWSAISRFYDNCKRKVPGKKGFPKFKKHARSVEYKTSGWKLSENRKAITFTDKNNIGRLKLKGTYDLHFSLGARSQAPAGGAGSHRYQLKDLKRVRIVRRADGYYVQFCISVDLKVETEPTGKAIGLDVGIKYFLADSSGNTIENPQFYRKAEKKLNRANRRKSKKYIRGAKPQSKNYHRARCQYARKHLRVSRQRKEYAKRIAYCVIHSNDVVAYEDLNIKGMVKNRHLAKSISDVAWSIFRHWLEYFAIKYGKLTIPVAPHNTSQNCSNCGNKVPKSLSTRTHICHHCGYSEDRDVNAAKNILKKALSTVGQTGSLKLGEIEPLLVLEQSCTRKFDL

SEQ ID NO: 14365 - protein, 407 aa, unknown
  TnpB Polypeptide
MGMERRQAYRYELLPDGDQRCRMRRFAGSCRFVFNKALALQKQRYERGEKKLGYAGLCKLLTEWRNSGDTAWLADAPVHPLQQSLKNLERAYANFFDTRAAFPRFKKKGRNDGFRYPDPEQIHLDQANSRIFLPKLGWLRYRNSREALGRVRNVTVRLSGDKWSISVQTVREVEEPLHPSDSMVGIDMGIVRFATLSDGTVIEPLNSFKRQELRLAKAQRALSRKRKFGNNCKKAKAKLQRLHTRIADARRDYLHKATSTISKNHAIVCIEDLQVRNLSKSAAGSSEKPGRNVRVKSGLNRLILNQGWFEFRRQLEYKQAWRGGLVIAVPPGNTSRTCPACRQVSADNRRTQARFACVMCGFEENADRVGAINVLAAGHAVIACGEPVQSDRSAKQEPTEATQAIFA

SEQ ID NO: 14366 - protein, 425 aa, unknown
  TnpB Polypeptide
MVKKAITHLKLNQANPGKLRKLDQLALEHQRVVQAYVDWLIERQIDQPNKYADIPEQHVPTPLSDRWQRCAWQQACGIVQSWYANGRETPPVLRNVCLQANANVVVIEPSHTPQFDFWLRISTLEAGNPVRVPIPLYNRAKETIAEFTKLCTGVTLNKRDGQWYATFVVERRGAKAQSSQVIGVDIGMVSIVSTSGGQRYGQISPELRKRLERAVEKHRRKQKLNACLKRKDMPTVDPGDNRAEAFSRNEIGRPLNQMLDELLKGSAVALERLSVKDMRFKSRQMNRVLRASQLGYVRDKLKFKLDERGIRYRSVQPAYSSQQCSHCGFTFSLNRRSQAEFRCLWCGYEANADENAAANLAERFGDEELNLLPFREVETVLAMRFMRRLPDARSASAGLDTRVNEVAYLHLGQSARLKHPWHSCL

SEQ ID NO: 14367 - protein, 422 aa, Scytonema sp.
MYSLKLELKLNNLERSRLAGCAGFARFVYNFGLSMLQASWDFEDIKATDSKRLQKIEKVFTNHVKQNPDFAWMQNYPSAIYSCAFRNLAKAVDRWRKGYSKFPRMKSKKRGDSFTVLKKSGVYPAIGEPMLLFSNRQVLLPGKRITIPGLGEFRLRSPIPFRCSSQTFTISRTADKWYVSFMLDAQKIPPVIHEVESVGIDLGVKCFATLSDGSRLIAPPSLKIAKTKLSLEQWRNRNKCFGNRCQGIKISNNAKKYLKKLARRHAYIANTRIDFLQKTTTDISRKHYRIRIEDLNVSGMIANNKLSEAISSLGFYEFRAMLTYKQAFFGTKVEIVDRWYPSSKTCSCCGHVQPMPLSERVYVCQSCGYTQDRDLNAAINLKNCPNNRVRAASAELTPVDRLGADSPDRSRKQTSKCSSYAT

SEQ ID NO: 14368 - protein, 275 aa, Scytonema sp.
KSVVGIDVGVNKLVALSDGSFIENTRPATNKRTARRLAQRNRAASRKQKGSKNRRKAYKRVAKMQHEIAQERDGRNWQAAQKIVNTADVIGHEDLNVRNMVKRAKPKHDGKGGYKKNGAKAKSGLNKAIQDCGWNDLFNKIAWLALKASKPVVKVNPKHSSQVCPKCHHIDKSNRDGEKFLCVNCNYTDHADIKASRTVGKRVGLVFPQKIRKTLPRDSRKVTPEKPASQEASTVSRVESRNHAFEQLGVQLSLFDTTAYTTADSRVSKRYGRNS

SEQ ID NO: 14369 - protein, 470 aa, Lachnospiraceae sp.
MAAIHNLTIETRLDPKESGSLIRFFEEWRTEYGRMLRYVWHRYAARASRPGQAAFNTHLQQHFGITKRTANSLIYDAVGRYNALVELKKTEKVHLETKIATFKDNIKSFKEDVDAAAKLAAQNKLSGKQLESYRKKKKSLHDKRLKLNRMENSLASLEKSIASGKIKICFGTKKLFHAQNNLEENHYRSHREWYRAFREKRDANIFYLGSKGETQLNQMFQLFPEGNGQYRIVCRKDGKYAPSSKEKLAFGTCRFSYLSEKLAGQLESGYKGISYRVHFERKKSCLQEKIYLQAILSVPADYQPETTMVEGAIGLDYNDGFIQMSETDRAGNLTGQKKYVLAFHGTGAHADTELKQAISEIARHALRKGKSIVCENLDFKNTKSRQMKGRSRKGKAYNRMTHLLDYKRYKECLKNAAVRMHFDLVMVSPVNTSKIAKQKYCNRRKLNGHAGAAYVIARRGQGFHDKLQKA

SEQ ID NO: 14370 - protein, 455 aa, unknown
  TnpB Polypeptide
VLFIGNSINRKGDMIMQYTKTAIVPIHYETTKKKLSYLDNLTARLTYCVRLWSEIIEKHNINNRKELQNLAFQHRLQKKTILSSAFVQQCGNKALWMWKQYRTTYKKWEWKVKKSKEGTKYHEKLLKREPSIPFSNSKSLLHKVPVRFDYRTGKIDKAGLEMSEWVINISILKKYEKITIFLNASEYHNELLEEGEIRDFEIMKRDNKYYVHITCQFEVKDTKPKSITTIDLGINRSVVAVQFSHSKEPKSIIIEDKEKQDKLQFYNDLVGELRREEKWDKLKVIRNKRRHISEYYDWITAKKVAEFTNETIVVIGKLTHIRERQYKGNENKEHRKRMHKWAYERISGCIQQKVNEKGIEFNRMFESWTSKKCSNCGSYNTTRPVQEAIFCYDCLQGFDADMNACPNMASRYLSKNATDELAITKDDLKIKPSMSLEAPCESWCSSHKKTLEAMT

SEQ ID NO: 14371 - protein, 387 aa, unknown
  TnpB Polypeptide
MLKSFKYRIYPNQDQKELLSKIFGQVRFVYNLGLETKISAYTGNKQHLSCFDLNKQITELKKHECEWLKESPSQALQMSMANLDNAYTNFFRGAGFPKFKNKYRKQSFQLPQGVFFNEDKKQIFIPKLRLVDIDFHREYKGDIKTVTVSKSVTDKYYVSLLVDNKRELPKKKPIKLETTVGIDLGIKDFVITSDGKKFKNQDFFKSALKRLRIEQRSLNRKQKGSNHYNKQKMEVALVHEHVRNQRQDYLHKISKHLVDNYDTICIEDLNIGGMLKNGNLSRAISDMGWFDFRSMLEYKCKLYGKNLSVIGRFDPSSKTCSNCGVINKELTLNDREWTCKCGTNHDRDINAAKNIRNFGLRNKPSVTQSGWLHRACDVETHQPLADV

SEQ ID NO: 14372 - protein, 375 aa, unknown
  TnpB Polypeptide
MRQFFFKNHYFPSYASVNKEFTHFNQPDDRALPAKVAKHTQMQADEACRSFFSLNKKYKEGKLENKPSVPRYLHPKKGRNVVHYELMAISKRSLQKELIHLFRTDLYIPTKIDPSKVQFVRIVPKNGVIVVKVGYRETLPDLKQDCRRIAALDLGVNNLAVCSSNVMDPLVIDGKYLKSVNQRSNKALAASRSYEEKQHGRKNSPKIQAIFLRRNNRISDYLHKASRYLVNQFVFNQIDTVIIGHNPGWKQDTNIGKRNNQNFCQIPFNVFIRMLEYKCRMAGFQVILCEESYTSKCSFLDDEECRKQQTYKGKRIHRGLYKSQNGKLINADLNGSLNILKKGLLTLGQWNRSIYQQCLDRNEKAALIRYKVPRS

SEQ ID NO: 14373 - protein, 398 aa, Moorea sp.
MVEKAYRYRFYPTPEQETLLRRTLGCVRLVYNKALDARTKGWYERSRRVSYKETSLMLTGWKKQDDLFFLGDVSSVPLQQGLRHLQTAFTNFFAGRAKYPNFKKKRNGGSAEFTKSAFKWKDGKIYLAKCKEPLPIRWSRQLPENCNPSTVTVTLDPSGRWHISIRFNDYRDLSLPPTDKQVGFDLGISSLITTSDGDKIANPKHFKKLRKRLAKYQKALSRKQKGSNNRYKAKLKVARIHAKIKNTRKDFTHKLTTQLVRENQLIVFEDLAVKNMVKNHKLSQVINDANWAEIIRQIKYKSDWYNREAISIDRWFPSSKLCSVCLNRVDSLPLNIREWDCPFCNAHHDRDINASTNILAAGLAVSVCGATVRPEESKSRKAGAKNSPKGRRKQKPKS

SEQ ID NO: 14374 - protein, 231 aa, unknown
  TnpB Polypeptide
MENSTIKTVTISKTPSGKYYISILVEYENQILPIVPKNFLGLDFAMHGLYVASDEDNADYPNFLREAEKKLVKAQRKLSKRQKGSRNRHKQRLRVAVLHEKIANQRRDFLHKKARYLADRYDAIGIEDISVKAMAKRKKGGKFSFGKSISDNGWSMFTSMLEYKLAWQGKQLIKIDKWYPSSQLCHVCGYQNNDTKDLSVREWDCPKCGSHHNRDKNAAINIREEARRISA

SEQ ID NO: 14375 - protein, 383 aa, unknown
  TnpB Polypeptide
MYMKLIKRTYRFRLYPNDYQKDLIEKTLGCSRQVYNEFLSITKKEYEKDHNYKIDKYELIKLLPEYKKKYPYLKEVDSIALQQSVIHLFEAYRKFFLHNSEFPVFKKKKNDYGYITMNINNSVRIVGNEIQIPKIGRVKFVYHRQLPESFVYSMVSISRIGKHYYVSLLGEEEYREYQECSKASLDLTNSIGLDFSLANLFVSDSKTKSSMPKYFEKSLTKLASEQRKFSHMVKGSNNYKEQFLRIANLYEQIANQRKDYLHKTSRYLANKYDYVFVEDLDLKEMANRKEELKLGIFVNDLAFGTFLNQLKYKLEWLNKKLVKVDKYFPSSQLCSECGYRNTDLLLKTKSWICPNCGVKHNRDHNAAVNIKKEGMRMILNPSN

SEQ ID NO: 14376 - protein, 201 aa, Okeania sp.
VKIPGIIKYQSVHQGQALRDLERAFKNLLTIPKYGFPKFKKKGKKDSFYLQGSIKILKGNYIKLPRIGIVKTYEILPSVPVKNLTISKRAGDWYISFKYDARPNQTTKERDIIGVDVGINLSATCSDGTKFANKKAYKQAKKRLTHYQRRVNKKELGSKNRAKAIKKLARIHKKVADIRADALHKLTTWLAKNHSTIVIEV

SEQ ID NO: 14377 - protein, 507 aa, Escherichia sp.
  misc_feature (213)..(216): Xaa can be any naturally occurring amino acid
LSGLTKTSSGSGLLFPDSKKRGQNDAFRYPQGVKLDQENSRIFLPKLGWMRYRNSRQVTGVVKNVTVSQSCGKWYISIQTESEVSTPVHPSASMIGLDAGVAKLATLSDGTVFGPVNSFQKNQKTLARLQRQLSRKVKFSNNWQKQKRKIQRLHSCTANIRRDYLHKVTTTVSKKHAMIVIEDLKVSNMSKSAAGTVSQPGRNVRAKSGLNRXXXXFRYPQGVKLDQENSRIFLPKLGWMRYRNSRQVTGVVKNVTVSQSCGKWYISIQTESEVSTPVHPSASMVGLDAGVAKLATLSDGTVFEPVNSFQKNQKKLARLQRQLSRKVKFSNNWQKQKRKIQRLHSCIANIRRDYLHKVTTTVSKNHAMIVIEDLKVSNMSKSAAGTVSQPGRNVRAKSGLNRSILDQGWYEMRRQLEYKQLWRGGQVLAVPPAYTSQRCACCGHTEKENRLSQSKFRCQVCGYTANADVNGARNILAAGHAVLACGEMVQSGRPLKQEPTEMIQATA

SEQ ID NO: 14378 - protein, 392 aa, unknown
  TnpB Polypeptide
MAELTLTLKLPFYRLNQVKALEFERLTTVNTAVANDLLAVDKKERKKLTSSAFQHIEIGSAWINQTIRNANAKTKAKQFKRMWLEVNNQNFEVSKQGDLYAVAFNLLRGRKGRIPLEVHSASHSEVLDKLIACVAKLGTLKICKSKKGIWYALISVSMEVPDAKAVERWIGIDRGQNNIAVAALPNGFGKFWKGGRVKGLRRQFQRTRRKLQQAKQLKEVKRLEQRERRIMTHINHVISKELVQFAKDFEMGLRFEDLSGIRQSSKQRKKTKSDAANNRDSWAFYQLEVFTRYKAIRAGVPVQSVPAPYTSKSDHRNGVLGRRNGDWFKGFDGYRCNADWNASQNISQWLGFSCPLSLQSAVAAMAVADPGGGVNDSPLSSEASKRVDLSSA

SEQ ID NO: 14379 - protein, 379 aa, Lachnospiraceae sp.
MEQMTVTAKIQISVNTDSRALLDKTMSVYADACNYVSDYVFRTHDLKQFSLNKVLYSTLRERFGLKSQMAQSVFKTVIAKYKTILENQKKWIQPSFKKPQYDLVWNRDYSLTQGCFSVNTLNGRVKLPYFAKGMSKYFDHTIYKFGTAKLVNMHGKYFLHIPVSYDVEESNISDICNVVGIDRGINFVVATYDSKHKTGFVSGKAIKQKRAQYSKLRKELQMRQTPSARRRLRAIGQRENRWMQDVNHRVSKALVENNPKHTLFVLEDLSGVRNATEHVRTKDRYVSVSWSFYDFEQKLIYKAKQNQCTVIKVDPRYTSQCCPVCGHIEKANRDKKIHLFTCKNCGYKSNDESQYLIQLRQSKLCRKGCCQPPYDVTPL

SEQ ID NO: 14380 - protein, 210 aa, Bacillus sp.
MIKYWDKKMDELKSLRDACEKNYRKRKTKQGNTYKVHSPRWNRFNHALDKAYHKRREQLKTALYTISHELYRRYDLVIVGDYTPTNSTAPFNHMKRRMLNQEKIGEFRHIAEWVAVKLEKYYLLANEHNTTKECCVCGHEEKKDPSIRSFVCVQCGNEFMRDTNSSVNIGRKMGFSLDLQKYKHKLKSFTHIGEARYGKPVLWIENKNNL

SEQ ID NO: 14381 - protein, 374 aa, unknown
  TnpB Polypeptide
MVNESLRIGMANDASSLRRLSLLSYNQLAQYDSPSYYKLCAISRAAGILAARKKSTRRGYATRTPYAVRPVLVSCYGFKIRNGRLEIPVSRGKRLSLLLTNHTLEVITQLGVKVRSFTLTRTRLSLCIARDPPMIECASTVGVDRNLRNLTIGNDDQTSCYDLSKIVRIASTTTSIVASFRRDDDRVKTRIASKYGRRRTARKGHLLHNATKTIVALAVRRRTAIVLENIEGIRSLYRKGNGQGRKYRGRMNGWGFGEAQRQIEFKARWVGLPIIRLSRRETKGSSLSCPRCGERLQSDKRLERKLWCIKCRVVMDRDMVAAVNLARRGRVRFARSQPPIDEAQGGAGEAMKGNPTPTVIPGVDAPKLTQPTKS

SEQ ID NO: 14382 - protein, 407 aa, unknown
  TnpB Polypeptide
LLLSFIVLAVKSAWQYYAPTGDVLRLLDVFRRMVNDSIRIGLLNDASSLRKLSLLSYNQLARYDSPSYYKLCAISKAAGILAARNKSARRGFPTRTPYAVRQQLVSCYGFKIENGGLEIPISRGRRFSIPLTKHVLEIISQPGVKVRSFTLSRTRLCLCIARDPPVVECVSTVGVDRNLRNLTVGNDDQTRQYDLSKCVRIATTTVRIVASFTRDDDRIRTAIASRYGQRRTSRTGHLLHSATKAIVTLAVQRKTAIVLENIEGIRSLYRKGNGQGRKYRGRMNGWSFGEAQRQIEYKARWVGLPVIRLSRRETKGSSLSCPRCGERLQSDKRLERKLWCGKCRAVMDRDMVAAINLARRGRVRFARSRPPILLEAQGGAGEAMKGNPTPTVIPGVDAPKLTQPTKS

SEQ ID NO: 14383 - protein, 365 aa, unknown
  TnpB Polypeptide
MLTYEFRLYCSRHTKHLDAMLCEAAYVWNRALALQRRYYALTGKHISCSRMKAYFAKRNKRTLLHSQTVQEILERQETAYDCFFKRLAKRPPKFRKASRFRSFVFKQGGFRLYGNEFIVNRIGRRYRFSYSRPVEGKPKQVRVLRTPLGEYRLYIVTDACASPCRKSHDGASVGFDFGLKVFLTGSDGTRVDCPLFLKQGLGELRRASRRLSRCVKHSNNWYRRKAELDRIHERIANRRDDWQWKLAHHLCRRYDTICIEDLDMRGMSRLWGRKVHDLAFGRFVEKLKHVASKYGVVVHEVNRFYASSKTCGHCGFVNKGLALRDRIWICPECGAVLDRDFNAACNICRRGIADLGSTCKTRVAG

SEQ ID NO: 14384 - protein, 379 aa, unknown
  TnpB Polypeptide
MRKTYEFRVRPTKAQERRMFATLNAGRFVYNWGVEDRKNLWQYCRVSTGFNDQSDYLKHLKDANPWLKEVHAHPLQDALKRVDKSFDRFFKAHKNGHGYPRFKGLDQYDSFTFKEWENGASFDGKRLRLSKIGRVRVVIHRPIEGEIKTCTIKRRADGWYALFSAVVADAKPSKIDNPVGVDVGIKTFAALSTGEKIENPEFLRSNERALKIAQRKVSRRKKGSRRRRKAVLHLKLEHQRIGRSRKSFHFTQAHRLVEKFNPIFVEDLNIKGMVRNHHLAKSISDASWGQFLGILSHSAESAGAASIALEARGTSQECVCGEPVSNDLSIRYRSCPKCGLAEDRDVVSARVILQRGMGSPVGEGAGSNRHPMIREAAGL

SEQ ID NO: 14385 - protein, 409 aa, Actinobacteria sp.
VAHRYRLYPTAQQAAFMLERHCADARYVWNLAVEQFSWGRAGRSAPGPAQRQKQLAEARQEFEWLAAGSSSVQQQALRDFDRAVAAFFGGTHRRPSWRRKFLDEGFCVRDSRVEIVNGKWAQVFVPKLGVVKFRLSRPLPAGKLGMARITCKAGRWHVAFPAPQPSVRAASGRAGRAVGIDRGVKTTLALSDGTMLRAPTMRGGEQKKLARLQRQLARCRKGSARRGKVKARIARLHARVADRRRDWVEKTTTRIVATYGVVAVEKLPVRNMVRAPKPKPDPENEGHYLPNGKAAKAALNKGIYANCWGLIAQRLDHKTSASGTTVVYVPAAFSSLECRNCGHSVKENRKSQAAFVCVNCGHEDHADIQAANTILARATAPALTSGPEATPAPAGVLAQARKPNAAHAA

SEQ ID NO: 14386 - protein, 552 aa, unknown
  TnpB Polypeptide
MSPQQKLLKNTIFLNLHSEDGDSLEKLNISRQRGITSGTLNQASEIQSQIQDQESIIAESRPTNKRMTSKGKRKSLGKTSRNIKSSKTLGLDSISREKDSLTWWTKSSKELSVKLLSRIGTDSVDLRSISWNGFVNDQIANSWFKTRSSNLKIKNSQKILWPSFTSSLTSLTEKDVTRAKKIRIRPTSEQIKILRKWMEDYRKTWNMALKLVKEDKRKISLDLKKDVVTKRKNDSEKLIYLKSSPAVIRKGAVNDLVKANKSAWALYKAKLKESKSNWRKNPFEIKYKSRKSNTGSFPLDKVYVKKNNDESFSLFNEPKFKMILKAKNVPDINKDCRITCVFDRWYLIVPETTKSIKRDIQEEPKVIGIDPGLRTAFSCLGTDGSIFEIGSDVNERLYKINSKLESIKTRMNTDVSKRSRLKKAWHRHLMRTKQLCDELHWKTINFLTSEYDVIVLGKLNVKSLMMSNNKTNKKLLSFLSFYKFRQRLEEKARSRGNLIIIQNEAGTTQGCPQCGFKKLDVGSSKVYKCDRCSFEGDRDIKSALCMIIKSCS

SEQ ID NO: 14387 - protein, 441 aa, Methanosarcinales sp.
MRWARRGGWEIFKYFKLLKNNKMYLTQKNHIRCNKKTYRVLRILTRLSKNLYNYTLYTLRQYYFNNGKYLPYEQAYHLVKHNENYQLLPSQVAQQTMKVVDRSMRSFFHVLNERKKGNYNRPVSMPRYLPEDGYFVCIFQKDMFKVDGDRIKLSLGRNFAKEFGIRHLEFKLPPTLAGKKIREVRILPRCKALWFEIEYVYEVEPEKADLDCNKYLAIDLGLDNFATCVSTSGTPLIIEGRGLKSFNRWWNKEKAKLQSIYDKQGIKMGKKMAWLLKKRKNVINNFMNQAVNYIIKYCLVHRVGNIVIGEFKEIKQNMKLGKKNNQNFQYIPYGLFKQKLRAKCEYYGLNYIEVDEAYTSQTCSFCGNVSKNNRKHRGLYVCKKCGFVANADVNGAINILKKVAPESVRIGGSGGVNPPVRIRLAHPSKQTPHEAPCVSEG

SEQ ID NO: 14388 - protein, 220 aa, unknown
  TnpB Polypeptide
LCLDETFETLPKTGDGIGVDLGINRLATLSNGERVSNPRITAKYQKQLAHEQRLLAKKHKGSRRREKQRLKVARLHAKIAASRQDVLHKFTSNLVRRFDLICIEDLNVRGMIGNHRLAKALSDASFGQVRAMLDYKCARYGKTLVAIDRFFPSSKTCHVCGLIVEKLPLDVREWTCPSCRTTHDRDGNAAQNIYAVGQTVKARGESGRHKVASAASCTIL

SEQ ID NO: 14389 - protein, 254 aa, Cyanobacteria sp.
MRVAYQYRLLPTSEQRAEMSRWLDMLRLQSNWMLAERFQWWEENRSSVNACPLICYLPELKDQPDYYSQKRSLVPLKQDRPWYKDIHSQVLQDMVKRVKLAFDRYLSGDSNGNRSGKPRFKGKNRYRSFSYPQASIDWIDGNKIELPKLGMFKVIWHHPFPEGFNVKTAIITQKADGWYVTLTLEDVSAPEFTSEIEPTKDNSIGIDLGLEKFLADLDGEFEPIPQHFRKSEQKLARLQQKVSTAKKEVAPEID

SEQ ID NO: 14390 - protein, 235 aa, Erysipelotrichaceae sp.
MRNCFDKKRKSRCGFPKFKSAKHSRKSYTTNNQKGTVAIIDGRYIKLPKIGMVKAVIHRAPDTDWNIKSATVSQDCDGRYYVSVLFEFEKVIEKVEISDRALGLDYASDGLYVDSNGRRGSNHKYYRESHKKLAREQRRLSRKKGSKKGEAKSSNYMKQLRKVNRIYKHIANQRLDNLHKISAEIANQYDVVCVESLNMRAMSNSGFGNGKATLDNGYAMFLDMLEYKLADRGKP

SEQ ID NO: 14391 - protein, 477 aa, unknown
  TnpB Polypeptide
MFVYTLKLNTNLSHHHALEKRFRMADDIYQKTLREILKRSRKQKKDPRYKRAYKFEKGAERNAILKELDVDYDLQGKFTFGKWANNYRNARNYSPYIPSDVAVKLGIRAWEAYSRVKFAKGAKKIQLNQKLLSVEASKDSGLIIRDGIFKMGTKQAKFECPVKYKEDDFEIDAMRNQFKYNRLVRKFQYGQWHYYVQMTFDGEPPIKNIGTTGNVGIDIGTSTIAISSVDETQLTELAQGLNNKSENDLIVRLQRKLDRQRRANNPDNYNEDGTIKRGFKVWNDSKEYLKTKEELAELQRTRAMRRRNQHQTLANKIVTSGDRFIVEQMSFKGLQAKAKEATKSETTGRYRSRKRYGKTIGHRAPAMLVEMIRSKAELQGKTFIKAQTSKVKASQLDHITGQYTKVGLGVRAKTVGDDLVQRDLYSAFLLQHVEDDGFTVNLDACDSDFTQFLENQEVTMAQLETTLKSTGKEHFAA

SEQ ID NO: 14392 - protein, 319 aa, unknown
  TnpB Polypeptide
LERAYFLDGWIVCLQCRKCFRRNVEKIYRKSRVRRWRRPMLKAYKYRIYPNSEQRIQIAKTFGCCRFVYNQTLAYRKDIYEKEKKSVSKTDCNHYCNRELKKNYEWLKEADKFALTNAIYNMDAAYQKFFKEHAGFPKFKSKHDNHKSYTTNYTNGNITVYFDRGKVKLPKLKEVKAKLHRKFSGQIKSATVSQMPSGKYYVSILVETENKELVHPTGRIGIDLGIKDLCITSDGKIYENLKITRKYEKQLVKLQRQLSHKGKRSKNYYKTKKKIALCHEKIRNIRKDYLHKVSHEIISENQVIVSENLQIKNMVKKMV

SEQ ID NO: 14393 - protein, 373 aa, unknown
  TnpB Polypeptide
LKDNDRWLFYPDLDRIMKNVTNLEGTVNYRLVKSHVAQQTLRVLDKAMKGYVKAVKDWSKNRGKYNGKPELPCYHKRGGMSNAIYTNQSCKIHDGYIILDRDLKIPVPQWEKYKGRIERFKQVRIIPKRTYMTVEVVYDCGCSDNVGTGMASIDLGVNNLATLVCGCNALLFSGKVIKSYNRWFNKTLSMLQSIKDRQGIDKLTNRMRKMYEKRERFMNDAMHKTSRRIVDYLVSHHVGTLAVGYNKGWKQSVNMGGVNNQKFTFIPFARLRSCLRYKCELAGISYIEHEESYTSKCDALSMEDICKHDSYLGKRVKRGLFKSAVGKVINADVNGALNIGRKVFGDSFMIADSGRWYRPERVNVLKCMCKDVY

SEQ ID NO: 14394 - protein, 252 aa, unknown
  TnpB Polypeptide
LHIHNSRANISFKVEVPEGPVPPTSPPSDARENKAYRKLRRRLERLHRRASEPKEGEVVAVDLGVNRLATCSNGKVFENIKPYRKAKKRLARLQRQVSRKKKGSANRKKAIRRLAKLHQRVAHIRHDALHKITTYLAQKYRVVVMEDLNVSGMLQNHRLACAIADCGFYEFRRQLAYKAKRYGCQLVWVEWLTPRYAIGFIPPASCRCQHRQKMPLHQRVFRCQRCGFEIDRDLNAALNLLQWYFECYLKRS

SEQ ID NO: 14395 - protein, 398 aa, unknown
  TnpB Polypeptide
MKILQAYKFQLRPKKGQENVMKRFAGSCRFVWNKALAKEKENYEETGKRLGYYKLADQLKEWKQEEETAFLKEAHSQILQQTLKDLEKAYGNFFAKKAAFPRFKKKGALDSFRYPQGFKLDEPNNRIFLPKIGWIRYRNSRKIQGIAKQVTVSLSAGKWYVSIQTEREETLLQHPSTSAIGIDMGVARFATLSDGNYIEPLNSFRTHAEKLAKLQRELSRKKKFSSNWNKQKEKVQKQHQKTANVRKDFLHKCTTAICKNHALVVVEDLKVKHMSHSNSGTVENPGHNVKIKSSMNKAILDQGWFEFRRQLEYKLLWNGGRLLVVPPQFTSQKCSHCGNTSKENRKTQAKFKCSDCGFESNADYNAAVNILAAGLAVSACGASQRFAMKQEPACGKLC

SEQ ID NO: 14396 - protein, 486 aa, Moorea sp.
MGEAAKVRGVSMEKILAYATTAKQTYTQVIPVVACQDESQILEIMGLCGTARALTYNKLGSLQGWGLNWKKADKIVRTIMTPEQIGLPSKLWEWAVNDTIKAITAQQEAAKVFIIREIYGKTSDKSERKRLLELLKTDPRADPWLHRIFRKQYQRGHTFVRNQIVYQNNGYKCKRLTRNTVELQVAGLNRGKRVSLKLKCRHVLKGQIRLIQNGQGRLEVHTIRTKAIPAVEKPVKTIGLDKGYTEAFYLSTGETVGEGLGELLSRKSLRHGRTNRNRYRLFQHAQRTPAKLETIKFNNLGYKVKSKRLAQEKATIKNLIRTDLRRAINEPTQIFAEDLTSPIVNKTQAKVINRKLNQWMKGELQDSLVSVAKETGSVVTTVNPAYTSQVDSQTGTLLGQRSGDRFTRYTGVVLQADQNAALNIMHRGSDTEITRWMKYADVRRVLLLRTVRYLASDGKTVTEALNLGWLNSKFKTEALRLEASIT

SEQ ID NO: 14397 - protein, 402 aa, Psychrobacter sp.
MKTLKLRIKDKHVNQLNKIAGSVNYAWNHVNDAWNYVNDVSYKHLRKTGRFFSAYDLNEYIKGSGEYLGLHSQSLQAINETHAKSRKQFKKAKLNWRTNRPDAKRKSLGWIPFKKSAIKHLATRQSGKKALKSTIQLSLSKGQKLIIDVFDSYNLSLYQINTLEIVQDSRNRWYACITVKEYPKQPCGTGSVGIDLGLTESATTSNGDKLTIKQTQKWADTLAIAQRANNKKRVKAIHAKIKNSRLDAIHKFIIQLVKDNALIVVGDVKSRSFTNKKTKLAKSTYDAGWFEFKRQLEYKCKHAGCQFEIVNESYTTQTCSHCRKISDSSPKGRASLGIRGWICAKCGRWHNRDINAAKNILAVGLDRLAVGIPFCEGRKSKALLKFKNTYVININKIYLSNN

SEQ ID NO: 14398 - protein, 257 aa, unknown
  TnpB Polypeptide
MLQKVAKKASLFRAGRWYAYQSAGVNQSRRTISSKKAFVDLGVVNILTAWIEGERQPIAFSGKSLLADCWYWTKKIAHYQSIAMKVNKYYTAKRIRKYYRRRKLRFRHAINTIIHRFVKICYGKGVTEIIVGDVIGIRDNDDKGAKVNAMTHNFWSFRYIINRLITTAENFGINVRLVKENNTSSICPRCGSTNAYKHKRLFKCLNCGLEAHRDVVGVLNIAHLLNAGGFNEALAGPELPRAHPLVAQTSLLEILAL

SEQ ID NO: 14399 - protein, 655 aa, unknown
  TnpB Polypeptide
MELEEIPPDPPEKEQVYRIIKCPLKCVLKKYDTLQPIIEKAVMDINEIVILSYQFIRLYLLEKFNNNQTLPIINKQFVLDVIKTIASPTSKRGQKVKEENIKNSSGKTDMKQFYNETFSKLVSNKPSYTNKTHIVAITANEMITCINTNISTHFVKHLFKYINCLFKQSKSIEIKQEKDKAKRKELYKILNKEIRDLKSDLINNKIELSKSEYHNWIRENKDFLFPNKVNKSVAYDVKCNPEKYIKYSFYINSKIEQMGKKPYQAIPQRNNIVPKHITLNSNGIADLIDDKKQTIFNYNKSALVLHANKHQSHIWSKILKLEKKDIFKQQEYVFYNQIITDGFSCSLLFILKKYKNKVFGDRLPSVKDEMEFTRVEDLSKDKCNEYLTDKYKLVSLDPGKIRPITMIDENNKFFKYTACRRRVETYTKRSNYIILQEKKKNGIIEKETELSRFKSNTLIPEEYTKFIVKKTILNNELKDFYQQPLFRKLAFRRFIRTKQSEVKLLNEIENTYLNKEEIKQGKKLLILHGDYSRTSQMKGCIPTPNIGLKKLLLSRFDVVDVNEFNTSKLYNKTKREMENVIVKRKKHRKHLHEILTPKEETKCRIFVNRDVNACKNILLLGKCYLESQTRPEEFTRKVILDKKEKVKKPRKSGNK

SEQ ID NO: 14400 - protein, 370 aa, unknown
  TnpB Polypeptide
MKRTIALKLVLIKEQSNALLETQIEFAKSCNEAAPFAAKNRCWNRVALHHLCYYKIREKVPSLGSQMVCNSIKKVCSAYKVLKIKKSQDVPVISFQETGSVHYDKRTFSLKANILSLFTLKGRMKCAFKLGEFQRAYLEQGTIKEAELIRKGKRWFFNIVLDIPNITFKEKGEIIAIDVGENNLAATSNGTIYGGGKLRHERDKFLARRKKLQSNGSPSAKRCLKRISGRERRHVKETNHIVSKKIIEEAVRFEANVIVLEDLTNIRKRIKGKRRIRSRLNRWSFYELQQFVEYKAQSKGITIVYVNPAYTSQTCSKCGSLGSRHKHLFKCSNCGSYQHSDRNAAINLLKLGESVVSPTATVNMPMVAVV

SEQ ID NO: 14401 - protein, 385 aa, Bacillus sp.
MRRAYFIEIKPTHEQITKINQTIGVCRYVYNLYLSKNKEMYESEGRFLSGYDFSKWLNNVYTKECSQWIKKVSSKAVKQAIMNGDKAFKRFFQGLSGFPRYKKKKNQDVKCYFPKNNKTDWTVERHRVKVPTIGWMRLKEYGYIPKNTIVKSGTIGKRAGRYFVSVLCEWKEAEMKPILNQTGLGIDLGVKDFAIRSDGIVYENMNKTIQVKKIEKRLKREQRSLSRKFENIRKRGEQSATNKRANIDKNILRVQKLHAKLANIRLAYVKSVVNDVVKTKPTFITVEDLNVKGMMKNKHLSKAVAKQCFYTFKTWLLTKCEEYGIELRQVDRFYPSSKLCSYCGQKKVDLKLSDRVYTCNCGNVMDRDLNASINLLQAKKYTILT

SEQ ID NO: 14402 - protein, 224 aa, Escherichia sp.
MLPDDILYPVSASFEPVSLPITVSTVGIDIGLKDLFVTDTGFKTGNPRHNAKYAKRLAVLQRRLSKKQKGSKNRAKARLKVARLHTRIVDCRMDNLHKLSRKLINENQVVCVESLKVKNMIRNPKLSKAIADAGWSELVRQLQYKGEWGGRSIVAIDQYFPSSKRCSSCGFTMQKMPLNIRKWHCPECGAEHDRDINAARNIKAAGLAVLALGESVIPKPLHVV

SEQ ID NO: 14403 - protein, 166 aa, Escherichia sp.
MKRAYKYRFYPTPEQTELLARTFGCVRFVYNSLLRWRTDAYYARHERVGYAQASAKLTALKKEPEFAWLNDVSCVPLQQSLRHQQTAFANFFAGRAAYPVFKSKRHKQAAELTASAFKYRDGKLYMAKSKEPLDVRWSRPLPSAPSTVTITRDAAGRYFVSCLCEF

SEQ ID NO: 14404 - protein, 427 aa, unknown
  TnpB Polypeptide
VWNLAVEQQRHWQPGRRAPGYNEQCAQLTAARAEYDWLAAGSQTVQQLGVPPACGGALRDFAQAMRNFFNGTHRRPTWRKAGTHEGFRQVGLKPRRIQRLSRRYGQVWIPKVGWVKFRWTRNVAHTVKSYRVTMDRSGRWHIAFAAIPESVAGPDDGSVVGVDRGVAVSVTLSSGELLHAPGLRAGQTKRLRRLQQRLARARRGSHRRARTKLAMARLRARETDRRRDWVEKTTTDLARRFDTIRVEDLDVRAMTRSARGTRDRPGTNIAQKRGLNREISRHGWGLLVARLKHKASGRLEFVPAAYTSQRCSHCGHVAPENRKSQAVFQCVACSAGPCHADVNAARNIAAGRAVTARGDLGASRSANREPQLCSPAAQVGAGVGIQRRKPVEDVKPNHRTASSRGTFSGVRGRVCPTAQRRSFGHRE

SEQ ID NO: 14405 - protein, 482 aa, unknown
  TnpB Polypeptide
MSRWVDHPLFSPAQALFPSPLLNRNNGNVRTVRLRLLPNGSQERKLRRIADTAAKLWNGLNYARLIQFRASGKINFKDTGHEFYHRYKDKLGVNAGQVINLNNNAWKSYFKLLKLYRQGKLPRFNGKPSPPGFWRDRLLGKRELRILVRNDRYYLEPTNGGEGYIVLKDWGLKIKYAGRVKWSGKQGMLMIKLEDGRWFAYVPITVGEKPAKTNPKGYVKGIHEKIRIENPKGSNKAFIDIGLNNLFAVVFNHTDTAILIKGSTIKAEYYYWKRETKTYQAIGDWLRNRGFNAWRKYHAFHLHAVFKRKERLRHYYRTAIRFLAKTLWRMGINEVFVGYPYLVSQGNGNEYNANIWWFNKVINWLGDVLEEYGIRLNIVNEYGTSKQCSICNMKHENGRVKRGLYICESTGIKINADLNAARNIARRVGYEVPMPRKILSYIITTNGVKPLTPMEGVTIETPTVKTPPKRARRGSSNNSIYS

SEQ ID NO: 14406 - protein, 366 aa, unknown
  TnpB Polypeptide
MNVLRTVTFKLKLTNQDQCTLLDTMRAYTNAFSASATWGFENESWNKVDNHNATYKLVRQNNPELPSSLVQGARDCACEALKAVKCKSLPERKTFAAMRYNQRVITVNLIRGIATIASTKGRIKTTFKIPDCYQDYLTWKIKSSTISYDKRSKTFYLHVSLEHPDPELTQDIKVLGIDRGIVNIAVCSDNTFYNSKKVKDTRAKYAHLRKELQSKGTRSAKRKLKKLSGRERRFATDVNHCISKQIVNSEHTVFALEDLSKIRVQKRRGKQFNRKLNSWSFYQLEQFIRYKAETLGKHVLLVDARYTSQKCSECGHIYKGNREGSLFRCRKCGFELHADLNASRNIAQAGISCLGRLPVNQPIVTA

SEQ ID NO: 14407 - protein, 407 aa, unknown
  TnpB Polypeptide
VHRSHGLAGVGAVSFKDAGKPRFKSKSLGLNSIEGTDNHEIMYKPERQAIVWRKQVLRLVDVDTPYRKEALADSLDKSRSKRVKYCRIVRRTINGKKRWFAQICLEGQPPVRKIYAPQSEVVGIDPGPSQIAYYHENYVDIVKVAPNVNLQEKVVRRLQRKIDRSRRANNPDNYEDDGRIKRGPLKWKFSHRLNKLSRELAEHHRCLAATRKRDHGALANLLLQIGGTVKIEKNSYRSYQRNFGKSTTRSGMGAFIEHLKRSAERAGAKVVELNAYALKMSQYDPATDTYRKKTLKERWHRWGNSETLVQRDVMSAYLACYATEKGHNRALLLEKWPTAEVLLSGSGLCRQQPRSDQGEQSLRLTKPQSESETARARGLPRTLCATGDVRTARAKATPSERACCWSK

SEQ ID NO: 14408 - protein, 387 aa, unknown
  TnpB Polypeptide
MAIQVTRTYVGYIQNHQQVKSGLDSLGDSASKIWNVARWTADRIWDATGEIPDAGVLKSYMKNQQCWKDLNAQSSQKVIEELSDAFQSWFDLRQKDDKANPPGYRKHGDTRPKRTVTFKLCEYQTRPNVDLSDVNKVQNVRAVWNSDEWELHFVCKVELETTDSAGDNVAGIDLGITNIATIAFPDEYVLYPGNSRKQDTHYFKRAEYNTEGDNGPSEKAAWARRKLAERETHFYHTLTSAIIEECVERGVGTLAVSWPENVRESDWGKTGNKKLHSWAFDRIYQYLAYKGEVRGVEVPKENEWDTSKTCSKCGDNTKSNRKHRGLYVCQSCGLVGNADCNGAETMRQKTTPSPHGEDRSNGCVAQPSTYLFDRESGMFRTRERVVS

SEQ ID NO: 14409 - protein, 147 aa, unknown
  TnpB Polypeptide
LDVFKRLRGRERRIVNHELHVISKEIVEYAKQFPSPVIAMEKLTGIRENFRRGKKLNRRFHSLPFRKLQKMVEYKAKLEGIEVRYVNPKNTSKTCHRCGYVTHVEGREYRCPKCGLKYNRDLNAAINVARALTRGTGRGYVNTPKGR

SEQ ID NO: 14410 - protein, 417 aa, unknown
  TnpB Polypeptide
MEYSHRYHAYPTQEVAETVEHHIDVHRQAYNFTRYEYTNHKDADDVGSAYKHHDRLTDWKDEFPVFKEVHSKALQRTVTRFYQNLSNLSEQKANGNNVGMLKWKSPAEYQSMTYSQSGFELKNTSGRNATLWLSKIGDIKIRHHREIPDKADIKEVTIKKETTGDWFVSLGLETDEVDLHEKPDVDSLTTNNSVGIDLGIRNYIHTSDGKTVDWLDLKDEHEQLRREQRKLSRKEQGSNNYEKQRLKVAKAKRHPRRKVLDYQHKLTTWLVKEYDAVFVEDLNVKGMLEQSHNARNKQDAAWRQFITLLEYKAELYGTHVEQVEARGTTKECASCGVETAKTIWVREHSCPSCGFECDRDANAAMNVLQRGFSELGLGWPEDTPVETALPTDTTSVSAKRVIETGSPTLNEAAPAAE

SEQ ID NO: 14411 - protein, 261 aa, Burkholderia sp.
MILVYRYRVKSLNGLLNKQSRAVNYVWNFCNDTQNFATLSTGEKLPNDRFGRRAAEKLAKAQRARKHKRHIAKLHAKVANARADFQHKLALDLVRRFDYIAVGNVSAVKLARTRMAKSVYDASWSSFRNKLRYKAIAHGATFEEVDESGSTQSCSSCGSKDSTTRPKGIAGLRIREWACSGCGVEHDRDINAALNILDADVHRQVWESSAFRRGGGRQEVRFQVASTSVRPASHDGDSMPKCSRRRLQSSAEFAGLGAGNG

SEQ ID NO: 14412 - protein, 361 aa, Clostridioides sp.
VYPNKKQQELINKTFGCCRFVYNKYLAKRIDVYKSDKETFTYKQCSSDLTNLKKELKWLKEPDKFSLQNALKDLDNAYKKFFKEKAGFPKFKSKKINRFSYKTNFTNGNIMYCGQYIKLPKLGMVKIRDKQVPQGRILNATISKEPSGRYYVSLCCTDVDIEAFENTNNHIGLDLGIKEFCISSCGDFIENPKYLKKSLNKLAKLQRELSRKTIGSLNRNKARLKVAGLQEHIANQRNDFLQKLSTKLIKENDIICIEDLQVKNMIRNRKLSRLISDVSWSEFIRQLEYKANWYGRKIVKVGKFFASSQICNKCGYKNEEVKDLNIREWICPSCNETHDRDINASINILKEGLRLITIQNK

SEQ ID NO: 14413 - protein, 440 aa, Streptomyces sp.
VNTERALKGWQYGHRARLALTPAQARLVDDQAHAARAMWNQLHDLWTMTPKCQRSLSRMDQTLRQARKEIDWYAVLPAQAAQAVLKTYFQAWKNCWDGRADAPTFKARIRTVMSVDIPQGRDLQIKRVHRRWGMANIPKVGRVRFRWTRDLPVGKAANKENRITGARLVKDALGWHIAFRVQSLEPRPAPHGGGEVGIDAGVNLPLALSDGNHQNHGRPPRLPDGTADRDKWLNPDEKAKLLRLEQRAAHRTSFRRPKERSSNRLQKTYDQIKQLRARATRRAVDWQHQTTTNLARTYGTVVVEQLTITNMVKSARGTIEEPGKNVAQKSGLNRSINQEAWGRTVTMLTYKTARHGGTLHKVPAPNTSLRCSACGFITPGSRESQAVFVCKNPDCGWEGNADHNAARNVLHLYRTGLALVPAAGRAVVRRPRGVKPAAAR

SEQ ID NO: 14414 - protein, 435 aa, unknown
  TnpB Polypeptide
MIKAYKYRLYPNRLQEVALLRHLDLTRELYNAGLQERRDAYRKCGISRSFYDQKKELPAIKEVRPEFAREVHAHVLQGTLQKLDRAFQGFFRRVKSGETAGYPRFKGKGWWDSFSYQECSSRIEDAWKWTTCGRPDKDRKRINLPKIGKVKIKMHRPLEGRPKTLTIKREGTQWYAVYTCEVEQSSVTSPSREIGLDLGTRYLYTTSEGNHANPGYLSKSQSKLAYHQRTLSRKKKGSKRRQEVKRCLAKAHLKVKRQRLDHAHKTSKKLVQNFGKIVVEDLKPSKMVHGFTSLNRSIHDAGWSSLISILSLKAESAGVEVIKVDPAYTSQRCYKCGYIEKANRKDEEFKCVSCGHGDHADVNAAKNILEKGIDRSGYEARTHREGVQSEGQKNRGWMSPAGPEEVNPQNSAGDSGLLLPSEVLPLRCPALESGE

SEQ ID NO: 14415 - protein, 405 aa, unknown
  TnpB Polypeptide
MKRIQAYRFELRPNNKQQRLMRQFAGCCRYVYNKALELQIQRYESGEKKLGYAELCKLLTEWRNNPDLAWLKEAPAHPLQQKLKDLERAYQNFFQKRANFPQKKKRGLSDAFRYPDPKQIKLDEENNRVFLPKLGWIKYRNSRNTAGAIKNATVSLSADKWFVSIQTEREVPNPIPTATTAIGIDMGIVNFATMSDGSYLEPLNSFKKHEKRLAKYQRAMSRKQKFSNNWKKAKSKVSKLHSKIASVRRDYLHKSSTAISKNHAMVCIEDLKVKQMTRSKKGTKEAHERGVKAKSKLNKAILDQGWFEFRRQLEYKLSWNGGLFIAVPPKNTSRMCHKCGHTQKENRITQAKFHCMACGYTDNADRNAALNILAAGTAALACGDHVRPNSIRSEAMVDETRISSV

SEQ ID NO: 14416 - protein, 251 aa, unknown
  TnpB Polypeptide
LNFIKLAEPNRIPTENCKYYNPRIKYDGLNWYITVSIECKNISTIPVNTGIGIDLGINNLAVCSDATIYNNINKTFKIRKLEKRKRRLQRSISRKYLKNKKGESYCKTSNIIKSEKKLLKIIKKLTNIRHNYLHQTTTEIIKRKPSFICIEDLSVSKMMKNKHLSKSIQQQNFYEFRQQIEYKSKWNNIKLIIADRYFPSSKLCSCCGDIKKDLKLSDRIYKCKCGNIIDRDYQASLNLKKYGENIFKSIS

SEQ ID NO: 14417 - protein, 562 aa, unknown
  TnpB Polypeptide
MSRWNKDIEVGERCVLTLPLNCYPRDTRFLDQIFQIENKLKNQLIEWYKTQLNEMTRTRLWRETNQALADLHSEYGPDMKLLAELDEKAKKKPLSKAREMKRTQLRQKVREFQAKQKLLYEARNGMIRKYGFSRGDFEKRMAKYRRSYTAFVGSMVAQRLADDVWSMFQSCLYSKGRSIHFSGINKFLTIEGKNNSTNIVFDRTTMKVFIGQGRHKTGIRVKRSRKDAYGYEAEALSREVCYCRITRKAYPEGWRYFLQLVLKGAPPVKAKPDTGELLHPMGKGRVGLDIGPQTLAYSADKTVGLVELAPGAQNLQKDIRRINRAMDRSRRATNPGMFDKDGQIIPRNRLPREMLDSHGKRKWVKSKQYREMERHRRYLYRKQADLRKVRHQQLANQLLAAGDRFYVEDMSWRALSRRSKQTRKNKKGKNLSKKRFGKSIANKSPGSFLSILEKKVLAQGGAFYRINTWKARASQFHHMTGQYIKKKLSQRVDILEDGARVQRDLYSAFLIMHSNKALDGFLVSACNRDYPKFLQMHNKAMADLAAGDKHLPSSMGVRSKTA

SEQ ID NO: 14418 - protein, 394 aa, Mycolicibacterium sp.
VSRYRLLPTAEQAPALAEHCRHARYVWNLAVEQQQHWQPGRRAPGYNEQCAQLTAARAEHGWLAAGSQTVQQQALRDFAQAMRNFFTGTHRRPTWRKAGVHEGFRQVAVKAHHIARLNRRFGRVWVPKVGWVRFRLTRPVPEGAKSYRVTRDRAGRWYIAFGHIPAPVAGPCDGSVVGIDRGVAVSAALSTGELLHAPRLTRGESKRLRVLQQRLARAERGSNRRARTKRAIAKLKARETDRRKDWIEKATTDLARRFDTIRVEALDVRAMTRTARGTVEQPGRRVAQKRGLNRGISRSGWGLLAARLQHKAHGRVEQIPAGYTSQRCSVCGHVAPGNRKSQAVFECEACTAGPCNADVNAARNIAAGRAVTARGDLGTSRSANREPQLCSPAA

SEQ ID NO: 14419 - protein, 388 aa, unknown
  TnpB Polypeptide
VPVLERHCADARFVKNLALEQANYWQPGRGPSASPTERQRQLAEARQAFPWLAEGSSSVQQQALRDFDRAMAGFFAGTHRRPTWWKKGRDEGFCIRDVKVRVLGRKWASVVVPKCGEVRFRLSRAIEHKHGMARVTLDAARRWHLSFSAPQPSIDREPTGRQVGIDRGVATTVAMSDGGMLRIPSIPKLTAKTDRLRKRLSRQKMGSNRRRRTRVALARSHARITDRRKDWVEKLSTRLVRDYDVVVAERLAVANMVRRPKPKRDLEHEGSYLTNGASAKAALNRAILGSSWGLLLRRLEEKAAASGVTVVLVDPRYTSQACRCCGHVSAENRKNQAVFSCVSCGHSNHADINAAQNILARGLKVLAPAPGPGESARVSPVLPAARTS

SEQ ID NO: 14420 - protein, 219 aa, Enterococcus sp.
YISLLCKEEIIELPKTNSTIGIDLGIMDFAILSDGQKIDNNKFTSKMEKKLKREQRKLSRRALLAKNKGTNLFEAKNYQKQKRKVARLHEKVMNQRTDFLNKLSTEMIKNHDIICIEDLNTKGMLRNHKLAKSISDVSWSKFVTKLQYKADWYGRKIIKVDKWFPSSQICSECGHKDGKKSLEIREWTCPVCHTHHDRDINASINILTEGLRLHSMGLA

SEQ ID NO: 14421 - protein, 390 aa, Mobiluncus sp.
MLKGKRIRLYPTEEQAQTFFRYAGASRFAYNECVAYCNAQYQAGRTGIVKQPELRQHLRDLRDNVSEYEWLREIPEAVVNRATIDFDKARAKAFKKRAGFPRFHKRHSKASFYQRTDGFHTTKHGVKITGIKEPVRVKFRKFPDHALNTRVIWDGKYWYLSYAYETGTEPAKPRKHGDTLGIDLGIKNFAVVSDGTVFSNINYSKEVKKLEKRKRHLQRRLSKKLESNRQGARFVHTSNSNKLQRKVALLNRKLTNIRSTYINEVIKDILSARPKRIVIEDLNVRGMMKNRYLARSIANQKFAEFANKLSRKCEETGIELVKADRWFPSSKTCSGCGFRKQTLSLSERIYVCEHCGLVIDRDLNAALNLANYPSVAGKLSPGRIKPTLVA

SEQ ID NO: 14422 - protein, 236 aa, Streptomyces sp.
VVGVDTNADHLAAWRLDAHGNPVGAPLRFAYGLTGSSEHRDAQVRHALIRLLHWAKRHHLAIAIEDLDFTAETTREKHGRNKRFRTLISGMPVARLRARLVAMAAELGIPVIAVDPAYTSRWGTRHWHKPLTSKNRNTTRHDAAAVAIGRHALGHPVRRRTAPPPAHRSDEQGHRTIQAGPGALGREGNRPRLPGPRTRSVRAGRGANAVDQNAQHRSGRPAEHEPWQQDSLPLSP

SEQ ID NO: 14423 - protein, 412 aa, unknown
  TnpB Polypeptide
MTIVQQVEKHVIKKSHPCYSMFCEYTHLAKNLYNHANFLVRNEFVNTGKWLRNHALDKILRQDVEYPDYKNMPAAQSAQQTLKLLDDNWKSFFKSIRDWSKNKDKYTGRPKLPNYKPKDGRMVFILTNQQVRLKDDLLRFPQSFRGFTIKPRCVHLSNFKKINQIRIVPRNQVFCVEIVYSISINDGLLEDNGYYMSIDLGLDNLATIVTNTGLNPVIVNGKGLKSNNQYYNKKNAHYQKVAKQMNDKFYTNRLYRLTQKRNFKIEDSLHKISKFIVTSALSNDIHTIVIGNNKDWKRDISLGKRVNQSFVNIPHQKLIEKVIYKARNVGINVILTEESYTSGTSFLDEEAPNKEFYDKKRRIRRGLFVSNQGISINADVNAAYQIIKKVFPNVFTDGIEDVVFHPVRVDVM

SEQ ID NO: 14424 - protein, 383 aa, unknown
  TnpB Polypeptide
VGGEGLVYEEKEMTIRQKSYKFRLYPNDEQKQLFAKTFGCSRAIWNMMLADKIKHYEETKETLYNTPAQYKKDFPWLREVDSLALCNVQLNLQTAYKKFFRSGFGFPKFKKKSHRQSYKTNNNSNKGRIILENGFVKLPKVGWVRIKAHRQVSGVIKSATISMTPTGKYHISILCETEISPLPKTNSSIGVDLGISDFAILSTGEKITNPRFLSSLSKKLAREQKILSRRALVAKKEGRKLSDSKNYQKQRIKVAKIHDKIANQRKDFLHKLSTTLIKNHDVICNENLSSQNLMKNHKLAKVIGDVSWHEFVRMLEYKANWYEKKISKISRWCPSSQICSDCGFSSGKKPLSVREWTCTNCGSHHDRDINASINILNEGLRLL

SEQ ID NO: 14425 - protein, 374 aa, unknown
  TnpB Polypeptide
MLKTYRYRIYPSKAQISQLENQLELCRFVYNKTLATRKDAWEQRQAALGYYDTAPMLPTWKKEKPELKKVHSQVLQNVQMRVDLAYQAFFRRVKAGEDPGYPRFKGRGWYDSMTYPQYGNGATLDGNKLNLSKIGSVKVNLHRELCGTPKTVCLRRGAGNKWFVTFACECPDLVLPADQKAVGIDVGLQAFATLSNGAKIANPRFFRKDEKALAKAQRKLAKADKGTLARKKAKQVVGRIHERISNKRSDFAHQVSRQLVNHFSIICFEDLSVKAMMAHKTQVFGHKLNKSIADVAWSQLVQCATYKAESAGRRVVLVDPRNTSKRCSRCGSLVQKDLSVRVHHCPTCGLVLDRDHNAAINILALGLQRIGSVP

SEQ ID NO: 14426 - protein, 374 aa, unknown; identical to SEQ ID NO: 14425
  TnpB Polypeptide

SEQ ID NO: 14427 - protein, 423 aa, unknown
  TnpB Polypeptide
MVTKNERIKATLKDTKQRRKHMKCRIYMVKLDHSHLNQDTLTHLKLLFVEAKWLYNYCVGHPNVFSIDDKITTVSVKVKDCFEHRHLRYLSSHMRQCVITRTQQNIRSLARAKAKGHKVGRLKFKSYMNSIPLKQYSNTYRIINGNYVRIQGVPQKLRVNVLEQLPTNCECANATLLHQHGDYYLAITTYTPREHKPAMIVPEKSIGIDFGVKNQLTLSNGVRIRYKVPVKRRIKQSCKQLSRKQYHGKNWWKTLYKLLKAYAKTTNIKRDIRNKLVHFLHTNFQVICYQNENLRSWQRLWGRRMLSTSLGGIISMLEVKVQTPVEVDRFFPSTKTCSRCGHQRPMSLAERTYVCHHCGLVIDRDYNSSRVLEHEGHRILGRGPTEVTPAETNTSTLTLDYLNQMAYVEASMVVETGSLTALA

SEQ ID NO: 14428 - protein, 430 aa, Halonotius sp.
MAWDATRTVRVRLDVPDDRKSDLHATNQRFQFCANRTAEWAWRYPHDDCVTSKSEAEQAIYDELREKTDHLHANLVQKAIKRATKDIDNCVDRLADGERTSRPHYGTFSIVYDKRAATFYRDKVSLATVNGRVECEYDLPDDPGGTPHGEYLLNDDYSFSTSTVHYDSSADEFYLHAAMEKTVDADGPEKAEDSRVLGVDCNVDDHIAVTSTGRFVGNADLLNHERREFEKRCGDLQQTGTRSAHLTFQRIGDRFGRWSEDYLHRCSKAIVAEAQRHGCTHIAFEDLAQIRDRISDDKKFQQWAFRALQEQVENKAELAGIVVSKVEPAYTSQQCSQCGCTLDENRDGQAFACLDCSYAVNADYNAAKNIARKLALKLQRGQKSPAGGAFCQYALKSGTLIVNATDVASDQYRSAERESTDKPTSLLVGS

SEQ ID NO: 14429 - protein, 516 aa, Bacillus sp.
  misc_feature (209)..(212): Xaa can be any naturally occurring amino acid
  misc_feature (424)..(427): Xaa can be any naturally occurring amino acid
MTKENPSNYKTLQIWIKKGHRMYSYFQECCHNAKNMYNTTNFYIRQVYTGLTQEKELQPLQKEVLDHIHKNIGKMNDTQLLAYQKKLEKEKLKPKEEQKEIACNLFSEPNFEKPYVDYNFLDALFKAMIQNDYRALPTQCSQSIMKGLFQNWKSFFASLKDYKKNPNKYAGTPRIPKYIRSSEKEILYTNQDCIIKNGRFLKFPKTKLXXXXVELVIDVPSEQQIIEENARYMSIDLGIDNLATIVTRTGMKPVLVKGKHVKSINQYYNKMKSHFTSILRNGKQTNEGPFTSKRIEKLHQKRYLKIKDVFHKVSHHIVKLAQEEEVCKIVIGQNKSWKQETNMGKRNNQSFCHIPHSLLIQMITYKANAVGIQVVVTEESYTSKASFLDNDFIPTYGENDQNTTFSGKRIKRGIYRSANKTLIXXXXEESYTSKASFLDNDFIPTYGENDQNTTFSGKRIKRGIYRSANKTLMNADVNAAANILRKVIPNAWTNGIEGLGVKQLANVLTPLTLIVR

SEQ ID NO: 14430 - protein, 266 aa, Competibacteraceae sp.
MREALRFDGKPLSATLSREADRWFISIPVAIDRPEPVCESQATVGVDLGVSTAITLSTGEKIDSPKPLKKHLQRLRRRSRSHSRKQKGSANRRKSARKLAKFHARIAHIRQDWTHKTTTELPRRFAVIGIEDLNVRGMVANEKLARSINDIGFYEFRRQLEYKAARSGSTVVVVNRWFPSSKTCSICGVKAEKMPLSVRDWTCAHCGAEHDRDVNAALNIQREALATVSWAGSHACGEEGTGRSRKTPAKPASLKQEITHGLFVHG

SEQ ID NO: 14431 - protein, 518 aa, unknown
  TnpB Polypeptide
MLRRAYPVSFAFLTARKRRLIAEICRSYRAAVNHFIRVFWKNYKVASYTQALPPTRLSTGFLQDAFRQAEWLVKSAHKSAAALGAIPGRPYFSGKPILGFDGVAVERGAGSFDLVIRLSTFDKGHKVTLPTKATTPLRERLALEGSYLVQAVALDPDEPILWVASPPPAPKTAGDVTAVDVGANVLFADSRGGIFSENDDSFKEILDKIRRREKGSKGRRRARAERDNYIRWAIKQLPWEKIRVLVLEDLKGIKKGKKKAKRLRKLLGPWNQAEVYWLLANKAKDEGILQVFVEAYGNSITCPICGCRMKRQRQGSKFRCRNNECGFRGHADTVGARNAASKAKKRCWTPPMARCQPRPMPVEGAFKSHVKDMAWQRPVLIKKAAKAAALSLKTQERGRERALAAKAKKQRTESKLAGSRTATRGRSYGTVFNGAQPCEAPVAAVPLRTPSNVGDSFEPGRKVGLKAVAVVAGEITRSALSEGGRQVSAVKSTTAGASSTGSHGPFTSGKVTSLGPVT

SEQ ID NO: 14432 - protein, 377 aa, Cyanobacteria sp.
MKTLKFKLYQSKRNRHLKRSINAAGAIYNHCIALHKRYYRMWGKHLNCNKLQSHIAKLRKRKTFWQTVGSQAVQDICQRIEKAYQLFFKHHKKGVRPPGFKKVRRYKSFTIKQAGYKFLGGNRIKIGNRVYQYWNSRPIDGTVKTLTIKRTRLGELFMVVVVDGASESSFSEITVETSRIAGFDFGLKTFLTCSDGTKIESPQFLKQSLNAIKKASRQHSKKRKGSANRERARLNLVRKHENVVNRRSDWFWKLAHDLTDRFDVLCFETLNLKGMQRLWGRKISDLAFGEFLQILEWVAKKKDKQAIFIDRWYPSSKTCNHCGYVLKELDLSIREWRCPSCQSVNGRDENAALNIQRVGASTLKLGDVRQAMPAIAV

SEQ ID NO: 14433 - protein, 388 aa, unknown
  TnpB Polypeptide
MDRTVRLRLDPTVGQAAALADTARQFTDAFNLVCAYGWRAAEKNGVKLHHATYRDSKDAAPGLVSDLHIQARVKATEALKSALDRRRKGRPVSCPRSRACPPRYNAHTYRVDWAAGVVNLATMAGRQRIPFHLPAYAATYGGCSTATADLVRKRGHWYLYVVVSLPMPQVEPTEMVVGVDLGVTRAAVSSDNRFHGERCWRESEARDFRLRRKLQAKGTKSAKRHLKKLSGKTARRRRDHDHVVARRIVDGVPAGATIAVENLTHIRTRVRAKRSNGGQRRLHSWSFATLRGFIAYKAAERGIRVEGVDPRHTSQTCHRCAFQSRYNRRSQAEFWCRACGYRTNADRNASLNIAAKLRAGRGRTAAGGLPSTNLSRPTSVEAQAACFS

SEQ ID NO: 14434 - protein, 387 aa, unknown
  TnpB Polypeptide
MRKLRKSFKTEINPSEEQKIKIRKTIGTCRFIYNFYLAHNKELYNNGEKFMSSNKFRVWLNNEYLPQHPEYSWIKEAYSKAVTQAVNNGQTAFTRFFNHESAFPNFKKKGRSDVKMYFVKNNPKDCRCERHRINIPSLGWVRIKEKGYIPTTKDGYVIKSGSVSIKADRFYVSVLVEIPDNKITDDPNEGIGIDLGLKEFAIVSNGKTYKNINKSAKLKKLEKQLIREQRSLSRKYENLKKGESTQRANIQKQKLKVQKLHHKMDNIRTDYINKTIAEIVKTKPSYITIEDLNVKGMMKNRCLSKAVASQKFYEFRTRLKAKCDENGIELRVADRFYPSSKTCHHCGSVKKNLKLSDRIYRCECGYVADRDFNAALNLKDAKTYKIA

SEQ ID NO: 14435 - protein, 361 aa, unknown
  TnpB Polypeptide
MLLSKKTSIKVSREYANLIGHMCYAASKLWNVCNYERQHYKETGMEQYPDWYYQKKAHKEDLWYKQLPSQTAQEVCKLLDKAWKSFYALKRSGGIETPRPPRFKQESIPITYMQMGIVHERDTDRVRLSLPKALKKYMEETYQIHENFLYLENKIFRGMDQIKQLRIYPPEKGNCKIIVVYEIPDQEELPQNGHELSIDLGLHNLMTCYDSENGKTFILGRKYLELERYFHKEIASVTFLPLFPLALCGVDPLHACGTFRAVFGPVGTGGKQRPTYGALLRIQPVEQRRFQFLILRQYRRPKPPAQQGVGNRLDTDTFLPIVQGDTVSVDVVTALMHQPPHSAVLAVIHDGGRVRLILIHK

SEQ ID NO: 14436 - protein, 312 aa, Salinibacter sp.
VGVGIRLVANLTLRPIAFSCFHANPLPTCTEGCGFKKREKYTSFTLTQTGWKLLGGNRVRIQNHNYKFVKSRPIKGEIKTVTIKRDACGYLWICFSVEKKPSTPELPRTGNAVGLDFGLKDFLVTSDGEKIQAPELLKKSLEEVQDLHKKLSRKERGSNNRKEAKRRLAKKYRQIDNQRKDFHFKLARRLFSRYDVVCIEELNVGAMKELWGRKVSDLGFASFVKILEHVAQKEGKEVRKIDRWFPSSQTCSDCSHRYEDLSLEERTWTCEECGSLHDRDLNAARNVLERALSSAEAGVRPSGAAARDATSK

SEQ ID NO: 14437 - protein, 174 aa, Anaerolineae sp.
MAKLQRRIANRRLDCQHRMTTQIARTYRVIGVEDLNVAGMLRNHRLALSIADAGFGEIHHQLAYRSEGYGGMLVAMDRFCPSSRLCHVCGWINRDLTLADRTWTCDCGAGLDRDSNAALNIERQALKMVAGVGSRRPKTPGERMSDASAHSASKRENMAEERRPSKPCQFGAVW

SEQ ID NO: 14438 - protein, 487 aa, Rhodococcus sp.
MGRFEIPEGWVAQAYRFALDPTPAQQRALASHAGGARFAHNHMLALVTAVLDQRAAERSYGLTDADLTPSLGWSLPALRKTWNQRKSVYAPWWGANSKEAYNTGLDSLARGLDAWTTSRNGERVGKAVGFPRFKTARSRRSVRFTTGTLRVEPDRHHVSLPRVGRIKTHESTRKLARRIESESARILSATVSQDSSGRWHCSFQTLVAAKTRPAHASRSQCPVVGVDVGVKADSLLVVATPDGTEVQRIRAPKSLSAAQARLRVLQRKAARQHGPYDPAIRSRRRHSKRWAKTQARIGRSHARAAAIRRDVLHKATTTLAQQHRVVVVETLNATGMRAAGGAYKKGLNRALADAALAEVRRMLTYKAAWYGSAVVAADRFFPSSKTCSGCGGRKPNLTLAERTYVCAQCGVSIDRDRNAAINLARLGQTHMVGEQSSAGSGSVAGRGAIRETGPARAGQAGGREASTRHNPTRVDQTGTAVSQEATA

SEQ ID NO: 14439 - protein, 371 aa, unknown
  TnpB Polypeptide
MLLTYKFHHNRDFSQELEQAFEVAKFVVDPVVGFSRYSFPGGKFYKNNMIKKNVCRSSRVVKNFHLPSTISNQILKKYSNQKKIKNVHSVNLIVPAQGIKFFEETNSIWVSCLKLHLENMIPVNFTSINQMEIDDTYAYISVTVPEKPEMIPYENIIGVDRNTTGHIVVSANLTTGQVRKMGKKALHIHTKYRSIRTSLQKQGKYRKIQKMENRENRIVKDLNHKISRELVNMAHVQNAALVFEDLSGIRNTKKQNRSFKPSLHSWSFYQLQTFVEYKAKLLGVPFILVDPAYTSQDCSICGVRGQRNGKSFKCPACGHVNHADVNAAFNIALRQKSTIARIQTMMCTMGALIPHDDALLECGNRLEPHTL

SEQ ID NO: 14440 - protein, 390 aa, Streptomyces sp.
VATHVKRAFTYRFYPTDAQAAELSRTFGCVRKVYNMALAARTEAWARGERVNYNATSAMLTAWKKTGELAYLAEVSSVPLQQALRHLQGAFTNFFAKRAKYPRFKSRRKSRASAEYTRSAFTFRDGTLSLAKMPEPLDIVWSRPLPEGSTPTTVTVSRDAAGRWFVSMLCDDPSVVPLPATSTAVGIDVGLDHLLTLSTGEKIANPRHERQDRVRLAKAQRDLAKKAKGSNNRARARRKVARVHARIADRRRDLLHQLTTRLVRENQTLVVEDLTVRNMVKNHSLARAISDAAWREFRSLLEYKAAWYGRQVVVVDRFFPSSKLYSTCGTLQERMPLNVRTWTCACGTTHDRDVNAAVNLKAAGLAVSACGAGVRPQRRQPGGQSAMKQE

SEQ ID NO: 14441 - protein, 493 aa, Streptomyces sp.
VKRAFTYRFYPTDAQAAELSRTFGCVRKVYNMALAARTEAWARGERVNYNATSAMLTAWKKTGELAYLAEVSSVPLQQALRHLQGAFTNFFAKRAKYPRFKSRRKSRASAEYTRSAFTFRDGTLSLAKMPEPLDIVWSRPLPEGSTPTTVTVSRDAAGRWFVSMLCDDPSVVPLPATSTAVGIDVGLDHLLTLSTGEKIANPRHERQDRVRLAKAQRDLAKKAKGSNNRARARRKVARVHARIADRRRDLLHQLTTRLVRENQTLVVEDLTVRNMVKNHSLARAISDAAWREFRSLLEYKAAWYGRQVVVVDRFFPSSKLYSTCGTLQERMPLNVRTWTCACGTTHDRDVNAAVNLKAAGLAVSACGAGVRPQRRQPGGQSAMKQEVPPGRSGPRKRRTTVGRSGVPLPQQGGVVKLAIGTLCASSGAAAVPPATRTTCASSGCPSWCACWPGCWRWAARCSIRTRWSSCPSCRTRGWRSSSRWCCCRCSGGG

SEQ ID NO: 14442 - protein, 325 aa, unknown
  TnpB Polypeptide
LKKEYPFLETSDSTSLQVVNEFLNQAWKNFFNDKTGKVGKPHFHSRRYLKLSYTGKATVKIAGKRYLYLPKLGYIKTSKTDVLKDSKIKRYTVSLEPTGKYYVSLQVEVVRLNRFRRTNKKVGIDVGVTDLAILSNGLKYPSFDGSYYEKKAISWQQKYSRRRHFAQMLCLQDKQRKALCPRSLDSFFNWQKAQKTKASYQAKVAAQRKDYLHKLTTHLVKQYDVIAIEDLKVKNLKKNHHLAKSIVNASWGMFRQMLEYKCRWYGKQLVVVNPKNTSRICSNCGHNSGEKPLDIREWTCSKCNAHHDRDINAAINILNKAKSVL

SEQ ID NO: 14443 - protein, 384 aa, Bacteroidetes sp.
LLVNYKTEISPTQEQIRKINQTIGTCRYIYNFYLTIQKERYEHGEKFQSAMDFSKWLNNDYLPQHEELSWIKEVSSKSIKQSITNAYGAYQKFFKKQSRFPRYKKKGKSDVKMYFVKTDAKAIIYCERHRIKIPTLGWVQLKEKGYVPTTKSGLIIRSGTVSEKAGRYYVSVLVDVPQKEIERPTNQGIGIDLGIKDLAICSDKQVFANINKSKEVKRLEKKLKREQRSLSRMYENNKKGESTQKNIQKQKRKVQIIYHRLYNIRTDYINKTIAKIVKTKPSYITIEDLNISGMMKNKHLSKAISQQKLYEFRTKLIIKCHQNNIELRIVDRWFPSSKICNCCGKFKKDLKLSDRTYICDCGYVADRDYNASLNLRDCKDYQIV

SEQ ID NO: 14444 - protein, 578 aa, unknown
  TnpB Polypeptide
MTQLTEQFHLPDEYHDACDRLTALVQKHTHRLLDDEYWSEKHLNAISGHTGQSYTYIRDNDHDAFENVDEYVYSRFKRCVHHRVTHVLDAHNDEFQAFQFVTDTVAERKIRRLGWQRLRQRLFDKDSPYIEWRVLESVVEQLNTYYDTHGRFPETYTELVETPEPNGTLPYAPDKGDYHIHELTIENGGLRFVLNTPDSLSPESYHDWSKHELRFPAHSRFTEMLDTGDLKAPTLHSSEHGYTLDVPVSIPEQECETVSDRVLAVDLGVKKQATAVVLDSGDQTHEQTAAPEFLDHPAKAKLFRLKADAEGINDQLAELRRQGNAHTDRFDHLLSEFRQTRQKERRLREQIQHDVANQLVWLAAENGCETIVFESLGQIASPETGGAVGWSISSWARGELLDHVEYKTGLLGIDFTTENPWGTSRYCPRCGERGRTVNAPNDHEETRYGGHFHCPECGYECDRDVVGAVNVGRKHLSGTKMEGANPAEYSSTGNHASFPSSSEGARFTGVQPATDTQKQELASGRQTHLSQHCSSSLTATRRETATGGLHQTHGSHTGQQSPSGSITQYVLASTTECG

SEQ ID NO: 14445 - protein, 510 aa, unknown
  TnpB Polypeptide
MRAQTPSYVVSVKLHLPETVENYLEKSFHIANSAYNEALSFGLRRFEVMKQNPTYQELLEFRRELIQKSEKEQNKKLFKDQKKEIDKALTELHKAYSLTEYGLSGQLSKQRRKSGSVYKHLNSGELQVIAGQAYKTLEKVLFYQIKPHKVRFRSKFDLDVSFRNRVNSTGTRLEESDKTGIAYRLYLHKASTFIDIPVKAFNDYQQINLLRSERIKYVQIIRKTLRGKKVYYLQIICEGYPHTKTSKGDGTVGIDPGISTVAYATPIKVALVDLVPSMVNQKEKNIKSLNRRIERSRRVNNPDCYKEDGTIKKGSHFKQSSNRAQRLLTRRKNAYRSLSEERKKIQRQLINQLVSQASVIKIEELNVKGLQKRAKDLRINPKTNRPFSKKRFGKSIFRAAPSAFREALKTKAKQLGIEVVMISPKEVKPSQYNHISQTFEKKPLSTRIFDLSSEWTGLQRDLYSAFLIGHIEDGQYEQEQLEDDFPTFYTLMKDFLQQPVKTSRLAWYLS

SEQ ID NO: 14446 - protein, 394 aa, Methanosarcina sp.
MKAVKFKEYSLTKIIYFFKLYYSRMLKAYKYRVYPNKDQKRLIKVHFGACRFVYNWALEQKIKTYEQYNKSISRFDLQRILVHEVKPANEWLKEANSQSLLACLVNVESAFTRFFREKKGFPRFKSKKNPVQSYQMPQHYTVDFEKSLVKLPKIGEVKAILHRRFEGTLKTATISKTCTGKYYLSILVEDGKELPVKQEFSESTTVGIDVGIKDFAVLSTGEKVENPKYLKNSLIRLKVLQKRVSRKVKGSKNREKAKLLLSKLHEKISNQRNDFQHKLSSKLISENQAIALETLNKGMQKNHCLAQALIDSAWSSFVTKLEYKADWFGKTILRIGRFEPSSKLCSVCGYYNSNLTLDAREWECPDCKTKHDRDINAAINIKKFSLQDQNLIVI

SEQ ID NO: 14447 - protein, 311 aa, Methanosarcina sp.
LKSSNEWLGKVNSQSLQGMTKQVESAFTRFFREKNGFPKFKSKKNPIQSFPIPQHYSVNFENNTVKLPKIGEIKAVLHRKFEGELKTATVSRSCKGNYYISILVEDEIELPEKQEFYESTTVGIDVGIKDFAVLSTGEKIENPKYLKNSLKRLKVLQKRVSRKQKGSKNRAKAKKRLAVLHENISNQRKDFQNKLSFRLVSENQAIALETLNVKGMQKNHHLSQSIIDSAWSSFVTKLEYKAEWYGKTILRIGQFEPSSKVCHVCGYHNSDLALKDREWTCPDCKTVLDRDINAAINIKKFALIDQNLIGL

SEQ ID NO: 14448 - protein, 248 aa, Methanosarcina sp.
LSGFTRFFREKNGFPKFKSKKNPIQSFPIPQHYSVDFENNTVKLPKIEPIKAVLHRKFDGELKTATVSRSCKGNYYISILVEDGKGLPAKHPFIESTTIGIDVGIKDFAILSTGEKISNPKYLKNPLKRLKVLQKRVSRKQKGSKNRAKAKTGVAVLHEKISNQKHDFQNNLSFKLISENQAIALETLNVKGMVKNHHLSQAISDSSWSIFVTKLEYKATWFGKTILRIGQFEPSSKLCNVCGYHNSF

SEQ ID NO: 14449 - protein, 421 aa, Yimella sp.
MVSTTRAFVFRLRPATRQQVLLRAMLNDHRHLYNAALQERRDAWDTRTKRGITDPKDQFGKIGFAIQSAQLPAIRASDPDQARWSATSQQQTLRRLNKSFADFYRRCREGQTPGYPRFKPEKRWDSVEFRDGDGARWDSVPTGRDDSRRVYLQGVGHIKTSTHRPIRGTVATIRVKRQGDHRAHTRWVVIVTCNNVPLKVLPRTSRVIGIDMATGDNGLAYTSHGDRIDNLQPHKHAAQRLTRLQQQRSKTRRGSMPYRDLTRQLARAHARIARQRYDHHHQVAARLVASYDIICIEGLPVASMTRRAKAKPDPDAPGAFLPNGARAKAGLNRSIRDAGWGQFIAILKDKAACAGRQVIVVNPAYTSQTCVQCQRTDPASRSGKVFYCTGCGHYDDADINAAQTILCVGTGLVPEQPTRAA

SEQ ID NO: 14450 - protein, 385 aa, Streptomyces sp.
VKLVVQVKLMPEAEQVAALLATLRTVNEAANWVSAVAFEQGVPREYELRKHTYAELKSRGLGAQAAQHTIKKVRDAYTTLKGNIKAGNLGKPGLKRRKKAESKPIAFRSEAAQPYDDRCLSWQYDAQTVSIWTTAGRIRGMRFICSADGLRMLRQHRQGESDLMERNGVFYLIATCEVPEEKSYEPDGFIGVDLGIVNIATTSTGYQAAGRDLNRHRKRHVDLRTKLQRKGTKSAKRLLKKRNRRERRHVSNTNHIIAKTIVTEAERTSAGIALEDLGGIRQRVRLRKPQRVTLHSWAFAQLGESIAYKARRAGVPVVHVNPAYTSQMCCECGHVDKKNRVDQDLFICRNCGVVAHADRNASHNIAQRGAVVWNAGRESRVPATP

SEQ ID NO: 14451 - protein, 184 aa, Okeania sp.
MKYLKQRRMDALRYLSNAWKRCFSKVSGQPKFKKKGRDDSFTLDGSISVGLNHIKLPRIGWIKTYEVLPDNVTPKSVTISRVSDRWFMSFKIEKKPQVTEKSVDVVGVDLGVKSLATLSTGKVFEGAKSYRKFEAKLSRLQYLNRYKVKFSNNWKKAQLRIAQLHNRIADIRKDTLHKRAYLFG

SEQ ID NO: 14452 - protein, 369 aa, unknown
  TnpB Polypeptide
MKQVIVIKLEPSQEQYQALLKTVEAFNRGCQYAADIAYEKRLANKIALQPFVYGTLRSEFGLSSQMAIRAIAKAVEAYKRDRRIHVRFDERGAMVFDPRIMSFKGLTQVSLMCLDGRELVPMRYGAYQAARLDRAKGQADLILKGGTFYLYVTIDLPSAPPIESTDVLGVDLGIAQLAVDSDGEAHTGAGIKQCRRRFQRLRQGLQSCGSKSAKRHLKRIRQKEGRYQRWVNHNISRHLVDKALVGQKAIAIEELSFINQRVTVRKTQRYERLSWAFHQLRQFLTYKCEAAGVSLLVIDPRNTSRTCLACGHCAKENRRSQSEFLCIECGYQDNADFVGASNIRRKGLEEGLEARAIVTKPMDALSLAI

SEQ ID NO: 14453 - protein, 542 aa, unknown
  TnpB Polypeptide
MPGRVFHVAPTALAAVPPDRQFRTVGEAAQAAAPGDTVLIHRESRQGAVDFRRQGNVFLSAEGHLETLRESPSIALKRQTSCGIIFLAMNIQRTITIRLPDDQDLRDTLARFQALQNQLSPLCYNGGKAVGALQLQREHYHAVKGVLSSQMTIMAMRLVSGAYVAAKKGHQRRLKAEARRKAKYERKGWDYRPRIIKEPGVCQFERLAAMFLVGSRGRDASFLKNNTVSLWTTGGRKHLAYTVPAAFQETLAQASEVDSVTVIERHGKLLGRVVLTLEVPEPKAVHPIGVDLNETNAVVAVDPDGQTLFISGRHIKVRNKRTRKTRKRLQGRLASRKAQKKDSRSLRRLLKRQGRRNSNRTRTFAQTAARRLCDWAAAESVLVFEALAVPQPAKETVGAKDKAKGKSLRRRLSAWQYGLIRQCVQNRAERVGLAVAEVDPSYTSQNCSRCGLRGGRKRHKFECPHCGFLEHADINAACNIRDRFTVLRDGHSAVRQDTHFAVPRHGGPPSIGPVPHCGTLEALESAPGVEDEGKPSASADGN

SEQ ID NO: 14454 - protein, 318 aa, unknown
  TnpB Polypeptide
MSQRKGKSKEVHMAKAITTIRQSLNYQSQHADYLAANHALFNHVVAFYFAVIQAHENVLDLPTKEALTALETLTHATSKNRAPVMPLAEIAQDVPAMFRRAAINAALGSARSFYTSLKKWRTRREHAEAKKARKGKRNKCAERPPVPPRTWNKPVPFYAGQWKERTGSSILLKVWTGSCWSWIKVRSFGRALPDGVEMGSPALVRRGKRWWLHTPLEKKFSSPATIEQQVTTNAHTRICAVDLNLDTHLAVCTVQTVEGTILATRFIGHGRAISGFRKRQLGRIARNRSKTGIMQRTNRTMLTSGARSAAWTSRLPIW

SEQ ID NO: 14455 - protein, 179 aa, Blautia sp.
LYRDSNGKEPAYPKYYRNAEKKLAREQRRLSKMQKGSSNRNKQRIKVAKLHEKVSNQRKDFLHKQSRQIANAYDCVCIEDLDMKAMSQSLNFGKSVSDNGWGMFTTFLKYKLEKQGKKLVKVDRFFASSQTCSVCGYKNAKTKNLALREWDCPQCGTHHDRDVNAAINIRNEGMRLVIG

SEQ ID NO: 14456 - protein, 413 aa, Natronomonas sp.
MHYAYKYRLTPSDSHREELDRHRDICRQLYNHALYRLNEYQENHGELPSMTTLRSELPDLKKWWNDLSDVHSKVLQTVVERLFDNLNSLSALKENGYDVGQLKWKPPREFRSFTYSQSGFKLDKKGGQTVLSLSKLGDIPIRSHRAISDNATVKQVTVKKEPTGEWFATFGVEMNREPPEPPENPERCVGIDIGILTYAHDTDGTAVGSLNLSTERERLEREQQSLSRKKHGSNNYEKQRRRVAECHADIRRKRRDFLHKLSNYYAREYDLVAVEDLNVKGMIESPSNSRNTASAAWRTFLSLLEYKCEREGTHFIAVDPRGTTKECAACGVSTEKPLWVREHSCPACGFEADRDANAAWNILSRGLNDVGVGHSESMPVETALPVDTSVSAKRVIEAGSPTLKERTASAVSE

SEQ ID NO: 14457 - protein, 372 aa, unknown
  TnpB Polypeptide
MKQTMLVKLQPSESQAASLLHTMERFNAACDAIAVTALREKTASKVALQKFVYHDIRDAFGLSSQLTIRAIAKTCEAYKRDKSIQPTFKSHGAVVYDERVMSWKDADRVSLLALDGRVIVPVRFGASAEARCVRMRGQADLLYRDGTFYLACTVDAPEADPIEPEGWMGVDLGIVQIATSSDGAAFLGAQLNGLRIRHERLRKHLQAKGTQSAKRLLKKRSRKQSRFQRCENHRIAKSLVAVAQDTRRGIALEELGGITGRVTVKRSQRSRHGNWGFFQLRQFVTYKAAVAGVSMVFVNPRDASRACPCCGCISTHNRPSQSSFVCTRRGYSVPADHNAACNIARRAAFNLPYAEGDFCPLAAIPRLSPWGS

SEQ ID NO: 14458 - protein, 383 aa, unknown
  TnpB Polypeptide
MLETCRLVYNSLVNDRKYQYETAQVSVGRYDQQAYLPAWKESHAELAEVHSQVLQDVVHRVSLAFDAFFDRVERGDEKIKRKIKRTPGFPRIKGSGQYDSITYTQKASFKVGASSVHLSKIGQVKAKMHRSPWGAVKNCTVRRINGKWFASLCQEIEPELLPPSEEAVGIDVGLKTFAALSDGTFIENPRFFREGEKALAKAQHRLSKQKRGSKAREKARKVVSRIHERIRNRRHDFCHQNARRIVNRFGVIVIEKLSVRNMMASPTPKSDPENEGQFLPNGASAKAGLNKSIADAAWSQFRSILMSKAESAGREVLAVNPTYTSQDCSGCGYRPDGLEGRTKKKLSDRWHLCPMCGLSLDRDTNAAVNILALGQQSIATVVA

SEQ ID NO: 14459 - protein, 227 aa, Burkholderia sp.
MILVYRYRVKSLNGLLNKQSRAVNYVWNFCNDTQKHALKWNKRWPTGFDLNVLTTGSSRELGIHSGTINATCEPYGKSRSQHRRPYLRYRGRKSLGWVLLKGRDLKREGDAFRFAGNTFRVFNSRALPARMAKSVYDASWSSFRDKLRYKAMAHGATFEEVDESGSTQSCSSCGSKDSTTRPKGIAGLRMREWACDGCGVVHDRDINAALNILRCGRASPGVGITCL

SEQ ID NO: 14460 - protein, 364 aa, unknown
  TnpB Polypeptide
MAIRTVKCRLEARDDVAAALDATLEAFAAACNDVLAVALGQEDRRAFTLHRLCYRDVKARHSLTADYACRACARVAASFGKGKRPPLTFAPTSADLNKGLIRFNEYDEAVSISTVRGRLKLRLLIGNYQRSLLAGQKPKAGTLTKIGTKYYVNLCVERQSPEPGGSVPLGLDLGINRICTDSDGTVKSGRRLNRRRSRYARTKASLQRKGTKGAKRVLKRLSGREARFQKDANHCLTKQIVAKAATEDRYVCIEDLTGIRQRTNRKGRRMRRMMGRWAFYQFRVFLEYKAADAGVSVVAIDPARTSKTCSACGEIGSRRRHLFSCKSCGVFLDSDINGARNIALRGAQVNRPEVAEAFKVQAAS

SEQ ID NO: 14461 - protein, 379 aa, unknown
  TnpB Polypeptide
MKQITVTAKIQIVVNQTDKVLLDETMSVYRDACNYVSDYVFRTHNLKQFSLNKTLYTELRVRFGLKSQMAQSVLKMVIARYKTILENQNEWIQPTFRKPQYDLVWNRDYSLTQNCFSVNTLNGRVKLPYFTEGMSKYFDHTIYKFGTAKLTNKHSKYYLHIPVTYDVEESNISDICNVVGIDRGINFVVATYDSKHKSGFVSGKTIKQKRANYSKLRKQLQMRQTPSSRRRLKAIGHRENRWMQDVNHCVSKALVENNPKHTLFVLEDLSGIRNATERVSVKDRYVSVSWSFYDLEQKLIYKAKQNQSTVIKVNPAYTSQCCPICGHTEKANRNKKIHLFTCKSCGYKSNDDRIGAMNLYRMGIDYLADSQVHNTVTAK

SEQ ID NO: 14462 - protein, 430 aa, unknown
  TnpB Polypeptide
MAWEVTRTVKVRLEVPDDRKSDLHATNNKFQYCANRTAQWAWNYPHNDCVTSKSEAENAIYHDLREETNNLHSNLVQKAIKRATDDIDNCVDRLADGDSTSCPHYDTFSIAYDKRAATYYRDKVSLATVDGRVECTYDLPENPVNTPHGEYLLNDDWSFATSTVHYDSETDEFYLHAMMERQLNVSSPEKAEDSNVLGVDCNVDDHIAVTSTGAYIGNADYLNHQRREFEKRRASLQQTGTRSAHQTFHRIGSRFGRWSEDYLHRCSKAIVEEARRHGCTHIAFEDLDQIRERISDGKKFQQWAFGELQRQVETKAELAGIVVETVEPSYTSQQCSRCGCTLTQNRDGQQFECLDCSYAVNADYNAAKNVARKLAVKLRQGQKSPAGGASCQYALKSGMMTVTATEVAADTFVSVERESTDKPTPLGVGS

SEQ ID NO: 14463 - protein, 441 aa, Roseburia sp.
MQIVSSYGVEVKKQNIPIRHTLDIFRKAVSYLIGVYAENWEELSKIGNTQKRFNEAEHLVHETKKNRARFAFDRHFPKMPSYLRRAAIQHALGSISSYQTRLSLWEKGGLSGKPKLTCENHAMPVFYRDVMYKEAENGEDVAHLKLFDGRDWKWFPVKLLHTDMEYLRKKWSGEKASAPTLEKKHHKYFLRFSYTEETILSKTVVKEQVVCSVDLGMNTDAVCSIMCADGTILGRKFINFSSDKDQLYHVLGRIRRFQREHCSRQVQSRWAYAKRLNMELSRKIAVEITKYARENQANVIVFEYLEMQGKISGKKKQKLHLWRKQDIQKLCEHQAHRCGIHISRVSARNTSRLAYDGSGKVDRSTGNHSLCTFTTGKCYHCDLSASYNIGARYFIRELLKPLPETERSSLEAKVPSVKRRTSCVYADLRKLSVEINNSKAV

SEQ ID NO: 14464 - protein, 393 aa, unknown
  TnpB Polypeptide
VTDPLDVPVPPSTCVRTLRFKVRSEAYPWLNRAAREVNVAWNWANEVSYKAARPYSGAGKWLSGFDLCHLSSGATHYFDYIGADTLQRIVTEYAAKRNQAKKPKLRWRANTGPRRALGWIPVKSASLRRRGRYLRFCGKTVRVFERERFAEITRWGCGCFAEDAIGDWYLCLPCEIEATTPAAILSEVGIDLGLKDIAVTSEGERLCAADFFRGLEQKIAEAQRRAHRRQAQRLHRKAKRRRHNALHQFSRRIINRYKYIAIGDVSSQALRKTGKAKAVLDSGWGMLKSFLQYKGQQSGRRVDIVSERNTSRTCSLCGSLTGPKGVNGLRVRSWMCSGCGATHDRDVNAARNILAVGRSPPSVVGNEPAPQLAPPSRASRPRKARIARDAAAA

SEQ ID NO: 14465 - protein, 393 aa, unknown; identical to SEQ ID NO: 14464
  TnpB Polypeptide

SEQ ID NO: 14466 - protein, 401 aa, unknown
  TnpB Polypeptide
MQISHKFRLYPNKETQSKLLDMLELHRQTYNTLLGELNEQKEIDKSQIQGIIPDMKICEPKFKNLYSKAMQYECYRLFSNLRALAKSKGKRKVGRLRFKGKGWFKTFTYNQLGFKLIQTGKRLQTLHLSKIGEIRIRCHRNIKGNIKQITIKHTQTGKWFASIIEERKEEIKQQPIKKVVGIDLGLTDIIYDSDNNKITNPRHLKKRAEKLAHLQRRLAKKKKGSSNRLKARIRLARQYEKLVNSRDDFLHKVSRYYIDNYDAIGMEDMPIPNMVHNHKLSKSILDASWGKLRQMMTYKAEWAGKLYVPVNYKGTTQRCSQCGEIVPKELWDREHKCSNCGFEAPRDYNSSLEIKRLCLEKIRQELPESTLVEMEALPLMRQLPSEKQEAITSTPKVLGYV

SEQ ID NO: 14467 - protein, 263 aa, Moorea sp.
LIHSGIAKIGAAIICYAEKTKTYYLLVSLELELPELKPEAIKRVVGVDVGQRYLAVTFDTNKTAGFFSGKSVIHRANRYYKTKQTLQRKGTRSATRRLIVLSKRERRFNADINHCIAKRVVIFGSLIGLENITHNPDQIKLIQLGHEPSRKLSKPHINKRIWEFTKLHYFIDYKAVLGGALAIRVDADFTSQSCPRCGHTSKANRPNNGLDFDCMACGYKLHADLVGAKNIALRTLLLRQDFERTGRLSTVPDVSQDETKTLD

SEQ ID NO: 14468 - protein, 427 aa, Escherichia sp.
MHQENTMLPRRISVSLFIDQSIIWPVKRLQAFKFQLRPGGQQEREMRRFAGACRFVFNHALALQNENHEAGNKYIPYGKMASWLVEWKNATETQWLKDSPSQPLQQSLKDLERAYKNFFRKRAAFPRFKKRGQNDAFRYPQGVKLDQENSRIFLPKLGWMRYRNSRQVTGVVKNVTVSQSCGKWYISIQTESEVSTPVHPSASMVGLDAGVAKLATLSDGTVFEPVNSFQKNQKTLARLQRQLSRKVKFSNNWQKQKRKIQRLHSRIAYIRRDYLHKVTTTVSKNHAMIVIEDLKVSNMSKSAAGTVSQPGCNVRAKSGLNRSILDQGWYKMRRQLAYKQLWRGGQVLAVPPAYTSQRCACCGHTAKENRLSQSKFRCQVCGYTANADVNGARNILAAGHAVLACGGMVQSGRPLKQEPTEMIQATA

SEQ ID NO: 14469 - protein, 451 aa, unknown
  TnpB Polypeptide
MSQKVRIDGVKHVGASVFLGVDHCGNPRWTRNPERIMVWLCDGWRARFNQRREQRRTHNIPVKDEAGGIIDWVKEPLGGPDVAELLPDKEARLQYSWMAGIPAPILSSTDRIESVEWFAGLKRRKAIGGRIPGFKSRHRGLGFVCWRNASKTGNAIFRKTGRKSGVVVITGMNPTRWRRPGEKLHWRIVIHVRVSQPIRPYTSVHVDWTHRSLVFVNMPLPLPRTGNDIIGLDRGCVHTLVSSDGIFMDMPKPSKAELKRLRYLQRRMSRQDRVNEARGGRTAKFASKRRQRTLSEFNTLQGRIVRRRNDWIEKTTTNLAKANILIAMEDLDVKAMTRRPKPKPDPDNPGRYLHNGAKAKAGLNRSILSNNWSRLMKRLKDKMDANGGKLVIVPAAYTSQACHKCGHVAKENRESQAVFHCVECGYEANADVNAAMNILGRALIQTGGGTA

SEQ ID NO: 14470 - protein, 394 aa, Streptomyces sp.
VRRAFKYRFYPTDVQAAELARTFGCARKVYNLALAARTEAWMLRQERVNYKTTSAMLTAWKKTEELAYLNDVSSVPLQQALRHLQAAFTNFFGKRAKYPRFKSRKKSRKSAEYTRSAFRFGDGKLTLAKMAEPLDVVWSRPLPEGAQPSTVTEAQDAAGRWFVSLLVEDQTVEPLAAIGRAVGVDAGLDHLLTLSSGEKIANPRHERRDRARLAKAQRELARKAKGDGANRAKSRGKVAKVYARIADRRRDKLHKLTTRLVRENQTIVIEDLTVVNLLKNGHLARAISDAAWSEFRSMLEYKARWYGREVIAVDRWFPSSKLCSACGSLRVKMPLHVRTWTCDCGTTHDRDVNAARNILAAGLAVSACGAGVRPQRNTPGGQSATKQEVLRREP

SEQ ID NO: 14471 - protein, 400 aa, unknown
  TnpB Polypeptide
MSWIATKLYNTALWGAKETWDYTGKIPSGFDLQKVVLASHFHSFVPAHTYQHCAHQVGNAFKSWFKLRKTDRTARPPGFRNKEELSSFMVDAFKIIDTNTILLTPTSELKQEISYPYKKLSLRLHWNTAFPENGRIKQIEIVPKKGYFELHAKILLLEPEWKQDGQVMAIDLGMRNPIVSMDEYGNVDIYKGGKILSNLRYWNKEKARVQSEVMGRTKGKKKSSKALRKMSKHGSQQIKHSIHSMTNKVVELCVQRNVREVVVGDLTGIKKNKDGTGKNWNKKSNQNWQQFPIQQVVAQLDYKLARHSILLKKQDERGTSKGRCSQCGCTDRSKLHRAHRGMFLCLNCNTIRNADVNGVGNQLVRYLRLDGLPFISSSGCLAQPSVYRWDGHLWKGVHEE

SEQ ID NO: 14472 - protein, 379 aa, unknown
  TnpB Polypeptide
LILTYKIRHGRDFSDELRKAERVANFALKTRTQSSHDVKHLGLKSMISNQILRKYSRNRVLKEVHSVKLTIPSQGVRVLRELRTLIIPCLGLTLNYQFRDDFEKVNQVEVGDEYAYVSVAVPEEKPYDPRGWIGVDRNTTGHVAVVADPETGKVIKLGKSAKHIHDKYREIRRSLQSHWKYRKVKEIRDRESRVVRDLNNRVSRRIVDTAKASGKGIKLELLEGIRKTTRQARSFKYALHSWSFYQLEKMIEYKAKLLGVPVAYIDPAYTSQTCSRCGQMGDRDGKSFRCPNCGHIENADVNASFNIAVRQIGVSRSAGDRDPSEGSTDTPRADMAENDANRRTPRASAVGVCQPLPSRRPALMMCPATEPRIACTKTM

SEQ ID NO: 14473 - protein, 256 aa, unknown
  TnpB Polypeptide
MEDASKRVDGAKVLRMSVSRRAGRWQASLTVERADDPAPKPPKGGSVGIDLGVKELATLSDGTVIRNPHALKSNLTRLRKAQRSLSRKRKGSNRRRKARANVARLHARVANLRRDLLDKTTAMLAHTYADISIEDLNVAGMVKNHGLAQSIQDAAFAEFRRQLTYKTARTGTRLHVIDRWHPSSKTCSNCGTVKTKLSLSERVYHCDKCGLSIDRDLNAAINIQVAGSAPGDDKRAWRKRKTDPSQGRDNASSGEA

SEQ ID NO: 14474 - protein, 413 aa, unknown
  TnpB Polypeptide
MEYSHRYHAYPTDEVAERLEHHLDVHRQLYNHVRWDYENSPEDDKPSEYDQNNKLPEWKRKWPVFSELHSKAAQATVARFHRNLSTLRKKKETGHKIGRLKRQAPTDYRSVTYNQSGFDLDEKRGHDKYVYVRFSKIGWVKLRYSRPIPDHVTIKEVTFKKETTGEWFVSFGLETDDASLPEKPEVDSLDANNSVGIDLGILNYIHTSDGKTVDWLALEHDYERLRREQRALSRKEKGSNNWEKQRVEVAKVKRHIKRKVLDYQHKITTWLVTEYDAVFVENLNVKSMLQSDGNARNKQDAAWRQFITLLEYKATLYGCHVVQVEPEGTTKECARCGVETPKPIWVREHSCPSCGFKTDRDANAAINVLKRGFAELGLGWPEDTPVETVTATDTADFQRVSASHVIETGSLPS

SEQ ID NO: 14475 - protein, 385 aa, unknown
  TnpB Polypeptide
MAECIYTVNCKMAPTQEQMSEIEDTLKAFADACMWINFNVDARIRNRVIIHHFAYKDVRAKFGLSANLAVNAITRVAENRKTAHLNGSDVVEFKPTSVSYDARIFAFRELDEMVSLTLLRSRQRIKLVLSDYQRDRLRGSRPTSATLCKKGREYYINIQIKSEAPESIHTNKVLGVDLGITDIAMTSEGQSFGGEAIKDIKNHYASVRQSVQQAVSKGTRSCRRRGRQLLNRLSGKESRYQKQINHEISKAIISRAQKMPAMVALEDLTGIRVGVNQKAGKDQRRKINGWAFYQLREFLTYKALAVGVPLVLVDPAYTSQTCHKCGRHGIRKGKKFSCPHCGWSGDADFNGANMIALIGLHVGQPRGPMLPMFQAASGLLKARSI

SEQ ID NO: 14476 - protein, 353 aa, unknown
  TnpB Polypeptide
LQSQIDECRWLYNKLLEERKDAWEKEQKSLSYFKQCQRITQLKKERLSLNNVYSQVLQNVADRLDKAFRAFFGRVKAGETPGYPRFKGYDRYDSFTYTQFGFSLNSSLKLAKVGDVKIKLHRQPLGEVGTCTIRRQNNKWYACFSIEYEPEPLPPSDKAVGFDVGLESFATLSSGEKIDNPRFFRTDEKSLAKAQRKLSKLEKGTPERRRIKAVVSRIHERIANRRHDFAHQEARKLVNEFGIIAVEKLQIKEMMDGNWRSMNRSIGDVAWAQFRQCIKYKAEDAGRMYIEVNPRGTTQRCSRCQSTVPKDLSVRIHSCPICGLVLDRDLNSSFNILALGLQSLGKIPRSPAL

SEQ ID NO: 14477 - protein, 484 aa, Escherichia sp.
  misc_feature (365)..(417): Xaa can be any naturally occurring amino acid
VKRLQAFKFQLRPGGQQEHEMRRFAGACRFVFNRALALQNENHEAGNKYIPYGKMASWLVEWKNATETQWLKDAPSQPLQQSLKDLERAYKNFFQKRAAFPRFKKRGQNDAFRYPQGVKLYQENSRIFLPKLGWMRYRNSRQVTGVVKNVTVSQSCGKWYISIQTESEVSTPVHPSASMVGLDAGVAKLATLSDGTVFEPVNSFQKKQKTLARLQRQLSRKVKFSNNWQKQKRKIQRLHSRIANIRRDYLHKVTTTVSKKHAMIVIEDLKVSNMSKSAAGTVSQPGRNVRAKSGLNRSVLDQGWYEMRRQLEYKQLWRGGQVLAVPPAYTSQRCACCGHTAKENRLSQSQFRCQVCGYTANADVXXXXXXXXXXXXXXXXXXXXXXXXXXXXXXXXXXXXXXXXXXXXXXXXXXXXXCCGHTAKENRLSQSQFRCQVCGYTANADVNGARNILAAGHAVLACGGMVQSGRPLKQEPTEMIQATA

SEQ ID NO: 14478 - protein, 183 aa, unknown
  TnpB Polypeptide
VTIDAAGRWFVSLRVEENVETLPPRTEAVGLDAGITSLVTLSTGEKIANPKTFDKHYRRLRNAQKKLSRKEKASRNREKARRKVAKIHNIDHLHKVTTRLVRENQTIVVEDLSVQNMVKNRKLARAISDCGWGELVRQLEYKCRWYGRTLVKIDRYYPSSKRCSREDAPFSTGVGMSRVWHSP

SEQ ID NO: 14479 - protein, 475 aa, unknown
  TnpB Polypeptide
LKTLVYNIRVNNNDKILLKQLQHEYSIDFRKLYNNLDLSSDKNYLNNLNTKSIKAKEYLVKEVIAFKERYDISKNKIKDKIDELEKLKKLNDKKYNQLVKLKKSYKSKVCFGGRFNLKRRTKNLISSNEWKEHRLYPLNFYGETNSKGNRFFDFKDLSNGNILFKLESTKIKIPISISNKKHKSELIKLQELCLNKSISLNVKLTYNKIYLTFNESILNNTDFNYKLHQKNKPKGLNVDDTKLYWLNKHQEHETRLKEDRLDRYLAIDVNPNEIGFVISDNKLNIIDKGCYKIDRKITENKRKYEYSQIIKDLFNKIKHYKVSYFIIEDLKNLNKDNYGNKISNKKNKLEFKKNYIFSLINRRCNENGIILRKINPSYSSFIGNLMYNEYDPIASSIEICRRGIEYYNKGFKIIPEFCLNSIITDKIDDFVDIKQYINFKELFKVIRNKSYRRKDISFSSQKFTQSDKSHVRLCF

SEQ ID NO: 14480 - protein, 427 aa, unknown
  TnpB Polypeptide
MEPENIRYCRKIRIYPNKIQKDLFQKCFGCSRYIYNKGVEKLKNEWNSLFEKAKKTGCLECQNTLYNKLYCEKHYKKSKPKINFPLSLSKLRPLLMKSDKELSDQEKWMKDIPYDTRQLIIKSLIGNIKSAISNLKNGHIQRFSMNYKTKKDDKQVFFVNKHAVQQLNIFKRRLKKKPKIRTRRRYKNYHQAKIESDCIILKDTYNWYILIPKKKIHSYKKAPYTCCSLDPGVRCFQTMYSPDGIIGKFGDGLSTEINKINKRIDLLKSIQTKIKKFKTKRNLHFRCFQLRTKIKNILNDFQWKLSNYLVKNFNVIVLPTFETQKMVSRKLLSKKRKKRRLSKKTNRMMINLSHYKFQEKMKYQCKKYKRKLLIVNESYTSKTCTSCGKLKNDLGSAKMYNCTNCGLCLDRDVNGARNIYIKTLCSL

SEQ ID NO: 14481 - protein, 221 aa, unknown
  TnpB Polypeptide
MRGDGKAKLRKKLHHWNTKKLLQKIKRVAMLKGVEVVEVNPAYTSVIGMLKYAPQLSVDKDVAGAYVIGRRALGFKEDMPENYEKLLKDKAYLEFALKRYEEREKELTELIEKETNEYKRNALESELRSVENAKELLTNLIQSLQSESSSCEGANGRNPERGETKKVSQVAWQVLKVALLFPILGRVLPRDLSPLKPVLVEGAWDRVRSRLVPLEAGGRSR

SEQ ID NO: 14482 - protein, 394 aa, Clostridium sp.
MLRGLKTEISPTEEQKQIIHQSIGICRYLYNGYLANNKELYQQYKDGLIDKKQAFMSANDFDKYINNKVKIQNEFKWIDNCGSKARKKSICNCETAYKRFLSGKSGFPKFKKKKNEDVKAYFPKNNKTDWTIERHRVKIPTLKWVRLKEKGYIPVNSIVKSGTVSYKAGRYYVSVLVELPDYNDYSKSTNEGIGIDLGIKDLAVCSNGEAYKNVNKTKKVKKLEKSLKRQQRRLSRKYESLKKNKRKGGTAARQNIQKQIVKVQKLHQKLSNIRQDYTRKIISEIVKQKPSYITVEDLNIRGMMKNRHLSKAVAQQNLSEFRKILTYKCNWLNIELRIVDRFYPSSKTCHKCGYVNKDLKLSDRVYICPECGYAENRDYNASLNLKDCEIYKIA

SEQ ID NO: 14483 - protein, 518 aa, Thermoanaerobaculia sp.
MLTNTSATSQAVARPGAATPPHRAKRSASAARGQQIHSSRAEPFERRRATLRLYASATQEKQLLTFLRLHCELYNAALEERRDAWRAERKTISHYDQTGQLPLIKKLRPDLVALGAQALEGTLKRVDLAYQAFFRRVRAGHGPAGFPRFRAWRDFPGWTYRQSGWRWTPREDGKHGRLELANVGSIRVRGGARTLGRMKTCTILRRAGKWYASIVLECHPQRRGGSEALGLDWGVAHFATLSDGTTIDNPRLLERDLEKLAAAQQIVARKKKGSRRRAKAKLAVHRLHEKIRNRRAHFLHQVSADVVARASLLATEKLATRNMTRSAAGTVEEPGSDVAQKAGLNRAILDTAPATFLALLRYKAAEAGVPLVEVDTKTVKPSQTCPACGVVAKKKLSERVHRCSCGVELPRDQAAALVCLQAALTAFDLTDKTQAPGEGAARAARPSRSRAQCGTASRAFTLHARRAGTRPPASLRSAGGRNRSETTACGGQGPGEEVFGGEIVDSPPPPACVSAGGD

SEQ ID NO: 14484 - protein, 419 aa, unknown
  TnpB Polypeptide
MLVAWKQNLKHLSKDQFNLLRQMCHLSKNVYNESLYNIRQHYFAEGSYLRYEANYPIEKLSENYKLLGANLAQQTMKCVDSAFRSFFALLKLVEKKQYSRDAVRIPHYLPKDGLYPIHLPESFMKEDGTMTIPMSPLLKKQTDTRIVLHFPPQIRNKKVHQIHIIPKQGGKWFEARYLFDDDNPTVSSADETKALSIDLGVSNFATCATSDGNAFIIDGRRLKSQNQWYNKYCARLSSIKDKQKISQDTNLISRITEKRNRQIQNFIYCSAKYVVSYCLNNDIRNVVIGYNDGFQDSPNLGRVGNQQFTMLPYGKFKQRLKFLCQRHELNYIEQEESYTSKASFFDKDEIPVWNPLNPKQGSFTGKRIKRGLYRRSNGQILNADVNGALNILRKSKLNQINHLEQCRGEVITPLRIRLS

SEQ ID NO: 14485 - protein, 425 aa, Hyella sp.
MILNYRYRIYPDAEQVETLNEWLETCRVSYNYALRELKDWIASRKCPIDRCSLESEYIMAAGYPFPSYHQQQNNLPKAKKKFPRLKSVPSQVLQINIRRLHDSWDSFRVRGYGFPRYKKYGQMKSILFPQFKSNPLTGSLRAPSVGQVKIPKLGKVKINIHRPIPDGFIVKQIRVVKKAMGWFAVVAIESDIELPLPMPHGHAIGVDVGLLSYVATSDGSTEKRPKFFKTAYSRLKVLQKRLSKKKKRGENYEKARIKVAKQHNHIAFKRTDYQFKLAHKLCDMADTIYIEDCDFRIMAKGMLGKHTLDAAFGKQRDILEYVAQKRDVFVGRVDHRGTSQTCPNCRTEVRKDLSVRLHECHECSYVVDRDIASAQEICNRGQETYRGTPEKPEIGSQVVLSGNFVVDKWRFRGAMPNSDIGKPTP

SEQ ID NO: 14486 - protein, 391 aa, Escherichia sp.
MLRATKIRISPTPEQAAFLNAQFGAVRFAYNKALYIKKHAYQRHGVNLSPRNDLKPLLSVAKKSRKYAWLKEFDSMALQQAVINLDVAFSNFFNPKLKARFPTFKRKHGKQSSYHCVGIKVLDNAIKIPKLAPIEARLHRELHGKLKSITVTRSATGKYYASILCDDGASAPEKPTHLKEEKITGLDMGLEHYAITSDAVKVPNPRHLINAGRNLRRKQKALSRKQKGSANRKKARIRLAALHERVANARADFQHKLSRAIVDENQAVIVETLKTANMMKNHNLARAIGDAGWHSFITKLEYKAAEKGVHLVKLDQWFASSKICHCCGYKMPEMPLHKRIWRCPECGTEHDRDTNAALNIRQKGILELKAAGLVVSAHGGQRKSVEQTVAA

SEQ ID NO: 14487 - protein, 387 aa, unknown
  TnpB Polypeptide
MMKLLKSFKTEINPSEEQKSKIRKTIGTCRYIYNFYLAHNKELYDKGEKFMSSNKFRIWLNNEYLPEHPEYSWIKEAYSKAVTQSVNNGQTAFKRFFNHESAFPNFKKKNKSDVKMYFVKNNPKDCQCERHRINIPSLSWVRIKEKGYIPTTKDGYMIKSGHVSIKADRYYVSVLIEIPNNKIANNFNEGIGIDLGLKDFAIVSNGKTYKNINKSARFKKLEKQLIREQRCLSRKYENLKKGESTQRTNIQKQKLKVQKIHHKIDNIRTDYINKTIAEIVKTKPSYITIEDLNVSGMMKNKHLSKAVASQKFYEFRTKLKTKCNENGIELRIADRWYPSSKICHCCGAVKKDLKLSDRIFKCSCGYIEDRDFNAALNLKDVITYDVA

SEQ ID NO: 14488 - protein, 373 aa, unknown
  TnpB Polypeptide
MNTHVRAHTIRLNPTPEQEHHLRQAAGTARFCFNWGLHRVKEALDAGQPIPHARALRDAFKRIRTNQFPWTFQVGKSAIDGAFVNLGRALKHFFDSKHGKRIGKRMGFPRFKSKKHGYGSFYVANDRLRVHGHWLSVQKLGRVNMTEPLRFVGKILGATIRYRAGWWWVSIQVDMAHTPPEHQGGAIGVDLGIHSLAVTSDGEVFENQKHLKRAIRHVKRLQRVVSRRQTGSQNRKKAVLKLAKAHFKVACKRLDNLHKLTTHLVQKAALIGIEDLNVAGMLKNHCLAQAISDVSFAEIRRQLAYKAPAYGSRVVVIERFFPSSTLCNQCGCVNQALTLDMRTWECPACGCTLDRDVNAARNIRDRAIRLAHA

SEQ ID NO: 14489 - protein, 387 aa, Actinomadura sp.
VKLAVQVRLLPTAAQAAALAETLHACNAAANRVSQVAFDTGTTRNYDLRRATYRQVRETGIGSQAAQHVIKKVADAYTTLRANLRAGNLGRTGSKRRIRAEGKPIVFRPDAGQPFDQRNLSMAVDAGTVSIWTTRGRCKDIAFACSTKARMALTRYPHGESDLLYRDSRWLLLVTVEVPEQPLNEEPSGFVGVDLGIENIATTSGGYRAAGRGLNRHRARQAALRRQLQKKRTKAAKRVLKRRRRKERRRATDVNHCVSKRIVAEAERTGYGIALEELTGIRSRVRHRKPQRAAFHSWAFAQLASFICYKARRAGVPVVFVDPAYTSQTCADCGHVSRLNRVDQALFICRGCGVVAHADRNASRNIAHRAAAAWDAGRQSSAPASDP

SEQ ID NO: 14490 - protein, 353 aa, unknown
  TnpB Polypeptide
LPHKYAGFCERLKTLKARHDFLRAVHSQPLQQTLRDLAGAYEKAFDPKLAAEVPTFKKKVNVQGIRFPQGFKVERSGVFLPKIGWVAFRLSNRTAKRKIEGEVHNVAVRLEAGKWYVSFQMEREVDETIHENAGAVVGVDVGVARFAALSDGTFFQGANALKKYERRVAFLQRRLARKAKFSANWRKGKARITKLHSQIANIRRDQIHKASATISKNHAIVVLEDLVVVNMTASAKGTVVAPGTNVAAKSALNRRILDQGWGEFRRQLRYKLTWKGGTLLLVDPRNTSRTCSSCGHVSEENRLTQATFGCVACGHAANADTNAAINVLRRAGWARIACGDAKASTKQEAQRAA

SEQ ID NO: 14491 - protein, 437 aa, unknown
  TnpB Polypeptide
MDLTLRFRAYPDDDTATEAWRHINIHRQIRNHAVRDYYRAPRNDRPSAYDQHRKLTKWKQRWSIFKDVSAHAAQQTVSQIHKDLKVLKEHRKNGRQTGRLKWQGPGEVRSVAYQSEGFNVNHTTGHDSFGTLTLSKIGEIPIRAHRDLPETENVKRAILKKERTGDWFACLVVEVETPKKPNLDEIDPADCIGVDLGIQSYIHTSDDLSVECLDLADEYDHYAKEQRSLDRKQRGSANWEEQRQKVAKAKRRIRWKVLDFQHKLSTWLVQEYDVVAVEDLDVKPMLETSQSAKNKQDAAWSRFLDLLEYKGDLHGTHVVRVDARGTTKACNECGVETSKPLWVREHSCPACSHTENRDLNAAKNILDRGLNKLSLHIGPGRSESTSSESQGDSDMRTRAQLSSTPVQTVLPSFARHSGRVDAKHVCRGNLDRLSDAV

SEQ ID NO: 14492 - protein, 438 aa, unknown
  TnpB Polypeptide
MITSAQKIMLITSNAVGHKFNRACGCARVAYNWARLSWIEKKKQGIASVTIADLRKEFNANKTEWMYESPKDAMDQAIKDFGIAKKRHYDNPKQFGFPKKKKFSSKRSFYISNDKARLVGKNRIKLPQIPKPVRLAEPVCPECLSGKINNYVVSKGSNGKWYVSISYTYDETKIGNETPNNGIVGIDMGVKTLMQLSTGESVGNPRILRKHSLALKRYQRQMKRRKMGSSKYKRVKKKFNKKNTYVANYRKDLIHKATTEIVRNNSVIAIEDLNVKGMLKNHNLASAISDCGFGTIRSFLEYKCDKYGSLLLKVGRFFPSSKKCSECGHVKENLSLSEREYVCEHCGVVLDRDKNAAVNILAEGLFNELERRFNTDVARREFTPVEIVALASRLVPSSETMVDDTRCILTREGRAALVESLFGSLWNQVASIGYHKCV

SEQ ID NO: 14493 - protein, 562 aa, unknown
  TnpB Polypeptide
LAGNTKYRKKLRKIKVKIKKQFRDYLNNLLNYKNRLYQFTNRQFDYNDARWLHMNSQFLKTIKLMNQDNVLSENSIIPSIFKLYGGETIIRPFWNDKIQVLSDKLYLPDYNNLCQFEETPKQFQNTWFKSEFYMPTGNLNRLYKLKTKKKCDDFKALERVKKIKLYLTTKQKKYMKIIIGTYRYFYNRTIQVIKSFNKDTREAFYYIDRSKEETKITIKLLPNKYTTDFFYMRSLLKENEPNWILKNIPSHLISEAIHEAVKKYNECIDKYKKTKKPFKMSFKSKKDKLQTINLEKSMITYQGLFHNFKIDDEFLFRNIKKCENITKNHKGSTVTFNKDIDEFYLNATYEIIPKKQHNNKNICALDQNLFNFLALYSPNHVGIIGKKASNVLYKKCLEVDIIQSRINSTSYEEKNKIIIVNAEKRRSLKKAFYKKIEEIKNYKRELHDKSINYLINNYTTIIISPFEVQNMASKLLSQTARSMYNLSFYEFRMNLKEKCKEKNIKLIVKQEYYTSKTCTGCGHIKLNLKMSDREYNCDFCQLKIDRDFAGARNQILRNLSFA

SEQ ID NO: 14494 - protein, 361 aa, unknown
  TnpB Polypeptide
MNLSLKVGFRFVTATKLRRLSALLSRVRSLTNKYIARLWLEPGRLDKETMDWIPCQELSYRHRSNCLKVALETVSSTRKASRETGKPASLPVIRGAIRLSSLVCKVERGKGVFDYVLKVSGLSSGNPIVIPIRSHKRLNHWLTKPGAELLQGATLSENHACLWIKTIDIEPRTSGDVIGVDVGACKLMSDSDGNHYGREMRELMAVVRRRVHGSKGHQRARQARKRFINRTTKQLPYERLTVIGLEDLRGIKTGKGNRGKRFRKWIAPWVVRQVHHRIEFLAKLNRVQIVSVNARGTSRRCPVCETEAKDSRKGEHFDCVACHHQQDADSVGAINILARTLAVLGSVSSPNLKKTYRNVSV

SEQ ID NO: 14495 - protein, 359 aa, unknown
  TnpB Polypeptide
  misc_feature (16)..(152): Xaa can be any naturally occurring amino acid
LIEKERAWRTSLRNWXXXXXXXXXXXXXXXXXXXXXXXXXXXXXXXXXXXXXXXXXXXXXXXXXXXXXXXXXXXXXXXXXXXXXXXXXXXXXXXXXXXXXXXXXXXXXXXXXXXXXXXXXXXXXXXXXXXXXXXXXXXXXXXXXXXXXXXXXKNIAVLSNNLFFNSKHLREVKGRYQYLKRKLQHLGTRSAHRKLRKLSGRERRFVRDVNHLISKNIVSLPYDVFALEALNPAYMKQKDQYKAIRKMLGSWSPSELQKFIEYKAKDAGKTVIYVNPKYTSQRCSKCGYVDKNNRHGSVFKCHKLRFELNADLNASRNIEVLGRSEYFRLMSTSQSLRFNESPLTGGVENSNKLRSFSEE

SEQ ID NO: 14496 - protein, 434 aa, Proteus sp.
VTKTKWTCIRNTQCLPRRILVSFFIDQSIIDNMKRLQAFKFQLRPNGQQEREMRRFAGACRFVFNRALARQNEEHEAGNKYIPYTKMASWLIEWKSDTETQWLKEAPSQPLQQSLKDLERAYKNFFQKRTAFPRFKKRGKNEAFRYPQGVKLDQSNSRISLPKLGWMRYRNSREVVGEVKNVTVSQSCGKWYVSIQTEYEATEPQHESTSIVGLDAGVTKLATLSDGTVYPPVSSFKVNQRKLARLQRKLSRKIKFSANGQKQKRKIQRLHSHIANIRKDYLHKVTSEISKNHAMIVIEDLKVSNMSKSAKGTTERHGRNVKAKSGLNRSILEQGWYEMRRQLEYKQLWRGGQVVAIPPAYTSQKCACCGHTAKENRQSQSQFECLECGYTANADINGARNILAAGHAVLACGGRVQSDRPSKQEPAEVIQRSV

SEQ ID NO: 14497 - protein, 402 aa, Planktothrix sp.
MLDTLKVRIYPNRPQEIALAKSFGCSRFVFNYYLNKTNNQYQETGKGMSYCDMAKDLTQLKKLPDYEWLTEVTAATLQQTLKNLESGLKNFFAKRARFPKFKSKHSQQSLRYPESCSIKNGGLKLPKLGIVKASISKSINAKIKSVTVSKTSTDKYFAAILFETDDLTNKKSGKITSIDLGLSNLVTTFDGKDFNQVEPIKPTRKYAKGLKRRQQALSKKKKGSLNRLKQVKRVAKVHEKIANTRLDFLHKLSRKLVDENQVIIAENLCIKGLARTKLAKSVLDAGWGMLLNFISYKLDREGGIFIQVDRFFPSSKLCNSCQVKHNSLNLSIREWVCPECKTHHDRDENATQNLWEEGIRILLTNTAGHAGIQACGENVRLVNNCVKKQFSLKQESPVTAPA

SEQ ID NO: 14498 - protein, 662 aa, unknown
  TnpB Polypeptide
MDNVPEQIKPAREPPDKPEFHSIKTSLKSVARNPVVVSKLNDVVFMSHKIVIHTLQFIKLYLIDHYYRKLQFPTIDKPFVVAVMKTLCQDPASGRPPSQQIQTLKEELSCFYYAYYKHLQVDELNYQHMNTVLDYLAIDIVTMYENNIKQHFFEYVERYVNVVWKKKEMVEWIKQHKNYTKKGKMVSNLCVNLRKVKNDLLLKTRTSNWFYHKWINQVSTQIFPQREYRENNIYYDIQCTPQDYLPYMFYMMRELELNEIKLNNVCPLRTDMIPKHVRIDTTSLVHVCLTEEHGTKEEFLTKGNLVRMEDKIWGFFFKTKKKCFHLEDEHGYTFHHMISTDGVSCSILLIRKDMKGKSKFRIKPKKTPINEKYIDELEEARYKELEKKHVVSIDPGLSDILYCVNSDQKDTISKFRYSQNQRRQETKSKKYRDLILHWKEEIVGHQDVVHWETELSHYNKKTLDFGKFQDYIEKKNNVNYNLQDFYQKYMFRKLKLGGYILRQRTESRMMNRFKKIFGTPEETIVCFGDFEQKQHRRFKEPIKGKGFRSLFRRYGYKVFLVDEHKTSCRCPNCGHETKTFRWCHNPKYWKDNIIKRHGLLRCKNDCGLWNRDTNGAINIWKIAVSTIGRRERPEYLRRARSSISGVSSTSTTPNLHEDPLTF

SEQ ID NO: 14499 - protein, 342 aa, unknown
  TnpB Polypeptide
MAYDVNQVWNAVNADSAELSWVAIPEVGYLNLCPSAYDFMKRMKGIRQERDMIIDSTAVQETIAVHAKSRKQCKKNKLRWRCSGGAKKALGWIPFKSGAAKWVNGQVRYAGQYFKVWDSYGLASYDFRAGCFSQDARGRWYFNIVVQLEPVEKLAENGQVGIDLGLKTTATCSNGDVFARQDCYRKLALKLAKAQRAKRKNRVRAIHAKIKNTRKDAIHKFTTKVVRENSLIVVGNVSSQKLAKTNMAKSILDAGWFMLKTQLGYKSIATQGVFVEVNESYTTQTCSCCGLISLSSPKGRAGLRIREWTCAECGTTHDRDINAAKNILALGHKRLAVGILSL

SEQ ID NO: 14500 - protein, 383 aa, unknown
  TnpB Polypeptide
MKIVRTIICTLAPTAEQRTELDATLVAFADACNFTAEVARSMHSTNKVTLQHTCYQALRQRFGLSANLAIRAIARVCAALKVPVKMHSVFALTSADYDARIFSFREWDWTFSMTLLHSRAYLATKLGHYQKRQLQGRLPRSATLAKRRDGTFFVHVVLTDTAPEPAEPDGVIGVDLGIKNLATTDDGENFSGDAVEAVRKRYGRMRRTCQKTGTKSAKRKLQTIRLRESRMQANENHRISNRLIAKAKDTGSAIACEDLAGIGDRITARKAQRSRLKGWAFYQLRTFITYKAKREGILVVPVDPRHTSRTCSACGHCEKRNRKSRDAFVCRQCGYALPADWNAAKNIKARGEVMHPVVGPVDAGPRNPVEGTNKPRHLSGSGS

SEQ ID NO: 14501 - protein, 236 aa, unknown
  TnpB Polypeptide
MDHKKTTVNISEYRLKSVTVSQTSSGKYYASILFEYEYQVQEKELQKFLGLDFSMHELYRDSNGKEPAYPRYYRNAEKKLAKEQRKLSKMQKGSNNRNKQRLKVAKLHEKVSNQRKGFLHKQSRQIINVYDCVCIEDLDMKAVSRSLNFGKSVSDNGWGMFTTFLKYKLEEQGKKLVKVDRFFASSQTCSVCGYKNAKTKNLALREWDCPQCGTHHDRDVNAAVNIRNEGMRLVNA

SEQ ID NO: 14502 - protein, 437 aa, unknown
  TnpB Polypeptide
MYRIDRIYVNAQHEMFPYFDTLAHKAKNLYNASLFRIRNAFTAHGKTSLTSNEKEVLDELALLKGQNNYCVLGYIVLERLMRVTQNPDFFADLPVQSAQATVKHACFDFQNWLSALKKYKQNPTLFTAKPRMPNYCKGNITTFTLTNQEAVVYDDELKLPKTKQRLKIRKRHNARLQEVKVCPVSGGYDVLLVYLVKDQLVKSGAHSAAVDFGVDNTMAVVTDTGDSIIFKGEYIKSINQYFNKETAYRVSLMSKGSATTTRVWSKKLDRLSAYRTNYIRDCFHKMSRLLMEWCKSHEIGYLVLGSNKFWKQETNMGKCSNQNFVSVPFEMLKTMIELKSNEYGITVIRQEESYTSKASFIDLDFIPVYSKEDPNKYRFSGRRIHRGLYKSKDGTLMNADINGAANILRKAGYDVSNIKITRLLDPAIIQFKTLNYK

SEQ ID NO: 14503 - protein, 388 aa, Nocardiopsis sp.
MKATVQIKLLPSPEQAEALSATLHACNQAANSASQVAFATGATHKFALQKRIYEHLKVEYGLSAQPTVRVIGKVADAYTTRASNLRAGNLGPPGSQRRKKATSGPVSFTQDSAQPFDNRCLSWQLDARTVSIWTVRGRMKQVPFTGSTDQLKTVAEHRRGESDLAYRDGMWFLHATCDIPEEPLNVNPEGFVGVDLGIVNIATTSDGHRHAGRGLNRHRRRMNQLRAKLQRKRTKSTKRGLKRVRRREARRARDVNHQISKQIVERAERTGRGIALEDLQGIRERVRQAKAQRAALHSWAFAQLRNFITYKARRAGVPVAVVDPAYSSQSCSECDHTSRRNRTAQARFVCLSCGVIMHADANASRNLAHRGEVAWNAGRLSAAPTPLP

SEQ ID NO: 14504 - protein, 194 aa, unknown
  TnpB Polypeptide
MPPTGAAVGIDMGVRAFAVTSDGVSYPNHKYLAKSEKKLARLQRQLSRKSKGSRRREKARIKAAMLHEHIANQRQDAAHKLSTQLIRENDIICIEDLAPKNMVRNHRLAKPISDAGWGEFRRQLQYKAEWYGKTVVAIDRFYPSSQICSCCGAQWSGTKDLSVRGWACPECGAQHDRDINAAKNILQEGLRLLA

SEQ ID NO: 14505 - protein, 395 aa, unknown
  TnpB Polypeptide
MLVRQAFRYRLSPKGEQQTALAVQFGHARYVWNHALALRQDAYRERKESIPFYDLKRRITALKGDADHAWLRDADSQVLQAKVEDVERAYRNFFEGRARFPRFKRKDGPQSVRYPQRFRFKDGRVYLPKVGWVKAIFHRAMEGTPKNVTVSRTKSGDYYASVQCEREIDPAPHSGPVVGVDVGLTHLAILSTGEKIEHPRHLRRAEKRLARLQQSLSRKHKGGRNRGRARVLVARQHEHVANARRDTLHKLSHRLTHDFGTVRMETLNVRGMLKNHSLAKGIADSGWATLVGMCRYKAGWRGGTFEHIDRFYPSSKTCHVCDLKNEALTLADREWTCIGCDTLHDRDINAARVIASAPTAGAAERTSVGRLRKTTSPSGVARRSLNHEAQPLTLG

SEQ ID NO: 14506 - protein, 393 aa, unknown
  TnpB Polypeptide
VNRNYAYRLYPNRRQAQLLDRVLEIHRQLYNAALQERRDAWRMCRVSLNYCAQANQLKAIRQFDQDSAWLNYSSIQQTLRRLDKAFAAFFRRIRAGDQPGYPRFKSKRRFNSVQYRWGDGIRLKANRLHIQNVGTVKVKWHRPLPENATMKCAYLKRDGAHWYAIIALELPDATSAPHPGRAVGLDVGLYSMVALSDGTVIENPRLFRIAETKLADAQRILSRRVKFSGRWRKQAALVASLHRKIANQRRDFAHKLSRRLAATYALIGVEDLNIMALSRSPLAKSVHDAGWSQLLSLLAYKVENTGSQLVAVDPRHTSQRCSECGAHVQKELSVRVHVCSDCGLTLDRDVNAARNILALALLLAPVAQAQVNLTARTEPSAFEPRSRRVYATE

SEQ ID NO: 14507 - protein, 400 aa, unknown
  TnpB Polypeptide
MMQLTYRFRLYPSRVQEQKLLATLDQCRWIYNHFLEQLNQKEGGRTPRRYELQATLPKLKHEHPELEQVHSKVLQMVLHRIYSNLRALAELKRNGRKVGRLRFKGYGWFKSFTYNQSGFKIIEGHGKRRELCLSKIGAIPIVLHRELDGKTKQVHIKRERSGKWFACFSAEVEGAPKIERATKLIGIDLGIEHYIAGTDGKFVKHPHNIIKSEWKLKREQRRLSRKQKDSKNRAKQRIRLARAHERIRNQRLDFLHKLSRRYVNSYDFIAVEDLGVKELIEMAHNGKNRADAAWATFLHMLTYKAERAGRWVVEVEPRGTTSRCSRCGEAAEKPLWVRVHHCPRCGLELDRDLNAARNILQDGLKKIGWEPAEFAPVEIGPLSQLRAGTSSVVETGSPTI

SEQ ID NO: 14508 - protein, 298 aa, unknown
  TnpB Polypeptide
LLDLENVSSREDFHAFLGYVEGHGKRKELWLSKIGAIPIVLHRELDGDVKQIHIKRERSGKWFACFSVEVKEMPKLKKFSRPIGIDLGIEHYTADTSGNFVEHPHNIIKSEWRLKREQRRLSRKKRGSMNRAKQRVRLARVHERVRNQRLDFLHKLSHHYVNSYDFIAVEDLGVRELIETAHNGKNRADAAWATFLHMLTYKAERAGRWVVRVEPRGTTDRCSGCGELVEKPLWVRVHRCPKCGLELDRDLNAARNILCDGLKKVGREPAEFTPVEIGPLSQLRAGTSSVVEAGSPIL

SEQ ID NO: 14509 - protein, 411 aa, unknown
  TnpB Polypeptide
LFNRVYEFKLKPTKSQIAIFSEWLEQCRRVYNYALRERKDWFKSRSCQINACSLRSEYIIEADTKRPTYASQCRGLTVARANIPALKAVQVHVLQQTLRRLEKAFVSMWEQGHGFPRFKKAGRMRSFVFPQLGKDPIQGTAVKLPKIGLVKFNQSRPIPEGATIKQALVVKRASGWYIMLTLQWDLNVPQAMPHGEAIGIDVGISHFVAVSNGRLFPNPKPFRKLERQLKLLQKRVNRKRPGSNNLQKEQAKVSRLHERIANIRKNYHWELAHKLCDWAGMIFAESLNLKALAKGMLGKHCLDAGWGQFLQILEQCCFKRGVFFRKVDAKKTNYFCPNCLTQTGKKPLSERVHSCNHCGYTTDRDVAAAQIVRIRGLAAVGYTVKMLSEGKGFVLEDVKLCLPVTEESPSL

SEQ ID NO: 14510 - protein, 491 aa, Lachnospiraceae sp.
LGQGNWGFLSSTGLSKLQDQKHHLFRTSDEADSRFSKNTMIRRILHIKREGKIHSPPPAGWMGMREFPERRKSMRKCNQMPYHIGLVLKLHLSRQGKHIVAVNDGASRAVYNRLVASGNEKYRLRKTADLVPMDRARLDFLKTSYQTEAGIKNAMPFLYEKDVDCQVVTNSIRNYRAAWKNMKERHTGVPTFHRKSSVQSYQTNCHYVGGSTGLTDGTVRFPDPCHIMLPKLGKVRCDGSSKLIRDLLAHDQDTRIGTVAIRRDAVGEYWCSLQISSETPFREELARTGSSCGIDLNLLDLVNMSDGGSYENGRFYRKSEKRIAKLERTVRRRREAAKKDGRRLEDSKNYQKARQRLAYEHRKVARQRADHLGVISKQLVESQDLIAAEDLKVRNMLKNHHLAKSIADASWRSLLTKLQQKSAMYGKTVVLVPSQYTTQTCSVCGHVMKGPKALPLSARDWTCPVCGTHHVRDVNAARNILDKALKTLQDA

SEQ ID NO: 14511 - protein, 388 aa, Microcoleus sp.
VEQVLTLVCKLQPTPEQASKTDALLKAFADGCNWVNQVVKGGVTSKTTIQSLTYQELRKQFGLSANQAVRVCARVGANRKTAKLKNKPVQAFKATSADYDARIFGFREKDWTVSLTLLNGREHIKLDLGNYQRGKLKGRVPTSAQLCKHRDGRYYIHIQLKDETPEPIHSDRVIGVDFGRRDIAVTSEGDKWDGKQIQQVRDRFSKVRASLQAKASKGTRSTRRRARQILQRLSGRERRFQQWLNHNISKVIVLSALQHNAIIAIEDLTGIRERTNQQPRNKTERRRSNSWAFFQLRMFLNYKSLNYGALLVTVNPAYTSQTCHVCNHIGSRSDKRFKCGNCGWHGDADVNGSFNIANLGAVVSRLRGSDTLSCDVQGYQKPPASAVG

SEQ ID NO: 14512 - protein, 381 aa, Frankia sp.
VPADDRHVKLPRIGRVKVREPMGALTGRLANGRARLLGATVSRTACRWFVSFTVEVEREVPTGPSRRQRAAVTVGVDLGVRHLAVLSTGETVANPKPLARSLRKLRRDGPHKLTTRLATSHETIVVEDLPVAGMVRNRRLARAVSDTGMAEVRRQLAYKTLWYGSTLVVADRWYPSSKTCSGCGGRNPNLTLPDRIFTCPSCGLVADRDANAAVNLRHLVAASTSETINARGADRKTHPGGRVAVKREPGTAMAGKSVTRTTEVASGGKYGGTRRDTEGHGGRPGRREILHAARKGATRDSRRDRLAGSAVDHDGELPKKRRDHARRERPAHQLTQLGSQITARCCAPEGTNEGTNEPALPILPVKSDGTRTRTRSVKSGA

SEQ ID NO: 14513 - protein, 435 aa, Streptomyces sp.
MARFRMYPTGEQEQQMLLHCAHARYVWNLAVEQHSHWCRWRKSAPGFAEQCRQLTEARRENEWLGAGNADVQQQALKDFAKAKNARFTSGFGEPTWRKKFRHEGFRVIGTDRVPEFNEDGTAKLNAKTGKQVVGRSVIVQKLNRRWAQVRVPGCGWVRFRLTRSVLPRAKTFRITFRNGQWHIAFAVIPEPVDAPGTGEVIGIDRGVTITAALSDGRKLNCPQLTVKERAQIRKHQRRAARAPKGSEKKAAEYAKVARLKAREADRRKDWCEKTSTMLARTYDLVRFEKLNIKNMTASVKPKPDPEQPGQFLKNGRAAKAGLNRGILAQGWGRLRQRTEHKAPGRVEDVPAPYTSLRCSACGWIEKNSRKSQAEFVCVSCGFTCNADTNAATNVAAGQGGIPRPRRSAGAGGTTPPNQRSSVREPQPTWVGIPLF

SEQ ID NO: 14514 - protein, 417 aa, Streptomyces sp.
MKLVVQVKLLPTPVQAAALEATLHACNEAASWVSGVAFEKDVKRNFALREHTYAEVKQRWGLGAQAAQHVIKKTCDAYRTLAANAKAGNLGKPWSKRYRRAVEKPVVFRPEGAQPYDDRMLSWQITERTVSLWTLSGRVKRVAFTASPEQLTRLALYRKGESDLIARDGMWLLNATCEVPEAEPDSAPAGFLGLDLGIVNIATTSDGEIMAGRALNRGRLRERTLRTKLQKKNTPSAKRRLKKRRRKEARRAKDINHKIAKHVVAEAERTSRGIALEDLTGIRERVRLRKPQRATHSSWAFAQLGNFIAYKARKAGVPVVYVDPAYTSRTCAECGHIDRANRVSQAWFACRSCGFVDHADRNSSRNIRRRAEELWRRGAQSTAPDPPPIPGRGTGRKRSTTTSGARCASPGTLVPGR

SEQ ID NO: 14515 - protein, 433 aa, Streptomyces sp.
MSRFRMYPTREQAEQMLTHCAHARYVWNLAVEQHAHWRRWRKAAPGFAEQCRQLTEARRENEWLAAGNADVQQQALKDFARAKNARFTSGFGEPTWRKKFRHEGFRVIGTDRVPEHHEDGTAKLNAKTSKQVMSRLVVVQKLNRRWAQVKVPGCGWVRFRLSVRGKGAQLPDAKTFRVTFRNGQWHIAFAVIPESIPAPGTGEVIGIDRGVTVTAALSDGRTLNCPQLTVKERAQVRKHQRRAARAEKGSPEKAAGYAKVANLKAREANRRKDWCEKTSTMLARTCDLIRFEKLNIKNMTRSAKRTVDQPGKNVAQKAGLNRGILAQGWGLLRQRTGHKASGRVEDIPAPYTSVRCSACGWIEKKSRKSQADFACISCGFTCNADTNASINVAAGQGGIPRPRRTAGAGGVTTATSRSSAREPQPTWVGIPLF

SEQ ID NO: 14516 - protein, 202 aa, Streptomyces sp.
VRTARRSGVRTRLLPTPVQAAALEATLHACNEADTWVSEVAFTKDVKRNFTLREHTYAEIKQRWGLGSQAAQHVIKKTCDAYRALAANLKAGNLGKPWSKRYRRAVDKPVVFRPEGAQPYDDRMLSWQIGERTVSLWTLSGRVKGVAFTASPEQLARLALYRKGESDLIARDGMWFLQATCEIPEAEPNTDPAGFLGIDLGM

SEQ ID NO: 14517 - protein, 404 aa, Streptomyces sp.
MIRAYKFLMRPTVGQQSALTEMLRDHCSLYNGALQERRDAYRHASRTSITYGQQSAQLKDIRAFDPERQGRWSFSSQQATLRRLDKAFQAFFRRVKSGEVPGYPRFRGVNWFDTVVFAKDGDGCRWDSTPHDPVIRVRLQGVGHVKVNQHRPVVGKVKTVSVKREGRRWYVVLTAEQAQPEPLPATGSVVGIDMGIANFLADSGGEFVPNPRHGRGAAAKLEAAQQALSRFPRARRDKRTGNHQRAVQKVADLHRKVRRQRLDHAHKTALDLVREHDFIAHEDLKIRNMVKAPAPKPDPDQPGGFLPNGAAAKAGLNHSISDAGWGVFLTILHAKAESAGREVIAVDPRNTSRTCPECGHVDKENRPTQEKFHCVLCGHSAHADTVGALNVLRAGLVRRDAAPA

SEQ ID NO: 14518 - protein, 436 aa, Halobiforma sp.
MAIEVTHTYVGSIQNHRQVCDGLDSLGDSASKIWNVARWTADRIWDETGEIPDEGVLKSYMKNQSCWKDLNAQSSQKVIEELSDAFQSWFDLRQKDDEANPPGYRKHGDTRPKSTVTFKADGFEHDPENNRVRLSKGSNLKEYWSDFILCEYQTRPDVDLSEVTKVQNVRAVWNGDEWELHFVCKVELETSDSAGDGVAGIDLGIKNIATVAFPDEYVLYPGNSIKQDKHYFKRAEYDTAGENGPSEKSMWARRKLADRETHFYHTLTDTIITECVERGVGTLAVSWPEDVRNSDWGKSGNKKLHTWAFDRIYQYLEYKGEIRGIEVLKENEWNTSKTCSACGDDTKSNRKHRGLYVCSSCELVANADCNGAENMRQKITPSPHGEDRSNGCVVVRETGGPSSSRKAHSAFRTTQPSVHLFDRESGTFQSREQVVS

SEQ ID NO: 14519 - protein, 444 aa, Streptomyces sp.
MKRALDHALCRHGDSMPRFRMYPTPQQEQQMFLHCAHARYMWNLAVEQHSHWEPGRKSAPGFAEQCRQLTEARRENAWLAAGNADVQQQALKDFAKAKSARFTSGFGEPTWRKKYQHEGFRVIGTDRLPEYELDGTPKLKSRTGKQVMGRLVVVQKLNRRWAQVKVPGCGWVRFRLSRACLPSAKTYRITFRNGQWHIAFAVIPEPIAAPGTSEVIGIDRGVTITAALSDGRKLNCPQLTVKEHAQIRKHQRRAARAKRGSPEKTAEQAKVSRLKAREANRRKDWCEKTSTMLARSYDLIRFEKLDIKSMTRSAKGTAEQPGKNVRQKAGPNRGILAQGWGLLHRRTEHKAPGRVEDVPAPYTSLRCSACGWIEKKSRKSQADFACVSCGFTCNADENAATNVAAGQGGIPRPRRQACAGGVTTATGRSSAREPQPTWVGIPLS

SEQ ID NO: 14520 - protein, 376 aa, Bacillus sp.
MILAKKVRLIPTPEQEKVLRNHAGAARFAYNYCKRMSDRYYKLFGKSVSQLALQKRFTKIKKRKRYEWLKDINAQVPKQASKDFDTARKHLFKKYKNGYHTSYKSKKDLIQGFYANYERLVIGKKVVHIQSIGEVKTSQQLPRNKKPSNPRVTFDGRHWWMSVGFREDFESQELTDESIGVDVGLKELFVASNGMKERNINKDAKVKKLLKRKKSAQRDMSRRFKKGVKIQSAGYEKAKAEHLRLSRKITNIRNNHIHQATARLVKTKPMRIVVEDLSISNLLKNKKLSKAFLFQKLHFFFQCLSYKCEKYGIAYVKADKWFASSKICSCCGVKYDHSVQPEGQWSLKIREWRCVPCNSHHDRDVNAAINLSRWVK

SEQ ID NO: 14521 - protein, 447 aa, unknown
  TnpB Polypeptide
MGYTVMQRVVTPGEWTYDYLDSFARKAKLLYNAALFRIRNIFTGYSKEHRTENEAGVFAEVDLMQTVYPGKNVRKVITYYQLEKLMRVTHNPDFFAGLPMQTAQAVVKSAVTDFKNWLASLKEYKKHPEKFLGKPKMPKYKKTDLCTFAFSNQDVVLYPQETGVQMKLPMTKKRLSFSNISADAFLKEVKIKPYYDRYLLLLTIQEEDPVPSENMPYSCAIDFGVDNFAAIVCEGHSSVIYKGGAVLSSCQWFHKQRAKLVSILTKGHTNKYVSSRQLKNLSYHHANFIKDQCHKISRNIIHYCLKHQIGTLVIGVNKLWKQETEMGKQNNQSFVSMPIAMLRELITYKALNAGIRVVEQEESYTSKADVTAGDTIPTYGLDDEKAVFSGNRQGRGLYRCHDGRLINADCNGAANILRKAFPDIWKHTTDFGFLATPAVVGFHQLNP

SEQ ID NO: 14522 - protein, 389 aa, unknown
  TnpB Polypeptide
MSRKKQATQREMVKHIAYRFYGVPTEDDAILEAKTFGCCRFLWNRMLYDHNTLYQEIGKVPVNTPADYKDLDECKWLCEVDSLALANVQRNLETAFCRFFDGISRYPRFKSKKYCKRSYTTNAVYSRRSCNVKLDMEKGRLKLPKHKDWVQLKMHRSIRPGETVKSVTVTLEPDGKTYYSILVEYPKKEIAKKIPEKMIGLDMSLPDLYVDNHGDTPEFSKPYRHMEPALAKEQKRLSRKKEGSKRYERQRVKVAKLHAKAKHQRRDFLHKLSSYLVKNYDLIGIEDLDMSALKKALKFGKSVSDNGWGMLIRMLEYKSEREGKYLIKIDRWFPSSKTCCKCGHVHKELTLSDRTYICPKCGHVMGRDKQAAINILNEAVRIWKELSVA

SEQ ID NO: 14523 - protein, 528 aa, unknown
  TnpB Polypeptide
MKRCDHLPLLDANPGKIRALREVLSAFRAAAPNVAADQWQRFYETGRFNKMVTAKDEATSPRLSQAKESLGSARMQMLRYQAVGQLESFIKNRANDFRNVVLGSSINGATRHRLLTINKLEAWFLREPIFLRKSKTKPDIRIEDDVRRLARSIMRAVLARHRRPRFNRVDPWIDQRQAKIGSAETAAHAPLWVSIRGMRREIGKSGKPKRTQATIQVPVKSYAWFENRGGDIAKTLQLIERGADRGKPGALVIGVISDMEKPFGGSQMAYQPLREELSLDFGLSVLFATPDGDLLGRSWFDQLKKHDDRIVGLARRLQKQGIRPNQSARYRARVVALRGFIKTEIGRVLNRLILMKRPAHLVVEKLDFRAPGLSKRLNRILARSGRKVIREKLKDLQDRFGVTFAEVNPAYSSQTCSGCGFVATANRKSQSEFSCRSCGHEINADVNAARNLESGRSAFDRSAFHTTAKSLSLTVERHLERVVAGDRVISAKVLNSPYYRAAKVAAALDAPLKRKLRPPNVVADVSAG

SEQ ID NO: 14524 - protein, 368 aa, Chloroflexi sp.
MSKTLTRTICIKLDIASHEAVLQETQQRFNEAASWIASLCWQERITNTTTAHHRVYGETRSRFGLGAQLACCARAKAVEAVKAVRAKKQETCPEFGSRGSVRYDARTYRLMSLDRVSLNTLHGRVICRMILGERQHALLIDPAWTIGGADLVWRRGLYYLHVTQSREAPQQRETQETLGVDLGMVNLATDSTGESFSGAKVHEVRLRYHRRRQSLQKVGTRSAKRRLKRMSGREKRFQKNTNQCISKTLVEKAVHTRKALALEDLTGIRERVTVRRENRYERHCWAFFHLRGCIAYKAAWAGIPLKFVDPRNTSRTCSQCGHCEKANRQSQASFRCKQCGFCLSADYNAAINISRAAVKQPMVATHAG

SEQ ID NO: 14525 - protein, 276 aa, Deinococcus sp.
VQGAETGAAKLYYQKSKKQYYLIVALSITLPDPQPTDHPRIVGVDVGQRYHFVATDMNGQSLFKKGAAVRQRKDQFARTIKSLQRKGTRSATRRLVALSGRERRFVADRNHVLSKMLLTRFPGAIFGLEDLTNIRERTEGRSNPKASKKAKRVKRRRSQWSFQELQFNLAYKAPLYGSLAVKVDANYTSQSCPKCGHCSKGNRPNAGLMFVCEVCGHTGHSDRVASVNIALRTMLVRQDWMSTGSLSITPDVSDVEVKAARLSRYAELRWNPDTNP

SEQ ID NO: 14526 - protein, 537 aa, Bacillus sp.
MAKETTPSFVLTLEMETNPSIITSIESDLEVSRVIYNSCLGELVKREKQMKRTKKYKKVRRCLRAVSKKLSYYENQENQEKVTFYQAEKKQLVSELLDIQKQFYLSEYSMHKYMKSIRNHFGDTLNADIAQKVATRAWNTVKKKLKGEAKKVTFLKRGEMVSFEGKKNNTGWFYKAKQIVFGKSKIDVKIKENDVYIQEALSAIENKLEFEYKTKKGERKNASHKVKYVRVLKRVIRGNARYYAQLIVQGFPPAKRNKDGSFKHQLGTGRVGGDLGTSSIAVVGQNEVLLTNLAENVMNQSRRIRLIQRKMDRSKRAMNLNYFNEDGTIKKGKKTWIFSKHYMKLKSELKELHRKQADCRKQSHNILSNKLLTFGDEYYWEEMNIKGLQKRSRKTEISEKTGKFKRKKRFGKSIGHRAPAMFLSILERKVKTNGGTFTKVNTQTFKASQYDHKANDYKKKELKERWHIFDDGTKIQRDLYSAFLLKNSNRVGTKVNKGLCEKTFEAFKTFHDKEIERIEKKETFVLNSGIRKAKRLP

SEQ ID NO: 14527 - protein, 405 aa, Aliterella sp.
MSITVNYEYKLKPSMQQIKTFDAWLSTCKKVYNYALRERKDWVNSRKSPVNACSLVSEYILPADTPRPTYYSQCKALTSAKKNITDLTKPHIHVLQQTLRQLEAAFVSMWERGHGFPRFKKKMRSFVYPDVKQNAVESGRVKLPKIGWVRMRMSRPLPEGFTLKQMRLIKRASGYYAQLTYQLGVQVPDVPVHGHFLGVDIGLDKYIATSDGELVSRPRFFNALHRELKLLQRRLKHKKKGSSNWLKLQNKIAKIHQRINDTRKDWHFKLAHNLCDKAGAIFVEDINFKAWAKGLFGKHTLDAAYGQFFNILSHICWKRDVFFLKVNKDYTSQICPNCQTHTGKKDLSERVHRCVSCGYTTNRDVAAAQVILQRGILAVGQPVSQIASGDVLLGANSNISLGKCP

SEQ ID NO: 14528 - protein, 311 aa, Veillonellaceae sp.
MALQETLRDLDRSFRNFFDRRARYPRFKSAHAAVHSYRTRNQSNSIRWEGNQLRLPRIGCVTVRPRHIVEGRILNATVMQTMTGHFYVSLCMKREIEPLPAKKEKRHLGLILDPQGCFIGSTGFCIPLPESLSEREQRIARLKRDLARGQKGSANYEKRRARIVRQEERIWNTEQDFLQKLTTRLTREYSLIVVETRQGSSRGDSAGLRTTGWQGFLALLRYKAEENGCEILAVPIRKTPGQTCRKCGSPRSGVPSDHRGRWICPVCHAENDGIAAARTLLRRGLGLQAYKRLRCQNSQPNRKPRSGIRWK

SEQ ID NO: 14529 - protein, 451 aa, unknown
  TnpB Polypeptide
MSQKVRIDGVKHTGASVFLGVDHCGNPRWTRNPERVMEWLCDGWRTRFNQRREQRPRNIPIKDEAGGIVDWRKEPLGGSDVPGLISDREARLQCLWMAAVPSSILATTDRIEGNEWFAGLKRKKTAGGRVPGFKSRHRGLGFVCWYHPSGNSYNAVFHKTGRRSGVVVVTGMNPTRWVKPGEKAHWRIAIHVRVGQPIRPYTSVHVDWTHKSLVFTNMPLPLPRVGNGMVGLDRGCAHTLASSDGAFMDMPKPTKKEMARLRHLQHRMSRQDRTNEARGGRTAKFASKRRQRTLVELNALQSRIVRRRNDWIEKTTTTLAKANVLVAMEDLDVQAMTRRPKPRPDPDNPGQYLHNGAKAKAGLDRSILSNNWSRLMKRLNDKMDANGGKLVVVPAAYTSQACHKCGHVAKENRESQAVFHCVECGYRANADINAAMNILSRALDKTGGGTA

SEQ ID NO: 14530 - protein, 418 aa, unknown
  TnpB Polypeptide
MAYSSMKSTAKVVHKAYKFRLYPTGEQRTVLHKHFGHCRFVYNHFLAERMAFYEANKDKPKGVKKSLNYSDNQSVLPKLKKATDTEWLKEVNSQSLQVALQNLDKAYQRFFKEKKGFPRFKSKKHKQSFTVPQRFTFFSGVKPTKTLFGSKEIPSKYSWLKIPNLPKSIPLLKVKAHRKLPKEARILFVTISKTPTNKYFASLTCEVTIQPKAQPQGVPKGKIKAVGIDLGIKDLVILSDGRKVENPKYLKKGLKKLKYNQRQLSKKKKGGKNRERARQKFAKIHEKVTNKRKDLLHKISSQLVEEQTVVCMESLQVKNMVKNHKLAQAIIDASWGELTRQLNYKAGWHHRVVVQIDKWFPSSKMCSCCGHVLDELPLKVRKWKCPKCKITHDRDQNATLNILQEGLRLAKIPEQQVV

SEQ ID NO: 14531 - protein, 614 aa, unknown
  TnpB Polypeptide
VTQAFRFALDPSPWQERALEAHVRVARYAYNLGMQWTIEALTRRQIEKDTTGKATTKLPDHFTLCRMWTVHKDTSAPCPACRRIVTWADGAWRTRDGGPCLDGPLHAHPMFQCRHCGRPLVRTGADQWQGVGGGCVPGKTHYPLPGLAWVSEASAGTAQAALRAVAAAWKAFFDARAGRRAGRVGRPRFKSRKATAASFQAHGGGLAVPDHRHVRLPKIGPIRSHEKTKKLLRLLKRPPVDCTACGGRGVTAVPATGRNTLPAGYLATAFRVAAGAATPAGFLAAALAAAVGACGARLAACDACNGAGKVPHTRLVRANVTRTASGRWYVALTVETHRDTRSRAVPGGPLGLGTPAYVPKPSRRQRAGGTVGVDFGIRDLVTLSTGHRVPNPRHYETAQRRLAAAQRVFARTQPGSGRREKARRRLARLHERVANLRKDFLSKLASELVHRHSVIAVEGWDVKVAARRADEQLPRRVQRARNRALLTSGIGELRWMITRRAEWYGARVFVTGAHEPTSRTCSACGQVRTKPVPPAEERFTCSACGYTADRRINTARMLARLARRAVDAPSGGESLNARGAGVRPTGPRAGGRPASKREARARPSGRGKAGTPDP

SEQ ID NO: 14532 - protein, 381 aa, unknown
  TnpB Polypeptide
MNKAYKFRLYPNAEQAVMFAKTFGSCRFVFNRYLGKRIKLYMTDGKTINYYECAKDLTSLKKEAEYEWLKEVDSIALQAALENLDTAYQNFFRHIKNGEKSGFPKFKSKHNHNQSYTTKTVNGNIKLKDNHIYLPKVGAVKIKLHRAIPDDYILKSVTVSRTPSGKYYASILFEYEKIIIPAAVEKIFGLDFSMKELYVDSNGEEPQYNRYYRRSLAKLQKTSRTLSKMKKFSNNWYKQKRKIAILHEKIANQRKDFLHQQSRKIANFYDLVGVEDLNMKAMAKSLNFGKSVADNSWGMFRTLLKYKLEEAGKHFVTIDKWFPSSKKCSTPDCDYIYKDLTMDVREWTCPECGVHHNRDHNAAINIRDEAFRIYSESLVLV

SEQ ID NO: 14533 - protein, 356 aa, Thermoanaerobacter sp.
MTQIITIKLKLYKPTHEKEKMYQLMTDRVTAFANKYISLEKKDRPKTSRQAKAYSEPLPSAVLTQAIRDINAKKDPKHFKRLWCNFNNQNFKVEKENGNWKVSFPTLEKRIGVPIETSERQNDYLEKLVNGEVKQGTAMLVKRRGKWYIHLSIEISIEEKPKGREKIIGIDLGLINILVAETEGQTLFFSGGRLAYIRRHFKSLRSRLMKAKAYKKLKESEDREHRIVTDINHKISRAVIDFAKEQGITKIRMEDLTGARWEMKQKKKQRQDNGKSLQSWSFYQLQEFIEYKAILAGIEVEYVNKDNTSMICSVCGHKFTSRPKGRMFKCPFCGSIRHIDANAARNIAKAISGIAS

SEQ ID NO: 14534 - protein, 478 aa, Thermoanaerobacter sp.
MIVIQAKLVFLSQEDKQTVLNLMRRWSSCMRFAYKRLLEGYDRNTLKRELQGIFNLNSRYVDDAIMKARGVLESSRQLDNNPKKVIFAGRDLFKKLQKRHINGKEYQKLKIRWQEKRKGNLYSRGDKSKKGNLNTRIEVKENGTFLRINVRERKYVYARIEAGYKKNKSREELLQEIAQSSIPYSVELKLKNGSIYAYFAIEEEYPEIKITKEKGVIGIDINACPDNISWTETDEKGNLISYNKIPMPELASGNKDKREYFRWKYAHEIVKIAKEKGKAIVIERLDIKDKGKRGDFSGRKSRRIRHSFSYKSLLSKIKTLAKREEIEVIEVNPSYTSIIGMLKYSPQYMITKDIAAAYVIARRGLGLQEKIPDNYIKFLNTLTGNELEELKEHVKKTVRNKHIKKKHIKEINRAIKFLQSFESEPERVLKPLDGTSFSIYDFWRVLKVAVVTSLSPGKVPRDFSALRELLIQGKWRDP

SEQ ID NO: 14535 - protein, 481 aa, Bacillus sp.
MVERKLFVQSHIHGQSSASLKKAFSKNYGLTARQFNSLRIQLDGKVSSFIEKRQVELEEVERKIQYLRKFIDKKTKQKEKLHEKILKMKQTHPRFLKQLKKYRYLKFVLHQKKRRLRTMEQRFTQLNQDREHNKIRICFGSKRLFHKQFYLDANGYATFQDWKKDWQDARSYQFMVVGSKDESFGNQSATYDLENNLRLRVADQFVEKYGKYITLPNVLFSYGQDQLDQAKISYQGITKGGKPQRYFKAISYRFIKKEKGWYVNATVDIENPRVGTSNQNGLIGVDLNAGFLSICEIDRFGNPINEWKISVPMYARNKNQIKASLSNAVQEIVHYAILVQKNIVIESLNFAKKKTSLREMGAKYARMLSGFAYASFKSIVESKAKKSGVYVQSVYPAYTSQIGHMKFMARYGLSPHGAAACMIARRGYRFKVEQPKYDSILSFPKNFNKEKSNFSNWKSITTHLKKNYSFHDKIELLKADH

SEQ ID NO: 14536 - protein, 347 aa, unknown
  TnpB Polypeptide
LGRKSADHPGTSGKAYRSRERRKRTKVHPARRKAPCLFSEICHEQSCNGSKDRSKRRKLPRKDRCQYHLFQGNVQRPDRHLRSAEALERKEMDLGTCGLTGRPFPEEAAILSPTLVHEEKWLMFHVPVKQENSDARTAKERMQEGTRVCSVRFTNTDSFAVCTVLDEGSRQLAVKNCRGGNAYRHHCRALLKKVEASRAFTDKDNVSQPNRKYYMHLKHLNEHYAHQVSKEIMDFCKENQTGILVLPEYDEDFSRISMYRSGNYSPLHLSIRIRNYLKYKAWAEGILVLELRADGTEKKCSICGATGKKQGSIFICQNGHQVNRFLNGARNLGRKCQESFRKNNKSS

SEQ ID NO: 14537 - protein, 374 aa, unknown
  TnpB Polypeptide
MPSRGSIAVQVLRLRVKDKHAAWLCSLAREVNTVFNYCNELSIKVFERERRFLSGFDFWPFLKGATRGDCALHLPVQAVQEIAEEYARRRRQHQKIRLAWRKSGGARRSLGWIPFKVRTIRYRGGQIYFAGRWLSVWDSYGLGNFELRAGNFSEDSRGRWYLNVCVPRVQKVGDVRNKPSVASILDRSVPSLGIDLGLRTFAAFTDEAIPPIEAERFYRDLEPALARAQRARHRNRARTIHAKIANRRKDFLHKLSTRLVKAYSAISVGNVNASALAKTRLAKSVLDAGWSTFRTTTCSVCDSRAGPKGRKDLGIRGWQCIVCGAIHDRNVNAAHIILAAGHRRLAEGILGPGGRGGCQALDYARTASWGATAA

SEQ ID NO: 14538 - protein, 280 aa, unknown
  TnpB Polypeptide
MKLTLQLKLVPTPEQHTALLATMQAFNAAASYAAKVGFRDHVFSQQAIHIRCYRELRDRFGLSAQMAVRAIGKAVETFKRNKHVCPVFRPEGAMTYDDRLLGWKGPAHVSLLTLQGREVVAMVYGEYQAGFLQRLQGQVDLVYRDGTFYLYATIEVPADTPIEPTHFLGVDLGIINLATDSDGNSYTGEAIEVVRARSATARQTYQATHTKSAKRRLKKMAGRQARFQRWANHGLAKRLVAYAKDTKAALVLEELTGIRDRMTVRKTQRSKQRNWSFRQL

SEQ ID NO: 14539 - protein, 384 aa, unknown
  TnpB Polypeptide
MYTTKKVKAAKTPKLDILASEAGRAYSKVISLMRKVKRKKGFWLSQGAVQKYMRLKGYNLHSQTLQAIIQSYFDSLKSYFRVSKSNPDAKPPKRTPHFYKVRWIQNGITFKDGVVRLSNGKGNAAITLKSDVRPAYVEMYFQRGSYYFSLVYEVQIPPKRKTGKAVAIDMGEIHPIVSHDGEHTIIYNGRALRAIKQYLNKFKAYIQSKMDRCKQRSNRWYRLKRIKTKILAKLHAQIKDAEHKITSRFISDCIKAKADTIVMGDIKGIRKRAKFSKKSNQKVHQWAFARLQSMICYKAELAGLKVKFVSEAYTSQTCPRCGSRKKPTNRNYHCNHCGFAYHRDGVGAINLWNKVSGFILSPVVGVMASPIGVRFQPHLCKHAS

SEQ ID NO: 14540 - protein, 463 aa, Shigella sp.
  misc_feature (220)..(374): Xaa can be any naturally occurring amino acid
MRRFAGACRFVFNRALALQNENHEAGNKYIPYGKMASWLVEWKNATETQWLKDSPSQPLQQSLKDLERAYKNFFQKRAAFPRFKKRGQNAAFRYPQDVKLDQENSRIFLPKLGWMRYRNSRQVTGVVKNVTVSQSCGTWYISIQTESEVSTPVHPSASMIGLDAGVAKLATLSDGTVFEPVNSFQKNQKTLARLQRQLSRKVKFSNNWQKQKRKIQRLHXXXXXXXXXXXXXXXXXXXXXXXXXXXXXXXXXXXXXXXXXXXXXXXXXXXXXXXXXXXXXXXXXXXXXXXXXXXXXXXXXXXXXXXXXXXXXXXXXXXXXXXXXXXXXXXXXXXXXXXXXXXXXXXXXXXXXXXXXXXXXXXXXXXXXXXXXXXLNVAGNHVFQGVEDVNYPQSSPCGELENPASRSSVNIGVCRTGRSFTSVSVKRSLGSRRSAVVSAWKISGASNSSFSCQTSIFLPPCAR

SEQ ID NO: 14541 - protein, 490 aa, unknown
  TnpB Polypeptide
MIYNKKIKIVFNKSDIDILDNQSRILNWLYNKLLNDCIDDYQNNNNKKKLLTGYNLRNYMVTLKGEYPFLKKVYGHVLQEAPNRLKKAYEKSFNEKAGFPHFRSFSKKWFSLVYDEPKGWSINNNVLEFSLGILENNYASQQMAKKPKNTHIKGILCENVFLKEGEKFKQLHILKRKNTFYAMFTIETPPTKEDLLYKDLLNSYKEELSKYKILKANYKNKSIEAFNDGDFETSKNLLSKSKKLIKPEKPSIPKPDIPNNIKWISLDPNHKNFFVGIDYLGKTFEFENLKLIKYWDKVINTLKSKRDKCIKKYKKKTTKNNNSYWIHSPRWNKLNKALDNAYQKRNEQLKKALFVIASFLYKNYDLVIIGDYTPSKETAKFNNMHRSMLNQTVIGKLRKTLEWVALKSGKYYLCIDETDTTKTCCICGNKEHKDLSIREFTCQKCNTFIKRDINSAINIAKKANKLYTPSLENINKINNYKKVTYKTDKI

SEQ ID NO: 14542 - protein, 384 aa, unknown
  TnpB Polypeptide
MIKTHKVALNPNRDQIAWFYQQCGYAKFVYNSAVSDFKTELSANNFLSMYDLNTRFNEKKKAFDWTQAQDQRAAMYAIHHLGAAIDNWRKKRAKFPRLKKRGCKHSYTTDEQAVRVEGKRIKLPKIGWIKTYEKLRFRGKIVSVTISRTAHRWFASVSVEVQPPIHRCPASPECVDWFASKTEVGTPHQIERSIYPTIGIDVGISTLATLSDGRKYENPKALKPYEKKLKREQRKLSRKVFLSQNWYKQKRKVERLHYRIACIRKDAHHKTTTDILIGVNSIGIETLQVTNLLKNRKLAKALSDAALGGFLEKLKTKAKALGIPFVQVDRFFASSKTCSACGYKKDDLTLSDRQYHCNACGTSIDRDVNAAINLRTLAAGYAES

SEQ ID NO: 14543 - protein, 257 aa, Methylococcaceae sp.
VKNVTVSGKQGKWFVSIQTGREVETPVHPSAAIVGIDLGIARLATLSDGSHVAPLNSFKRQENALAKAQRLMGRKQKFGKNWKKAKSKVQKIHARIGNARRDHLHKTTTAISKNHAVVVVEDLQVGNMSKSAAGTTDQPGRNVNAKSGLNRSILDQGWFEFRRQLEYKQAWRGGELLAVPPRNTSRTCPACGHVAAENRQTQAQFACVQCGFAENADLVGAINLLRAGHARLACEVNGASMPSAAGTRRSCQAAKAA

SEQ ID NO: 14544 - protein, 653 aa, unknown
  TnpB Polypeptide
MDFKEKPPDDFFKGIKLSLKSVLKHPDINTPKITNAVIQCNKIVINVLLFMKLYLLDYYETHKVLPIIDKVFINSCMKILCNEKPQGRPPKKEIKELKDTLTTFYSKEFQPLIQNEPLEYTHMNTILDYLTIDILTMYENNIKLHFVEYVERYVNVVWKKKFLVSKIRKMNISKKEKDTRINKLCNQLRKIKTDLLNVETTAYKSHVSYHKWITEQKQNILPIKTFKKNVYYDLQCSPMDYFPCMIKIMKQVEEEAQTICNVFPMRNEIIPKHIRLDTTTLVHLLMTKSQGNKSAYLTEGNLKRNEDKIWEFFFRTERKCFHKKHYEFHHMIETDGISCSLLLLRKDLIGKRLPTMKKGINNEEYIDELKDYNSLQNKKIVAIDPGKCDLIYCVDADNKEANTFRYSQDQRRKETKKKKYAKIQLELKQEKIHGKTIIEWETDLSKMNKKTLDIIKFNAYIKKKSEINGRLFAFYEKYIFRKLRLQSYRNTKTSEQRMLNNFKRIFGNEKDVVVCFGDYEQKQQMKYKEATKGKGMRTLFRKAGFQTYLVDEFRTSCKCSKCEGGSCIKNMVMKNPRPYRTGNVIVHGLICCKNGCGYWNRDVNGATNIYKIASNAINNKARPNYLSRSNNLSGNLEELPQPKFTRSVMSKPC

SEQ ID NO: 14545 - protein, 428 aa, Streptomyces sp.
MSRFRMYPTPQQAEQMLLHCVHARYVWNLAVEQHSHWQRGRKPAPGFAEQCKQLTAARRDNDWLGAGNADVQQQALKDFAKAKNAKFMSGFGEPTWRTKYRHEGFRVIGTDRVPEYETDGTPKLNAKTGRQVMGRSVVVQKLNRKWAQVRVPGCGWVRFRLTREMPRAKTFRVTFRNGQWHIAFAVIPEPIEAPGTGEVIGIDRGVKITAALSDGRTLNCPQLTTRERAQIRKHQRRAARAPKGSEKKTAAYGKIAKLKAREADRRKDWCEKTSTALARSYDLVRFEKLNIKNMTRSAKGTVEEPGKKVRQKAGLNRAILAQGWGLLRRRTEHKAPGRVEDVPAPYTSLRCSACGWIDKKSRESQADFRCTSCGFTCYADTNAATNVAAGQGGIPRPRRSAGAGGTTTTTSRSSVREPQPNWVEIPLF

SEQ ID NO: 14546 - protein, 406 aa, Lactobacillus sp.
LTKLGRTIKLRLYPDTEQAAEFLAMSREYQRLANIVSQWIFDHDFPLSWLKINHRLYKVLRQESQLNSQMVQSVFRTVVARYKTVQAQMKQHPYRYKNENNKWIRVPRDLTWLMKPIQFCRPQADLVRQRNYSFVNEMTQVSITTLSKRTKLAFTDKGFEEYFRGDWKLGTAKLVHNRGKWFLHIGITKKIDDFDKPSCSQVVGIDRGLRFLATIYDHLGKTWFFDGRKALRKRKRFLEVRRQLQSKGSKSAKKKLKQLAQRENRWMTDTNHRLAKTLVTAYDSHTLFVLEDLTNVTFNTDDLPKSLRSSHRSWSFFQLESFLTYKAQEVQSAVVKVNPAFTSQRCPKCGLVEKANRHHETHEYWCAQCQYRCNDDRLGAMNIEKLGQEWLSGIKRPKIKRLTAIG

SEQ ID NO: 14547 - protein, 417 aa, Lactobacillus sp.
MTKTMAQLPYHYGVKVRVFPSTEQKRLIKRNSDASRFIYNQMNGMNNDLFWLKQVKIPITIVFDRIADLTERLKKPSTAISNIHGWLNHPDFDSLMKANAIKNYKTAWKLFRQLHQAGTPKFHKRGYTQTYQTSCLYGAKVTGPTVRNGSVRLNDTHHLRLPKLGCLRFKGLPSKILDRANDIRIGTTTVSMDTAGHYFVSMQLGSEHPFVSEQPVLKSKVGIDLNLENFLTDSNGQVIDNPRYYRMIKGKLAKAQRKLSRRARRAKRSQRRLSESNNYQKQRLLVAKLQLKVANQRKNFLHHVSTALIKNHDLVVAEELRGKNMLRNHALAMSISDVGWRTLLGMLAYKADLYGRKFLTIDPRNTTQTCSHCGYVMTGKNKLTLADRKWTCPSCGTFHVRDHNAHENILAKGLATL

SEQ ID NO: 14548 - protein, 406 aa, Lactobacillus sp.
LVKLGRTIKLRLYPDTEQSAEFLEMSREYRRLANIVSQWIFDHAFQLSWLKINYQLYQTLRKESQLNSQMVQSVFRTVAARYKTVQKQMKQHPYRCKNEDNKWIQIPRDLTWLVKPIRFRRPQADLVRQRNYSFVDKLSHVSITTLGQRTKMNFTDKGFENYLHGDWKLGTAKLVHSRGKWFLHIGITKEVSDFNSKDNPQIVGIDRGLRFLATTFDSEGKTLFFDGQKVLRKRRKFLKVRRQLQSKNTTSAKRKLQQLAQRENRWMTDVNHRLAKTLVTAYGSHTLFVLEDLTNVTFNTDDLPKPLRNSHRSWSFFQLESFLTYKAQAIQSAVVKVNPAFTSQRCPKCGLVEKTNRHHDTHEYWCAQCRYRCNDDRLGAMNIEMLGQDWLNGVKHPKIKKLTTAG

SEQ ID NO: 14549 - protein, 397 aa, Lactobacillus sp.
MRLYPDTDQSEQFLAMSQEYQRLANIVSQWIFDNAFQLSCLKINHHLYKQFRQKSPLNSQMIQSVFRTVVARYKTVREQMKQHPYRYKNEENKWIQLPKDLTWLVNPIQFRRPQADLVRQSNYSFVSEMQQISITTLDKRTKLGFTNKGFEKYFTDDWKFGTAKLVHNRGKWFLHIGITKEVSDFSPKDNPKIVGIDRGLRFLATAFDDEGKTLFFDGQKILRKRKKFLGIRRQLQSKGSKAAKRKLKRLAQRENCWMTDVNHRLAKTLVAAYGSHTLFVLEDLTNVTFNTDDLPKSMRNSHRSWSFFQLESFLTYKAQAIQSAVVKVNPAFTSQRCPKCGLVEKTNRHHETHEYWCAQCQYRCNDDRLGAMNISMLGQEWLSGVKYPRIKKLTTAG

SEQ ID NO: 14550 - protein, 406 aa, Lactobacillus sp.
LAKLGRTIKLRLYPDTNQANQFLAMSHEYQRLANLVSQWIFDHEFQLSWLKINHHLYKIFRQESVLNIQMVQSVFRTVVARYKTVQEQMKQHPYRYKNEENKWVQVSKDLTWLVKPIQFHRPQADLVRQSNYSFVDKMRKISITTLGKRTKLGFTDKGFEKYFSEDWKLGTAKLVHNRGKWFLHIGITKEVPDFEQQGNPQIVGIDRGLRFLATAFDSKGETLFFDGKKILHKRKKFLEIRRQLQSKGTTSAKRKLNQLAQRENRWMTDINHRIAKTLVVAYGSHTLFVLEDLTNVTFNTDDLPKALRNSHRSWSFFQLESFLTYKAQAIQSKVVKVDPAFTSQRCPKCGLVEKANRHHETHEYRCKQCQYRCNDDRLGAMNIEMLGQDWLSGVKHPKIKKLTTAG

SEQ ID NO: 14551 - protein, 462 aa, Halorubrum sp.
  misc_feature (169)..(169): Xaa can be any naturally occurring amino acid
VRRTNTFAVRPLSDDDKRLLRDLLDASASLWNELNYERRQQFFDGKSVWDTADYRKQYVDVLGSATAQQIIRKNKSAWRSFFAARENGEDTAPPGYWGNEDDGRELRTFIRNDQYTLETGKRSRIEIPVGHALKDEYGLGYYDRLRLEVCGVPKWDGEQGRLEIQYDEXGYYDRLRLEVCGVPKWDGEQGRLEIQYDEVDDTFRAFQPVTVPDSRQDSPLASHEAALDVGANNFVACTTTTGQRYLYEARDLFARFRETTEEIARLQSKLCEGRYSSQRIQRLYRTRTRRRDHAQDALVRDLMERLYTEGVATVYVGDLTDVLSTHWCAEINAKTHQFWAFRAFIKRLSHTAEEYGITVKVRSEANTTRTCPVCGEQDDTNRDGDVFRCPCGHEAHADLCASRTFLVQQAGEPAGSMARPVRLTWDDHNWSELPYSPERVRPSEERTNRSTREGKLASVGTV

SEQ ID NO: 14552 - protein, 424 aa, unknown
  TnpB Polypeptide
MRRTNTFDVVPQSDADEELLRRLLDASAALWNEINYERRENYADRDVEVWDISEYRGRYGGVLGAATVQQIERKNSEAWRSFFALKRKGEANGKPGFWGNAENGRELRTYIRNTSYSVEWGDYSRLEILVGQDLKQEYGLGYHERLRLEVRGERNWKEYDKQGRLELFWDETAQKFRAFQPVTIDDSRLAQPLASEEAALDIGVNNLVACTTTTGHQYLYEGRDLFNRFRETTQEIARLLSLLEEGRYSSLRIRRLYDRRTKRRNHAQAALARDLIERLYHEGVAAVYVGSLREVLNTHWSVEANAKTHNFWAHSLFVERLACTAEEYGMSVEVRSEAWTSQECPRCGAPEDTTRHDETLTCTCGFEGHADLTASETFLKQQTTVARPMARPVCLKWDDHTWSESPRSAPNEEHTNPQVASVGR

SEQ ID NO: 14553 - protein, 370 aa, unknown
  TnpB Polypeptide
MRKAYQFKLQSQKNVIKLGNMLDDMWGIHVHIMRLSRRYYRMFGKNLSAYRINAHIAKLKKRTKPHWADLPSQVVQDVVLRYGKTQDAFFQNIKDRKAGLTTRKVGRPKIKSRQKYSSMTFTQAGYTLEENRIKINCIDTWFSFHKHREIKGLIKTITIKRDKCGDYWIYFSCENVDDLKPKSKTGKSAGFDYGNKTFLTNDEGEKIESPQFFRQSLNTLRSLNKALSRKVKGSNNWYRAARALARHHRKVARQRKDWQWKLATELCTEFDTLCFETLNLDGMKRLWGRKVSDHAFYQFLQILQQKCAKHGKKFVQIGQWTATTKPCSDCGYHNQELSLSDRQWICPECGSHHDRDVNAAINIKQAGLAA

SEQ ID NO: 14554 - protein, 418 aa, unknown
  TnpB Polypeptide
MLLSRKTTIRLTEQEENIIGHMCYAASKLWNICNYERYHYKELSLPVEYPDWYYQKRAHKNNFWYKQLPAQSAQEVCKILDKSWKSFYALKKSHGIENPKPPRYKKSGIPITYIQKGINHENHSEQVRLSLSKQLMNHMSEKYGIHISYLYLKNLFFKSMDHIKQIKLYPPENGICNIIVIYEIKNIELLPDNGNYLSIDLGLHNLMTCYDSTSNNSFIIGRKYLSLCHYFHKEISRAQSQWAKTQSKSMAYPKASKRIKKMYRKRNHAIHDYLHKLTRYIVTYCQDHAIHTVVIGDLTNIRKGKDFGHVINQQFHTLPYLKLYIMLEYKLALKGIRFIKQNEAYSSQTSPLAKTVCKSEAEKNNRVERGLYKDSGYCWNADTVGAFNILRLYFAKNKITNELNPLKLKTPYIIKVAV

SEQ ID NO: 14555 - protein, 382 aa, unknown
  TnpB Polypeptide
MTVIHKSIRVRLYPTEEQEVFINKTIGCCRFVHNKTLENCKQSYEQTQHFPSQNKRIKNLVPLKDEFEFLKEVDAVALVQSVRDFNSALDHFFKNRSHFGFPKFKSKHEGKQSYRTCYNSGKTGVLDNKHIKLPKLGKVKTKRFNMPEVYKIFNVTVERTNTGKYYASICIETEVQPLPKTGKQVGFDLGLKDLLIGSDGTRYERPKFSYAFKDKLAKEQRKLSKMRTKLERANANLDECKNYQKQKHKVAKIHEHIANCAKDFNHKLSRKLVEEYDLTAFENLNIEGMRQNHKLAYSISDVRWSQLLNFIQYKCSWYGKEFRQVDRFYASSKICSECGAYHKDIVNSLSVREWICPDCGTHHDRDVNAAKNILIQALSVGI

SEQ ID NO: 14556 - protein, 422 aa, unknown
  TnpB Polypeptide
MSEEKNLKIKDALRATKERRSNMDCHVFSVKIQENRLSRAKEEKLNRCFLEAKWLRNAVVATENLSLEDTSSVQVKVKGEFETREISNLSSQMKQSVVDGIKTDVCNLSKAKKAGLKVGRLQYKHECNEINLKQFGNTYKIKGKNKISVQNIGVLVVNGLEQINLDEVEFANAKLIQKPSGYYIHLTVYSNKQPQSNIEKEVLGLDMGIKDQLTFSNGVKVNFYVEESEQLKGLMRKLSRQTKCSNQYKQTLNRIKRIYEHYNNKKKDVVNKLNSVLKQNYIICFQDELLSQWKRKKSKHKFSFGRKVQHGILGRVKDKLKKNNSNVMLESSVPTTQTCPECGCLTKHSLDKRIYHCNHCGVENPDRDIHSANMMVLLSGYGTYRSLNTDTVSTERMVGLLDNLSELGAVVSSTNSMQADCL

SEQ ID NO: 14557 - protein, 230 aa, Streptomyces sp.
AEQERPEPLAPTGSAVGIDLGIANFLADSNGDFVPNPRHGRTAAAKLEAAQQALSRFPRVRRDKRTGNHRRAVEKVAKLHGKVRRQRLDHAHKTALGLVREHDFIAHEDLRIRNMSRSVAPRPDPEQPGAFLPNGAAAKSGLNRSIMDAGWGVFLMILTGKAESAGRVVIAVDPRNTSRECPECGHTAKANRPTQEKFHCVSCVHQEHADTVGATNVLRAGLARRNAQQG

SEQ ID NO: 14558 - protein, 177 aa, Oscillatoriales sp.
LPKNGAFYLEMSYEVEKEQHNLDIGQALSIDLGTADNLAACVDTLGNSFLIDSRGMKAMNQLWNKKVATRKEGKPEGYWDNWLDSVTRKRNHQMRDGINKAAKLIANHCLKSGIGTLIVGWNEGFKFNSNLGKANNQKFVQMPLGKLKNRLKKLCDLHGIRFVETEEAYTSKASFLD

SEQ ID NO: 14559 - protein, 418 aa, unknown
  TnpB Polypeptide
MQLTRKVRVYPTKEQEDTLWVLSDRCRLIYNFALAERQEKWETEQKSVSYIDQQNKLPEIKDQYPEYKQVNSKVLQMVLRTLDGNYKSFFRLIKQDPNARPPGFRGRKYFFTMKYNQSGFKVTDEEVQLSHKVEGGAKLVFPITTYAKFMDVKQVDVHYNEGKWYLSIVDEIKPPEYHDNGLYQAFDLGITKQTAVNMEGKFFELKNIRPDLYWNKTIDKITGRRDHSIKHTKTNCRPNSKKWSMLNNIKRKFERKRANQILDFQHKTSLMIVKNTKANTIIVGDLDVKSMPQSKKANRGMNRSTQGTGYLARFTGFLTYKAERIGKKVIEISERNTTKACCQCGKLHDMPAWKRVMNCDCGNEIDRDCNSSVNIMLRFLSQNAMCTGYQQFVDNLRTGSGIIISPGHSQEAPSARVA

SEQ ID NO: 14560 - protein, 414 aa, unknown
  TnpB Polypeptide
MIRTHIEPCHVNRAEADALNRASGERYTQVAVFHWRTYRKHGHWLSQYGAEKWNDRANAEQPTLLHAHSVDAAQQGFYKACKTTRACRKAGLETRFPYRRKKFRTTIWKQTGIRREGDTLLLARARGQPSIRITLPEHLRDVLDIREVRLVYDKAKRRHFWHIVVEHGTQPKEAPGTTTVAVDLGEVHPAAVSDGHDTVVVTCRALRSQRQYAAKRLAELRQRQSTCKRGSRMWKRLQRRINRFLYQQAKRTRDMEHKVSREVVNTAVAMEAGTIAIGDVRDAAEKVKLGKKSNQKISNWSHGKVRQYITYKAAAEGIQTELVDERYTSQTCPSCGCRHKPRGRVYTCGQCGFSGHRDGVGAVNILSVQQHGEPGRICPTGSTTYRIPYNVRVLRSPLDTGQVACGQPQEAAAL

SEQ ID NO: 14561 - protein, 525 aa, Nocardiopsis sp.
MGLPGPLAFTLEQVSESRRKGVNPVVEAARQNAEQYPKREKNKLKKRGFEPRPGHVVQAFVYTLDPGAGTEQNLRSHCGAARTAYNWALSHVLAVWDQRAAEASYDIPEEEQTPWRSWSLPALRRAFNATKREDPRFADWWSENSKEAYNTGFANASAAFDNYATSKRGERQGPKAGVPRRKSKHRSRLSCRFTTGAIRCEEDRRHINLPVVGRIRTHESTRKLHRRLANGSARILSATFSHQRGRWQVSFQVEIERAIRAPARPEGAVGVDLGIKSLAVVSDSDGQVRQVENPRHLGRELKRLRRASLRVSRRRGPDRRTGQRPSNRWVRANEKRNKVHHRVANLRTDALHKLTTGLACEYGTVVVEDLNVSGMLKNRRLARHIADAGFGQIRRQLAYKTAWWGGRMIVADQWFASSKTCSQCKAVKAKLPLHVRVFDCDECDLVLDRDVNAARNLAALAASMTGTGVAGDRGARAPKARGADRRTRTTRPRRAAGTGRAGGAKPCERTEAGHRPQDTEQLGLW

SEQ ID NO: 14562 - protein, 408 aa, unknown
  TnpB Polypeptide
MILVQRHQIKPSSSMYRELDHLCFLSKNLYNATMFEVRQHYFQTGKYFNFRQANKMFIEINQPDYRALPAKVAKYVQMSVDDSFKSFFKLLKKKQKGEYNAPVNIPHYLATNGRHILTYEKGALSFKRKGYIHLSKTEIYIQSTFPKEEVQAVRLVPKNGYIVVEVLYKREAKKIKEANNRVVGIDIGVNNLAAVVSNVFDAFIINGRPLKSINQFFNKELASAKSDLKLRHNRYKSKKTNRLWRKRTNKVNDYLQKASTYLVNQFVSNDITTVVIGYNKNWKQDINLGKKNNQNFVQIPFRQFINMVAYKCYLEGITVYEQEESYTSKCSFLDDEPIQKHEKYRGRRVKRGLYKTSTGKLVNADINGACNILKKFLLRKEAWNEEISSNLVEVCSTPSVTKVTVNFS

SEQ ID NO: 14563 - protein, 274 aa, unknown
  TnpB Polypeptide
MSINRQSNPFSQKTVNNLQQVRLIPKYQHFVIEVVYKKEVKNDKLTHDNVLGIDLGLNNLATLVSNQPDVHPMLINGKPLKSINQYFNKKKAFLMSFIGDKGISHSIGRLSKKRHQKIDDYLHKASRNIIDYAVETNSGLIIVGENKHWKPEINIGKKNNQNFVSIPFDKFKAMIEYKAFDVGIDVVFTEESYTSKSSHLDNDPLPVYKKGESHSFTGKRVSRGLYRWSKGIINADLNGAIGIIKKVVPEALDLLIEIIHAGAGFAPFKVVNTF

SEQ ID NO: 14564 - protein, 312 aa, unknown
  TnpB Polypeptide
MIKNIIFDVGMVLVNWDPHAAFQELGFDEKTEEAVGNATVYSDAWNESDRSVLDAEEQLAVFVQNAPEYEKEIRHKQNLVDASMRKHNPENYNKNGTVKKGKHKWKTTKRCRRLKRQVRVLYRKQSAYIKTSHHTFINRVVQNTSEFILEPMNFKALQKKSKKTERKDEATTIKQKDGSLKMVCKYKRKKRYGHSIKNRSPGLMQADLKTKATQYGIPYYEIDIHQYRASQLHHDTGEYIKPTLSERFKTIEGCKVQRDLYSAFLICHTDDTLTAPDFIACHFNFPHFVEMQDTLILNKKKCGHTMKSCFGF

SEQ ID NO: 14565 - protein, 419 aa, unknown
  TnpB Polypeptide
MFLTQSNVIRGLTKDEYNVLREMCIYSNNLYNVALYNIRQYYFSSHKFLTYESNCSVCKENENYGLLQAGVAQQTLKVVDRSFKSFFNLLKKCKSGDYRYHDVKMPHYRKKGGMFNLVLSTNAISIKNGYLKLPMSHGFKKLHSGIKDIFIPFPERLEGKNIKEVRILPIHNGKYFKVQYVYEQEVENNHLNPDNTLSIDIGIDNLATCVSNVGTPFIMDGRKIKSINQYWNKRKAYLQAIATKQGSYTTNRIDRMTDKRNNQVRDILKKTARYIIDYCHNNDIGTIIVGYNPDFKESVNLGRRNNQTFVQIPFGNLRDDISNLCERYGINYIEQEESYTSKASALDMDNIPTFNPSVCYQGSFSGKRVHRGLYKSKDGTLINADVNGAANIMRKCKQNISIDELCPGLLASPQRIRLS

SEQ ID NO: 14566 - protein, 312 aa, unknown
  TnpB Polypeptide
MYLQTGDYEFQIKVYIRNTWDWIPVQVRKSDMDYIRHHCTGRKRCSPELTKRGKKWVLVFPFEEQVDLHNTPIKKQTIVAVDLGINNACVCSVMQPDGTVLGRKFLKLPREYDCLMHKLSHIKRAQHHGSKKTRNLWAYANGVNDDIASKTASFIVKVAVEYQADTIVFEHLGMQGKKRGGAKQRLHLWKARTVQKIVENKAHRLGMRIARICAWNTSRLAYDGSGRVRRGRESDKTMNHYSLCEFTTGKLYHCDLNASYNIGARYFIRELLKPVSATRRQHILANVPECAKRSTCTLSTLISLSAELCASA

SEQ ID NO: 14567 - protein, 436 aa, unknown
  TnpB Polypeptide
MMTKYQKMRSIASNVKYDYLIEKHFIRPKHSHYDILDKYSHRANNVINASIYQCRQSVFNKRSIGWSQLDSYFKQARNKGQANIYSQMPTVHMAQQLFKVVGQNFDSWFKAVKAYKVSPDKFTGRPKLPGFKTKGGKSLIIIDNQTAKLRNGYVVIPCLNKLTIKLQHQDTDKIQQVRIIPRFNCFAIEIVYKTNKTIDYKTDNGRYLGIDPGLDNAFTIATNVKNIEPLAINGRSIKSINHFFNKRRAKLKSIADVNHQPMNTKQMFQLSYHRAMKLDRFAHESSKYIVKYALRHEINTIIIGNNKGLKRSSNMGKRNNQNFIGIPHQKLVEKLIYKANLAGIVVLTTNESYTSQTSFLDNEEPVKENGNDARKEKGLSPAKRRIHRGLFKSNTNKLINADVNGALQIIKKVVPNAFANGIEGVGLHPLKININF

SEQ ID NO: 14568 - protein, 400 aa, unknown
  TnpB Polypeptide
MLIYEYKVQGTQAQYAAIEEAIRITQFIRNKCLRLWMETRGTNNNDMRCSCAVLSKEYRFVYLLNSQARQNAADRAWSSVKRFYENCRKKKLGKKGYPQFQHDNRSVEYKTTGWKLEPDGKHITFTDGCHIGTLRLIGSRDLATRPLPEIKRVRLIRRADGYYVQFGLSVQRHVQHAATGRALGIDVGLKAYYTDSEENTVENPRYLRKAGQRLKRLHRRLSRKQKHSQNRAKARKRLAKGYLKVQRQREDFARKVASTLITSCDLIAFEDLKIANLVRNRRLSKSIYDASWSKFLQWVKYYAAMHEIPCIAVAPAFTTQNCSQCGTVVKKSLSVRTHICPRCGLVLDRDHNAARNIVHIALFCWWAHCFLQSILEEEQSAEQETISTVGHTGTGPSSEG

SEQ ID NO: 14569 - protein, 379 aa, Methermicoccus sp.
MLSYKFRIYPSKTIQAKLTEQLELCRWLYNRLLFELNKAKEEGRKIKQKDTQALIVKLKEENPNLNKVYSKVLQMVNYQLWSNIKALSELKKNGKKVGKLRYKGKGWFKTLNFNQSGFKIDFENNKLILSKAGTIPIKLHRPIEGRIKGVIVKREKSCKLYAIVQVEDEPELLPPTGKEVGIDVGVRHFLTDSEGRQIENPKFYERTLQRIKTLQRNLSRKQKGSKNREKSRIKLAKAYEKLVNQRNDFLHKLSRFYVNNHDIIAVEDLKIRNMVKVGNKLAQRILDASWGKFIEMLSFKAERAGRRVIKVNPRGTSEGLTFDDLYRDYISACRIKNKSGLGRSLEPVERRPLLLVTAKAVIEGQVFSVKQEAPCVSGE

SEQ ID NO: 14570 - protein, 424 aa, unknown
  TnpB Polypeptide
MLSKEQILERNKLIGENGLKTRMKRAKQICKTFKFKIDYINCNKEQKEYIKMLFVEAKWIYNYLISQDNIYSFNYKDLKQITHKDKDRNDIISDIKYVKSSVKQELIAQIVNQIKGLSKLKKKGHKVGKLRYKSEFNSIKLKQYNITHSLRGNKFKIQGIKKPIRILGFRQLNKYDNIDYTTANLIYDGLDYYVCLTCFIDKDNTDKTYNIDYNNDIVGIDMGVSTSLTLSNGTKYDISIGESDRLKKLQTKLVTKQKGSNNRYKLIKKIRKEHIHINNKKNDISNKIVHSILSNNKTIVIQDEQISEWRQDGLSGTKIQHSILGRIKSKLSMNDSVVILDKWFPTTKYCSKCGNKVELELKDRIFECPNCKTKEDRDIHAANNMIYFYLQYINAPGTDVNMPVPNKISYKEFIEKRESTTSFE

SEQ ID NO: 14571 - protein, 354 aa, unknown
  TnpB Polypeptide
MIEKIRSEGFQTRNDLDYFLTELKEQETWLYSYHSKMLQMISTQVDGAQKALIQLHKNGQRTGTLKFARYGEYRTFTYNQSGFRIQNGILCLSKIDKIKIIQHRKISDNTEIKQIIITKSKSGKWHACVTCNVDMLIPKLNLKKAVGIDVGIKNFAYDSDGFVTPNPLNLKKMLTPLVRAQRRISRRQKGSKNRKKAVRFYQIIHERIKNRRRDFLHQLSTQYAKKYDVVFVERLAKLNMVKNHRLARNVLDSGWGIFINMLDYKYMLVEVPAKNTTVDCSRCGNPTPKSLAVRIHRCNVCGLVLDRDHNASINILKKGLHIFNIMLPQELRELTPVEISMRSLKQEKAIRQVW

SEQ ID NO: 14572 - protein, 419 aa, unknown
  TnpB Polypeptide
MHITTKIKIQVTPDQADVLWHLSEKCRLLYNFALAERNQNYQENKDRPDKQSIGYVQQANALPELKKKYPEYRWVYSKVLQTTFKSLDDNFKSFFALRQNGDEDANPPGFKGKNHFCTLRYNQSGFAITDGRIRFSHFYNDVPLAFDLPEGQAFVNVKQVDLFYDDLKGEYYISIIHEVPPEQKYADNGLYQAWDLGVTQHVGVNSHGKFLEVTNARPDNYWNPKIDAVQARRDHCKKKSRQWKRLNRAKRTMERKRSNQLRDFQHKLSRKLVSNTRAATILVGDLSVKQMPKSKQATPGLNRSTQNAGHLSRFIGLLTYKAALAGKRVITIDERYTTKTCCVCGAVHEMPLGKRVMNCECGNCIDRDQNSAVNIMVRFLSQDALWTGYRQFAGNLRQTGLRLPENLGHSQEAPCASGG

SEQ ID NO: 14573 - protein, 384 aa, unknown
  TnpB Polypeptide
MRHVTRYRAYPSHAVEQRLFTGFARCSFVRHWCLETKVYRDSCLPKLKEEYPELKEVHSKVLQNVVQQIVHNLIALRGLKAKGRKVGKLRKKWLHSMIYEQSGFKLTGNRLWLSKIGEMPIELSRPVPGRIKQIVIKHTPAHQWFVAIISETPDTPEPTTGTRAVGIDLNLENFSTDTDGVVFEHPHNVRKSAKRLRRAQRKLSRAVKGSRNRRKQRVRVARIHEQVENRRNDFLHTWSRYYVDRYDHIALEHLNIKPMVESLDAKLRGRSRSILDAAWYKAREFIRYKAANAGKYVHLIDPAYTTQDCFLCGHREKKDLWQRTHCCPVCGYTVPRDLNAAQNILKRAAVGWGTPESTLVEIRTATPPSLAVQVPVNETRISRL

SEQ ID NO: 14574 - protein, 260 aa, Cupriavidus sp.
VLGTLRNVTISQSCGKWSVSIQTEREVEQPLPNGGAIGIDMGVARFATLSDGTFYTPLNSFKLHETALRKAHQAMSHKVKFSNNWKKAKARIQRIHSRIGNARRDYLHKCSTTISQNNAMVCIEDLQVGNMSKSAKRSAEQPGKQVRAKSGLNKSILDQGWFEFRRQLDYKLAWSGGWLIAVPPQNTSRTCPSCGHVSKYNRQMQARFECVGCGFEENTAVVGAINVLRAGHARFACEVSGAGMPPAAGTRRSDSIRLDA

SEQ ID NO: 14575 - protein, 407 aa, unknown
  TnpB Polypeptide
MILAHKIALDPAPEQAVYFARASGTARFAWNWALGRWQEEYALWKEYQCGPNPSEASLRRELNALKEDAFPWMLEVTKNAPQQAIKNLGAAFKNFFEGRAKYPRFKKKGVAHDSFRADPGPDKLHPNAVEVDGKRIKLPVIGWVKMREAVRFNGKIKSAIVSRTADRWFISLSVEVDHTIPVRETQVAGGVDLGVKALATLSDGTTIEGPKALRQNLKTLRRHSRAHSRKVKGSANRRKSAARLARLHARIANVRRDALHKTTTRIVEQFDVIGIEDLNVRGMMANGKLSRAVADVGMFEFRRQIEYKAAMQGARIVVANRWYPSSKTCSDCGCIHTNLTLSDREWTCDDCGATHDRDHNAAINLKNMAASSVVTACGAGRAGPDRKVRTKRSAAKQEPTHGIFIHA

SEQ ID NO: 14576 - protein, 407 aa, unknown; identical to SEQ ID NO: 14575
  TnpB Polypeptide

SEQ ID NO: 14577 - protein, 407 aa, Streptomyces sp.
MQLRYAFRLYPDTGQQTAPAKAFGCARVVFNDGVRAREDARRAGQPFPKAGELSVRLITEAKRTAERSWLGEVSAVVLQQSLRDAERAYRNFFASLKGTRKDPRIGPPRFKSRKDTRQSIRFTANARWSITGSGRLNLPKIGAVKVKWSRTLPTTPTSVTVIKDAAGRFFASFVIDTDPAADAARMPETDRTLGIDLGLTHFAVLYDGTKIDSPRFLRRAEKKLKKAQKELSRKQKGSEDRDKARLKVARAHAKVTDARREFHHQLSTKLISENQGIGVEDLSVKALARTRLAKSVHDAGWSSFISMLEYKAERYGRTLAKIGRFEPTSQTCHVCGTVDGPKPLNIREWTCTACGTVHDRDHNAAINIETAAGLAASACGAPVRPGAFPAQREETGSHGFPTGPSAA

SEQ ID NO: 14578 - protein, 528 aa, unknown
  TnpB Polypeptide
MRTITIESNRFYHLSDETKEAIDKTIASFNRAVYSSYNLHFLKDTDSESFKSKYKDKSLHMIIKQKYEFDDYYSNSVTQLAKGKLNSQKELQKEYIKTKEAALKSVKTKRRDYEKLLSDYIRLLESLHRYRTKIKIEPNAKLIVKGIRNLSVSSYDITVRYFKSRQLVSETYGLYSFEYQYLIPKIHHIKTVLSNLKYKENRLHEQLQNLRTMKRIIFGSKKLMRTHTAGDKRLGERKYNSFQISGRKDAKYGNFVFKLHELESGTKESPVFQLTVRMCDKKEITLNHIKFPYKGMELVEVLKKKTPICFALKRKTDKQQKEYYQIFVSFDISVTKDINHDTSTGIFGMDFNYSHLDISEIDEKGNLVSVVTIPYQITGDSKVNERELRAALNIVGMMVQKSHKCLVIERLDTRDSKRRSTYRDPITNKIFHTFAYERYSDFVDWLGYQYGFEIIKVNPAFTSIIGSLKYAIPRKLNSHQAASYVIARRGMGFKENITKQYRPLVDNPNKHHWSQWNQIHKKLQVVNK

SEQ ID NO: 14579 - protein, 509 aa, unknown
  TnpB Polypeptide
MSVSDKHHYLNRNLSTNTLTIINIHDLIISNPILSRWWNTSVETLSSNTWLPDNVVTGSSTNCLKECLPNMGSNTWFSVTSTQSTNVPKRILKRPYTDTLHSDAKSPNGIMKIRLYPNQHQKDILQQMFDANRYSYNKVIEVIGDKMFDFNPGVFDTVYKDARRYITKKHMKHLDIPERVFNTNNIVLNSAYRDVLKSRESMIAASIARKEKTGKGFKLDKLKYRSKKHMSSESIEIHQRGIKTIDNKFVTFFPLLFKKGISAKKAKDVAAQIRIKIPLPKLEFSVRLQRIKPNIYYLCIPIIKTVKPITTNKICSVDPGVRTMLTVFDPEDKQVYMIGNNVDELVKRSKIIDKMKSKLRKFKGKRNARYRLKRDMQFMQRKIKNMTNDMHQKTSKFLSENYKTIIYPNFNIKGMCNRKHRNIGKETVRRMYLWAHYKFRELLKYKTVLKGGRVVDCTEEYTSKTCTCCGRLNHTLGASKIFKCPYCEYKVDRDVGAARNIYLKNHLLV

SEQ ID NO: 14580 - protein, 399 aa, Gloeobacter sp.
MKARFRYRIYPHPGQRVLLAKMFGCARVVYNDALKLRQHAYDNGLPYIRDTELQKQVITEAKKTPERAWLCEVSSVALIQSLQDLHQAFRNFFDSVTGKRKGAKVGLPRFKKKTDKQAIRFTRNGFKVHSESVYIAKVGHLPISWSRPLPSEPSSVTLIKDRAGRYFVSFVCETAVQPLPSTNGTVGIDLGLKTFATFSNGEKQDNPRIFRKLERKLKRLQRSLSRKIKGSKNRNKQRHKVARLHARIADKRTDFLHKLSTRILHENQVVVVEDLCVKGLGRTRLAKSFQDAGFGKFLSMLEAKAIKYGREVLKVGRFFASSQLCSNCQHKDGPKPLWVRRWCCSVCQVEHERDENAAKNILAQGLRERLNACGASVGPLATKAAGYEAGTRLKQKQKC

SEQ ID NO: 14581 - protein, 443 aa, unknown
  TnpB Polypeptide
MRRKINIDQQKLLIDNISKYKNNIWCPKINLQMNKVNNNTWFTEYCSINKKVNVITNNDKKILKCIQVTLELKKEQKIIINKWLDTFIEMYNLTLKHIKQKFILIKDNNKSRKINKIIVNYFKIKNELKIIKQKLINKILNKKNKIPIHELDKAIKLACSNYLSAISNFNSGNFKKFHLRYWKQTKNIKIMEFEKTSITNGNICKTKLGKVNATYNGVKFELNNIKHDCKLIYKDNKYILSIPIDVKQKQIVNRDNLISIDLGVRTFITGLSEDHVYEIGDNCYEKIKQKLLNIHKINNNKNIPVKIQQKNEKKNYKKLQNLTNELHWKSISNLVKKYDTIIIGDMSVKKIVSNNNVNQMNDMVKQVLNKLNIFKYKQRLQYKCEEYNVKLKIVNEAYTSKICSCCGKLNKELGNNKIFKCKSCNIIIKRDINGSRGIYLKSL

SEQ ID NO: 14582 - protein, 689 aa, unknown
  TnpB Polypeptide
MVDFTITRKFAVDIDPSVFDDVADIINYIMKDLKNKSEIFIPELFKNKGRNSAKRVYDLYKAHLNEHNLKIPFGYLDRLYRCLFTYAYFNIRHYHRKRRMLQSATTSLLPLPWWENLEEIKIKFVDVSKVKIEETNDVKRQYRNLIVKGLKDYPFINDIEKEFEEFIEHYQPEFEDYNQLVLTFKQQLGKYLENTRKILKKKPDKRGWVVDLIRIIDKGKWKNDKKIWRKKQNIELDKLQSEQFLNGFSLSRELPSYNEIINHLVFPKKAIGRLTSGSVAGFKEFIQSYLNSHCIQEFSNWLGKKYFNKIKELENSLTSEFSHNYPDILNFPKAHANSIPFGIDDNRIYKIDGNIHSFKMRPKTSFIHFKIEDERYQDLINAGWTPRRGVLRLSKGKIILCLPLTKEVPDELKSTLVCGVDLGLKDGMVVSVYETDVPEEPIEVKRIFIDQKQLAGKKDEWFLPPVREVKPFNFKAKLFNLRYQARKLQSERMKFDQPRKHNTRAYWYLQREEKKKWQQISAIHKELVNQFATRLVAYCKHFEIGFIAFEDLKWSKHSLKSKVGPYLAHWQTHWFFSQIQQKSEEIAVQHGIVVKKVNAKDTSKKCHKCGKIGKRERKTFSCTIKKCAWKGDADLNAARNIALRGIKKYYQHLKELAKKQEDKLQKLHASEDGSRETEQSVTTNLNEDG

SEQ ID NO: 14583 - protein, 415 aa, unknown
  TnpB Polypeptide
MLRAYKYRIYPTGEQKVLFAKTFGCCRFVYNWALNLKITAYKERKETLGNVSLTNLMKSELKAEHEWLSEVNSQSLQSALRNLDTAYSNFFRNTKAVGFPRFKSRKDRQSFLCPQYCRVDFERGTVTIPKAKDIPAALHRRFKGMVKSVTVSMTPSGKYFASVLVDTNLQEVPTVAPHDHTALGIDLGIKSLAVCSDGRTFDNPKNLQHSLDRLAVLQKRLSRKQKGSSNRNKARICVARLQEHIASKRKDNLHKITYALTHDSQVRTICMEDLNVKGMQRNHRLAQAVGDASFGMFLTLLEYKCKWYGVNLVRIDRFVPSSKTCGKCGYIYKGLKLSERSWTCPVCGTGHDRDFNAACNIKEFGLKALPTERGKVKPVDCPTVDDRPCVLKSRGRKKQENRGEVCISEAAKSLV

SEQ ID NO: 14584 - protein, 381 aa, Actinoplanes sp.
LVVPVKLLPTPEQSVALEKTLRACNSAASEVALLARQIDCYRNYDLRRIAYHRIKASHGLGAQAAQHVIKKVADAYRGLSVNIKGGRYGMPGSKRRRRIESEPIRFRWDAAHPYDARMLSWQHDMRTVSIWTTSGRIKGVIFAGSPAQLGAVANLAIGECDLVRRDGRWFLYATVESAEAAMYDPAGFLGVDMGIVNIAYTSDGTCHSGSRLNVYRKRQQSIRRRLQDKNTQSARRLLHRRRRKEARHAANINHTISRRIVTAAARTGRGIAVEDLAGIRDRVRLRKPQRVTLNSWSFGQLGFFLAYKARRAGVPFIQVDPRYTSQICNGCGCLDKRNRQNQETFLCRSCGVVAHADHNAALNIAQRGVEGWAAVDLPHVA

SEQ ID NO: 14585 - protein, 380 aa, Kurthia sp.
MEKLKAYKFRIYPTEEQEIFFAKTFGCVRKVYNLLLDERMKNYEEFKLDPSKKRKNPTPAKYKTEFSFLKEVDSLALSNANVFLDKAYKNFFRDQSFGFPRFKSKKNPVQSYTTNNQKGTVKVIDGKFLKIPKLKSLVRIKLHRQLKGEIRSATITRHASGVYKISLLVKEEIIALPKTNSAIGIDLGITDFAILSNGQKVDNHRFTLKMAQKLKREQRKLAKRRLVAKEKGIDLFDSMNYQKQKRKVAKLYEKVVNQREDFLHKLSTDIIKNHDVICLEKLNTKGMMKNHKLAKSIADVSWSSFVQKLQYKADWYGKAIVQIDKWFPSSQLCSHCGQNDGKKGLSIRQWSCTHCGTEHDRDINASINILHEGLRLHTLG

SEQ ID NO: 14586 - protein, 227 aa, unknown
  TnpB Polypeptide
MISMKAGQNIMFRLIIEIPDNKTADPSNEGIGIDLGLKDFAIVSNGKTYKNINKSARLKKLEKRLVREQRCLSRKYENLKKGESTQRANIQKQKLKVQKLHHKIDNIRTDYINKTIAEIVKTKPSYITIEDLNVSGMMKNKHLSRAVASQKFYEFRIKLKAKSKENGIELRVADRWYPSSKICHCCGTIKKDLKLSDRTFRCHCGYVEDRDFNAALNLRGVKTYKIA

SEQ ID NO: 14587 - protein, 408 aa, unknown
  TnpB Polypeptide
MLKAVKIRLYPNKTQEDYISNLLGSYRFVYNQCLNLKKSKYLEDKSNLGLKELGNFFHQDLTKNPEYNWLQEHNTKVLKQSIMNLMESYKRFFINGNGFPKFKSKHDNNQSCRFPLEAISKKNIYSDYKITLTSDLKKVKFKCSDKYCNYLTNFKENIKSSTLTKTKSGKYFLSILIDLPIGKELPKSENIIGIDLGIKDFVITSEGEIFENIKIKRNNQKKLKRLNKSLSRKINGSKNKEKCRIKLAKFNEKLNNIKENYLHQVSNQLLNENQVIVMEDLNVKGMMKNHKLARSIQELSLYKFKTMLIYKSSWYGRDLVQIDRWFPSSKLCHCCGYKKDDLTLNDRTFKCPKCNVLIDRDYNAAINIRNEGIKLLNNKIPIRNGELTPIESSGYTLDEIGRKGFTSF

SEQ ID NO: 14588 - protein, 379 aa, Actinomadura sp.
VQLRYSFRIYPTRGQQNALARAFGCARVVYNDALRAREEAREAGLPYVTAAELSAAMTAAKRTPERAWLGEVSAVVLQQSLRDLEAAYRAFFDGLAGRRPKVGSPRFKSRKDSRRSIRFTANARWQITPGGKLALPKVGEVKVRWSRRLPSVPPTVTVVKDTAGRYFCSFVVETTGGGTGEPGPGEGLGAGCDVGIDLGLEHFAVTSDGRKIASPRFLRRAEKKLRRAQRALSRKQKGSANRDKARLKVARAHAGVADARREFHHQLSTALVRESQAVYVEDLCVKGLARTRLAASVHDAGWSQFTKMLEYKARRYGRTFARVDRAFPSSQLCSGCGYRDGPKPLHVRHWTCGHCGAGHDRDVNAARNILHEGRRITSG

SEQ ID NO: 14589 - protein, 465 aa, unknown
  TnpB Polypeptide
MSIKLIKTEAVRLKLEMPEPTMRYCRKILNFMRDGTKMMDKLFRDGRVTKYGGYNFKFADNTPDLYGTDAQIEKGRLSDGEMRKMPEYEKLIEQHWGKDIQKSLIAGAITKMGELEMAYIERNTDSRTGEINWPNNAIQIREKSIQTKAKAFSFDKNGEAYITGFGNKKDREKYPLGVVGDHYGNFNLLPRGKRGITCPTGGVLSLKNRELILTRDRILEIPKVELWLGTDFNKSPMNWAVFSRETKYGKIIAKTPELKIIETQMRLLQKEASDHDKYNSNQRSGLRKKQDKAHEQQKRIVRDLTSEILQDFYDKNGAFGLGIDSVRTGQKNGSFAHEKFQKEMAFWMTREGLPFYHVATPYTSRRCPECGTVCAYNSAMDNYTNKEKTARNHKTNRYTCHNKDCDVSTEEGALHGDMVGALNNEAYCEWLQDASYEMVNTTSRSYNINQWRILKAILEPDFYYG

SEQ ID NO: 14590 - protein, 403 aa, Erysipelotrichaceae sp.
MRYNNNHKFKDGGPMKIYKAYKLRLYPTIEQTILIHKNMGSCRFIYNYFLDTKETYYKEIKTNLSLKTMKHMLVELKQDKNYNWLMEVDCMSLTNTLENLDAAYTNYFNKKSNKPVFKKKGIHESYTTDCIRSTYKNNNYSNIEIDFKEHIIKLPKLGLVNYKGYRNKTNFNGRIISATISHEVNKYYVSVIVEEEIQELNNQNELKAIGLDVGVKSLVVTSMGEEYSKLDNSRIEKHIEDLQRKLSTKVKGSNNYKKLKTKIGRLYQKLRNRRKFYIHEITNKITKENNVIVTENLKVREMIQDGSRMLRKGIINASLSELERQLEYKSRWRGKNLIKINTYYPSSQVCSSCGYQNKQVKDLRIRSWTCPKCNHEHERDLNASINILFQGLLKLNGLKEVKI

SEQ ID NO: 14591 - protein, 410 aa, unknown
  TnpB Polypeptide
MNKRTDDRFRYAYKFRIYPNKEQEILINKTFGCCRYVYNGLLSDAQKQYEETGKSKVKSYKSLYTDENTWLKEVDSAALVNTQRNVKTAYSNFFTAIKKDEHRELRFKCKYDNHKSYTTNNNSMSTRKTKKIEIHGDYLKLPKLGLVRCVFHREVVGDIKSVTVSKNPSGQYYVSILVARNSEDEPQKLPKTNKKVGVDVGKKSYATMSDGSEIKKQQWLINCDKKIAKLQRELSRKEKGSKNWEKARVKLAKAYQYKTNRMDHFLHNVTIDLIRENDVIAVENLSIAKDEKSMVRAKKKQGQTNKQRRKENHDTMNMSWYKFRQMLTYKSKWYDRVLVVAQNTYASSQICNKCGYKNPITKDVMVRKYICPECGTVHDRDLNASINLINLYNNHDIENIDESASINLTL

SEQ ID NO: 14592 - protein, 384 aa, unknown
  TnpB Polypeptide
VPGRSRPRPLQKPAEGNQGSLIWQDDQLAALIDWNDPVVQYGLDHRIKYVRLVQRKASSPQAKAADTQGYRYSVQLALEGVPYRKPKHTVGSDTVGADVGPSTIALVPRQAAASLEVFCEDLVPDEKEVRRLQRQMDRQRRAANPDNYDEQGRIKKQGQRKLHWKASRNYEKTRRRKATKERKLAAHRKSLHGKKVHEIVAVGNTVVLEKLSYKAWQKQYGRSVGLRAPGMFVALLKRTVASTGGTLLEVPTRSTKLSQFCHGCGRCLKKPLSQRWHQCACGVGPVQRDLYSAFLAAYLDPNQLLPSCAQYVIPWEGAEARLRAAHEQVQQRANEGRSLPRSFGLAQAGARRPSSLSEATPEPAFLLTRGRLEAWKHRSEPPLL

SEQ ID NO: 14593 - protein, 202 aa, Okeania sp.
MHKRLVAEVKSINPWYYEVSKCAPQQALRDLERAFKNFLTIPKRGFPVFKKKGRKDSFYLEGSIKIFQGNYIQLPRIGIVKTYEILPNCRVKNVRISKRADSWYISFKYNFESAPTEKVGETIGVDIGINTLATCSDGSKFANVKAYRQAKKQLVRQQRAVSKKVIGSKNRRKAVKKLAKVHKKADATPRRRQLACGTRTKQ

SEQ ID NO: 14594 - protein, 398 aa, Kribbella sp.
MSRFRLYPTTAQQAALLGHCRHVRYVWNLALEQWSMWHRDKGPTPGYVEQARQLTEARAAFGWLRTGSQTVQQQALRDFGQAVKNFYAGTHRRPTWRKAGLHEGFRVVGAQATRIVKLNRKWARVLVPKVGWVRFRLSRAIPDAKSYRITRDRVGRWHLAFAVVPPPIPVPGTGEVVGVDRGVAVSAALSTGELLTCPGLSEREQVRLKCLQRRLARCRRGSNRHRRAKAAIAKLSARAGDRRKDWVEKTSTDLARRFDLIRVEDLRIAQMTRRPKLKPDPGRPGAYRPNRRRAKAGLNRGILANGWGLLVQRLEDKASGRVEKVNPAYTSQTCSVCGHCAPENRESQAVFRCVACGHQAHADVNAAVNIAAGRAVSARRETPIRVSPKREPQLAASV

SEQ ID NO: 14595 - protein, 274 aa, unknown
  TnpB Polypeptide
VIQPSGLPIQVKTQQKNIDQVRIVPQNGHYVVEVIYSKEPAQGQVDPSFCVAIDLGVTNLAAIASNREGFIPRLVNGRPLKACNQWYNKRMKELKLCLPKEGRERVTRQMELITNKRNRQINHYLHTASKRMIDFLVKEGVGTIIIGKNPLWKQEVNNGRRNNQTFVSIPHARFIEMISYKAELIGIQVEVQEESYTSKASFLDLDPIPDYRPNYEAKHRFSGRRDKRGLYCASGKRYINADINGAYNILRKSRPDAFAKGVEGYVVHPLRLAV

SEQ ID NO: 14596 - protein, 399 aa, Leptospirillum sp.
MKRRQAFRFNVRPTDTQERIFRQFAGAFRFVHNRALALEIDRHASGKAHLGYVGTANLLPLWKRDPETVWLSGIHSQILRQSLKDLDRAYKNFFEKRAGFPKFRRKGEKDSFRFPQGARLDEPNARIWLPKIGWVRYRKSRTVLGTIKNVTVRRSGDRWFVSIQTEREIESPVHPNPGIVGIDLGVARFATLSDGTVIAPGRFLARHEARLKRLQRALSRKKKGSKNREKARKKLARLHRKMADARNDFLHKVSTTICKSHAVVVVEDLNVKGMSASAAGTVETPGRNVRQKSGLNRSLLDQGWSAFLRMLEYKADGSGGRVVRIPPQYTSQTCAVCGHVSPENRTTQALFRCVSCGHAENADLNAARNILRAGHARLACGTNTSSEVGAKASEPTEAA

SEQ ID NO: 14597 - protein, 440 aa, unknown
  TnpB Polypeptide
MKTRKVVHGEVWFNNEDTEIINKMVRNFSSAVRSGYQAKHKHKLKGNNIAKYIKKNYMNLLNQRYINDAVMVSGMINQDNALFGGKRNWKKLQTKTITKQEWLNSRNNQLYSRGDVTKKGNPNIRIVDNELWINDPSVRGKWVKGKLYLQKEVDLNCYDVRLIKKDNNRFSVTVSFESEIADIQFNDKNGVIGIDTNPDGIAVVETDYNGNLLSHKYIKKERIQFAGEDKRNNDIRLLAKEVVAIAKSKNKPIIVEQLSFKQKKSYKKFNRIKSNFLYRKTIEIIHARAIKEGIAVKEVHSAFTSILGQLKYQKMYSLNRHTSAGLVIGRRGMGIKEKQTFIVKDKKDKKEKSDKDKLNLEGRGLSIDMTRKAWSWLQDGFLKTKSATLTGSCLVPPKEAYNTSIGETPMGEPTTITGRCGIMNNNQDVEGHPCKIFQSY

SEQ ID NO: 14598 - protein, 438 aa, unknown
  TnpB Polypeptide
MANSSEYEGRRCGGRRRKDEYEYRAYKIPWYRAHGVSRDEVIKLMHWFRDVVNYVIRYFWSRIWEVDRGRLRANKIELEGGKVIRTPLFPLKPRRPSDDEYNEVRRQLAPRCPWNRHWAYSAVRYAKDIILESWRQRYFRGMARRKMPMLKRLVARAENTLVRSHGNVVRVSIFPWKFIEINTSGMWFLKRVEGWEVAEVEFHEDCIIITFRRPKQRHNVREYIGMDANFDTLDLFSQKHGWVRVDLRPLIHIIQTYDEKRGRIQRLTKKVLKHKVRKLLAKYSKRRNSRVNDYLHKLTTALARLFPDCVIAHEDLSKQGMYGNSRKHNRELRWRPWGRIIALLSYKATTKAVDPRDTSRTCPRCGGRNTERVDGTLVCKRCGLRIDVQLAAAVNIWLRARGIKPSERTWKIIEPATKRRTRLVLDLRSGMLIPAPSP

SEQ ID NO: 14599 - protein, 404 aa, unknown
  TnpB Polypeptide
MTPIQRVERHIISQNDPRWQAIDRAAWFSKNIYNAANYLVRQAYILSGCYLNYNAVEKRFKKCNLLADQQLPMKIVQQILKQVDHDWQGYFAAVAEWRVHPEKFQGQPRLPKYKEKATGRNLLTYTAQAIGRPALKQGFIEPSGLPIRIKTAQKAVDQVRIVPRSRHYVVEVVYTVQIKQAEVNTDLVLGVDLGIDNLAALASNQPGFMPLLVNGKPLKSINHWYNKELARLKSALQNGQHTSKRIHNLTHKRNCRVDDYLHKASKRIIEFMAGMGIGTLVIGKNEGWKQGVKMGKRTNQNFVQIPHARFIDMLTYKAEFVGIKVITTEESYTSKCSFLDDEPVCKHAQYAGRRVKRGLFRASDGRLINADVNGAYNIVRKVIPNAFGNGIGGAVVHPVRVQPA

SEQ ID NO: 14600 - protein, 386 aa, unknown
  TnpB Polypeptide
MKKTLRKAFKFRLKVTPEISQKLGGFAGECRFVWNKSLSLNLTRLEQKLPIMWYEELNFWATLWKKTDEYGFLANLPSQVLQQKLKDLDKAFKDGFDKKQPLKRIPKFKKKGQADSFRYPQGFKVDQDKSKVFLPKIGWVSYRNSRKVLGVAKNVTVSRKGTHWYLSIQTEYEADLLAHNSTSIVGIDMGIKQFATLSDGTVYAPLNRFKAKAERLARLQHQLKNKNKFSNNWKKVKAKISQCHEDIGNARKDYLHKVSTEISENQAIIIIEDLRVKNMSKSSKGNSEKHGKKVAQKSGLNRSILDQGWSMFATMLEYKQDWHGGAVLRVPAHHTSQTCPCCRHDAKENRLTQAEFACVDCGFSENADLVGAMNVLAKGHALLANQ

SEQ ID NO: 14601 - protein, 395 aa, Pseudonocardia sp.
VQLRYAYRLTPTPAQHRALARAFGCARVVFNDAIAARRAAHENGEPYPTDGALSKALTAAKRTPERAWLGEVSAVVLQQALADANTAYRNFFASIKGARKGRKLGVPRFRSRKDRAQSIRFTMAARFRVTLAGRLRLPGIGDVPVRWSRELPGEPSSVTVTVDAAGRYHASFVVDVPDQPLPLVQHEVGIDLGLTHFAVLSDGAKVDAPRIARKAQAKLARAQKELARRQRGSKNREKSRRKVARAHVRVADTRRDWLHKLSTTVVRENQLIAVEDLAVSGLARTRLARSVHDAGWSTFVAMLTYKAQRAGRTLVKVDRWFPSTRACSACGAIGEAKPLHVREWTCGCGTVHDRDVNAARNILAAGRAVMPVETASDLGKPGQLSAKQEPTGSAA

SEQ ID NO: 14602 - protein, 458 aa, unknown
  TnpB Polypeptide
MKKQFTLETRLSLLDDAKEYLTEYIAFYNEISRKMWQIVKLSNFDECYTRSEFNTYVIKKYNVLKRTANSIYNELVGKKNSLLELKKVEAFNLKNKLEVHILKKKLLIEKINKLKEKVTLNKATDKELSRYRKYKNKYYYLSNKINTLKQKLDITLTQIKNKTISLGFGGKKAFKAQYNLLAYGYKTHTKWKNDYVKKRDKNIFYLGSKDESYGNQLAQMNYDAQTDEFTLRLRKEKKYSIDSKYLEIPNIKFSYMKNELIDIINNQKNQLNLSPLSYRIYRRDRKWYLQVIITVISSDFITRKDYGVIGLDYNNGFITLSETNESGNLIMSKNYNLKYHGCGNKALNEILNVVNDIVKYAKSVGKDISIENLDFKKTKSKSISGTNKKYNKMIHTLDYSRYIFRLENKCYKMQVSLNKVNPYKTSQIGFIKYAQKRKMSIHQAASFVIARINQGYID

SEQ ID NO: 14603 - protein, 422 aa, unknown
  TnpB Polypeptide
MAGGLSGITRSGNAWNMKISRGYKFKLDPTDAQADAFARNVGVFRVVYNLALEQRRDHYRQFRRATGYGISFASQCRELTELRAEVEWIADGSLTAQQQALRDLDAAYSNFFAGRADYPTFRRKGVNESFRFQGREVTFRRLNKSWGLAKLPKIGGVRFRWTRDIPGKLKNVTISLDPLGWHISFATEREEAVARHTGPAVGIDRGVVEPVAYSDGTFAVFPKSEIKRLEKRAQKAANALSRCKKGSNRRKVAKARVAALRAKAARVRKHFNQVETARLARMFGVVSIEALKTKNMTASAKGTVEEPGRNVAQKAGWNRSMLEIGWHQFHTFLTYKIAAAGGEVRLVTAAYTSTDYSCCGMREKTNRKSQAVYECVGCGSSMNADTNAAINILMAGTRPAKGKRRKAANGRKSRLEPSSLAA

SEQ ID NO: 14604 - protein, 438 aa, Thermococcus sp.
MKRTVTVKLQPSKEQEKLLTELADTGAKVWNEVNYLRRRQFFEGKGVDYGATERTIYEKYKAEIGSATVQQICRKNAESWRSFFALLRKHRKRELPYWLGKPSPPGYQKEDGKRKPIIIFRNDQYKIEGNKLILKGIGKYGRLEIQFKGRIHLEGKQGRLEIVYDEAKGKWYAHISISEVRERLEGKEWVSIPKTPKGNLTAGIDLGVNNLLAVYVGNGQSFLVNGRPLKSIAFYWQKRITNYQSKLNKNGKKTSKKLKRMHQKWKLQAKDYVNSAVRQTVRKLYELGVSRIVVGYPKGISRNSDKGKRQNFLLSRVWLFNYTIQRLKEVAEEYGIVVEVVDEAYSSITCPFCGQPHYGARFVRGLYLCPRKGLVLNADLVGAFNILKKVVRTITPTLEGLMAFQRRGNGPKTGPEGLNDPKLVTGVGKTPQTSPALG

SEQ ID NO: 14605 - protein, 226 aa, Campylobacter sp.
LLSAVKYRIYPTKAQKELIHKRFGCVRVVCNHFLDYRQKQFSKGIKETYFTMQKELTILKKQDEYKYLNECASQSLQMALRQLVTAFDNFFAKRAKYPNFKSKKNARQGYAIPQNIKLDDKKVYIPKFTEGIKAKTHRKLDKDYIIKQAFISKIADEYYIAISYENNKSLPRPKVIGNAVGLDMSLSNLIIRSDCIIYKNHKFLQDKENKLIKLQRQLSKKTKRFK

SEQ ID NO: 14606 - protein, 474 aa, Thiomonas sp.
MQTGFRFRCYPTAAQEQTLLRWIGCQRFIVNAKVREDRYFRTFARKSLQHTGQYAPQDQQYAQFISEETAWLREVPSPILRNGAVRWKQAYGRFFKQLAGRPTLQRKTGTQSVWITSELFRFEPVTDPATGEVAQRLILGTTKFPVGEMAFKTSGAFKPPASIHITVEAGRWFVSGSFDDGVVQATFQETADWLATFTQDELLERTVGVDRGVTIPAMASTGQAFDFTTAQQERMARKETSRRRWQRKLSRRTKGGANRRKAARRVEALHQYAKNVRRDFAHQTSHALVSNPSKLLIVFEDLGVQRMTRRARPQQDADGRYVRNGAAAKSGLNAAILRSAWGKAKEYSTYKALRAGKLCLSVPAQHTSQECATCGHIHPDNRLSQAVFVCQRCGKKDNADHNAGRVIASRGVDRVLSGQYKDKDRKRTMRLRQKSLGPERPEVTPMETTVSRGAGNSATLGSGKWEIPARTPCV

SEQ ID NO: 14607 - protein, 431 aa, unknown
  TnpB Polypeptide
MQVVEQHVISKGDPRYEVIDQAAFKSKNLYNAALYEIRQAFFADGIWLRYAALDKRMQSHEAYKALPAKVSQQVLKQLDDVWTSFFEACRAYKQAPSTFTGRPKLPKYKDKAKGRNLLVYTAQAVSKKGLKRGLIKPSMLPIEVQAKQKDVSQVRMVPKNGFYVVEVIYEKAIKHAEVNPEYYAGIDMGVNNLVALTANKPGFQSVLVNGRPVKSINQWYNKRKADLQKQLGHTGTTKRMERLTNKRNRRIEHYMHTASRRIIDLLVKEGIGTLVIGKNDGWKQECNLGKRNNQNFVSIPHARLIAMLTYKAELVGIRVVVTEESYTSQASLLDLDPLPVRDPNNGGEQHTFSGKRIKRGLYRASDGRVLNADINGAGNTIRKVAPDAFSKVEGVEDGKAVLASLVVHPVRFVITPSRTHKGKSLAHARKR

SEQ ID NO: 14608 - protein, 376 aa, unknown
  TnpB Polypeptide
MKKSFQYRIYPNKEQIDILNKTLELCRNLYNTALYQRITGYKLGYKVSFYTQSKELKELNKDNGYEIVHAQVLQNTLKRLDQTYQNFFRRLKSGQKPGFPRYKGPNRFNSFTYPQYTKLTINHDTSDKIYIPKIGDVKIKYRRPIQGKPKTLTVKRTNNKWYVVITCDGIPVKERIKNITKIVGIDLGIKHFLVTSDGKKVHNPKFVSKFLVRIQKLQQILSRKHKGSNRYNKTKSRLRTLYEKVTNIRNDFLHKVSRWLVDNYDCICYEDLKVKEMLDSQRPFKHNLNRNILDVSWNRFIGMVTYKAEEAGKYTIPVDPKNTSKRCSNCGYVNDQLELKDRTYNCPNCGISLDRDYNASKNILWLGSSLISGYCS

SEQ ID NO: 14609 - protein, 509 aa, unknown
  TnpB Polypeptide
MQLEQIYLCEAHREEAHMAAKATTTIRQGMNYQPEHAAWFAANQVLFNQVAAFYFEVIQAHEKVLELSNKDALTALEKLTHTTQSNPNPVKPLSEVAEDIPAMFRRAAINAALGSTRSFYATLGKWRTRREKATAKGKKFTERPPVPPRSWNKSATLYAGQWKERADASIMLKLWTGSVWSWIKVRITGREIPNGVEMGSPQLIRRGNQWWLHTPIEKRFKSPGKIEHQVTTYEQTKICSVDLNLEQHVAVCTVRTVEGSILATRFIGGGRRVNGLRKQHLGRIARNRRKTGIIVEGEQDNADLWNKIRNTDEQVAHLVSARIVQFAQQYEAPLLVFEHLGNLKPAKGKYSRRGNSKRAFWMKGRIFKYAKYKAYNAALITSRVNPRNTSRECARCHSLVARYEEGQPAEGYASGAPLVLCPTCGMRGNADRNASLVIGQRLLARYQKSLKEKPQTPLVAERVEQSIGVMISLDVQSVGTRPSTGSARHGDHNEHGTAHETGMRMVEPV

SEQ ID NO: 14610 - protein, 416 aa, unknown
  TnpB Polypeptide
MSLHSNMKSNTLYYVQIRYNYRLYPLPGQRAALARAFGCARVVFNDGLRARQQAYQAGLPYLTDAELSARLTAAKKTPERQWLGEVSAVVLQQALADLNAAYRNFFASLKGERKSGRAGPPRLRSRKDRRQAVRFTANARFKVLPNGRLRLPRIGDVPARWSRSLPCEPSSVTVIRDAAGRYFASFVVQTDPAADAQRFPQAGREVGIDLGLTAFAVLSDGIKISAPRFLRRAEKKLKRLQQAHSRKQKSSRNKEKSRVRLARAHAAVANRRADFCHQTSTMIIRENQAVYVEDLCVAGLGRTRLAKSVHDAGWSAFVAMLEYKAARYGRTFARTGRFEPTSQVCSTCGARDGPKPLGVRTWTCAACRIVHDRDVNAARNVLALGRRESLTACRGGVRPGETPAAAGETGSHRGAA

SEQ ID NO: 14611 - protein, 407 aa, Lactonifactor sp.
VKKIKAQRTERIVIKKSHPKFKVIDQQCFHSKNLYNEANYTIRQKFISDREYISYYDMNKEFKTHENYKLAFSQPANCTLRLLDKNWKSYFAAIKDWKKNPSKYLGMPKLPKYLDKDGRFPWMIPNNQLIYDYDKSTIYIRNRLVNDYDWKCRCLGRPIQVRFIPKGSCYVMEIIYEIEISEQNRESNNIAAIDLGVDNLVTMTNNIGLNPIIINGKGIKSINQFYNKQLAKEKSLLKIRHGKDWSKKLDSITFKRFQRIKNYMHNASHYIVKWCMDNNIDTLVIGKNKEWKQESGMSKGSNQKFISIHYQMLLQQLKYKCENVGINYTETEESYTSGTSFLDGEEPVKQNYDKNRRIERGLFKSNNGLLINSDVNGSLQIMKKVFPNAVDRYGIEGVLTPVVINVA

SEQ ID NO: 14612 - protein, 535 aa, Scytonema sp.
MPQVYQTYVTQIDNNLTGEIQTLEMLEKFSPVAAEMSLVALDGLQSDIKKEKLNSLIQNSFKVNKRHANSVINFVSGELESASLCQKRHLDTLDAKLKSVKAEIERLTKRLKNHREYVRAVEIYNKAIKYPQKTKAGKLKKVSVLKKTPEFDDACPINGQPHGKTYLQLAKQQLHQKKRSFRMYLDRRAAFVQRGVKVNLGNLGKVTFVGSTNETNSNQICQLIPDVIPLLKIRVPYFLEETFGEQVQLPLYKINNHGYDKIVTAWALNNALTYVFSKNNKGKWVVAITCLVNFSITSDDKYAGCIGLDINPGSIGWCATNRHGNPVAWGKVNLDLHSCSTDQTEARLADAITELTNRALATLKPIVIEKLDFSEKKKQYKRGRKYNRMLSGFAYAKFKELLKARCLKLGIKIIEVSPKYSSQIGVVKYMRRYGMGSDSAAGLVLARRGMNIYYERMPARYAFQTSIQPEARQHVFAHWQRFNKHYLKPGSRNAWFGTPTLTGSAGDGLANTGNLGFLKLRHKHGSPNPHPSVKA

SEQ ID NO: 14613 - protein, 464 aa, Scytonema sp.
MALKKQKGKRIETKTLRAKLIRDGIDLNETVQVYRDGVAFYIQVINQHPEYVDLAQAQMRQAYEELTLGENAKYPFLYQDMPRDLRWDVISTACGHYKSWRSNYKNWEVSEAKRLARSLKKNKKHSPHKPPLLPTEVFDSPTYYKYSMFKDDTGNSVILKIRKNHNWAWVRFNYSAYLFDAAWGKGCPTIIVKKDGSCWINWTLERYHDATGGLKALQNERVCSVDIDLDGDTICILSILEPDVNSEVQEVARHFIKGHASHVRRRKRAIGKIAKKMNQTGIVGKGFGCTIWSKITNREKSEGYRIASQIAEFANKHHCRVIVFEHLGNLRPQRGKYSARSNQKRAYWLKSKIVDNTSHIARTKFNILTSKVSPKNTSKFSAVDNSALIRTSEHQLADLLANNERIWLSRYNNEKYTPGLHAIAQNGYWIHSGLNAARNIGMRFYQRSKPDAKFVISKSLSSHV

SEQ ID NO: 14614 - protein, 455 aa, Bifidobacterium sp.
MPVWSDNPQVVLDWLCDAWRCRYNQLRSRRMKWNRDRSELVPLGAVVDSRTDRQVREQCSWLASVPAMVLQSPNRIENTDWWAANKRRKTLKKQHRYPGMMPRFKSHKTDPMFVCWYNKGANAVFHRLNKHHGVVVISGQNSKEHSLPGQGCRYEIRIRVRLSQEIRPYTSIGVHPKAGYLVFVNDPLPIPRKRTGLETGIDRGCVHSLALSDGSFIDLPKNRLEKIDREIRRRQKAQSRRVRQSGLSAKEYVRGGHHSNRYMQEQKRISRLYRQAHNIIDDFQQQVSRRLVSKYDLIVLEDLNLTGMGRKAKPAPDPLHPGRFLPNGQAAKRGLNHALRSASMGGIRQKLEYKTKRAYASSLLLVNPAYTSQQCSQCGHTCRENRESQAVFHCTQCGLMLNADTNAAINILQRGHEVLISGMGEAGRGNTAPDVRGEHIAENAAVSKHEPTASH

SEQ ID NO: 14615 - protein, 364 aa, unknown
  TnpB Polypeptide
MERAFKVKIYPNKNQIQLLNQTFGCVRYIYNYFLNRKINFYEENNEGLTYNACSKELTQLKKENEWLQIPDKCALQNALRNLDTAYKNFFNKRANFPKFKSRKSYKDSYRTSDNLKFENNKIRIPKVGWIKTRGYKEISGRILSITISKNKSNQFFASICVTEFEPEQFEKTNQNVGIDLGLKEFAIFNTGEKINNPRFFVESQKKLAKMQRKLAKKVFESNNYFKYKIKVAKFQEKIKNQRLDFLHKLSIRLIREYDIICIETLRVKNMMKNYKLAKSFQDVSLSEFIRQLEYKARWYGKVISKIDTFYPSSQLCSSCGYKNHDIKNLDIREYDCPICGTHHDRDINAAINILNEGLRILNSI

SEQ ID NO: 14616 - protein, 417 aa, unknown
  TnpB Polypeptide
MYLTIKQQAKHLTKEEYNILRELCRTAKNLTNQAIYNVRQHYFQERQYLRYETNCYEMKNSDNYKLLNSNMAQQTLKNVDQMFKSFFALIKLAKQGKYNFRHIRLPNYLPKNGYASLIIAQIRIKNNVLTIPYSNTFKKKHEVNKIQIKIPKVLENKKIKEIRIIPKFNARFFEIQYTYEIQEENIKLNTNNALAIDLGVNNLCTCVTNTGKSFIIDGRKLKSINQFFNKQNAKLQSIKDKQNIKRKTKKQYLISRKRKNRVDDYINKTCRYIINYCLINDIGTLVIGYNQSFQNKTNLGKRNNQIFTHLPFGEIREKLEYLCKRYNINYILQEESYTSKASFFDNDDLPIYNADNPQTYEFSGKRIKRGLYQTKNNYLFNADCNGALNILRKSKAVDLTVLCRRGELDTPKRIRIS

SEQ ID NO: 14617 - protein, 387 aa, unknown
  TnpB Polypeptide
MNRTIKVKLNLNESEVQSLRETQKIVASCFNDHIEWSFQKRIWSKTVAHKDLYFTQREKHPQLPSAMLQSTRDTALESVKSLKFKFRPKKTENSGIRYDKRLFSLRGEQLTLSSINGRIKTIVKFPEWCRETVKEGKIQGIQLCWDKKKKQFNANFVFSLHDVKPKADGAVVGLDRGLINLVTSSSGEIFGGKEVRKNQRKFLFLRKRLSTKGTRSAKKLLKKLSGKEQRFSREVNHIIAKKLASRSEVKTYVIEDLTAIRRQKRGRKMNKLLSSWAFKQFESFLTYKCGAKGISIEVVSAAYTSQTCSCCGNILKSNRQGGRYSCKKCGYKGHADINAACNIRDRWITKSSPSSNCEQDGVKHPNGDCVLLDVGSSAELQGHGLVP

SEQ ID NO: 14618 - protein, 431 aa, unknown
  TnpB Polypeptide
MKTVKLTISNKIDVLDDMRVFSSIVRVAFNRYQEGLEEKEVRAYCNARFNHNSWFVQCAVKEAASLYKLNGEKSILFGGKNNLHQYLKGLIDKTTFKYRRMCPIGIQGEKLSKGNRLFIFDLDHQRLTYKPSRYRHVEIQFLPMKRKIAEELSKMQELAEQKKITVSIKLSDKYVWLTYDESLICDVRFKRLQSRRVLGIDMNPNYIGLSVIEFDKNDEFKVLHKQVFDLGKLTISSGKASTDSSSKYLTNKLRHETIAIAHEISKLINVWKCKTVAIEDLSIKPSDKKKGTHFNKLCNNKWERNLFVNKLKMLASLHKFNLVEVNPAYSSQVGNIAYGDENTPDMVAASIEIARRAYKKFDKGWFYPRFNIQFRDEQWKQTLGSVEDWKGLFFKIKETGLKYRFLLRDYIQNAVFSKNYIQKCYNIYTFA

SEQ ID NO: 14619 - protein, 495 aa, Vulcanisaeta sp.
MLRRSVAVELEVTKELNKLLYSVESAYLSIVREVVEYAVKHNVTSATELHRLFYSKYRLEYPGLHAHLVIQAIRQASGVAKSFVERRKRSLVSKPYPEVKTMSIRFTEFTWSYDQFISSVAPVRLELSLLGVRRVVWLRPHKRFWLYWWRVLTGEAELASTLMIKRKLNRWYAVFVFKIKPRQEAPQSVVAFDINENTVAVGKINLPSTVSKVVDWNRQYTTPELYTIRTDFGRLAKRYERIRNAIIERLKPGFALPNGKFSNVTDTREFRKRVKHLREGVRKVGRVRHVANELTKTPAIIVTEELGNNPQESMINEIRRNETRHRIKQTPFKALERAVEDKALERGSKIFRVSSYRNSRVCPMHFVRLKSTDDWHTLQCPLGHLVDRDYASVLNMAWKIAPEAWTKAFWWDLRKKMDWGEYEDRHNPLVPYGIAILLQHIMENTKASLEKSPAVLARGSPMNHHRMQNEGGGEETSHTLREPSPFRVGRRSVQE

SEQ ID NO: 14620 - protein, 255 aa, Streptomyces sp.
VSDLVARDGMWFLNATCEVPEAESNMDPHDFLGVDLGIVNIATTSDGEVMAGRELNRVRARERELRTKLQKKNTPSAKRRLKKRRRKEARRAKDINHKIAKHVVAEAERTGRGIALEDLTGIRERVRLRKPQRATHSSWSFQQLGQFIAYKACRAGVPVVYVDPAYTSRTCAQCGHIDQANRVSQAWFACRSCGFVDHADRNGSRNIRARAWELWRRGAQSTAPDPLPEPGRGTGRKRSTTASGARCASPGLPGR

SEQ ID NO: 14621 - protein, 405 aa, Streptomyces sp.
VVIVVRMAIACAVVGLRSDVVKLVVQVKLLPTPEQASALETTLRACNRAATYASQVAFAQDLKERNGLQKEVYADLKATFGLSAQPTVRVVKKVVDAYTTLKANLRAGNLGPPTSRRHRKAVSTPVVFRPEAAQPFDDRCLSWQHDARTVSIWTVDGRMRGIRFACSPDQLKTLVAHRKGESDLVRRGGKWFLVATCDIPDPEEYEPVGWIAVDRGIVNLATTSDGTNHQGRRLGRYRRWQARKRAELQAKQTRSATRRLARRAQKERRHATHVNHKISKEIVSVAQRTGRGIAVEELGGIRERVRLRGDQRGALSSWPFHQLGQHLAYKARWARVPFVEVDAAYTSQRCPRCGHTERANRPTRDHFCCRRCGLAGPADVVAGVNVRDRARSAWVFVTMPVPLPA

SEQ ID NO: 14622 - protein, 453 aa, Streptomyces sp.
VQLRPNVIFGAVGRPCARTVIGMKLRYNVRVYPSASQRGSLARAFGCARVVWNDALRLRHDASAQGLPRPTAAELSKRAITEAKKTPGRAWLGEVSAVVLQQSLRDLETAYSNFFASKNGTRKGPKMGPPKAKKKTARQAIRFTANARWSITKAGKLRLPKIGDIEVRWSRELPARPSSVTIIKDPSGRYFASFVVEADDKPLPELDVEETDTGIDLGLACYAVLRGRKIASPKFFRRQERKLRRAQRAVSRKQKGSNNRRKAKLAVAKVHARIADQRRDFIEQETTRIVRESQAVYVEGLNVKGMATRGGRLGKSVHDQSLGRFVRTLEAKCARYERTFVRIDRWFPSTQLCSRTGCGSLTGPKGREQLNVRVWTCTDCGTRHDRDENAEANLRAAGRKRAAEMRHEAERQNACGEHVRPRKPGQRSVKQEPTRSPVAARGGAGWNRPRSRG

SEQ ID NO: 14623 - protein, 383 aa, unknown
  TnpB Polypeptide
MKAYKFRIYPKREQIENLDRTLMLCRRLYNAGLEQRITAYERGHKLTYQKQQNELPNLKAEMPEYNGVFSQVLQDTLHRLDKSYSNFFRRVKEKKGKAGFPRFKPSNRYRSLTYPQAGFQISDNGHLELSKVGTIRMFRHREIVGTIKTCTIKRDAVGDWYAVFTTELPDVPKRKPKTAIGVDVGLKQLAKVTDGTKIMPPKFLRASEEKIKIIQRDVSGKVKGSENRRKCVRRLAKAHRRVERQRDDFLHKASRSLSLKADTIVFENLNIQNMQKNHHLAKSIGDASWGKLIQYTTYKAEDAGRRVVFVNPNGTSQICSRCGTMVRKSLSVRVHSCPTCGFSADRDLNASFNILGRLPSDRGELLKTPVEMLPLQQPQGGCK

SEQ ID NO: 14624 - protein, 419 aa, Kitasatospora sp.
VHLRYSYRLYPTAGQCQALARTFGCARVVFNDGLAARKVAWRADRSRIALGALAKAVITDAKRTTERAWLAAVSVDALQSSLRDLDAAYRGFFDAVSGKRRGGGRVGLPVFKSRKEKRQSVRFSRNGFRIRGNGKLNLAKIGDVRVKWSRKLPADPSSVTIVLDPSGRYHASFVVDVEPEALPELDAEVGIDLGLATYAVLSDGAVIDNPRFLRKAEKRLKAAQRELSRKAKGSKNRAKARVKVAKAHAKVADTRKDWLHKQTTGIIRENQAIYLEDLNVRGLGRGRLAKSVHDAGWSTFRRMLEEKALRYGRHVGIVHRTFPSSQLCSACGHRDGPKPLAVRAWVCGACGVSHDRDLNAARNILAAGRADRLNAPGGPVRPGVAIPHQARPVERGTHRNAADMGRKPRADGAAGIPAP

SEQ ID NO: 14625 - protein, 432 aa, Bifidobacterium sp.
MLEAVRVALDPTPAQERLLSSHAGAARFSFNAGLAHVKAMIDAQERPEWSLYALRRWWNANKDTLAVDKDGVPWWRENSKEAYNSGLEALSNALRNWSESRKGQRKGRRVGFPGFRSKDRATPRFAYTTGSYGLIPGDPRALRLPRIGRVHCMENVAKRVGDGRVLRMTVSRHAGRWHASLTVERADPAPATPSRGGAVGIDLGVRTLATLSDGTVIANPHALEGSEHRLRRVQKALSRRTRGSNRRRRTRERVARLHARVANQRRDLLHKLTTRLASIYSDISIEDLNVAGMVRNHRLAKAVEDASFHELRRQLEYKTARTGARLHVVDRWYPSSKRCSDCGRVKAKLSLDERVYRCDGCGLIMDRDLNAAINIMVAGSAPETLNAHGADVRPGVPWDAGQTAVKCEPSSHHGGMSLGADGRKTVLQAKTN

SEQ ID NO: 14626 - protein, 373 aa, unknown
  TnpB Polypeptide
VEKAFKYRIYPTKKQQELIQKTFGCCRFVYNYYLNMRKESYEKDKTSITYNMCSKDMTSLKKQLEWLKEPDKDALQKSLKDLDMAYQKFFKEYSGYPKFKSKKNRYKSYRTSCTNKNIRYDNRKIKLPKIGWVKTKDKQIPQGRIINATISQEPNGHYYCSLCCTDVEFPQFTKTDKNIGIDLGICDFAIFSDGTRIENPRFYEKSENKLVKLQRELSRKTIGSNRWDKARIKVANLQKHISNQRKDFLQKLTTNIVKNYDVICIEDLDVKSMKETDSTIRNKRVGDVSWAEFRRMITYKTQWYGKELSVIDRFYPSSQICHICGNNDGRKSEDIRFWICYNCKSELNRDINAAINILNEGLRMRTVGTTGIA

SEQ ID NO: 14627 - protein, 434 aa, unknown
  TnpB Polypeptide
MGEEATKTIQTRLHIASGDQSWLHDARLASREVFNQTIRLKQQGYTRTEIQRAVDRDDFLRNNKCAVVGKALQTWDSYESLLDWWHEQDNPDGGKPTPPRTDKKGAYPLVMAHTEGYRLAVDEDTNRVQVRISPKPYAKVTGHLRGEPDALDELRDAITSDEVDVGQAELLYRDGVYYLHVTVTREFDVPDPDTSDTLVGVDINERNVALTALDRETMRTKGTFVLDYGRVKQERQRYHTITKRCQEHGKTSIHRKLGDKEERFSEWVLHRLSRAVVEFAEQFSNPVIVFEDMSGLREELQYGTYMNRRLHKLPFDKFETFVSYKATWREIPTDTVDAYYNSQTCSCCGERGSRQGRRFRCSNDECAVVQDHADRNASVNIAWREKGKLDGNESNYRTHKTQPQVRLVRLSGSGRVSRPPSSRSLAEQGVLAHG

SEQ ID NO: 14628 - protein, 412 aa, unknown
  TnpB Polypeptide
MPVVVKEEMLVKGVVFYLASDLPSEAKLLLEDFRLAVNNAIRVGLQARVTSRNALVKIAYKDFREQHRRMYAQHLVSAFEVAGSALKNHRRRIRKGVTSRIPFVKRLMMKAENQAYKLDRKSGVIDLPIRAGCHVELRLVVSQYHREYLDDMSLSLGSLTVLPDRVIVAFRKDVPKPFAPESALSLDTNERSLDGIFVEGDVAKAVKADFPEVAIIQQRHHDRRKRLQKKKAHDRRTSRTLCRREGAREHHRVEYRLHQVANSVLKFAEERKSAIILEDLRGMRPKRNKELNRRLSKWPRRKLHQIIEYKAQWKGIPVVKIDPRNSSRTCPTCGRIQHSRMGAEFACECGWHMDRHLNASINLLQTAISKGMAGGLRFDPGAFQHDVMMILYEPAMAARSEPNGTSGVVGVT

SEQ ID NO: 14629 - protein, 391 aa, Erysipelotrichia sp.
VSHKTRIYPNKTTIKLLDSYFNYRRAIWNRALTVWNDAYDEHLINANQSPTWQSVRNELVSNKTDYDVMFPSTILKSTCNQLGKAWKMYFDKTLTKFNRPVFKSKKNTKQSFTVENETSRVMIKNNKLVLPISRDLKHKSYGIRLAEQPRFKGIVKVLTISKDVTGYYVSFIIKLDEPIPTIKTGLSVGVDANIKHFDSKDGSVNILPDRLLSLYEDVTYYQRALAKKRSANHQFKSNNYRKVITKLQRAYLDINRIQLDILHKYTKQLVKKFDYIAIENLDVTQMKMNKRLAKNLHRSLFGKFKEMIVQKATMYDKTVYKVDRFYPSTQTCSGCGNIKTNDSYGGKHSLSGDSIYHQHQTYRCYECGLVIDRDINAYTNIEHKMLQELQI

SEQ ID NO: 14630 - protein, 446 aa, Natronolimnobius sp.
MKIIRSDKLSVKVQQPEQREALDATLLVYRNLVRDLMTVMMTHWPALGRFDGNAVVKEIEQLIHPTSKRPEVRYPYFARRYYKFPSYLRRVAIMDAAGQVRSFNTRFERWRAGDRKKATVKPPQLVCATNTYPALYRGQCIRFNSDHSRAEIKVVHRGDWVWMAFGLAGDKRHIKQGRQLSPSLVNKRGRYMLSVPVERRVRLPSNADIDRVLSVDVGINTASTWAVIDASGTVHARGFLGRSDKDREARLIARIQKAARQHTRHGCRLPPGFCARDHRRLRGLFDNAAHQISRRIVNEALAHGAQAIAVEQLKGWRPTAGRRRSGLRQRFHRWFHRLLVERIETKAAEAGLRTLAVYPRGTSSQAFDGSGKVRRDKGNASLCTFPGGKRYSTDLNAAYNIAARGIVSIHRPAREGQAGAGRPKSASTPRSPVTLSSLWPTAMAAA

SEQ ID NO: 14631 - protein, 446 aa, Natronolimnobius sp.
MGSITRSDRLRIHADSPAQREALSETLRLYRRLVRDLMTVAFTHWPAIGPLEGNAVVSVMEGLVHPTAKRPDVRYRYFQNRYYKFPSYLRRVAIMDAVGQVRSFMTRHSDWLDGKRRHANARPPRLTASTKTFPSLYGGQCIKLNKEGTQAFIKVRYRNDWVWMGFRLSGTLRYRGRGTSQSPMLTSNGKRWGLSLPEQFTPVKPVRAPKRVLAVDVGINTAATWAVVDDQGTVHARGFLRRPDKDREHRLMQRIRKAARRQTRHGTRLPPGFCARDHLRLKHLADNAAHQISRQLVDLARAHDCQAVVAENLKGWRPKAGGKRTSMKARFHRWFHRMLVDRVQSKAREVGLRTALIHARGTSSQAFDGSGAVKRDARNHGLCTFASGKRYHADLNAAYNIAARGVVYFQGGRRESAACAPQPKSERTPRSPVTLSSLWSKATLAA

SEQ ID NO: 14632 - protein, 374 aa, Clostridiales sp.
MRRAYRYRIYPDHEQQKQFSKTFGCCRFIYNRMLSDKISWYEQHHEMLRTTPAQYKKEYEWLKEVDSLALANVQLDLEQAYRKFFREERAGFPRYKRKRNERQSYTTNVVNNNIRLEGGWLVLPKAGKVKIRLHRQIPEEAKLKSVTIAREGTGKYYASLLCELPEPENQREAVSWEEARILGIDYAMEGMGVFSDGTKAEYPGYYRKAQEKLAREQRKLSHCVKGSRNYYKQRKRVAVCHEKIRNQRSDHQHKLSRRLADQFDAVSVEDLDMKALSRCLRLGKGVMDNAYGSFLRKLEYKLEEQGKELIKIDRWYPSSQRCSNCGSIHPEVKDLKVRRWYCDKCHQLHDRDINAAKNIREEGRRLLKEKQESA

SEQ ID NO: 14633 - protein, 724 aa, unknown
  TnpB Polypeptide
MVHTSHVVTLMIVEKQGSLPIRVDKDTGETKDNEDVGVVEDDEEQEDGDNGQGTDKLPQNLFGLYNKVMRTLANFLQGRVREGTDPDILRVCQKYAEETGLERGSWPDGCLSGWRGKVLDQMAKQCSTAHTTHIETNLFIYALRYLKYLTRTDPEEASIRQLRTKTVYKKVISAVTDAFWSYLTKEDPDDIRVVISRRPSTLKVLPLGHEVWSVAERLLNHMKEMVPKDTTLSQKSEIMFRIMEKLEPFSIELQRQFMEGVEPPPGEIRWGKSKWTFCLCPQIEWRPKHIHVSTTAVIQLLRDLSRKHSHMKQILNDLNSHVDPEDSSHDQKYKIWSALFNMKRVLRPKHLEDRSQLRFGNFIATDGVSVSACVMKKNAPLQCEAVHMTNAINRVNASLKTADISSAPGIKEELEGLKTEKKVLAKRIKDLNDQYRIGDQVKQLAALEKMDDGTIVSTIGSTIVGLDPGKKSAATWVVHDPEKQAKHQKWEGDNGEKTVIEERYDSGSLGGGEWRFLSGQKQYTAKMNKRMEQLCPEVRNLPSTKTIDAGLLLDTYRQQVALWPGIEKAFFETTRWYQKTKMRKFCRGQSAMEDVIARITGTRNKEDQKKVIVAYGDGDNQGTLRGTSPIMSSRLLKKVSQSACVVLVPEFRSSKLCSCCHHEMTQFQGQFRMKRCINSDCIRTVWDRDINASINLLNLFLWACLSKNGKGRPQAFRRKRGCDE

SEQ ID NO: 14634 - protein, 685 aa, unknown
  TnpB Polypeptide
MGVVTNNGDDDDDLDIMVVKKTLNSLCMDVSRQQICSRIQSMVLVINHAVAEAYLFANFHITRCLDDVDFDVKQLPHLDRNFYYRCILAVSTSNVRKDTLGQSLKDSMIAFDALRPSGYLKVDVRQWGQVIADVSIQMATMACNSVWANVDRVVIKYLRLKHPSLKKHFNKIVKAVVQYPESDIDKIIPASLVHANNIKDVVRRLRDLLPLPRGKQFNTRAHLTMRLFHHVLTELGEDLKEKTTKKRPRLFSILPRKSGFTISYVPISSMTLMKILSMGDSPLESFRGDGRHENHSMLWRKYFNVQGLETKGSRFDNRILSDGKGVSVQMKHQASEDVAVDNAGYPKDAILEDCQDASLRVGVDPGMTDIVTVASSDGRVESFSSARFSEAAGYNTSNRRTNKWNVDTQDLVKSIPSPTTSSMHDMQDHVRGYLSALPTLLQHRASRGYRSMRFFRYVGKQKTIEKVCDLIAPKAQKKTIEEKVCDVIAPKAQKTIVGFGNWSNQGYGISRSCSGPVKEIRKCLSRRQNVLFKNVDERNTSCTCHGCFQKLVNMKADSVVWRRVKNEPPSLINGAPTTTTTIEKQKTVVKNVKVHKVLHCRNSVKSASSNVRCGATWNRDVNAAKNLLLLLTTWMDGKERPATFCVPSSSPTPKTTVSGEANVGAQPTDPPGSVSSLQLLSSRPA

SEQ ID NO: 14635 - protein, 460 aa, unknown
  TnpB Polypeptide
MLYVKSKKLMDVREGSLVILKLIRTYYVPISDPRVSDLITWYVVTLQKAIDIIWDNIRWELRKPKLTRRNGMLQVIMGLKLHNPIIPKGEKFNRMLRDILMKDNPYAKHWVDAIIRKAYSIIKSWRKRYLKGKARKAKPRIRRRFAKCKITLMKVDYREKTIRITMKPHEYLEITWRGTWFEKRVEGWLVGEVILKDDKIIIPFKNYKVVKVMDIIGWDSNELELTGYTPRIGFIHLDLRPLQSIKIVYEEKKRIAQSKGRRDLYEKYVRREKNRVRDFMNKLASQLIRTFPNTLHIFEDLEKEDMIDKGRVEKNRRKRNARTPWKTIHRKIGEKALTAKVPARNTSRTCSRCGFKVRDLRGQEFKCPRCGLKMNRQKNAAVNIRRRYVEGGRGRRGKHRMRGFPHRDELEETMKVELWAGVTQSGQRLMTWWGDDRKPHMKPMKPRASRRLHIKQYKPP

SEQ ID NO: 14636 - protein, 383 aa, unknown
  TnpB Polypeptide
MRTYKFRIYPSKKQEELLNKHLGLAKNLWNELLEHCKQTYEDFGYFPTKNTLQLMVKNYGLYSQTQQEIAHRVHNSLMRVFKLRKKGVKCGFPRFKSFDRMKSLHYPQYETGFWLDKKLKVTHFGEIAVKKHREINGRIKTLTLKKESSGKWFAVFTVEEEKFTPKENKGEAVGIDLGLKTFATLSNGMKIDNPRYFKKHEDRLAFIQRKFSFHKKRTKNHKKAKIRVAKLHEKVANTRKDFLHKISTKLVNDYSFVASEKLASREMAEENYGKQINDAGWNMFANMLAYKAEGAGCRVVFVNPENTSKMCSRCGNIRNDLALRDRVYICPKCGLSRDRDLNSAANILTRATPGQGGSNACNSVKERDVAVAMSVKQEAHAYS

SEQ ID NO: 14637 - protein, 382 aa, unknown
  TnpB Polypeptide
MRTYKFRIYPSKKQEDLLNHHLRLAKNLWNELLEHCKQTYEDFGYFPTKSTLQMMVRNYGLYSQTQQEIAHRVFNSTVRYFKLKKQGRKAGFPRFKSIDRMKSLHYPQYGSGFSLDKKLRVTPFGEIAVKKHRETKGRIKTLTLKKESSGKWFAVFCVEQEKGIPKENKGEAIGIDLGLMSFATLSNCENIKNPRHFKKHEDRLAFIQRKFSFHKKRTKNYKKAKIRVAKLHEEISDCRRDFLHKISTELVDDYSFIALEKLASQKMSEENYGKQIHDAGWNMFANMLAYKAEGAGCRVVFVNPEDTSKMCSSCGNIRDDLSLWDRTYNCPNCGLLIDRDLNSARNILMKATPGQGGSNACNSVMERDVALATSMKQEAHTC

SEQ ID NO: 14638 - protein, 462 aa, Symploca sp.
LYRTVTIRARFDHEEKLFWLDQCHHANSLINCAVYHTKQSHFSWLTEKGDAFTIYWKEDELRHGWKAYGCLTTYPKLDQALKQSEHYKAMAAQSAQQTLKTVGESIDSYNALVKAYYRGEVDKPKLPRYRTKGGLAAVTFPKQALSYKDGYFKPSISRETKPELITDIKLELPEFIDSDWVKEVTVRPCLGEFWINWVIDDGKQPVEVNPNLNYTQAWGFDHGGANWLTGVSTKGQSLIINGKLLRSMNQGYSRLVAKYKHGRQNYWDSNLDRIQRKRNNQMRDAVNKAARFIVNRCLSDGIGNLVIGWNEGMKNGSSMGKRNNQNFAPIPTGRLITRLKQLCPEYGIVLSVTEEANTSAASFLDGDSLPKHGEKPVRWSSSGKRVQRGLYRSAKGFLINADCNGAANIIRKVATQLNINLVEVGSGSLALPQRYEVITGLSKSYRQQALPPTALASVATTT

SEQ ID NO: 14639 - protein, 325 aa, Lactobacillus sp.
MDRACRPKFHKKGVNDGYQTSCSYDSKKKNIENCTPFSGTVRFLDMKHVKLPKLGRIRISGSSYRKVLAHNPNFRIGTAAIKYDASGYYLSLQIGDVVPFKSQKPKTDKTTGIDLNLDNFLTDSDGVVVDNPRFYRKSLKRLKRLQRRASRRRTRAKKEGRKLWQSRNYQKARLQTSRLQRRVRNQRGDFLQKLSTAYINNHDVVVLENLRGKNLLKNYALAMSISDAGWTSFQRMLEYKADLYGKTYLEIDKRNTTQRCSSCGSIMGHNGHEKLTLKDREWDCPMCGTHHIRDYNAALNILEKGIAKLSDQEYKIIPYDSEAAS

SEQ ID NO: 14640 - protein, 459 aa, Mycobacterium sp.
MARFEVPDGWCVQAFRFTLDPTEDQARALARHFGARRKAYNWTVAVLKADIQTWRETGVETAKPSLRVLRKRWNTVKNEVCVNAETGAVWWPECSKEVYADGIDGAVDAYWNWQQSRAGARAGKRVGFPKFRKKGRDQDRVTFTTGAMRVEPDRRHLTLPVIGTVRTHENTRRIERLITKGRARVLAISVRRNGTRLDASVRALVQRPIRPNVWLPDSRVGVDVGVRRLATVADADGVVIEQVANPQPLAAALRELRHVSRARSRCTKGSRQYRERTTELSRLHRRVNDVRTHHLHVLTTRLAKTHGRIVVEGLDAAGMLRQKGLPGARARRRGLSDSALGAPRRHLSYKTGWYGSELVVADRWFPSSKTCHACGHVQDIGWDEKWQCGSCSVIHQRDDNAAINLARYENTISVVGPVGAAVKRGADRKTGPRPAGGCEARKGRSRTAAEQPRDGVQVA

SEQ ID NO: 14641 - protein, 386 aa, Sporomusa sp.
MLRAYKTELNPTAEQKTKIRQTIGTCRYVYNLYIAHNKEIYEQEKRFVSGMDFSKWLNNEYLPNNPEYQWIKSVSSKAVKQAIMNGEQAFKRFFKGESKFPRFKKKKNQDVKAYFPKNNTTDWTVERHRVKIPTIGFVQLKEKGYIPTNAVVKSGTASMQAGRYFVAVLIDSNEKPKEDIEPTNGIGIDLGIKTLATISNNKVFKNINKTNSVRKLKRKLKREQRRLSRKYEHKKKRGEKTATYSANIAKQVKKIQAIHYKLTNIRNDYTNKVVNEIAKTKPSHITIEDLNSSGMMKNRHLAKAVAEQRFYCFKQKLECKCKDNGIELRVVDRFYPSSKTCSCCGNIKKDLKLADRTYTCQECGLVIDRDLNASINLANAKIYKIA

SEQ ID NO: 14642 - protein, 547 aa, Streptomyces sp.
VGGLREVVASFVVPASTGVAVRDRLRVSDADAAVLTEAGVYLGSLAAGDLAERCRQGPAHDAVSWAVRKRSLTGRSSARWAGSITKATHDQWALARRGQAAHMAWLRGQIASIEARLARPLGAKADKRDGLARGYGSRGEWHAKSRRLHALKARLAVVEADWTAGRVRVVRGGRRLANVRHHLQAAGLDEQAWRERWRAERMLLSADGETGKRFGNETIRVTDTGQVSLKLPAALAHLANAPHGRYVLDATVEFRHRGQEWLDRITVNRAVAYRIHHDTARGRWYVTASWQRAATTALPLQAALARGVVAVDMNDDHLAAWYLDVHGNPVGEPRRFFYDLTGSTQHRDAQIRHALSRLLHHTRRCGAAAIAIEDLDFRDGTSREKHGRNKRFRRLISRFPTAKLKARLVSMAAEQEIAIVAVDPAYTSRWGAQHWRKPLTTPTRRISRHDAASIAVGRRALGHPIRRRTAPPHDNQSDRRGHRTVQARPDTRRREETRPHIPGPRTGCAPPGSGAKAGDQGAQHRTGHPAEHRSWQQDSLRLSPQER

SEQ ID NO: 14643 - protein, 435 aa, Kitasatospora sp.
VHLRYSYRIYPTASQCAVLARTFGCARVVYNDALAARKEARKAGLPYPRSADLQKLVITGAKKTPERAWLSSVGVDPLIQSLRDLDTAYRNFFDSVSGERAGRPVGLPRFKSRKDSRQSLRFTRNGFRIRSNRKLNLAKIGDVRVRWSRALPADPSSVTVVLDAAGRYHASFVVDVESDHLPEASSEVGIDLGLTTYAVLSDGSVIDNPRFLRKAERKLKAAQRELSRKAKGSKNRAKARKKVAKAHAKVADTRRDWLHKQTTRIIRETQAVYLEDLNVRGLARGRLAKSVHDAGWATFRHLLEEKAARYGRHIGIVHRAFPSSQLCSECGHRDGPKPLHVRTWACSACRALHDRDLNAARNILAAGQADRLNAPGGPARPGVAIPHQARPVERGTHLGDLRNTDTRAPGAEGIPRLQAGEDVKRPVAVPRSPSP

SEQ ID NO: 14644 - protein, 542 aa, Parageobacillus sp.
MKKIWRIYVLKDPNKEEGKVMKTVRGMKIVSNDEAQLRSLDELMRVFGSAKRYAFNRLLEGRNAKDIIKHLPRPFRLNKRFAEDAVLLAQSLISSQRELLPIRLEDVQAKIEKTEKKIDEYQHGRKTPKKVDLPTCLAGLHRRLEKLKSKEAELKHHLDQGTIPRVIFGGKQNFYKRLKGNITNEEWKDLRSNQLYARGDKSKKGNLNIRLVYDDHTDECYVEIANPLGQQKGKHAPRLRLLVSVPEKYEEEIIDLVMGEPVGVNAKGKPIIEYRSYTVEIKRKNGEYYVHLIYEEEVYGRELAYDEPIQAERIAGIDINIDRIAVSIVSKQGNFLQSKVFYCHELEYVRANKRNNLIGETVRDVYDWLLQENVGAVVIESIQLRQRHDTDKRFNRLTHNFKKKKLTETIVRRGMRLGFRIKKVNPAYTSVIGRFKYMKKYGLYVHESAALVIGRRGLGYRERLPKELMDTIKTKVKRHLVAVLGSMEESYKQSKSGKKQRQYIAMMLRKIENFKQEHEWSLWNILHQFCWLNQYQIQLKEV

SEQ ID NO: 14645 - protein, 462 aa, unknown
  TnpB Polypeptide
MQQIITAKLKLKTTPEQHQLLRQTQLTFRDALNHVSRYAFAHGKVSSAKRLHQGTYDDVRLLFGLPSQMACSVMRQVGSTYKGLWTKLKKNSEHRKVKYTRKRFKGLDKAPKYISPTVTYVYGHDYGFKSDQCVSIMTLHGRMILPYQGYHPHVALIQQGASFGEAKLWYDKPHKQYYLLVSLELEVTDPTPEALPTVMGVDVGMRYLATTATLTNQSRFYAGKAVRARADHYARLRKRLQKKGTRSATRRMIATSGRERRLKLQVNHTIAKSIVQAHPHTLIGLEALTGIRERTKRRTRRRKKNGRGTEPVSPKARRANRHVSRWAFAELQNMIAYKAALAGSIAIKVDADYTSQACPLCGYTDEKNRPRHGLLFICQNKQCQYQLRTARPYTLHADLVGARNIAMRTLCVWQDWAQTGQLSVAPGSELGPDASDTETKAARLARLARYAELRWSSDASLC

SEQ ID NO: 14646 - protein, 393 aa, unknown
  TnpB Polypeptide
MKTIFKSFKFRIYPNKEQEILLAKHFGACRFVFNYYLNKRKETYLEEDKKSLNYYDNANDLTQLKKNDDYIWLKEINSQSLQSSLRNLDTAYGKFFRKQTKFPRFKSKYDRQSFKIPQFVKLEKNKLIIPKFKGGIKINLHREIEGKIQFATISKSTTGKYYVSLTCEVQYQPYEKTNSKVGIDTGIKELAILSDGTTYENIKTLKNNLKKLKFEQRQLSKKVKGSSMRDKQRKKLAILHEKITNVRKDYLHKVSTEIVKNHDIISVEDLAVKNIMKNHKLAQAMSDVSLGTFYSMLEYKCGWNDKQFVKIDRFFPSSKMCSNCGWINQDLTLNIREWKCPSCGKKHDRDFNASKNILKQGLKILSGLGTNSDIKQKQVESFSLEEAMKPETH

SEQ ID NO: 14647 - protein, 387 aa, Lachnospiraceae sp.
MVRLLKSFKTEINPTEEQKHKINKTIGTCRYIYNFYIAHNKELHDKGEKFMSGKAFSVWLNNEYIPNNPDKIWIREVYSKAVKHSMEDACTAFTRFFKHQSGFPRFKKKSRSDVKMYFVKNNPRDCCCERHRMNIPTLGWVRFKEKGYVPTTKDGWIIRSGTVSIKAGRYYVSALVDVPEHKFTGNFTEGIGIDLGIKDFAIVSNGRTYKNINKSAKIKKLEKQLRRGQRCLSRKYENFKKGESTQRNIQKQKLKIQKIHQRINNIRTDYINKTIAEIVKTKPSYITIEDLNVRGMMKNRHLSKAVASQKFYEFKAKLKIKCDDNGIKLRIVDRFYPSSKLCHCCGSIKTDLKLSDRIYKCDCGYVEDRDFNASLNLRDATTYEIAL

SEQ ID NO: 14648 - protein, 541 aa, Streptomyces sp.
VGALRELGEPFVVPGPSGVAVRTRLKGLTAEDEQVLRLVGDHLGWLACRDLKERCSAGLEHDGDRWAERKRVLTVESSSRWAGSLTRATHDQWALARRGQLAHIHSLQAGVRTIRHRSLPVGEKGSKRAPGGYRSRREWFAKSRRLQVLEDRLRAVQADWQAGVVRVVRGGKRLLNTSHHLQAAGLTHEQWRCRWQAERRFLQADGESGKRYGNETVRVTPGGQVSLKLPAPLAYLANAPHGRYVLTAKVSFAHRGEQWADRVAANRAVAYRIHEDVQRGRWYLTASWTIPPTPAVPLDAARANSLIGVDTNADHLAAWRLDAHGNPVGQPLRFSYDLTGTASHRDAQVRHALIRLLHWAQRHGLAIAIEDLDFTAETTREKHGRRTRFRKLISGMPVARLRARLVSMAAELGIPVIAVDPAYTSRWGAQHWHKPLNSTTRTTTRHDAAAVAIGRRALGHPIRRRTAPPRTHQSDGCGHRTVQAEPDTPGREETRPRIPGPRTRSAPPGRDAKAGDQCAQHRSEHTAEHESWQQDSLPLSL

SEQ ID NO: 14649 - protein, 215 aa, unknown
  TnpB Polypeptide
MKNMYILKNNNNVIFGNGEKAEIVFNMEEYNDVLENLETNKYEKKLKREQRKLSRRCKLAKDSAKKLSDSKNYQKQKKKVAKIHNKIRNKRKDFINKLSTKIINNHDIICIEDLNIKGMLKNHKLAKSISDVSWSEFVRQLEYKANWYERKIVKVPTFYPSSKTCSSCGNIKETLTLSERIYHCECCGLEIDRDYNASINILRKGLEILREEKVS

SEQ ID NO: 14650 - protein, 435 aa, Arthrobacter sp.
MIRAYKFRMYPTSKQEDLLRAMLADHCFLYNAALEARAGAWTRSHVGIRYADETGQLTAIRAYDPDYARWSFTSQMGTLRRLERAFQGFFRRVKAGETPGYPRWKKSGRFNTVVHRNGDGAKWDSVPHPTQTRVYFQGIGHVRVRQHRPVTGRVKTVSVKREGKHWYVVLAVEQDLPAPLPKTGAVVGLDLATGSNGLAYTSLGERIGNPAYGKVSLEKLADAQRAVKRTKPGSNRNRKARGRVAGMHRKTRNQRHDYLHKAAHQLVARYDVIVAEKLTIAGMTRRAAPRPDGAGGYEPNGGSAKTGLNRSILDAGWGILLGMIRAKAESAGRQLILVNPAYTSQTCSECGHREAANRNGKDFLCLSCGHRDDADVNAAVNILRAGLVLRDTAKAVSRENLSGSGGVTASQSGEVTSALLLDRARRHAQGELIDS

SEQ ID NO: 14651 - protein, 403 aa, Lachnospiraceae sp.
VERDLLEPELLPVDSGTGPHRDDQTVYRDPGGEMKAQRAYKFRLYPDRQQETLFHKTFGCCRFLYNHMLADKKEMYEKTGKTERLTPAGYKTEYPWLKEVDSLALANVQLQLEAAYKKFFREKNVGFLRFKSKHRSRRSYTTNVVNGNIRLREGKLRLPRVGEVKIRCHREIPEGYILKSVTVSMDPSEKYYASLLYEYQVSENQAAGKDRKEAEILGIDFTMQGMAVFSDGTRAEYPMYYRKAEERLAKEQRKLSHCQKGSRNYEKQKRKLAHSHEKVRNQRRDYQHKLSRKIADRYDAVAVEDIDMRAMSRSLKFGKSVMDDSFGAFRDMLRYKLAEQGKTLLKVDRYFPSSKMCSRCGNVKKELGLNERIYLCGCGNRMDRDINAAVNIREEGRRLLMNG

SEQ ID NO: 14652 - protein, 403 aa, Mycolicibacterium sp.
MQMRHRYRIEPTPAQQATLARVFGCARVVFNDALRVREQAYRAGVKLSDSEIQRRVVTTAKTTTRRAWLCEVPSVALVQSVNDSRRAWRNFFESVSGKRKGRKMGRPRFKSRKDHRQSFRLTRNGFSLRSNGRLFVAKVGEVGVRWSRELPSEPSSVTIIREPDGRYYASFVVDVPASPLPPVEREAGVDVGIARLATIAATDGVRSDIDNPKGLGRKLRKLAQLEREKSRRQKGSANRDKSRRKVAVPHNEVARARRDYHHKQALALVRDNQVIHVEDLNILGMVQNRRLARAISDAGWGQFVRIIGEKADRYGRTVHTVSRWLASSKTCSGCGHRLDELPLQVRTWTCPACRVVHDRDHNAAKVILAAGRAERLNACGVPVSPATSGQARGDEAGSTPTAA

SEQ ID NO: 14653 - protein, 406 aa, Lactobacillus sp.
LVKLGRTIKLRLYPDTEQAAAFLAMSEEYRRLANIVSQWIFDHGFQLSWLKINHHMYKKIRQESVLNSQMVQSVFRTVVAHYKTVREQMKQHPYRCKDEESKWVQVPRDLTWLVTSIQFHRPQADLVRQSNYSFVDKMQQLSITTLGKRTKLRFTDKGFEKYFTEDWKLGTAKLVHNQGKWFLHIGITKETSDFDAKDNPQIVGIDRGLRFLATAFDSEGKTRFFDGQKILRKRKKLLETRRQLQSKGTKSAKKKLKQLAQRENRWMTDVNHWLAKTLVAAYGSHTLFVLEDLTNVTFNTDDLPKSLRNSHRSWSFFQLESFLMYKAQAIQSAVVKVNPAFTSQRCPRCGLVEKTNRHHETHEYWCAQCQYRCNDDRLGAMNIKMLGQEWLNGIKRPKITKLTAIG

SEQ ID NO: 14654 - protein, 374 aa, unknown
  TnpB Polypeptide
MQRTFKYRIYANKETLTKSENWLRLCCNLYNCALEERIDAYKKQQETLSGYDQANELVELKNSFLEYKLVGSQTLQGVIERLNRSYQSFFRRIKNNEKVGFPRFKSSKRYDSFLLKNTGWKLDGKKLLIRNLGQFNIRLSRKIEGKIKTITIRRTSSNEWYACFNCDEVPEKLLPQSDKVVGLDMGIKSYLTDSEGSHIENPKWLKHSQRILRVKQRKLSRAKKDSNRRKETRLQITKLHEKVVNQRKDWQHKLANQYIQNYGTIVIEDLNIKGMVRNHHLAKAISDCAWGKFFQLLKYKAEEAGRDIVESYRFKPTSKTCSSCGAINKTLKLSDREWVCQTCGTLHDRDENAARNIKESGFGQNLQTLTCSTS

SEQ ID NO: 14655 - protein, 380 aa, unknown
  TnpB Polypeptide
MKRTFKYRIYANNQTITKAENWLRLCCNLYNCALEERIDSWKKLRIPLSLYNQINELPNLRKIFSDYKGVDSQSLRTPLRILDNSFKAFFRRMRSGEKPGFPRFKSISRFNSITLERAGWHLDGRYLWIHKIGRFKMNLSRPIEGKIKTITIKRTPTNKWYVCFSCDEVPEKILPQSDKVVGLDMGVKSYLTDSEGNHIENPKWLRHTQRMLRVKQRKLARAIKGSNRRKESRLQVAKLHEKITNQRLDWQHKLANNYIKNYGIIVIEDLAISNMVRNHCLARSISDCAWGNFFQLLKYKAEEAGREIVESYRFKPTSKTCSSCGAINKTLKLSDREWVCQVCGTLHDRDENAAKNIKESGFEQNLQTLTQASASAIRSL

SEQ ID NO: 14656 - protein, 371 aa, unknown
  TnpB Polypeptide
MRKTFKYRIYANKETTAKAENWLRLCCNLYNCALEERIDAYKKECKTLSGYDQSNELPKLRKEFPEYKLVGSQVLQEVLDRLNKTYQGFFRRIKKGEKSGFPRFKSVKRYDSFTLKNCGWKLQGKKFLVKHIGIFNIKLSRRIEGEITTVTIKRTPTNKWYALFSCDEVPEKVLPKSDKVVGLDMGIKSYLTDSEGKHIENPKWLKHAQRILRVKQRKLAKAKKGLNRRQKARLQVAKLHEKIANQRRDFHFKLANQYVKDYGVIVVENLMIRNMVRNHHLAKSISDCAWGNFFKILSFKAEEAGRIVLKENPRNTSKMCSECGSINAELKLSDREWVCRSCGTLHDRDENASKNIKRLGQSHQTLTYSTS

SEQ ID NO: 14657 - protein, 303 aa, unknown
  TnpB Polypeptide
MGRSVVVQKLNRRWAQVKVPGCGWVRFRLTRACLPDAKTFRVTFRNDQWHIAFAVIPAPVPAPGTGEVIGIDRGVTITAALSDDRRLNCPQLTVKERAQIRKHQRRAARAPKGSERKTAEYAKAARLKAREADRRKDWCEKTSTMLARTYGLVRFEKLNIKNMTARAKPKSDPEQAGTFLKNGRAAKAGLNRAILAQGWGLLRRRTEHKAPGRVEDVPAPYTSLRCSACGWIEKKSRKSQADFVCVSCGFTCNADENAAVNVAAGQGGIPRPRRTAGAGGATAATSRSNAREPQPTWVGIPLF

SEQ ID NO: 14658 - protein, 482 aa, Streptomyces sp.
VKKFQAQPGSVVQAHRFALDPNAGQSAALRSHCGAARAAYNWAVGWVEASWWQRRVEESYGIAEDELTPWRPWSLPALRKEFNKAKQADPRFSGWWTENSKEAYNTGLANAAAAFDNYAKSKQGKRKGKRVGMPRRKSKHRARLACRFTTGTIRVEDGRRHVTLPRLGAIRTHESTRKLQRRVANGTARILSATIRYERGRWFVSFQVEVKREIERVTRPGVTVGVDLGVKVLAVMADSLGEIRYIPNPEHYDTALKVLKRLSRRVSRRQGPDRRTGQKPSKRWIKANAERNQVHHRVANLRADALHKLTTGITAEYGTVVVEDLNVAGMLRNRRLARKIADAGFGEIRRQITYKTRRNGCRTVVASRWYPSSKTCSDCGAVKAKLPLHVRVFDCDACPLVIDRDENAARNLAALAAACMTGTGVAGDQGAQAPKPRGADQKTRTTRLDLTAGAGRAGGTKLPHQRVTEARDRTQTEALMLW

SEQ ID NO: 14659 - protein, 637 aa, Streptomyces sp.
MADLRPIAPPFVALGPSGVAIRDRLKGLALADEKVLRLVGAHLGSLASRDLKARCADGLEHCTDTWAARKKSLTSESSSRWAGAITKATHDQWALSRRCQLAHIQGLEAGLATIRHRLSQPLGQKGTKKAPGGYRSKHEWFHKARRLHVLEERLERERADREEGVVHVVRGGKRLAGNRHHLDAARLTEAEWRQRWEVERWFLQADGESGKRFGNETLRVAPDGEVSIKLPAPLTHLANAKHGRYILGAKVRFPHRGQEWADRVEANRAVAYRIHYDVQRARWYLTASWTFPVTQTVPIETALADGVIGVDTNADHLAAWRLDTHGNPTGQPRRFSYDLSGSADHRDAQVRHALSRLLNWAKTCGVKAIAVEDLDFAAEKTREKHGRKRRFRRLVSGMPTGRLRARLTSMADATGIAIIAVDPAYTSKWGAQQWQKPLTGKTRKRTRHDAASIAIGRRAQGHPIRRRTAPPRDDQSDRRGHRTVQAGPEAPGREEPRPRIPGPRTRSVPPDAGSTRATRTPKTVRGVRSDQAWVQDPLLLTDQERSDQLVAGLVHGGGDGLAVEGGVGDDGDLAGLGDGGDGGDAGDRGDLAGDRALAVAAGHALDLVDGGEFGLRLCGHGALLLGIQGLTVPRLYP

SEQ ID NO: 14660 - protein, 410 aa, unknown
  TnpB Polypeptide
MFSKGGINFNKVERHIINKNHPMYSACDNLCFLAKNMYNLCNYTIRQEFFRTKTVKKYGVLNKELKHTDAFVELGSNAAQMVTKSLCKSWKSFLVAVKDYTMHPKKYLGKPKIPAYKKKDGRFICTLTNMQTHIKDGYLYFSFKRMKKYNNLIHTKVIGYHLGTRIIPKGGCYIIEIVYRDEKQFINNLDRNRISSIDLGINNFVTMVNNIEEPSIVINGKGIKSYNQYWNKKVSNLRRIAKAINGSDWTKRMQNLTNKRYFKMEYFMHCTSRWVVDYCVNHNIGTLIIGKNDGWKQKSNMHKVVNQTFTQIPYESFIKKLEYKCEEAGIDLIETEETYTSGTSFLDDELPIKENYNKLRRVYRGLFRSNNGKYINADVNGAFQIMRKVFSNVKANEIVGAYSHPVIINL

SEQ ID NO: 14661 - protein, 222 aa, unknown
  TnpB Polypeptide
LLKTIIKKDKSSALTYRIKIKNDEIYLQLMFTLKHTIEDCLTRSSNGVFGIDFNKGFISVTETDKQGNMIQTYNLDYRFGSGNKTKNDLEIVIGKVVKEALEKGKDVVVEKLDFKVKKSEIISKKNKKYNEMLSSLPYRMYGSIVKSKCAKNKVYLHQVNPAWTSYIGNIKYVTPRKMNIHTAASFVIARRGMNLIDSISKKKMKLKRKKRKKYEKRKVENK

SEQ ID NO: 14662 - protein, 358 aa, Gemmatimonadetes sp.
LRDLLLERDEASYRETGKRLSRRALQDVVYEFASAHPGLGWPAHARNQHRRDHAVAVRGAFARLDAGKRGRESGWPVLRRGRPTSIYVHNQMLRVSGSYVRLSRAPHGWTRYRGTIPDGKIMSGRIRRHGGTWTLSLSIEAPMPAYVEPQRETCHVRLGPGGVAEVTDVASGTTVCTDLDRCRELERRMAKLRRRAGRRSWRCADCGGLMRADARSGLLARDKRKAPCGHWIEGYERTARLRRAEAALAKTGRRIRNRQRDAVHHQTAGIVRRYGKITVYAEPGHGGGAVEFTRQLDYKSAWHRRALTTNGTAARAETGPSEEGQTDVETCVVRETSIPPRTHRRGHQSESFSSRQRV

SEQ ID NO: 14663 - protein, 616 aa, Rhizobiales sp.
LAGRKAVRLAPVVAEYAKLMSRAERHLLAQLKAGRTWTGDLKVSSYQPLGISAVHLDMAYRQLMAKLASVSELAKERADDLARKAASKKTDIKRKTMALARTAKARVKLREELATISVKLEKRRASMKTANEKKRADELFALKQLLIKHHARRAALENATFEIQELRFALHQHNRRLNILESKHAEARNLAVDPTICFGSKKLFRAQFDLQKNGYADHAEWLGAWNAARSAQLTLDGNSSKEGGNQFARLNPRRDGRFDLELRLPKVLTHLATRTFKVSGQTIACVDLHGLSFNHGNVVIEQALANRKPVTVKFLRDAKSWKVMVSVDHATELKTPDFSAGALGVDLNAGHISAALVDRDGNPVEVFEFPCVTYGKTSDQAQDAIRKVAAEITALAERLGVPVVSELLDFSEKKKTLKDATDVRYARMLSSFAYSAFGKTLASACARSGVALRRVNPAYTSIIGRVKFARRYGLSVHEAASVTIARRAMGYSERLPRSSTGTVKVPTNGCDHVTLDLPVRKDASEQAPKSRHVWSRWNGLNKEYQKALAALGSSRRRPRPKRGSRRRGVANCHRCGGTLAGGAENRSMVLRKRQDVPAKSRFSHAARRRSVPGINS

SEQ ID NO: 14664 - protein, 404 aa, unknown
  TnpB Polypeptide
VLVLEYKAKGNRQQYQAIDEAIRTTQFIRNKAIRYWMDVSREAKINKIALNNYSTALRKEFKFVEQLNSMACQAATERAWSAIDRFYSNCKSKKPGKKAFPRFQKDNRSVEYKTSGWSLHPTKRRISFTDKKGIGEVKLLGKWDIHTYPVKSIKRVRLVKKADGYYCQFAIDIQVQTEQRTADGEIGLDVGLEFFYSDSNGHHEENPRFLKKAEKAIKHAQRQIYKKEKGKNQRKKARRRYAQKHLKVNRQRNEHFKRIGRCVCKANALVAYEDLSVKNMVKNHCLAKSINDAAWSTFRCWLEYFAGKFITLVVAVNPRMTSQKCSDCGTIVKKSLSTRTHKCSCGCQLQRDVNAAINILNLGKATVGQTGNNATGLVTTTLIGENLLEQVTRKNVESPGFPNK

SEQ ID NO: 14665 - protein, 350 aa, unknown
  TnpB Polypeptide
MIVRTLKLRLTKVQETILNQWLWHLTGVWNWAIKKIEHDAHDKIYHFKFNFINLVANHSKCMGVPSHVMQGILSQAYLSWQRCFKKLGGKPHLKGQRNKLNSIPFPDPIKFPKDGKIGILGIGKVRFYKQDLPDAKIKCGRIVHRASGWYLCLWFDCDHKFFVKQTDKAVGIDPGFKTLLTLSDGVKIENPRELHRGSERLAQAQRGKRKHLSARLQERQANRRRDRNHKISRKLVENYKTICYSDDSFKGMVKRFGKSVSEAGLSQLVQMLAYKCRTGSRELVPVESFNTTKTCSVCGALTGPTGLSGLAVRQWTCSACGADLDRDINAAQNVLFAGLGASHLTEIPGG

SEQ ID NO: 14666 - protein, 250 aa, unknown
  TnpB Polypeptide
LPIKSKIEESTSVGIDLGIKDFATLSNGEKISNPKFLGSKLERLKALQQRASKKKKGSNNRKKANFKIAKLYEKVTNQRVDFLQKTSTKLIRENQTIILEDLNIAGMMKNHCLARAISDVSWSKFIEMLKYKSEWYGKNLVQIGRFEPSSKMCSCCGTINKNLKLSDRNWTCMSCFATHDRDINAAINIKKFGLIGVFNAPGKASLSYGKNQILSRPGSPEELVEMPKRAAPKVRKNKDRGDKKLLTKVN

SEQ ID NO: 14667 - protein, 196 aa, Gemmobacter sp.
MNRLTGADPTAPVPEAPQEVTGPEAARYRNMHGRFFRLLGGLGRLKARRRALYRRIDGVKRSWFGHVANVRAALAEKHGAVVVREDLSVLAVEKKDVAYRGRTFNKLINNGAKGQYTRRADDTLEWRGIATLKLPSFYSSSTDWRTGTVDRGQRSGSRFRAPDGAEWDADLHAAELLARWLFLRPKPAAPAAAPTL

SEQ ID NO: 14668 - protein, 350 aa, Gemmobacter sp.
MIGTFRLHDHRKVRGRIQTVTLKWAHGRWWCVLTSLIQAKDLYQPVRAGVGDAGADPGLTAALTLSDGRVLDPPRALDEGLARLRRAQRALSRKFEALKARQAEENRAARAEGREPVRLPRPNRLRRQIAEVGRAHTRVVNVRDHWHKVNARRVANAYDRVAYEAHGLMFMIRNRRLARIASDRALAQQRHALASALGPRLVPVPNRREGVGGNSQTCVCGASVPKTLRDRWHHCPACGVSAPRDVVSANIAELIAFGTHKLTTAPGRGSKDVEGATPQARESAPGTGEEPVRAPDETSTSCDLRSNENTAGGFGLRRKARLVPIGVLSLERKPKPHGYEKIRKHPASAG

SEQ ID NO: 14669 - protein, 347 aa, Moorea sp.
VSRYVFNKTVKIISDGSVKANWKGIKTDIINSLPDWCKSVPYQIKSIAIKDACTAVREAKKKYNKTGQINRVRFRSRKNPVQSCYIPKSAVSAKGIYHTKLGKVVFAEALPDNICDCRLTSTNGDYYLTVPHKTTKNTAENQGRVVALDPGVRTFLTFFSENSVGKIGDGDFSQIQRLCSHLDQLISKISKAKGKQKYRMRKAGRRMVIKIQNLVNELHHKAARFLVDHFDVILLPSFETAQMSKKKQRKLRSKTVRNMLSFAHYRFKEFLKHKAQETGKLVVDVCEAYTSKTVSWTGELVNIGGSKIIKSKIDGQVMDRDINGARGIFLRALVDTPWMREHLALAG

SEQ ID NO: 14670 - protein, 406 aa, Moorea sp.
MRAAYQYRLRLTKKQMLELERWLEMLRCQYNYLLADRFNWYEQNRCSINACPLICHLPNLRDKPDYFSQKQTLPQLKKNRPWYGQIHSQVLQDCVKRVDLAFKRYLKGDCNGKRSGKPRFKGKGRYRSLTFPSLGKDPISGNQLKLPKFGWVKMIYHRPIPNGFKIKTATITRKADGYYVTLSIQDDTIPKIIPVDQVSDPIGIDLGLKSFLIKSDGTEVGIPQYYRKAQKGLAKIQKAVSRSKKGSNNRKKAVAKLGKAHKKVADTRKDFHFKTTKELLNNHDLVAHEKLNIKGLAKTKMAKSVLDAGWGQFLSILATKAENAGLLTVAVNPKNTSQNCSNCGKKVPKKLKDRIHSCHHCGYIADRDVNAAKNILYLAVGRPASNKACRVTEPLGGVGKKPALSL

SEQ ID NO: 14671 - protein, 204 aa, Symploca sp.
MKARYQYRFYPTAQQQQSLARLFGCVRVVYNDALTICKQSLKKPKSSELQKIVITQAKKTEARVWLSEVSNIPLQQSVADLDTAFKNFFDSCKGKRKGRKVGYPKFKKRTNTQSARFRIGGFSLKGQGVYLAKIGIVNPIWSRELPSSPSSVTVIKDGANRYFLSFVVEVEPIKVNAKNQSIGIDLGIKTFAVMSNGEKAVSPS

SEQ ID NO: 14672 - protein, 480 aa, Escherichia sp.
  misc_feature (78)..(155): Xaa can be any naturally occurring amino acid
VKRLQAFKFQLRPGGQQECEMRRFAGACRFVFNRALACQNENHEAGNKYIPYGKMASWLVEWKNATETQWLKDSPSQXXXXXXXXXXXXXXXXXXXXXXXXXXXXXXXXXXXXXXXXXXXXXXXXXXXXXXXXXXXXXXXXXXXXXXXXXXXXXXPLQQSLKDLERAYKNFFRKRAAFPRFKKRGQNDAFRYPQGVKLDQENSRIFLPKLGWMRYRNSRQVTGVVKNVTVSQSCGKWYISIQTESEVSTPAHPSASMVGLDAGVAKLATLSDGTVFEPVNSFQKNQKTLARLQRQLSRKVKFSNNWQKQKRKIQRLHSCIANIRRDYLHKVTTAVSKNHAMIVIEDLKVSNMSKSAAGTVSQPGRNVRAKSGLNRSILDQGWYEMHRQLEYKQLWRGGQVLAVPPAYTSQRCAYCGHTAKENRLSQSKFRCQVCGYTANADVNGARNILAAGHAVLACGEMVQSGRPLKQEPTEMIQATA

SEQ ID NO: 14673 - protein, 266 aa, Escherichia sp.
LALQNENHEAGNKYIPYGKMASWLVEWKNATETQWLKDSPSQPLQQSLKDLERAYKNFFQNRAAFPRFKKRGQNDAFRYPQGVKLDQENSRIFLPKLGWMRYRNSRQVTGVVKNVTVSQSCGKWYISIQTESEVSTPVHPSASMVGLDAGVAKLATLSDGTVFEPVNSFQKNQKKLARLQRQLSRKVKFSNNWQKQERKIQRLHSRIANIRRDYLHKVTTTVSKNHAMIVIEDLKVSNMSKSAAGTVSQPGRNVRAKSGLNRTILD

SEQ ID NO: 14674 - protein, 423 aa, unknown
  TnpB Polypeptide
MLTKNEQIKVTLKDTKERRKHMLCRVYTVKLDRSHLNHDSLTRLKLLFLEAKWLYNYCVGHPNVFAIDDKITVVPVKVKDQFERRQLRQLSSHMRQSIITRTQQNIRGLARVKAKCHKIGRLKFKSYVNSIPLKQYGNTYKLINGKYLQLQRIPQKLRVNGLEQLPPNCECANATLLHQHGDYYVSITTYTPREHRTAVVVPVKSIGIDFGVKHQLKLSNGIRIRYKVPVTRRIKQLCKKLSRKQYRSRNWWKTLFKLLKAYAKTTNIKRDIRNKLVHFIHTTFQMVCYQNENLRSWQRLWGRRMLSTSLGGIISMLEVKVQTPVEIDRFFPSTKSCSRCGHQRAMSLAERTYVCHHCGLVIDRDYNSSCVLEHEGHRILGRGPTEVTPAETNTSTLTLDYLNQIAYVEASMVAETGSLTALA

SEQ ID NO: 14675 - protein, 463 aa, Mastigocoleus sp.
LYRTIPVRAKFNDWENDYWADQCRNSNSLINCAIYYAKQKHYSALAEMGNAQSLYWRGDELRSGWKTYRCDIKYPELDKALKQSPHYKALAAQAAQQTLKSVGESITSYNGLVKAYYKGEVDRPRLPKYRKKGGLAAVTFPKQLLRLIDGRVYPPISKEVKPHLIDEISLHLPEFIDFDWVKEVTIRPNLGEFWVDWVIDDGKEPITHNPNLDYSQAWSFDHGGTNWLTGVSTRGRSLIIDGRKLKSMNQGYCRLVAKYKQGKSDFYWDANLDRVQRKRNNQTRDAINKAARFIVNRCLNDGIGNLIIGWNNGQKQRSKMSKRNNQNFVVIPTGRLIERLKQFCPEYGIVLTITEESYTSKSCFLSDDFLPKVGEKPQNWKPSGTRVKRGMYKTGSCFLINADCNGAANIARKVATQLGIDLTKVGRGALTLPKRYDLLSDLTRTYRKRCLNRTISEKLTTVA

SEQ ID NO: 14676 - protein, 402 aa, Escherichia sp.
VKRLQAFKFQLRPGGQQECEMRRFAGACRFVFNRALARQNENHEAGNKYIPYGKMASWLVEWKNATETQWLKDSPSQPLQQSLKDLERAYKNFFRKRAAFPRFKKRGQNDAFRYPQGVKLDQENSRIFLPKLGWMRYRNSRQVTGVVKNVTVSQSCGKWYISIQTESEVSTPVHPSASMVGLDAGVAKLATLSDGTVFEPVNSFQKNQKKLARLQRQLSRKVKFSNNWQKQKRKIQRLHSCIANIRRDYLHKVTTAVSKNHAMIVIEDLKVSNMSKSAAGTVSQPGRNVRAKSGLNRSILDQDWYEMRRQLAYKQLWRGGQVLAVPPAYTSQRCAYCGHTAKENRLSQSKFRCQVCGYTANADVNGARNILAAGHAVLACGEMVQSGRPLKQEPTEMIQATA

SEQ ID NO: 14677 - protein, 466 aa, Mycobacterium sp.
LCAEDHDTVKSCGRCRQVHPVRSTYTMASRHSGPPRGCFGARKLAIRAHAVSDRSQRYRRRLGLGAHDDRSRGRTRRRWPACCQWCVGRSTVMARHTTFRFCLDPTVEQHALLARHAGASRFAFNHCLQIVKNALSQRRTDPGVEVPWTGFDLINAFNAWKKTEGAGRVFTVDTHGGVEVVVTGLSWRREVCQQVFEEAAVDLGRGLAAWSDSRSGKRKGRRVGFPRFKKKTGAIASFRLRNKHPKGKPAAIRVGDNDRPRSVTLPGIGAVGVHDDTRRLRRMLGARRAKILFATISYHGGRWWIALNVEAADLHPAQQHPTRHPDDAGGWVGIDRGLSAFLVAATADGTEVARIDDAPKALAVGMKQQRRLSKSLSRKKKGSRHRKDAAARLGRHHHRVANVRRHFLHKVSGELVKTHDRIVIENLNVAGMLANHRLTFTPHPRPELTTPEKGGAEHSVELFDTL

SEQ ID NO: 14678 - protein, 438 aa, unknown
  TnpB Polypeptide
MGIGLTCARLFNELNYEKRQAFFNRELTKRRNSGISRKYYYKYNETLGVNAQAVTQKNNEAWNVFFKQLDLKKQGRLPPHIKKFSPPGYWKDRETDEKEIHIFVRNDRYYLEPINEGEGYLVLVDFGLRIRYAGRIRWESKRGRLEIIYVNGRWFAHPPIEVDVDPPKSNKRGYVKPIYDDDERKKKKQRITNPKSTRQRDPIGDKEAFMDMGLNNLFAVVTTDGSVMLIKGGTIKSEYYWWKREIATYQSIRDLLWNAGLPTWREYHEKYLKAMYKRDERLRHLYITAIRFLADKLYDRGVRKLYIGYPYMLSQNNGNEYNTNIWWFREIVLWIVDVFREYGIEVELVPEDYTSRECSICGIKHKNGRIYRGLYECKKTGKKINADINAALNIARRLGYMVRIARKIESYSVMHNGVKPLIPLQGANTRDPSIETPP

SEQ ID NO: 14679 - protein, 411 aa, unknown
  TnpB Polypeptide
VTPTDAILEHVSRFRLDPTPAQEVLLLEQCAHARYVWNLGLEQRLMWRRRQGPTPGHNGQAAQLTEARRANPWLAQGSQTVQQQALRDLDQAWRNFFGGTHDRPTWRKRGQGEGFRVVGAQALRIRQDNRRWSSVLVPKVGWVKVQRSRAIPNAKSYRVTRDRAGRWHIAFAAIPDPIPAPGTGEIVGVDRGVAVAAALSTGEMTSPTGLRPKEAERLLRLQRRLARAHKGSNRRAALQLQIARLIARGADRRKDWTEKTSTALARRFDVIRVEDLKVKSMTRSARGTRDTPGRNVRQKAGLNRGILAAGWGLMVTRLEQKAPGRVEKINPAYTSQTCNPCGHCAPENRESQAVFRCVACGHQANADTNAACNIRDTQPAVGRTVAARRDRANPARSVKREPQRTRPPKAA

SEQ ID NO: 14680 - protein, 423 aa, Microcoleus sp.
MYSLKRELKLNNKERSLLDGCASLARLVYNLRLSILTQSWQFEEIKASDSQQLADIQKVFTNQVKIKPEYAWIKGYPLAIYPSALNNLGKAIQGWRLGKSGLTRFKFKKKGDSFTSKNKSGVYPAKGEAMMPFTNRQVRLKRKQSTIAGLEKFRLKQPIAFVSYSKTFTISRAADKGFVSWNLPVDDKNLHRVHQVQTVGVDFGVKCCATLSDGLFTIAPQILKISKIKPIKNRWYNRNQKSGNRTQTIRAFNNGWKYYQKLPIKPADIANLRRILGQKKITTDIISRKYYQIRIEDLNISGTIANQKLAIDLETLGIDEFRRILTYKVAFWGTKVELVDRWSPSSKTCSCCGNIQRMPLKEPVYSCDRCGVSLNCNLNAAIILENARQSIVPEASAQLRPANNKMPSSLVEAGSKRQFKPNA

SEQ ID NO: 14681 - protein, 370 aa, Microcoleus sp.
MRISFKTELKLNNYQRTQLAKHAGVARHAWNWGLNLCKIILGYNVEHPEAKLKFPSAIDLHKLLVKWVKSEHNWYYEVSKTSPQYALKYLSAAFTDFFKKKTIRGKPVGFPRFKRKGQQDSFTLEGTIKIDRRKIQLPKIGLLKTYEELPIGLTPKTAIISRNAQRWFVSFSYEIDIQPTDKQRAVVGVDLGIKTLATLSSGETFANPQPYRTAERRLKRLQKAASRKVIGSNNRQKANQRLAKQHAKVANIRKDTLNKLTTHLAKNHGQVVIEDLNVSGLMANHKLAKSISDLGMYEFRRQLTYKCELYGSKLITVNRFYPSSKTCSCCGHIQEMPLKKRVFNCLGCSTSIDRDLNAALNLEHQAFILA

SEQ ID NO: 14682 - protein, 424 aa, unknown
  TnpB Polypeptide
MYWMHTTRRTHICRIANHSQVADALNRHGWSASKLWNVANYYARQQWDETGEIPNEDELKHELKTHPKYKGLHSQSSQNVLEELSEAFSSWFGSDDDRDNPPGYRKRNYYDSDGNRVHEEHPRSTVTWKQNGIRHDTKHERIRLSKGKTHKDGRDFILCEYDAPPEVELPNIQQVRAVWNTTKNRWELHVVCEHEIATESPGDKTAGVDLGICNPAAVALPDDALLYPGNRLREDKHYFQQAEYQTEGPDGPSQTAQWARAKLAKRKDHFLHALSKDIVERCADRGVGTLVVGDPSGVDEDDWGRHGNKRLDNWAYKRLLNLIDYKARERGIEVEQRDERGTSSSCSVCGHEDGDSRVERGLWKCDRCGVVAHGDVNGADNIRQQSLTVTPPLGQADSGTGCLAQPRVIHFSRTRGFQPRASAG

SEQ ID NO: 14683 - protein, 375 aa, unknown
  TnpB Polypeptide
MSEQTVRKTFKYKLHPTPQQAQAMAFVLRRCRELYNAALQERKEAWHMREVSITVAGQSAQLPEVKVARPEYREIHSQVLQDVLTRLDRAFQAFFRRVKNGEKPGYPRFQGAGRYTSFTYKQFGNGATLDTGFLVLSKIGRIAVRWSRPLVGAPKTITISWEADGWYVSFSCAHAPVQPLPPTGQETGIDLGLEAFATLSDGTRIFHPSWYRKAERALKTAQRRVSRRNKGSNRRRKAVKLLARAHQKVKRQRQDFHHKTALALVRANDTIYHEELQTANMLKNHHLAKSIADAGWGVFLSILSFKAVCAGRSVVVVPPAYTSQRCSGCGRLVWKGLSVRWHQCPYEDCGTSLHRDHNAARNIERAGQARRGAVT

SEQ ID NO: 14684 - protein, 395 aa, Methanogenium sp.
VLTVKTIILKLDCLDTGILDQTIQAYTDGMNYVSTVVYALGKPKGSVALQKEVYPTLREAFSLKSQMACNVVRQVTGTYRTLQQQVKIKKSEWQEIEFTPSSMTCSFKRDFTINGDQIGITTLEGRKIFRYFRYPYMEKYLDNSWKFGASKLVKHRDGTYYFHLCCEKEADTKAITESSNFMGVDVGQNFLAVASTTDKKCKFFCGGEAKNLRNIYSNMRKRLQSKGTRSARRMLKHLSGRERRLMTDMNHRVSKEIVEFAVQNDVDVIGLEELTGIRDTTITHKKQRYTHHSWAFYELQTFVEYKAKDRGITTVYIDPAYTSQTCPRCKHISKNNRHRKSFVCECCGFALHADLIGARNIESRARTVRYNLEVQGCSQPPIRELSMDRVPSPGL

SEQ ID NO: 14685 - protein, 407 aa, unknown
  TnpB Polypeptide
MLIQCAYKFRIYPNAAQRQRLAVEFGNARFVWNRCLELRGKAWEERQERHNYVSLNRLVTDWKRGEFPWLADSAACCLTQILIDQDQAFKNFFEQRGKYPRFKSRHDRQAVRYQLDQRQIERTYQAGEFLKLPKLGALKIRWSQVPAGTPKMATVSKTPDGRYFVAFACEVAIRPLPPTGKVIGVDLGIKDVAVTSDGEKSGNPRHLKRRLKHLKRQQRRLARMRKGSHRRNRQRLKVARIHARIAATRADFLHKTTTALIRRADGIALEDLHVKGMVKNHSLAGAIADVGMGEFRRQMEYKSAWHGRQVEAIDRWAPTSKTCSACGSVREKMPLRVREWTCPDCQTRHDRDVNAAINILQFSTLGDRGLEARGAGQNLLGHVSSTCNEARTDAEKFTEADRLERAA

SEQ ID NO: 14686 - protein, 441 aa, unknown
  TnpB Polypeptide
MPHLHGFTKTFRLNLLMSAEVNIQAFCTIMQYRQAVSYYLQIFQDHRNIIGHSQWLKLAENLTHRTEDNPNPEYPFDNEFPNLPSGFRRNAIAEARGKALAWQTSYEKWEEKKCKHEEKNARRIAAGKKPIEFKDHPSQYPVDDNCWLSYYGTEYKWLDINHILLKMFTGKAYVYRKIVLLQPFAVLPGYAAGSPTLVQKPTGWELHVPIVLQTKLNLKKIKTLVKDPSLKICCVDLGINRHAVMTIQDTEGRVYATKFISGAKDNHLRKRYLEKIVNLQVQTKTIPEGERFAKDLWDKVSSLNDDVAHRVSRQIVEFAGHHGAKIIVFEHLDNLKPSRGTKSHWLNHKFIFWVKGRIFRYTQYKALHAGIITCRVTPKETSSRCPYCGFLTIVRYNKSKDEKETKGVDLAKCTNCKVHDVNSDFIGSLGIGRNFRLKHCS

SEQ ID NO: 14687 - protein, 396 aa, Sporolactobacillus sp.
MNLLKAYKTELKPNEEQLFIIRKTMGVGRYVYNLFLDVNRQRYETDYWYMNAYAFSKWLNNDYLEANPTEMWIKSVHAKSIKQSIINADQAMKKFFKRQAGFPKFKSRKRDWGSFYFFKNGSKQFIDCERHRIKIPTLGWVRIKEKGYIPTDKNNFVIKSGTIKEKANRYYLSIIVEQQDTKKQVTNAEPIGIDLGVKTFAVLSTGESKPTINKLSHIRKTRKSLKRQQRKLSRRYEALKIRKFKMKRGESATEFNLDKQKLKVQKLHQHLTNITKDHHNKFVHELATTKPSYIAIEDLNVKGMMKNRHLSKAVAQQGFYDFRIRLTNKCKELGISLHVVNRFESTSKICHNCGHKKIDLKLSDRIYHCDNCGYTTDRDYNAALNIRDTQNFKLAL

SEQ ID NO: 14688 - protein, 168 aa, unknown
  TnpB Polypeptide
VGQLRVGRQYRALEQKLGIAQRAGKKARVRALHAKIRNQRKDAQHKFSTALVERCAAIFVGNVASGKLVKTKMAKSTLDAGWGQLKTMLEQKCQRAGVVFEVVDERFTTQTCSRCGVISSNSPKGRAGLRIREWTCVDCGTAHDRYMNAAMNILAAGLRRLAVGIPAL

SEQ ID NO: 14689 - protein, 384 aa, unknown
  TnpB Polypeptide
VKKGFEYRIYPSQRQELLLDRTFGCSRWTYNHFLEEKIRFFKETGQPLEYGECSKMLTVLKAQEDTAWLAEADSTALQQSLRNLEAAFKNFSQRRGQGIGFPSFKKKKSRKTYRTTNAKIVEDSHVWIPKVGLVKARISRPIEGRILSATIKQTPSGKYFIVFTCTDIPEPPKVKAGKAIGIDLGIASLVTTSDCQKIGSLEGTRKLDKKLAREQRKLSRKKKGSNNRKKQKIKVARVYEKIASKRKDHLHKVTAKIISENQVICAETLDVSGMLKNRYIAKKIANQSFATILGFLEYKARAKGKTFVQVGKDFASSKTCHSCGVKADTMPLNIRSWQCKNCGARHDRDINAAQNILAEGIRILNGTEGHSGTTANNFAVTLVE

SEQ ID NO: 14690 - protein, 407 aa, unknown
  TnpB Polypeptide
MECFTRKIKIDRSHLSKKQEEAIARLFLECKWLANSCIASERFDRSYIKELDGKVQVKTPEGMEEREFLVLGVQLARSVVDGLRSNLRALSKLKSNRRKVGRLRYRRQVRSVDFPQYGNSHKIDREKNRVKLAKIPGWVRVRGLDQLPAEAEFANCKLLDKPDGLLIAITCYTDKQDQDFTPGTSIGVDMGVKTHLTFSDGTKVNALVEESERARGLRRKISRQKPGSNNRAKTLRRLEKVLAKDANKREDIANKIVHELLKNETVYYQDEPISKWFEKQGRVKAGKRLQGSILGRVKAKLERSPRAVMLDRYLATTATCICGHKTKHEPSKRIFVCSTCGYSDDRDIHAAKNMVRLGQSQNAPATEHSSTLADKCVRPVAPMDYMFIGKTGGVWMKQEAPTSLALG

SEQ ID NO: 14691 - protein, 213 aa, unknown
  TnpB Polypeptide
MRRDEHQSSGSCRTVAKTGQSEVPYFKRGQGPHSLRHDIPQSQRQVFVALYCTDVEIKPLPSTGAAVGLDMGIKSFAVTSDGVEHPNHKHLAKSEKKLARLQRQLSRKTKGSNRREKARLQLARLHEHVANQRQDMLHKLSTDLMRQYDLICIEDLAPKNMVKNHRLAKSISDASWGEFRRQLEYKSKWYGKQVVTIDRFFPSSQLCSVCGAQ

SEQ ID NO: 14692 - protein, 518 aa, Xenorhabdus sp.
MKRLQAFKFQLRPNGQQECDMRRFAGACRFVFNKSLAWQNENHEAGNKYLPYVKMAAWLVEWKTTPETQWLKEAPSQPLQQALKDLERAYKNFFQKRASFPRFKKRGQSDAFRYPQGVKLDQENNRISLPKLGWISYRNSRQVVGEVKNVTVSQSCGKWYVSIQTEYEVAESVHTSTSLVGLDAGVAKLATLSDGTIFDPVNSFKTHQKKLAKLQREMSRKVKFSNNWKKAKRKVQNLHSRIGNIRRDYLHKVSTTISKNHAMIVIEDLKVANMSKSAAGTVKQPGRNVRAKSGLNRSILDQGWYELRRQLEYKQRWRGGQVLAINPAYTSQKCACCGHTTKENRRSQSQFECLECGYTENADINGARNILAAGHAALACGEMAALGHSMKQDPPRGELDFGLNAVGILALKGEEDVKDTILREPTTVGEMLSEEFLKPLNITQAKLGEALNLSRPRIAEIISGKRRISIEEAVMLAALFETDSDFWINVQASHDRWEARQLMAQKTSVKPLTALLAR

SEQ ID NO: 14693 - protein, 285 aa, Acidiplasma sp.
MTHPWKSNGDKRTIVFEYKPSGTILKYLNDMRDLINKAIINAYSMAKSNNNELPSPIVLRKSLKNYYDNNIIYAKHHINPACRNAIAILRSYKKNNNGKLKIIKAKRLAMRIDSELIRIDNNKLRITIRPNEYEYIDIVDKNRKYNEYSKYKISEVLLTDNKVCITFIIGSLNKPLINNNIIGFDLNFKTIDYTIIKDNEIVETNTIDTSDIAKTQRDYARKRTKIQGHIKNPEKRNRKLKESRHRQRNIIRDKLQKLTTKIVNDNSDKTFVFEDLTNIKRREEK

SEQ ID NO: 14694 - protein, 378 aa, unknown
  TnpB Polypeptide
MKIYKYKFGDQSNCIRIGNLLDDLWQVHEYFHKWQRQRYKDGLAYANYHAMSAHLTELKRTTHPHWNALPSQVIQEELRRIHLAYDRFFKKLGGRPHIKPRHKFKSITFPGHAGWSLKNNCITLSFRQWNPRTRKWQFDKVPYTFHKHRQWHGTIAQITIKRDNCGDYWLCITTTYTDFQRLPTTGKSVGADFGMKDAYLTLSTGEKKQHPQPLKHSLNKLRSLNKSLSRKVKGSNGWWRCVRQIARLYRKITNQRKDFQWQLASELCKSFDTIAIETLNLDGMKRLWGRKVSDLAFYQFVEILKYKCQKHKRPLIQIGRWTATTKPCSDCGFHNETLTLSDRQWTCTECGSHHDRDVNAAINILQAGIPVKVSTRYA

SEQ ID NO: 14695 - protein, 384 aa, unknown
  TnpB Polypeptide
MLIYEFKLRGKPKQFAAIDEAIRTVQFIRNKAIRFWIDRRGTGKNDLSKLSATLAAEFPFAKKLNSTARQQATERAWDAIANFYDNCKKKAPGKKGYPKFKKDTRSVEYKKSGWKLSEDCRFITFTDGHGIGTLKLIGKQMLNAFQDKIQRVQIVRRADGYYAHFVLKVDRAEEMPVTGSVLGLDFGLTVLWTDSNGGTKPNPRHLRQAEQALKREQRRISRKQKGSKNRKKQIQKLARKHLKVSRQRRDFAIKAARALYQSHDVVVLEDLKVRNMVRNHHLAKSISDVGWSMLKDWIQYFATLFGKVCVLVPPEYSTQECHACGAREPKPLSQRWHSCPCGCEMDRDQNAALVLLQRGLKKLEEGSRGHRQTCVATRKTPVDR

SEQ ID NO: 14696 - protein, 435 aa, unknown
  TnpB Polypeptide
MKDESKKIHARKIQVKRGSQAEKELDYNMFLSKNLSNTCIYTQRSAFFAKRDCQDPKLKNEMKSFISKRELIKMLQDSNQADYRALPSIVAQQVCNQVCDEFISFFKKLKSGDKTARIPKYKDKVKGRNKLSYPKNAISTKELRNGYIKLTGINTKFKIPDGIDYKDIQRVDIVKKSSHIEVIVMYKVPKVELKEKNNRYMGADLGLNNLITIVSNVKGITPIIFDGRPIKAMNQFYNKSVSELQSKLTKKGKEKYTSNKIYSITRNRYNKINDYFHKISTYLINQAVSNGITAIFIGLNKEWKQEIKLGKENNQKFVQIPFDILIDMITYKAKDKGIDVITTEESHTSKCSFFDNEEMCHHDQYQGKRIKRGLFRTSDRKTINSDVNGALNIIRKVIPTFSCETAKLEVADVANPLRISFRNGNLFQASKRMCL

SEQ ID NO: 14697 - protein, 658 aa, Micromonospora sp.
VLTSTATCTAYRAVCGGKPDAPGVQAPVTGRVLAERVGWLADLVQSMADGVIVAHWSDADLAELAGGVGPEGRRLPGNGWMALRRLGWAAVPPAGVVVSDRVRRIAEEEAARVLRLACHRRAIVAALLATWPADPSARTDDEWAALRAALPDATDNATIRNRTRQITAHIAGHGRPPADLCELEGQPAAARQVSLAAADRQQVAVDRVDDSIVRVWSQLPTCPAPASYRDWVWHAFDVVLPAIVPAGVKVCTPTLRPGDGKVRVDLPWQTPHTPPRLDGHTRALGVDWGVNTLLTATVADLDQDGTVVVQGRPLRFDATGASAKLVRLRRHREHLNTKADHLARLRDGRPTHHPAAAALTAKLALLQAEHTAVCARIRHLNKALAWSSARWLVDQATAAGATVIYVEDLATLEGGGRSRSLNRRLSGAVRGTVFTAIAHLAAKVDIAVVTVPARGTSSGCPRCGGPVKHVKTPQRMVAGYRWANCSCGLSMDRDHAAAQRIAARGLANQANTRRGRNGNAAIRTATDTPARHQTRRPTRTATIPPARDRRKTAPTPKQIRPATVKTSRLLPLRRQVPAPAESPSGSSGQRPAGRTPQETNPKGPVSQVPHTAPTTTPRHPHRVRGAALGRGFHRHVHATPVTDRDGSASRMSGSPRIA

SEQ ID NO: 14698 - protein, 255 aa, Escherichia sp.
MHQENTMLPRRISVSLFIDQSIIWPVKRLQAFKFQLRPGGQQEREMRRFAGACRFVFNRALALQNENHEAGNKYIPYGKMASWLVEWKNATETQWLKDSPSQPLQQSLKGLERAYKNFFQKRAAFPRFKKRGQNDAFRYPQGVKLDQENSRIFLPKLGWMRYRNSRQVTGVVKNVTVSQSCGKWYISIQTESEVSTPVHPSASMIGLDAGVAKLATLSDGTVFEPVNSFQKNQKTLARLQRQLSRKVKFSNNWQK

SEQ ID NO: 14699 - protein, 602 aa, Micromonospora sp.
VEQAVVAALLLVGLFIGCGVGAAYARARRGWTDYKTAQKTVPGARRTAWMAIRAVITKVGVIALLLFGAAAYAAVGSDHERADPAPTPTVTPAPSHGPGASAASTNVRRVGRRVKLSYGWCWLRLVPRRRDPAAPRVVHRTAGVALRLTPGQRRRCFGLLRSAGDVWACVLEINAWRRRRRDVPLTGYQQLCRELAASGPGTFAGLDTTGARSVLRRFSDAWFAAAKRRQAGDLSARFPRRRRGLVPVRWYHGKFTLDERRVWIPTAKGTPPLWVRLARDLPYPLEQVRSITLLCEGGRLFLDVTAEVPVAVYPPGEEPDPARVAGVDLGIIHPYALAGPDGDGLLVSGRAIRAEHRMHLADTKARRRAVSRRAPGRGGRGSRRWRKYRRRARQVEGRHRRRVRQAQHEAARTVISWAVRQRVGLLHVGDPRGVLDIAAGRRHNLRLRQWQIGRLLQVLTDKATLAGITVWLVNERGTSSTCPACQRRVPKPRGRTLSCPHCHFSGHRDLVAAATIATRTPGGGPTTPTAVVLPQVVTHRRAGRHLPGAGQSRRDPRRPPRAARGSVGPRRPALPPGGESLAHTARIHHNHRTPGERWWTPH

SEQ ID NO: 14700 - protein, 376 aa, unknown
  TnpB Polypeptide
MDVPEGFLDYLKTCSEIFARHVDWAFENKSTNKIQAHKDLYHKLRLEFPNIPSNILQTTRDQALEIVKLLKFASKPKKKPYSAVRYDARNMALRGNLLTFSGPGKRIRTMIDLPTFFQKYKSWVMKSGTIGYDKFKKKIKVSLIFEAPTPQTIQRVKTERIVGIDRGLYNIVALSDDKAFSSQQVRKQKRKFLHVKRQLQAKGTRSAKRKLKARSGREKRFSSNINHVVSKWLVGLPYDTFVLEDLSGIRNQNRGHKVNNWMHNWTFYQLEQFLTYKAGALGKQVIFVDARYTSQKCSNCGITCKKNRNGSQYHCTSCGYFGHADHNAAINIRSNYILSAAYASQEAIWSVEQALANEPNAVLLNCNATGFLVANQ

SEQ ID NO: 14701 - protein, 378 aa, unknown
  TnpB Polypeptide
MKLIRSTKCSLKFATAKKQNELSVILSEYSKVANIFIDYFWLNTDKTSKGELLKPIVDLPETWLSARLRKVAAREAIDMINASKLRWKDKAVKPLHKGNRMYVSCTIADLVSTKNNGYKTEDSLRFDAWLHIASVGNKMIMDLPIKYHKHFNKYNNIGKRLNSYIITKNYVQFSFEIITEPKREGLKCIGVDTGINALASLNNGNQYGKDIKGCIERVKRCKQKSKGYYVAKRALKQRIDETAKEILVKENPDLIVVEQLKNMGYKSKLKARLSKSIRRSIGTWNWKYWLKRLEAQCEINRVSFRSVAPYYTSTTCPVCGHSDRGNRLGEMFLCLNCGHEDNADINAGKNILNRFLTGQYGARYKQENQENLVITNFL

SEQ ID NO: 14702 - protein, 330 aa, Sphingobium sp.
MFLQYKFPIEPSRAQHARLASILQLQRNLYNDALQNRRAAFQRGVHLTYEDDTKSLPAYRMANRQHTALPWGINNWTLRCVDTAMTRYRDRLTANPNAGFPRFRSEERWRSFGVHGVRGCVIADGYLTVDGIVGKLRMRMHRPLPADARIARLTFTRRARQWHVAILIDCKVGDQEHKKPGSACGLDLGIEQLASLSDGSLFDDTPRKTTQSSALRRAYRALARCQKDSRRSKKLRERQDRASQRVINLRSTRLHQISAAITNRFETIVVEDLALKQFPRPTRTRRPSDGVGAIAIRENGQVLAEPRPKRLLEMRGGLENLDSRISGFSA

SEQ ID NO: 14703 - protein, 402 aa, unknown
  TnpB Polypeptide
MIRTYSQPIKATDLIFETSKESSQIYNQAIELHKRGVNFKDIGKTIDAEFDNKFLLAQSRQASYQQYSKDFKSYLEALKSYKSCPDKFSGQPKPPHKIKFIRSIYFKEEAIKYIDGNLFLSLKKPNDPIIVRWTKDLPIPQFASITFDKYKGWELHLIVEIEQSNEVVEKNDKVMSIDLGVKRVATTFDGTNTITYSGKELMSLNNLRNKLTAKTQAKYANAKKDSRRRKYLKRCLRKNIFKIKNKEKDILHKYSRMIVEDAISNNIGTIVIGDCSNTHNKTNCGKNNQRIQQNPEQKLAKYIDYKFQSTGRLVKIISERRTSKTCPECDHVHKNSPKGRIFTCKACGFTYDRDGVGSVNIYRLEVSLSHDEWLNVVGRLTRPLGIKYIPNLSIKCKTRSFI

SEQ ID NO: 14704 - protein, 363 aa, unknown
  TnpB Polypeptide
MQKGVKFRAYPDREQQNLINRTLGCCRLIYNKGLAMRNDAFESGQKIGYNQTSAMLTDLKKQDDYAFLKDPDSIALQQSLRDLDRGFKNFFEKRAGYPRFKSKHDNHQSYRTINQGDNIHIAGKYIKLPKLGYVRIRQSMEVGHINNVTVERTPTGKYFVVLNVDFEPEFRPNARGMVGIDVGIKDFYSDSNGNTVSNPKYLEKSQRKLIREQRRLSRKQKGSNNRNRQRIRVARVHEKITNQRNDFLQKQSTMLVSENQTICIEDLNVKGMIRNHRLAKSIASASWSKFFTMLEYKAAWYGNDVVKVPTMYPSSQTCSCCGYRNPLVKNLAVRKWECPECHTAHDRDTNAGINILNKGLSIA

SEQ ID NO: 14705 - protein, 382 aa, unknown
  TnpB Polypeptide
MFSMQRTISIVLDPNPALAETVLAFNECCNFFLKLGFNDRTHSRHKLQSLGYYEARERWPRLQSSLVQGARDCAADMLRRERLKRLPVKKATSAVRYNQRTFKAFLESNMLSLSTVRGRIKVPLGIAPYFDRYRKGTVASVRVRNDHGMLRADLVMGLPDVPMRDVAEPEVVGMDRGINNIAVLSTGHFFNSRAVRHVRGYYAYNRRCLQSVGTRSARRHLRRLSGRERRFQTDVNHRIAKTVAQMDMDVLALEDLDIRKDRKLGRGFNRKLGGWAFTQLEFFLAYKLEGRGRRLVKVPPEYTSKKCSRCGNLGVRKGRGFHCPACGCRLDADLNAARNIASLGKALAGRPSVNGPIVAGDDAEHRTSAEPSCKPPVSMGGS

SEQ ID NO: 14706 - protein, 648 aa, unknown
  TnpB Polypeptide
MPVEGPDRKQGPRPLTVTRTYTYRCLRIRKPQREQLDRVFRHLTWVYNQSVAFCRERHEAGLEYPGLKGLSADLLTPLRKEIIYEDRQETNSWLDRQLQSNTLKKVDRSYQVFFKSVKDRKESGTGRIKGRPRFKPMHRGVKSFESSSPNHKPRPCKNGQYEIRIKAVHKGRTHIKLRFNDLRDILSDPTAQVRRIRIVKHQLGTGYDVQLIVERSVWIEADDRPLLGVDLGLRQSITLSNGTQYKRPRAATTKARKAQQRLSRAKLGSNSRKKKRLTHQKEQRRLKIRRRNAIHQLSAKVIRDESAWLGVVDFSIANMMRTGGGYRRSLNRELAEEALDALKQQLTYKAESAGGEGGLVDPKDITQRCSVCGGKPEEKIGLDIRIYQCAHCGLSMDRDHNAAINVRTKAEKVFDRLNASPVSRSDAKENSFDDPRQTEGSPILQGELAWRTSITFHTNLHAPAKPASFFVFPRLPGNNLYVMLRYAPTVSAMGTIVYNSLSFRLFSDRQFLQLEKVMGRAADAHVVFHQERNQLFAVHEAHGCFVRFVSFRDGSAAEAAGGNDQALLVRTKAAAHLLNDRPLNICFPAFYLNSHLYADCVADQQRTSDINTAIPAELGHLNAFKTHLCQKLPNESLKLAWTQVHQQG

SEQ ID NO: 14707 - protein, 520 aa, unknown
  TnpB Polypeptide
VRPTHILDLDGELLDSASVMTHLAAEVRGISAYATYTVRNDTQLAADLSQVTVSQPATAGRRAGVMIPPELVVKGELRRNKAGKLVEEKVFGRSRKEWLFRHRVVTEHRSWQERTNAANGESSKYVSQGWKRTVDASAPSYGEDVVNLGAVDKQYAVIENDPFKDGEIVLKLVVQGVWYRLIFPFDNARFTEGKVTLPVIKVEDNQPVFIFTVVTDNPIVQFSGKYTIGVDVGINDYTTVVVRNSATGQVVHKTTLSQRVHSLWNSVRASERQVKQLNKKADKLLYQRQAHMSAIDEAQLHREAASRKKRELAILAAQEIAYLSYQFGNAVVAVEDLGWIRNTMSNGRWNRGAFTQWLTHYITQNGGWVVAVNAANTSQVCHLCGSNVLHPEHKVSICPEHGDMDRDVNAAANIAARAVSKVEKARKTRAKNRKLQKKAQLKTPVARETLKYPGRDRTKHAPTPKRAKRVAGEVNLPLSPARVNPTTVLADWDAFGILETDMAAISQDYVTRECMLCSLN

SEQ ID NO: 14708 - protein, 391 aa, Cyanobacteria sp.
LKQVLTIACKLQPTPEQTLKIEELLQVFADGCNYANQNVKDSITSKTTIQNLVYQSLRAQFGLSANQAVRVCARVGANRKTAKLKGRPVREFKPTSADYDARIFSFREKDWTVSLTLLNGREHIKIDAGNYQRGKLKGRTPTSAHLCKHRDGKYYIHIQLKDDAPDPVKTKNVIGVDFGRRDIAVTSNGDKWDGSGIAQARDKFSKVRASLQAKARKGTRTTRRRVRNILKRLSGRERRYQTWLNHTISRAIIQDAMRSGSLVAIEDLTGIRDRTNQQPRTRAERRRSNSWAFYQLRQFLEYKGIQSGVEVIAVSPRYTSQTCHQCLYIGLRSGKRFGCTNNCCNWHGDADVNGSEMIRLVGLSVTQAEGSKLLSCELSWDSSGLLKAPCL

SEQ ID NO: 14709 - protein, 402 aa, Escherichia sp.
VKRLQAFKFQLRPGGQQECEMRRFAGACRFVFNRALARQNENHEAGNKYIPYGKMASWLVEWKNATETQWLKDSPSQPLQQSLKDLERAYKNFFRKRAAFPRFKKRGQNDAFRYPQGVKLDQENSRIFLPKLGWMRYRNSRQVTGVVKNVTVSQSCGKWYISIQTESEVSTPVHPSASMVGLDAGVAKLATLSDGTVFEPVNSFQKNQKKLARLQRQLSRKVKFSNNWQKQKRKIQRLHSCIANIRRDYLHKVTTAVSKNHAMIVIEDLKVSNMSKSAAGTVSLPGRNVRAKSGLNRSILDQGWYEMRRQLAYKQLWRGGQVLAVPPAYTSQRCAYCGHTAKENRLSQSKFRCQVCGYTANADVNGARNILAAGHAVLACGEMVQSGRPLKQEPTEMIQATA

SEQ ID NO: 14710 - protein, 347 aa, unknown
  TnpB Polypeptide
MILTFKIKHKKDFSYELSLAWKIAEFALKTGSCSSKDVKHIGLKSIISNQILRKYSRNKKIKRIHRVVLTIPNQGIRVNKKNRKIIISSLSLNLDYQFRNDFKKINQIEINKDYAFIGVTVGEPSTKKVDGYIGVDRNTTGHIAVVGNPMTGKILKLGKKAEHIHKKYKNIRKNLQKKGKYGLVKKIKHRESNIVRDLNHKISRKIVDNADKNNTGIKLEDMKQIRRHVKVRKAFKYSLNSWSYYQLEQMILYKAKLLGIPVAYIESAYTSQNCSRCGHLGNRNKKEFKCPSCGHVDHADSNASFNIALRQVKDDRLNVDRDAFKGSTDTPQTAMMGTTLTVEPHNL

SEQ ID NO: 14711 - protein, 431 aa, unknown
  TnpB Polypeptide
MAMVTQGYRFALDPTPRQRRALASHCGGARVAYNWGLHLVQARLDQRRLDPTVQVPWTLPELRREWNRAKHEVAPWWVQNSKEAYSSGLDGLARALKNWSDSRNGRRKGHPVGFPRPKKKGRARDACRFTTDPIRVESDRHHITLPRLGKLKTHESTRKLARRVEQGTARILAATISRTADRWFVSFTVEVQRQIPTDNGKTTVVGIDVGVRYLAVLSTGATIPNPRALEHQLCRLRRLNRQLARCKIGSKRRRQTRRQLARVHARAANLRKDALHKLTTALATNHKVVVVEQLNVAGMLRNRRLARAIADTAMAELRRMLLYKTLWYGAELVVADPFYPSSKTCSACEWVKAKLPLSERSFICARCGLVIDRDLNAARNLAKLVDHVARSGRETINACGADTRPGQAGLTVSKREAGAESPRVGPAPVGT

SEQ ID NO: 14712 - protein, 392 aa, unknown
  TnpB Polypeptide
MGVIVTYNVKLRATKEQIARFEAVLAQARDAYNLCSQVVDSEKLAYSRVTIHNRCYDTLRTTFPLLSSQQVIRVQCEVCSAYKSRRANKQHGDIPQKRGLSMTLDKRLYNKLTPNSVCLTGTEDRHRTRYEFVPYERLSEMFSKFLPKDPSVFVRNGELFLSIPFDVPQKPLQGETCVGVDLGVRRLFVTSEGKSFVDKEYLKERRRLRYLKRCLQSKGTRSAKRHLSKVAHKERNLSKDMVERSTNALLCSSDASILILEDLTKIKSKTSKTKEGFTRKRHNSALSQVPFYKFKERLTHKAARVGRQVQTVSPAFTSQTDSRTNKRDGIRKGCIYLCSDGVILDADFNAAVNIAQKSNHPLSSTLVPLSGRVQSITQSSEAKGLIGKPISL

SEQ ID NO: 14713 - protein, 387 aa, Escherichia sp.
VKRLQAFKFQLRPGGQQECEMRRFAGACRFVFNRALARQNENHEAGNKYIPYGKMASWLVEWKNATETQWLKDSPSQPLQQSLKDLERAYKNFFQNRAAFPRFKKRGQNDVFRYPQGVKLDQENSRIFLPKLGWMRYRNSRQVTGVVKNVTVSQSCGKWYISIQTESEVSTPVHPSASMVGLDAGVAKLATLSDGTVFEPVNSFQKNQKKLARLQRQLSRKVKFSNNWQKQKRKIQRLHSCIANIRRDYLHKVTTTVSKNHAMIVIEDLKVSNMSKSAAGTVSQPGRNVRAKSGLNRSILDQGWYEMRRQLEYKQLWRGGQVLAVPPAYTSQRCAYCGHTAKENRLSQSKFRCQVCGYTANADVNGARNILAAGHAVLACGGCQQTG

SEQ ID NO: 14714 - protein, 455 aa, Symploca sp.
MKYTYQYKALPTTQQKLELNLWLRTCQYWYNRQLGDRFDWWDCNRSPVNACPLVAHLPKLRDKPNYYNQKKQLPEIKKEPVVVQWSGQKLDFSRVPANTLQEVCKRVDKAFERFIVGNLTGTRNGKPRFKSESRFRSFVIEGAGLGLYSCSVGGKYLYLKAPKIGLVKVRSHRHIPDGSILKQLQFIKKSDGWFVNLRLEDVTVPSFAPNEIVPDWDNSIGLDAVLHEDSYLATSENTKLPSLKVLRNSLEKLAQISKKKNLRKKGSASRRKLAKKQGRQHQKIARARKDFQYKTAHKLVQTGKKVFFHEGLNLKGLTRRNAPKQDETGAYIPNGQSAKSGLNLSWADAAFGQFFEILSHIAGKAGAKVIAKNPAYTSQLLSYRDEFVFTDCGIREYWDDVEKLLVDRDVNASINIKRLGLDVFPSIKRRKSGVVIVDSITNTTSKEVLHTLRGV

SEQ ID NO: 14715 - protein, 383 aa, unknown
  TnpB Polypeptide
MEQKRAYRYRCYPNATQKHILARTFGATRYVYNWALRLRTDAYYDRQERIYYKDTSARLTQLKRQEETVWLNEVSSVPPQQALRHLDTAFRNFFDGRTAYPSFKRKHGHQSAEYTVSGFRFANGTLTLAKMDSPLKIRWSRPLPKDAKPSTVTVSQDTAGRYFVSLLVTDDIHTLPQTNAVVGIDLGITSLVTLSTGEKVGNPRHLVSDVKRHRKAKKSLSRKQKGSRGRERARLRLARVEARIADRRRDFTHKLTTRLVRENQTICCESLRVKNMVRNHSLAKHISDAGWGELVRQLEYKATWYGRTFVAIDRWYPSSKRCSRCGHVLPSLPLDIRHWGCPECGARHDRDVNAAVNIASAGQSESAGRDAVRPGRSKSLYVK

SEQ ID NO: 14716 - protein, 353 aa, Escherichia sp.
  misc_feature (275)..(333): Xaa can be any naturally occurring amino acid
VKRLQAFKFQLRPGGQQEREMRRFAGACRFVFNRALALQNENHEAGNKYIPYGKMASWLVEWKNATETQWLKDAPSQPLQQSLKDLERAYKNFFQKRAAFPRFKKRGQNDAFRYPQGVKLDQENSRIFLPKLVWMRYRNSRQVTGVVKNVTVSQSCGKWYISIQTENEVSTPVHPSALMVGLDAGVAKLATLSDGTVFGPVNSFQKNQKTLARLQRQLSRKVKFSNNWQKQKRKIQRLHSCIANIRRDYLHKVTTTVSKNHAMIVIEDLKVSNMXXXXXXXXXXXXXXXXXXXXXXXXXXXXXXXXXXXXXXXXXXXXXXXXXXXXXXXXXXXQSQQRVRSASRGAMSGQNQV

SEQ ID NO: 14717 - protein, 268 aa, unknown
  TnpB Polypeptide
LGNPTPTTSDECKLIFGFYYKTKQGSAVAVDMGEIHPITAFDGINAEIYNGREQRAKTQYREKSKATINHKLSKCKRGSRRWKKLKRAKNKTLAALTSQLRDMRHKITSCFVSTCRERKIETIVIGDIKNIRQSVNYGKKANQKLHQWAFSKFQHMITYKAKAVGINVETEDEAYTSQTCPSCRHRQKKNNRNYKCSKCGWNGHRDVVGASNILTKYQGWLFNPVVGAVVSPGGVRFNPHLRRLDKWSPFAGLKSSKPPTRKQRSTRL

SEQ ID NO: 14718 - protein, 308 aa, Spirulina sp.
LEGDYIKIPGKIGLIYCRRHREFEGTIHTVTLSKNPDGKYYASVLVDDGKDTLSPSVEGKAIGIDVGLTHFAITSDGSKYDNPRHFAKHQNNLKRKQQKLSRKKKGSKNRAKAKQKVAKVHSKIAHCREDFLHKLSRTAVATTGGTPATRCLKIVNENQVIAVENLNVKGMVRNPQLAKAISDVGWGMFTTMLKYKAEWEGKTYIEVDRYFASSKTCHVCLNRVDSLPLEVRQWECQHCGTHHDRDINAAQNIKNEALRILSLGTSDTAWGGNVRQPGKISVLLDAFPIESGSPILAPRQGGVVHVNC

SEQ ID NO: 14719 - protein, 393 aa, Spirulina sp.
MRVIEFKVKATQTQQVAILEAIRTGQFIRNKCLRLWMDSSKEDKVNYASFCKFVTTLSNNTDTPFVSNLNSMARQASAERAWLAISRFYNNCKKGLAQKGYPKFKKFSRSVEYKTSGWKLTEDKKSIHITDKTGIGKLKLIGSYNREILDKLLIKRVRLIKRADGFYCQFVLDLERIEPFDSTGKEVGIDVGLNHFLTDSNGDKVDNPRFLRQAEKRLKKAQRKLSKKKKGSNKRQKQKSKVACLHLKISRQRKDFVVKTAKALIQSNDLVVYEDLKVSNMVKNRKLAKSISDASWSMFTDWLDYFGKIHGKFVIAVNPQYTSQQCSSCGNIVKKTLSVRTHICSCGCVLDRDENAAKNILQKANTVGRTEIQALGQTTHCLLGESLLDKVTG

SEQ ID NO: 14720 - protein, 396 aa, Mycobacterium sp.
MKRVVKVRILPTELQGIALDATLRQCNSAASWLSGRMHAERIFHKRDAQKHFYVELRQRFGLSAQPAIRVIGKVSDAYTTLRANVVAGNYGPPGSRRRMKVQSTPIRFRERAAQPFDARCLSWQIPDIVGSRDATVSILTVQGRLRSVRILAAPQNLVLLRTRPIGETDLINRDGKWFLYATVNAPEAPLTDPVNGFIGIDMGIVNIATTSDGNRVAGKRLNRYRKRQQRIRRRLQAKKTSSARRLLKKRRRKEARFAADINHQISKRIVVEAQRIERGIAVENLTGIRERVRFRKPQRTTLHSWAFSRLGLFLAYKAQAAGVAFVQVNPAHTSQTCHECGWVDKRNRFSQSEFKCGRCGFVGHADHNAAINIAVRGVERWGEVMRPHAAPTLTAS

SEQ ID NO: 14721 - protein, 401 aa, Microcoleus sp.
VGGKTMLVFEFKAYGKSNQFTAVDEAIRTAKFVRNSCIRYWMDNKNVGKYDLNKYCAVLASNFPNAYELNSMARQASAERAWSSISRFYDNCKKGVAGKKAYPQFQKDCRSVEYKSTGWKLADDRKSINFTDKKGIGRLKLKGTRDLHFYQISQIKRVRLVKRADGVYVQFCIDIARKENTAPSGNTIGLDVGLKEYYTDSNGITVENPRFLRKGEKVLKRCQRRVSRKVKGSNNRDKARRILGKRHLKISRQRKDHAMKLARCVISSNDVVAYEDLRIKNMVKNHCLAKSINDASWYQFRVWLEYFGKVFEKITVAVNPQYTSQECSSCGVIVKKTLSTRTHVCKCGCVMDRDENAARNILSRGLGTVGHTGTFALDASNALGESISTLAGEILSQQIGS

SEQ ID NO: 14722 - protein, 416 aa, unknown
  TnpB Polypeptide
LANISAKLFNELNYERRQQFFNHQRVDFKGTWVKYYGKYKGLLGVNAQAVMQKNNEAWNAFLHLLRLRREGKLSPFMRRVSPPGYWKDEATGKRKLILVVRQDRYVVDEQRRVIILKDFDLEVKFIGRLRWYGKQGRLEIHYDETRNAWYACIPVEVGVEEAKTGRRSKFIVHGERKVIQIKSPKGSKVASIDLGINNLASVVVSDGTWLLYKGVRAKEDYFYMQRLISRIQSLRDTLKDKLLADAVDELDCEVRRLHGKLARRLLHLYRNFANHLIKVLHELGVSTIYLGYPFNIAQQKGNKFTVNMWSYRKLMEAIELKAQEYGIKVFIVIEYNTSKYCTYHNVEVKRQPRGVVHCPKGHKLHSDLNGALNIMKKATGKIPLVIKKPLSFIVEHNRVAPVKRGVTPKTPTNPHP

SEQ ID NO: 14723 - protein, 405 aa, unknown
  TnpB Polypeptide
MYLTEKEIIYSTDERFNLIKDLCHLSKNLYNASLYDVRQYYFETKSYRTWQSQVPIFTKTKNTDYYALQSHVASEVIKQVGRQFISFFNNKSNKKKRIPKYKDKNGYNVVTFNNRAISRKIEFDEDKQLYTHTLCKKSYNLKIQSTKSNIKMVKFVYDEVNDLIKCYKIYEVEQPKLKNDNSRYFSIDPGLNNIVAIYNNIGIRPLLYNGRPIKSINQYYNKTTAKLRSELPTNIKSSKRLKQLSLKRNNKIDYEMHKISTHIINEAVKNNISKIFIGNNIGWKNEINIGRRNNQNFVNIPHTKLFNQLLYKGSLNDIEVIFTEESYTSRASFFDKDELPIYDETSKYKFSGRRIKRGLYKDSKGNIWNADLNGAANIMRKCSDKAYKGIRKTKEMMRQPILITL

SEQ ID NO: 14724 - protein, 471 aa, unknown
  TnpB Polypeptide
MKRTVKIKANCSNNESEILLIGTIQRNIKNYVWSRYSGIGSLLKQSGWTIRDELIQKDLLSKKITKIFSRIAIEKSASTIKADWTTTKKKVKNAIKQNENLTEDDKRYLYLCLKHTPTLYNILNYKKVDYSTDYLKDFKIDVHRLNNLLRRYIRRYKTKFHTNKTNIIIASNIYSFDSNNKCLSFTGKKKNSRIETTLIGHVPKLKGTLELVKNQKDNQYYLHVPLDRIIVKKNMTDESEILGLDVGITDLITLSNGSVYGANSAELFYTLSDNLVNKNRSRLFSYKQELEKRIVIEQDLSKKSILEQKLKNLEDNNLGSKKRISKISKYKSRIASHINCELNKMVKEEDIKEIVREDLNWSSKKKNVSRKQRNRFVTWSKGVLLERLSVKLAERGIKETIVNPAYTSQVCCKCNHLGNRKGKEFKCSNCNLSIDADFNASINIKKRKFIKEIDIYTPYKEVKKYYENLPV

SEQ ID NO: 14725 - protein, 498 aa, unknown
  TnpB Polypeptide
MKKKKVHWKSFNINMPSELIPIYDFLQNELNFILSNDETRALLDKIDLSKLRGDVWRDMRDSLKFRIKDWPLHNKTWHSYILFENIRREIKSKQEAIIIWNQLVKNDFNINEDLFNSLHKLKLYPTRSRIANIKRNNSIPELARSAVFNLDYTISEKQIFRMKQGNICEIKVSKKDWIEYEIIFPSSIDERFTGRIAKPRFIKRKRDNQYIGICSYEYEVGDYVLEDKILGVDIGKIKLFSSVVVDRKGNFSNEFVNTKRSQETEYKINKLYENKQILYDKLKSYEALRLTNQSKYEIWKNLYSNISNKIINTKDYQAKLLSNEIVNLALEQKCKTIHIEDLSWLNSQGGKWNHSQIHSKIIEKATMYGIEVKKVSAFNTSKEHPITKEIGVVNDRTIEFTTGKIDRDLLAAINIAIRSTNIKLKKSLPKKAKTKRVKPKSNKKEIKEKVNKLKGNGQIVSFLTNVLDSTVQVELGVRPLHEVLPYNSLIHYYNKLQM

SEQ ID NO: 14726 - protein, 463 aa, Okeania sp.
MKYTYQYRLYPETQQALTLNGWLRVCRYWYNRMLGERFEWWEQNRCPVNVCPLICQLPVLKEQPNFYNQKKQLPLLKKDLVKIAWSGELLDFSQVYSAVLQDVCIRVKNAFNRFLAGDQNGKRSGKPRFKNAARYRTLNFPNADNSWLKFCTVNGRWLFVQLPKIGWVKLRTHRPLPDGANLKQLSMTKKADGWYCNLSLEDKSIPDFNPDDITPTWDNSIGLDAVLDRDFYLATSDGKKLPSLKPLRKNQDKLTTVSQRKNKRKKGSKARRRLAKREARIHQKIARSRKEFQYKTAHQLVDTGKKVFFHEKLNLKGLTRRNAPKLDEDGTFLPNGQSSKSGLNKSWLDAAFGQFFKVLGQVAAKANASVVEVKPNYTSQLLSYRDEFVFTDRNKREYFDEKFKLCVDRDVNASINIKRVGLDVFPTIKRRKGNPVVVESTTNSTSKEALTALFEHQKPTLKA

SEQ ID NO: 14727 - protein, 567 aa, Thermocrinis sp.
MIVQEILFRKTSAIPSSGFGIFSLYKYPAKFIPQVPAFVMESYAKKGMKVFDPFAGFGTVGFAARLYGLDYEIWDLNPLLEHLHSLCEAPSKPTDRLVDKIKAHPQEFMPSWTNLSYWHPEEFILLLSKAWSFYHFSPQEGFVVLYNLMTKAEKIRQAIKETKERRKNLRPVVYQLKIQNLSKVREEKLNRVFLEAKWLYNWFVADISRVNIPTKEIKEVEIKVGDTFEKREIKLLGSQLKQAVQERVKNNLRVLKGLKEKGYKVGKLKFKKVVSSINLKQYKVSFDIDFERNRVRIQGLGWFRVLGLHQVPRDCEIANAQLIKKPSGYYVYLTCYVKREHFEREKVREAVGVDFGVANKLTLSNGLSVDFEVKESERLKRLQKELARKKKGSKNREKVLRKLQREYERLTNIRRDIHNKLLALFRHYGVVVYQDDNIKAWHEGWFGSQVQHAGIGMLKARLRNNLATIPVERFEATTQECCVCGWKQKLSLSQRVYHCPVCGSVIDRDLNAAINILKKGLDLSQNQVVGVGRPELTPVERELVVKILGSNPYIKTTALVEAGSPHF

SEQ ID NO: 14728 - protein, 539 aa, Thermocrinis sp.
MTAKPLSVKKKNDHNFITVECLLVFDKDEDKEKVLNLMRKFSSMVRFAYKRLLEKMERKELKKLLSQKYEINTRYSDDAVFLAQQTLDSCIERGQNPKKLIFGSRELFEKLKKRHLTGKRREKLRQKWEERRYGILYSRGDKSKEGNLNLRLVNLDNQWYLRINLGNGEYVWAKVVRSAKRERDRWISFVWDLTQAEKTGNWFAYAVRLKLRNGKIYAQISKEEKFPEITITRENGVIGIDINAYPFHLALAYASRDGNLEKYERISLSGLLDGSADKREYLSWQIAHQVVEIAKREGKAIVVENLEKIPKGRRGDGMPKLRQKLHKWIYKGLLEKIEIVGKREGVQVIKVNPAYTSVIGKLKYAPIYRIDKDVASAYVIARRGLGFKESLPKNYRKLLEDKEFLSYSSARVEDRIAKLKKEIEEEKNEYKRNKLKSVLRRLKRELKLLLKFLIGSGKSESATQQTVNRKMERVRGPTQAGQKSWQVLSVALAFSCLESFRDFSPLKRVILLGDWVRVASRLVPPPGQGTAALNRCSFV

SEQ ID NO: 14729 - protein, 398 aa, unknown
  TnpB Polypeptide
LQKKAFRFRLYPTKEQGVLINKAIGCSRFVYNYFLDKWNTAYNITGKGLSYNTCATQLPILKKEYEWLKEVDSTALQSSVKNTSQAYSRFFKKQNNKPVFKSKRNPIQSYTTKYTNGNIKVVGKKLQLPKLGRVRYAKSRDINGRIINATVQRTMAGKYFASILCETDIQPMVKTNNSTGIDMGLKSFAVFSDNKKSIENPKIYQKHEKRLKKLQRDLSRKKKGSNNYYKNKQKIALVHEKISNSRKDFLQKHSTDVIKNHDVICVESLQVKEMMLNHRLAKSIGDASWSKFISMLEYKANWYGRIIQKVPKNFPSTQICSQCGNQITEAKELNVREWECPVCCSHHDRDKNASINILTEGLFLLSGKKRTAGTAGLAWVSLDYGRSIDQESCQFIGG

SEQ ID NO: 14730 - protein, 381 aa, unknown
  TnpB Polypeptide
MNVVRSYKFRLYPNKIQEKEMQIHLFISKNLWNDGLEFAKQLYEDFERFPSRQAFQEISKNSGLYAQVAQDVFIRLDLAIRAKIRRKKAGLKGGFPRFKTLDRMKSLHYPQSGFSLSERKLKVTPFGEINIRKHREIQGKIKTLTLKRESSGRWYAIFTSVVKGSTTIEINKDEQVGIDLGLMTFATLSNGEQIKKPKQMKEYEEKLAFKQRELSNKKLRSKNRSKAKIKVARIYSKIADIRKDWLHKTANNLLSRYSMNALEDLKVQGIAEEHGKGINDAGWSIFTNILSYKAESAGCEVVFVNPNNTSKECSDCGTLISKTLWERQHDCPSCGLNIDRDLNAAINILNRATAGIAGSNACQDEAIVSSMKQEANAFRHG

SEQ ID NO: 14731 - protein, 375 aa, Terrisporobacter sp.
VIKSIKIRLIPTSEQEILMFKSVGVARFAYNWGLNRWSELYSLGEKPNKYSIKKEFNNIIKKQAEYSWLYEVSSKITTQAFLDLSNAFKNFFEGNSKYPKFKSKKKTKQSFYVRYDRIKFTDGMVHLEKIGNVKYKTNYDIPTLTTYSNPRCSFDRKYWYLSLGFEHGENQVIINKDLSVGIDLGIKDLATINCLDNPINNINKTKKVKNLEKRLRRLQRQVARKYEDNKVGNRYNKSNNLIKIERKIKLLHRKLDNIRNNHIHQATNKIIKLHPYRVVMEDLNISGMMKNKHLSKAIANQCFYEFIRQMKYKCEFNKIEFIQVPRFYPSSKMCSSCGEVKKYLKLKDRVYKCSCGFVMDRDKNASINLASYQLV

SEQ ID NO: 14732 - protein, 267 aa, unknown
  TnpB Polypeptide
MLSFAKLGAMKVRWSRAFVSDPTTATITKSPSGRYHVTLCLDEPEPQPLPKNGKVVGIDLGLHRLATLSTGERISNPRHQGRRLRELAHAQRDLARRKKGSGRRNRARLKVARVQEKIADTRDDHMHKLTLDLVRRFDFIAIEDLHVRGMVQMRSLARSISDVSFGMFRTLLEYKAKWYGKQVAVIDRFYPSSKTCSDCGWINQDMTLAVRDWACRCGAKHDRDENAAKNILAAGQAVTPCGGGIRLERTPVRKSARRRSVKQQGAA

SEQ ID NO: 14733 - protein, 428 aa, unknown
  TnpB Polypeptide
VSSRGRRGDPGVQAGGGAAPPACPPKDCLAWHTRGIMSWLKLRYRYRIYPTDEQVRHLAREFGAARYAYNWALRLRSDSFRDGVRLNDLKTSAAWTKERRSLPWASETSCVPPQQALRHLQAAFVNFFDKRLGYPTFKKKAQKQSAEYTRSAFQYDPSTQMLSFAKLGAMKVRWSRAFVSDPTTATITKSPSGRYHVTLCLDEPEPQLLPKTGKGVGIDLGLQRLATLSTGERIANPRHQGARLRELAHAQRDLARRKKGSGRRNRARLKVARIQEKIADTRADHMHKLTLDLWRRFDFIAVEDLHVRGMVQMRSLARSISDVSFGMFRSLLEYKAKWYGKQVVVIDRFYPSSKTCSDCGWINQAMTLAVRDWTCKECGVEHDRDENAAKNILAAGQAVTACGGGIRLERTPFRKSARRRSVKQQGAA

SEQ ID NO: 14734 - protein, 496 aa, unknown
  TnpB Polypeptide
MLGRCSRCSTTWCGASNTAKASSWTCWRNGCENCCTRKRKRLRQRCKPWKSCQTTFTWLSRATPRWHPQDWRHSSRGSPVTNFGKSFRGSSPICRVCGAVRTTSEASVLFPKRPSSGTWRTRRLMRKTFKYRLFTTRLQGERLEVQLAEACRLYNAALQERRDAWKQRVSINYYTQANQLKEMRAAGDLGLANFSCCQDILRRVNKTFEAFFRRVKRGEKCGYPRFKSRRRFDSITFPSYGDGIKLNDNMLRIQGIGQVEVKLHRPVGGKIKTVTVKRECGKWYACFSVECESKPLPASTKEIGIDVGLEKFATLSDGQSVPNHRWYQKAEAKLRRAQRKVARRKKGSHRRRKAVALLQKVHQRIKNQRHEFQHKFTFWLVQNFGIIAVEDLNVKGLAGGMLAKSVHDVSWASFFSKLAYKAESAGRTLKSVDPRGTSQTCTCGAKVRKELSEREHVCIACGLLANRDHVSAQVVLQRARMSPSNRNVAELIASVV

SEQ ID NO: 14735 - protein, 374 aa, Moorea sp.
MHKAIKTKLKLNNQQKTLMAKHAGYSRWVYNWGLALWQQAYSEGLKPSASKLRKLFTNHVKPQYPWMNELSSKVYQYAFIALGVAYKRFFKGLGGYPKFKKKGRNDSFTIDNSGKSINLSGIRHKLPKLGWVRTYEPLPEITTKKITISRQADGWYVSCHYEHEPLATPKLKDVVGVDLGIKELAVLSTGIVFPGSKPYGQAQKQLVRCQRDLSRKIKGSNNWYKAVNRLGKKHQKVANIRKNTLNQLTTYLAKNHGTVVIEDLNVSGMMANHRLAASMADQGFYEFKRQLEYKCQWYGSQLVMVDRFYPSSQLCSSCGHRQKMPLKIRTYNCPECGLSLDRDLNAAINLRNAVGSTVSACGRSAADSSGRSRK

SEQ ID NO: 14736 - protein, 390 aa, unknown
  TnpB Polypeptide
MICAFKTQLFPNNKHRTYFHKACGVSRFAWNWGLDAWHKQYALWESSDKTDKSLYPNGLMLKKQLNAVKKAEFPWMYEVTKYAAQQPFINLQRAWSDFSNKKTMNGKPVGKPRFKKKGKCLDSFYVGGDQVVVKNKHVKVPNLGWVRMAEPIKYGGKINSMTISRSADKWFVSFSIDVEISFIPSKNQARCGVDLGINTLATLSRGDVRYWQTPKPLHNSLRKLARMQRRLAKKTKQSNSYKKLVVRLGRLHKRIADIRRNCLHQLTSYLVKNFAEVTIEDLNVKGMLANGKLARHIADVGMYEFRRQMEYKSSWYATVLNIADRWFPSSKLCSDCGSKNTDLTLSDRTYSCACGNNKCRDYNASINLEYYTARSAEIYAVGDDGSAPTV

SEQ ID NO: 14737 - protein, 398 aa, Alkalinema sp.
MKQVLTVSCKLQVTPQQVIKIDETLRAFCDACEYVNKEVPEKVTNEIAMQSLVYQDVRARFGLSSQLAIHAIRRVSGNRKTAKQKGSKVKGFTPTSATYDARIFSFREKDWTVSLTMLGKRERFKLHIGNFQRGKLKGQNPKTATLVKNRKGEYYLNIQLESEPPEPQKSDKVLGVDLGRTDIAVTSEGEKFSGKDVTKVRDHHSHLRAKLQQKASKGTRSTRRRVRNLLKRLSGKEQRFQKHVNHTISYRLIQHAKSNGMVIALEDLTGIRERTNQMPRAKKERRRSNSWAFYQLRQFLEYKAIANGVEIVMVNPAYTSQTCHQCDHIHPVRGESYRSGKQFTCGHCGWNGDADENGAKNIAKIGAVINQPGGSGVACSLSDHLSGLLKTPSAYAVG

SEQ ID NO: 14738 - protein, 138 aa, unknown
  TnpB Polypeptide
VTLRSHDSGAASWATHAVDTPHKDAVVTSDGERVAAPRFYRAVQRKLGRAQRALSRKAKGSNNKAKARVKVARVHQKIASKRNDVCHKLITNHVKNYDAVCVEGLNVKGLTRTKLGKSFNDAALGTIRQQVAYKGTWY

SEQ ID NO: 14739 - protein, 450 aa, Fusobacterium sp.
  misc_feature (157)..(444): Xaa can be any naturally occurring amino acid
MKIIKKAYKFRIYPTLEQVIFFLKNFGCVRKVHNLMLDDRKKGYEEYKSTGIKTEYPTPAKYKEEYPYLKEVDSLALANAQLNLEKAFKNFLKNKDFGFPKYKCKSNPVQSYTTNNQNTIYINDSYIKLPKLKSLVKIRLHREIKGIIKSATISKNXXXXXXXXXXXXXXXXXXXXXXXXXXXXXXXXXXXXXXXXXXXXXXXXXXXXXXXXXXXXXXXXXXXXXXXXXXXXXXXXXXXXXXXXXXXXXXXXXXXXXXXXXXXXXXXXXXXXXXXXXXXXXXXXXXXXXXXXXXXXXXXXXXXXXXXXXXXXXXXXXXXXXXXXXXXXXXXXXXXXXXXXXXXXXXXXXXXXXXXXXXXXXXXXXXXXXXXXXXXXXXXXXXXXXXXXXXXXXXXXXXXXXXXXXXXXXXXXXXXXXXXXXXXXXXXXXXXXXXXXXXXXXXXXTYRNKF

SEQ ID NO: 14740 - protein, 167 aa, Fusobacterium sp.
LSIGGASKEEEMKIIKKAYKFRIYPTLEQVIFFLKNFGCVRKVHNLMLDDRKKGYEEYKSTGIKTEYPTPAKYKEEYPYLKEVDSLALANAQLNLEKAFKNFLKNKDFGFPKYKCKSNPVQSYTTNNQNTIYINDSYIKLPKLKSLVKIRLHREIKGIIKSATISKN

SEQ ID NO: 14741 - protein, 364 aa, Methanocella sp.
MRKVYKFRLYPTKPQLKKLGRTLELCRYVYNKTLETRKKAWEEDGRTLSKYSLNNLLPEWKKEDPELKEVFSQTLQEVQERVDLAFKYFFRRLKNGDNPGYPRFKGKGWYDSFCYPQMGFKVHDNSVYLSKIGEVYMVKHREIEGEIKRICVRRKNNKWYACITADVRPAEISNSLAVGVDVGLESFATLSTGEKIANPRFFREDEKALAKAQRKLSKTEKGTPRRDRAMKVVSRIHERIGNRRYDFVHQLSRKLVNRFGLIAFEDLSIKKMVKNHRLAKSVSDAAWRMLINATRYKAESAGTKVVLVNPANTSKMCSRCGQIVEKTLDERVHRCPCCGLVMDRDENAAINILRLGLQSVAYKA

SEQ ID NO: 14742 - protein, 434 aa, Methanocella sp.
MDKRIIIVVCMLVRKTVRIPVHYETTKSKVDRLGRLTARLTYCISLINGLVSPETSLDRKTLRRLVKDSDIVQKCGLSAGYVDQCIDKVLWAWRSYEDRHGEWQYMYDRAVEDHANCGDDERGELEKKVKRLEKNEPSPPVFDHKVSCRLDFRTGGIERGENSFLLWMHVSTLVKGETMDVPLNPSYYHLKQLEGAMISDFEIIRKNGRYYAHVSTTRFVVDVETSSYGGIDQGLNRTLAIVLLPPTGAGVPREELLYDEKRNMLDKYDAIIASLQSAMASARHDRARWLVEYHKMSRKLKQLRGKRNNVSVYHDWLLANKAAEYTDGYTIAIGNTRFRQAQYRGNGMPALRKRIGKWSYARQRMFIAHKRAERGLSTMLVDERNTSNTCRCGSRLVTRKYLNGASWLLCHSCGSKLDADLNAAYNIAARGMTG

SEQ ID NO: 14743 - protein, 424 aa, Methanocella sp.
MEVRKTVRIPVHYRTTKSKIDRLDRLTARLTYCISLINGLVTANTKLDRPTLRKLVKESDVVEKAKLSSGFVDQCIDKVLWAWKSYRALHKEWEYRYNRALDRLESARDDEEKMRAETGLRKLEKKEPRTPRFEEKTSCRLDCRTGTIQRGENTFRLWMHVSTLVKGETMDVPMNPSYYHLKQLEGAMISDFEIIRKNGRYYAHVSTTRFVDDRITSSYGGVDQGLNRTLAIVLLPPTGDGVPREELMYDEKRNLLDKYDAIIASLQQAGKTRKLKQLRGKRNNVSVYRDWLLANKAAEYTAGYTIAIGNTRFRQAQYRGNGMPALRKRIGKWSYGRQRIFIAHKRAERGLSTMLVDERNTSNTCRCGSRLVARKYLDGASWLLCHSCGSKLDADLNAAYNIALRCRDDRLKVRMNAAENRTSA

SEQ ID NO: 14744 - protein, 346 aa, Methanocella sp.
MILTYKVRHDRDFSTELRMARQVADFAVKHRSFSSKDVKHIGLKSMIANQILRKYGRSKTIKKARNVNLIVPSQGIKADHSKHIINVPCLKLSLPYRFPDFEKVNQIEVDGEYAYISVSIPDVEIKEPSHYIGVDLNATGHAAVVGNPQTGKIWKLGKRCQHVHKKYKNIRRRLQKLGKYGMVKKIKDRESRIVRDLNHKMSRKIVEIAKEAGCGIKMEDLKGIRKTTKQAKSFRYSLNSWSFYQLRTFIGYKAKLQGVAVAHIEPAYTSKTCSRCGHMGNRNGKAFKCPYCGYVENADVNASFNIAKRQIGVTQSDIERDMSEGSTDAPQMATSRTMATIEPHRL

SEQ ID NO: 14745 - protein, 435 aa, Methanocella sp.
MLVRKTVRIPVHYETTKSKLDRLGRLTARLTYCISLINGLVSPETSLDRKTLRRLVKDNNIARKTGLSSGYVDQCIDRVLWAWRSYEDRHGEWRYRYDRALEELQNAGDDGREKLEKRVKRLQENEPSTPVFLHKVSCRLDFRTGRIERGENSFLLWMHVSTLEKGETMDVPLNPSYYHLKQLEGAMISDFEIIRKNGKYYAHISTTRFVDTRITSSYGGIDQGLNRTLAIVLLDEVPREELLYDEKRNMLDKYDDIIASLQSAMASARHVEPRKLVEYHKMSRKLKQLRGKRNNVSVYHDWLLANKAAEYTDGYDIAIGNTKFRQTQYRGNGMPSLRKRIGKWSYGRQRIFIAHKRAERGLTTMLVDERNTSNTCRCGSRLVARKYHDGASWLLCHSCGSKLDAGLNAAYNIALRCRDDRLKVRMNAAENRASA

SEQ ID NO: 14746 - protein, 455 aa, Methanocella sp.
MKYISRRVIIEALDMKQTASNYLRMDKKTYRIVDTLSFLSKNMYNVGLYNVRQHFFQTGKYLSYESNYHVSKTNENYSLLHSDNSQQILKMVDRSFRSFFGLLQAKKDGGLPEDMEVRIPHYLDKNGRFLLIFPAARLRFSDSGSKVSLGMSIKFKKQHGLKGDELTFNVPAYISPTAIKEIRIAPVHDGKSYKIEYVYDVMPEEMSLDPNQYLSIDLGLDNFATLVESVDGAATIIDGKHVKSINRYYNKEMARLQRIKYKQGVEKFTRRQSRITIRRGNQINEFLNRAVNYVVNVCLKKHIGNIVVGELKEIKQEINHGKRNNQNFVQIPYWLFKRKLKGKCQRYGIEYHEVDEAYTSRTDALNFDEIREQPYDKTRRIERGLYRSITGVTVNADVNGSLNIMRKVADESIVRRIVGSGLVNRPWRIRLAWETTQQTSPEQNCTQQTVQATAL

SEQ ID NO: 14747 - protein, 433 aa, Methanocella sp.
MLRVQKNRVRGLTKKEFSILRSLCHYSKNLYNVTLYTVRQYYFLNGTFLKYESAYHYVKDNENYNMLLTASGQQTMKVVDRTMKSFFGILRQRKEGNYNRPASLPHYLDKDGLFVVLFPETGFRIRNGKVYIGLSKKFREENHVDQRDIVLDVPKNIRGKHVKEVRLIPKYGGLYYDLEYVYNDRQENIALDKSKYLSIDLGLDNFATLVDSTGSAVIIDGKGLKSINQWYNKENARLQSIKDKQKIKGITKRQSRLLYRRNNKIKEGLNQAVNIVVKRCLDNGIGNVVVGELRDIKQKINHGHVNNQKFVQIPYGTFKLKLKSKCEQYGIEYHEVDEAYTSRTDALAFDEIKLQPYGESRRIERGLYRSITGNVINADVNGALNILRKVSGDSPVRGIVGRGLVNRPRRVRLYSRPPPNQIANATAAASPVL

SEQ ID NO: 14748 - protein, 484 aa, unknown
  TnpB Polypeptide
MQTGYRFRLYPSREQVSILWRWIGCQRFIYNAKVSEDRYFRAFARKSLQHVGLHAPQDQQYSHFITEQTTWLREVPSQVLRNGAVRWKQAYSRFYKQLAARPRIQKRHGVQSVWLTSELFRFEPVTDTNTGENTGYRLLVGTRKYPVGELAFKAHRQHGIPASITLSVDAGRWYLSFTEDNGVALPSEQGIANWLAALSEAELTERTVGFDRGVVTPIAGSNGMSFALSDIQQARLDKKERTTRRWQRKLARRTPGGANHRKAKQRIAGCKAYGKNVRRDFAHQTSHRIVADPHTLLIVWEALGVRRMTRRPKAKQDESGHWAKNGARAKAGLNRSILASAWGQTKTYTQYKAIRAGKLAIEVAPHHTSQECARCGHTHPDNRLSQAAFACQRCGHAENADLNASRNIRRRGVEAILTGSYRQKASKTVMRMRKKLLGADCSEVTSVETTVSRGAGNGTAHRSTKQKGRAVRPTETPTTTASEV

SEQ ID NO: 14749 - protein, 413 aa, unknown
  TnpB Polypeptide
MKITRSTKSSIKFATRKKQAELKTVLKEYGRVVNIFINYFWNSDSKTEKTKLLKPIVDIPKDTWLSARLRKVAAREALDMVSSVKEVFDWNKEQLESGIKAIQTRISKIQPNTKKDRRTINNLYVRLKKKQNQLSMLKPHKPKHSGDRMSVSCTIAELQRAKKANRFDYWLHMASIGNKMALDLPINSHRHFKSLLASGQRLNSYIITKDSVQFSFEIETGPKKEVKHSIGVDTGINALASTSDGNQYGTDIKAHIERVKRCQWGSKGHKRASNALRQRIDEVAKQTVKDADLIVVEKLSDLNKNSKLKRRLSLNMRRSIGSGNLRYWLGRLEQQCEQNRVSFRSVPSYYTSQRCTVCNHTDGGNRSGEMFLCQRCGHSDNADVNAAKNILERHLTQPYGACCKQENLLSKIM

SEQ ID NO: 14750 - protein, 382 aa, unknown
  TnpB Polypeptide
MTTIKKGIRVRLYPTEEQEVLINKTIGCCRFVHNQTLADCKQSYEHTQHFPSKNERIKNLVSIKEVHEFLKEVDSGALQQSIRDFNSSLDNFFRNRGHFGFPKFKFKHNLKQSYRIPCDKRLVYVLDNKHLKLPKLGKVKTKRFEMPEVYKIFNITVERTATGKYYASILIETETQPLPKTDKQVGFDLGLIDLLIGSNGTRVERPKFAYAFKDKLAKEQRKLSKMRTKLERVNANLDECKNYQKQKHKVAKLHEHISNCAKDFNHKLSRKLVEEYDLLAFESLNIEGMKKNHYLAYSISDVRWSQLLTFIKYKCLWYGKEFRQVDRFYASSKTCSECGAYHKDIVNSLSVREWICPDCSTHHDRDVNAARNILNQALSVGI

SEQ ID NO: 14751 - protein, 336 aa, Bacillus sp.
  misc_feature (221)..(221): Xaa can be any naturally occurring amino acid
  misc_feature (320)..(321): Xaa can be any naturally occurring amino acid
MEVNEMMINKAYKFRIYPNKAQAILINKTIGCSRFVFNHFLSLWDHAYKETGKGLTYGTCSAKLPAMKKEFVWLKEVDSIAIQSSVRNLADAYTRFFKKQNSAPRFKSKKNNVQSYTTKQTNENIAVIENKIKLPKLGLVRFAKSSEVKGRIVNATVRRNPSGRYFVSLLVETEVQELPKTNSYIGIDVGLKDFAILSDGRPYKNPKFFRSLEAKLAKAQXARIHEYISNARKDYLDKISTEIIKNHDVIGIENLQVSNMLKNHKLAKAISEVSWSQFRYMLEYKAKWYGKQVIVVSKTFASSQLCSCCGYQNKDVKNLXXSGGSSKNKRYKNKMQ

SEQ ID NO: 14752 - protein, 366 aa, Vibrio sp.
MTQRAYKYRFYPNKAQAEILEQTFGCVRFVYNRTLAYSQEQYEQGNKTNLSDWNKNLTALKKTPEFNWLKAVSSVPLQQTLRHLDKAFKAFFKSGFGYPKFKSKRNKQSACYMVNSFKWDAANQTFTLAKMERPLKIKWSRHFTGKPTSAYVSKTSTGKYFISILVNEDIQPLPKVNKTVGIDVGIKDLLVCSDNTTFGNPRTLQRFERKLARAQRQLAKKKKGSNNYRKQKLVIAKIHEKIANIRADYTHKLTTKLIRENQTICLESLRVKNMVKNKRLAKHILDANFGEIDRQFDYKATWYGRTISKIDQWFPSSKMCSGCGAIYEGKWSLAIREWICSCGQHNHRDHNASVNIEVEGLRLLAA

SEQ ID NO: 14753 - protein, 414 aa, unknown
  TnpB Polypeptide
MDRTIVVHLNPVPEQARTLKATLEQHTACYNAVAHEGFTTTCSNGVELHKRTYYPLRLQYPDLPAQLVCSARVKATESVKSALTWKAKKEKAYPKMVEKAKKQGKPIPPFKPVRCPHSESTCIRYDQRSYWVKWETMTCSLATIDGRVELPFTVPSHLQHYVGYKVCSADLCYRKGRYTLHIVLSIPQPGVPVSQDVIGVDLGMNRPAVTSSRQFLGERRWKEQERRTFRLKRKLQAKGSRSAQRHLKKLSGKQFRRRKDHDHVLSKRLVQHATPGSTIVLENLTHIRDTSKIGRGKGNKNVKNKRRLHSWSFAQLYSFVEYKAEARGIQVEKIDPRHTSQTCSKCGYHHRSNRRSQSLFLCKNCGYCLNADLNASINIKQKYQALVGTSFVGGLPSDSLSCPSSGEMQAPSFS

SEQ ID NO: 14754 - protein, 505 aa, unknown
  TnpB Polypeptide
MAKSSTNSFITEIPLVVDSKQEKELLSRFQAGRQLYNACLNEAVIRLELVRKSLAYQKAKNTPIGNKKERSNAFAEARKSCRYSEYDLHSYAALVAKNSKWIAEKLDAQSAQKLATRAFNASERVMLGKSKRVRFKVLSRFRSVEGKTNKQGIRWTNNQLVWGKLKINAKIEADNPVIQHGLSASIKYVRILWRELKGQRRWYAQLVNEGEPYQKPSNCVADGLVGLDLNISNIAFVGDKKAGLLPFAENVPTYEREIKALHLALQRSQRANNPENFHPDFESKRGRKLVSKKGKHKKGNHKWIKSKQYQKLAQKKRELERRKAAYAQTQNRKIVNDILRHGKHIKTENVSVKGWQKRYGKAISAKSPGFVQSELKRKAEIAGGSFTKFSTQKTALSQTHLDGTRIKKSLSQRVHQDITGVVMHRDLFSAFLSRHVNDEDNLLLHLARNEWGRLEPILTEAWEEFQQSANQVSASESRLCHSPSERISVEDRSISQIAIKGKKLI

SEQ ID NO: 14755 - protein, 412 aa, Oligella sp.
MKRLQAFKYELMPNGEQQRAMRRFAGSCRFVFNKALALQQAHYAEGKKKLSYSDLCKHLTQWRKSSETPWLADTHSQALQQALKDLERAYKNFFEKRADFPRFKKKGQSDRFRYPQGSKLDQGNSRIFLPKLGWVRYRNSRDVLGVVKNVTVSSKQGKWYVSIQTEREVETPTHPSTAIVGIDMGITRFATLSDGSYLVPLNGFKRQEKALAKAQRAMSRKQKFSNNWKKAKATVQKIHARIANSRRDYLHKATTAISQNHAMVCIEDLQVRNMSKSASGTLVIPGKNVKAKSGLNKAILDQSWFEFRRQLEYKLTWLGGELLAVDPRNTSRTCPCCGYVAKENRRSQACFKCMDCDFEENADVVGAINVLRAGHARLACAETSPVGKGVGPRTHRSESGDGRLNAVGIPVL

SEQ ID NO: 14756 - protein, 387 aa, unknown
  TnpB Polypeptide
MIKSIKVRLNPNNKQLTKLFQYAGCDRFAYNWAISREQDNYKQGNKFLSDSELRKEFTQLKKQSEYQWLNEVSNNVTKQAIKDACNTYKRFFKGQCKYPKFKSKKHSTPSFYQDNIKIQFTDTHVKVESFSMSKKQNKQKLNWIKLCEKGRIPTDCKYMNPRFTYDGLYWYVSVGIEVNDNTTLPLNEGIGIDLGIKDLAICSDGNTYKNINKTQTVKKLEKKKRRLQRSISRKYEENKKGASYCKTSNIIKSEKELLKLNHRLTNIRQNYLHQTSAKIVKREPSFICIEDLNVSGMMKNRHLSKAVQNQGFFEFRKQLEHKCRDKGIQLIVADRFYPSSKLCSCCGNIKKDLKLSDRVYRCACGNMIDRDFQASINLKTYGEKFAS

SEQ ID NO: 14757 - protein, 275 aa, unknown
  TnpB Polypeptide
VLKAYKYRIYPNSEQRIQIAKTFGCCRFVYNQTLAYRKEIYEKEKKSVSKTDCNNYCNRELKKDYEWLKEIDKFALTNAIYNMDASYQKFFKEHAGYPKFKSKHDNHKSYTTNFTNGNIAVDFETGKIKLPKLKAVKARLHREYSGQIKSATISQISSGKYYVSILVKTEHKELAHTNHNIGIDLGIKDLCITSDGKVYESLKIIKKYEKQLVKLQRQLSHKGKRSKNYYKTKKKIALCHEKIRNIRKDYLHKVSHEIISENQVIVSENLQIKTW

SEQ ID NO: 14758 - protein, 374 aa, unknown
  TnpB Polypeptide
MKALNIKVYPTREQEILFYKYIGSQRYVYNWALAKNNELYKKEKKKYSTAELGKMLTKHKDEVEWLKEISNATLKESIRCLDKAYINFYKGQAKLPKFKSKKKSKNSFYSRYDRIKFYENNIVKLEKIGKVKCKSSYNMDLTKISKFINPHISHNGRCWILTLGIEIENRPHKTTDEVIGIDLGVKELAVCSNGMVFKNINKTNQIKKLEKRLKHLQRKVSKKYESNKKGGRYLKTNNIKDLEKRINKLHRKLKNIRLDYTHKCTSTIVKTKPCRIVMEDLNIKGMIKNKHLSKAIQQQNLYKFIRQIEYKCEWNNIDFVQVDRFYPSSKMCSNCGNIKKDLKLSDRIYKCECGLTIDRDFNASLNLANYGKSL

SEQ ID NO: 14759 - protein, 443 aa, Actinomadura sp.
LLVSAGDVWACVLDMNRWRRQRGLPAMVNFQELCRELHNSGPGVFGELASIPAEGMLRRFSDAWFSAAKRRRQGDTSARYPRRKRRLMPVRFRHGAFTTQGRRLRLATARGCPPLWVRLDRDPPYPAEQVRSVTLLADGGRLFVEVTAQVPVATYPPGAEPDPSRVAGVDPGVIHLYAAAGPDEQGLLVSGRAVRAENHLHLRDTKARTKATARRAPTKGQAGSRRWKKTRTRQRKLQARHHRRITQAHHEAARDVVQWAIQHRIGILKIGDPRGVLELTAGRRHNKRLRDWRVGHLITCLRDKAEQAGIDTHLVDERGTSSTCPTCDRRVPKPKNRNFSCPHCAFTGHRDLVGGANIATRTIGGGTITADRNPFPTVIQHRRAGRHLPGVNSARRDPRRRPHHGTVRGSPGRPRPAPPEMGTSLAHQARISQHHLDSEANVA

SEQ ID NO: 14760 - protein, 350 aa, unknown
  TnpB Polypeptide
MLLSKKTSIKVSREYANLIGHMCYAASKLWNVCNYERQHYKETGMEQYPDWYYQKKAHKEDLWYKQLPSQTAQEVCKLLDKAWKSFYALKRSGGIETPRPPRFKQESIPITYMQMGIVHERDTGRVRLSLPKALKKYMEETYQIHENFLYLENKIFRGMDQIKQLRIYPPEKGSCKIIVVYEVPDQEELPQNGHELSIDLGLHNLMTCYDSGNGKTFILGRKYLALERYFHKEIARVQAQWYGQQSGKGVKYLATSKHIRKLYKRKHDSVTDYLHKVTRYLAEYCREQGITCVVAGDIRNIRREKDLGHRTNQKFHSLPYNRIYIMLEYKLKRYGIRFIKQPANKKSRLN

SEQ ID NO: 14761 - protein, 268 aa, unknown
  TnpB Polypeptide
LEGKIKTLTIKKENDEWYAIFSCDKVPVKKVKNNFKSEVEGIDVGLKKFIVCSNNQEIESPRFLRKSEKRLKRLHQRHSKKKKGSKNKTKSRIKLANQYTKVTRQREDFHKKLARSLAMEIKYIGVENLNIQGMVRNHCLAKSISDAGWGQFVSYLKYYKTIFEGGVIEIGRFEPTSKTCSNCNHKQKMPLSKRTFKCENCGLEIDRDINASINIKNLTINKLIEKDKSNTDGQSEFQVCGDSIRPSFEFTQEKAIVEEAENYREIVC

SEQ ID NO: 14762 - protein, 423 aa, unknown
  TnpB Polypeptide
MIVTKSLKIPIHYATTKAKLDKLDNLTARVTFCITCISSLISDDTDLDRKTVRKLTGDNDIASRTGLSSGFVDQCVDKVIWSWKSYRKLHTDWERWLEGAKERIDSAEDDRTREKAEKSLAKLVKREPSVPEFQEKTPCRIDYRTGRIEQGVNSFILWMHVSTLEKNRPMDIPLNPSPYHLKQLEGCEINDFEIIKHGKKYYAHISISKEITEKETSSVGGIDQGLNRTLAIVLLDGDMPHEELFCETEKLSLIDKYDSLIASVQQSRNGRKLKLLRHKRSNVAMYHDWCLANHVARLTESYYLAIGNARFHQTNIRGNGKPGLRKRVGKWSYSRQRQYIALKRAEMGYQTLLIDERYTSKTCHVCGSRLVERKWLDGSSYILCHCCGLKYDADLNAGHEIALRCRDDWLKVRMTPEENRVSA

SEQ ID NO: 14763 - protein, 518 aa, unknown
  TnpB Polypeptide
LVINLFGYKFALYPNKTQEELLNKHLGECGWLYNKAIEQNEYYKADSNIEEAQKKFELLPDKNSDEAKVLRGNISKDNYVYRTLVKKKKSEINVQIRKAVVLRPAETIRNLAKVKKKGLSVGRLKFIPIREWDVLPFKQSDQIRLEENYLILEPYGRLKFKMHRPLLGKPKTFCIKRTATDRWTISFSTEYDDSNMRKNDGGQVGIDVGLKTHLRLSNENPDEDPRYPNPKIWKRYDRRLTILQRRISKSKKLGKNRTRLRLRLSRLWEKIRNSRADLIQNETYEILSENKLIAIEDLNVKGMQEKKDKKGRKGRTRAQEKGLHRSISDAAFSEFRRVLEYKAKRFGSEVKPVSAIDSSKECHNCGNKKGMPLESRIYECPKCGLKIDRDLNSAKVILARATGVRPGSNARADTKISATAGASVQTEGTVSEDFRQQMETSDQKPMQGEGSKEPPMNPEHKSSGRGSKHVNIGCKNKVGLYNEDENSRSTEKQIMDENRSTTEDMVEIGALHSPVLTT

SEQ ID NO: 14764 - protein, 174 aa, unknown
  TnpB Polypeptide
MIQTHFTGEKIEHQRELGLMAWRLAQAQRGQHQVLAARLQERIASQRQDRNHKLPRRLVAENKFIAFSADRHKAVAKEFGKSVASSGHAQLRRMVSDKSVQCGRNYVEVNPALSAKTCSACGCLSGPSGLSGLSARQWVCSECGTPYDRDVNTAINTLSDGAGTAHEGGLRHGA

SEQ ID NO: 14765 - protein, 386 aa, Shimazuella sp.
MFAKFQLGGDFMHKAFSYRLRPTKAQAMLIHKSIGCSRFVFNHFLGEWNNMYQETGKGLTYTTCSRVLTEKKRELTWLKEVDSTSLQNTLKHLADAFQRFFQKQNDAPRFKSRKNRVQAYTSQCNYSKNSRPTIEIIRNKIKLPKLGWVKFVPSRAISGRILSATIRRTSSGKYNISILCEGCYLRSVPARKEAVGIDLGLKDFAIFDDGTKTKPNRFFRQYERKLAKLQQMMARRKKNGSNWHKARIQVARLHEKITHARHDFLHKLSTKLVCENQVISIERLQVKNMVKNQKLAKSITDASWSEFVSMLEYKAKEYGRKLVKVGKSFPSSQLCSCCGHRNKEVKQLQLRAWTCLNCKEHHDRDINAAKNILQEGRRLLAVGLTV

SEQ ID NO: 14766 - protein, 201 aa, Brasilonema sp.
LNCKIARLHQRISDTRKDWHFKLAHKLCNGAGMVFVEDIDFRTWAKGILGKHTLDAGFGQFVEILKWVCWKRGVYFAKVDKDYTSQVCPQCDAHTGRKDLSDRLHVCHECGYTTHRDVAAAQVIRNRGASAVGGSPDLRHLAWVSGLGRSLEENACGDGLAGTGNRLVKSQRNRKNGEEARLKEPVLRTGLPPQVSGVTAS

SEQ ID NO: 14767 - protein, 162 aa, Brasilonema sp.
LNCKIARLHQRISDTRKDWHFKLAHKLCNGAGMVFVEDIDFRTWAKGILGKHTLDAGFGQFVEILKWVCWKRGVYFAKVDKDYTSQVCPQCDAHTGRKDLSDRLHVCHECGYTTHRDVAAAQVIRNRGASAVGGSPDLRHLAWVSGLGRSLEENACGDGLAG

SEQ ID NO: 14768 - protein, 407 aa, unknown
  TnpB Polypeptide
MFRRQLFRLYPTTSQEEYFLQCVGAARYAYNWGLALNQRYYRRYGRNCHWMRLATKWRQIKRTVNRKAWVQDISKIVTSIPLKDLGDAYKRWFSYLNSKKSGKVARPVRQPAFKTKAKSRRRFTIADEGRLVRIDRGRIKLPSVGWVATRSERRWPSAPHKSAAVIERGGYWFLSVLFELPDPKPEPHTGPSCGIDLGITTFATIASEGRAVDEVKPPKPYAKAKRRLRRLQSRLDRMMSGSKNREKSRVKLGRLHLRVANIRHDFLHKMSRKVVNTYGMVVLEDLNVAALSKSHFRKSVRDLGIAEFRRQVEYKSSETGTRIVIAPRFFPSTKTCSQCGIVNRDVVLGVVAWDCPSCHAHHHRDHNAAINLEKLGRGTPKVTPAETGGSGERKRPGAGRGSRKATL

SEQ ID NO: 14769 - protein, 369 aa, unknown
  TnpB Polypeptide
MFNISYKAYQSDNNIHIHEMINISAWVWNHSLALQKRYYALYGGYISLNRMQKHISKLRKRNPKWMLLNSQTVQEICQRLDESYKRFFKKIAKRPPKFKKAINFSSFVLKQSGWSIDGNKLIINKIGVFKFSKSREYENIKRVVVKRNKLREIYFVMMCDIKPKEYKRLRNGSIGMDFGLTTYLTLSNGEEIQSPQFFKNELAKIQKASKELSLKKKGSNNRKKALMNLSRAHIDIKNKRDDFHWKLAHKLCKYNSFIAIEDLNMSAMKQLWGRKISDLAFSDFVLKLEQIAKKYGTTIQKVGRFYPSSKTCGCGSVNKGLKLSDREWCCPECGIINQRDRLASKNILAEGIRLCRSECKTDIFSATYV

SEQ ID NO: 14770 - protein, 235 aa, unknown
  TnpB Polypeptide
MKTYNSRVKYDGKYWFLIFAIEVDITADNTTDEVVGLDLGIEKTITTSSGVVYSNINKTRKVLILQRRKKRLQRKIARKYELNKEGKRFIKTKNIKRLEKQVRLIDRKLSNIRENYNQSIVNDIISKYPKRIMIEDLNVKGMMKNRHLARAIQEQQFYRIRQLLTEKALNTINIQIGVVNRFYPSSKLCHTCDFKNKYLKVSDRIFRCPNCGSVIDRDYNAALNLRDCDDYKLAF

SEQ ID NO: 14771 - protein, 346 aa, unknown
  TnpB Polypeptide
MKLKRTIHAKLVLDRGGKREAVEREYWAWQRQLGGKDETLYSAAKQQAQRFRRRVKKQNRHGLKRKEYPMILRRDCVKVQCQKDSVFRWWIRIPVNPRSIWVPMQLPYEQERLLNYDLRECKLIRDGEKWFVNIIVQKQARLKRRYAAVLPIDMGIRKLATTIEDGKPCFYGKEVRRIRGRYFKLRRSVGKGGIVKKWKHKEHEIVKHQVHAVTRQIVNRAKQTNAIIAIGDLKGIRKQGDSKGRSFKRRLSSQPFYMFKQMLTYKANWEGIRVIEVPEAYTSQTCSRCGLRGQRVAGRFSCQNCGLAVDADVNAAWNIGKRAHGLLAHEAGAVLTPPRTLAVCEP

SEQ ID NO: 14772 - protein, 372 aa, unknown
  TnpB Polypeptide
MEYSYKFRLYPNREQETQMLRTFGCCRFVFNHYLADRIETYKETGKSPTRFEQDRNLTFLKKQEETSWLREVDATALQSSLRDLDDAYQNFFRRVKHGEKPGFPRFKSKHDHRQSYKSKCVGTNIKVLDKAIQLPKLGAVKCRISKEVKGRILSATVSRNPSGKYFVSLCCTDAEVAALPMTGSVIGIDMGIKDFAVSSDGIAYENHKYLAKSEKKLAKLQRQLSRKAKGSRNGDKARLQIARLHEHISNQRKDMLHKLSAQLLKENDIICIEDLAPKNMVKNHKLAKSIQDASWSEFRRQLEYKAEWYGKKIVVIDRFFPSSQLCCNCHGLWSGTKDLSVRKWTCPVCGHTHDRDRNAAINILNEGLRLLA

SEQ ID NO: 14773 - protein, 185 aa, unknown
  TnpB Polypeptide
MVCMSPPMKRMRTIRTSCERSKSDWLKLKENCRKGKKASRNRDKQSLRVAKLHEKVANQRRDFIHKKARYLVDKYDAIGIEDISVKAMAKRKKGGKFSFGKSVADNGWKKFVNILEYKLVWQGKQLVKIDKWYPSSQLCHTCGYKKSEMKDLSIREWDCPKCGSHHGRDKNAAINIREEARRISA

SEQ ID NO: 14774 - protein, 451 aa, unknown
  TnpB Polypeptide
MKKAKKVTRIAYSDDLNQTKYDALDEIAKHCGAVRTEVWRNYGSVGGLSARFRPVRDGWIADGHIKNLPQRIWRATLSDTLNDVKANREAAKEKVVRHIFRNIDDKDKRKELFKQLKNDSVWINNSYLRRLLRKYWKHGKNNTFNQIVLEPGSYKCFSHNGKNYIEVISLKRGKRIAIPIGTRYSITGQIRLILRDGGVEIHYTIDNTDDRTCGNKVCGIDKGYTEVFVDSEGEFYGKGFGEVLSKESDSLKKKYQRRNKIKAVLDKVKQKNPKKARRIKKYNLGRKKLNRRKQRHQNQVKTIVFTATNRVVDKAKTLVCEDLTKTSHFKNLGKNTNRRLSGWVKGLMASAIDIVASRRGSRVVQINAAYTSQMCSKCGCLGKRTRDTFHCSFGCGAVMQADLNAAVNVKARLDDKELHRWLPFQKVKQILLERCRRSDETAHPEVQLQLI

SEQ ID NO: 14775 - protein, 556 aa, unknown
  TnpB Polypeptide
VHDLILVTLDGLTVTHDSRKEGALAKNQTYKAFTVRPSYVLDLNGELLDSVPVMAQLASEIQGISAYATYTVRNDTQLAADLAQVTVSQPAVAGRRAGVTIPAELVVKGELRRNKSGKLVEEKVFGKSRKEWLFRHRVVTEHRSWQERIKAANGESSKHVSQGWKRTVNASAPAYGEDTINLGAVDRSYAAVENNPFEDGEIILKLVVQGVWYRLIFNFDNKRFTEGKVTLPLIKIQDNQPVFIFTVVTDNPVVQFSGDYTIGVDVGINDYATVVVRNSTTGGLVHKTTLSQRVHSLWNSVRASERQVKQLNKKADKLLYDRQAHMCAIDEAQLHREAASRKKRELAILAAQEIAYLSYSHGNAVVAVEDLGWVANTMQNGRWNRGAFVQWLTHYVAQNGGWVVAVNAANTSQVCHLCGEKVEHPIHEVSRCPKHGDMDRDVNAAANIAARTVSKVDKARKTRAKNRNLQPQAQLKTPIARSSLRYPGRDRTKNAPTPKRKKHSRVVREVNLPLSPARVNSTTVLADWDAYGILETDMAAIKQDSMAYECRLCNLY

SEQ ID NO: 14776 - protein, 517 aa, unknown
  TnpB Polypeptide
LNGELLDSASVMSQLTSEVQGISSYATYVVRNDEVLGTELSRVTATAPAVAGCQAGVVMPDFLVPDKKDEDGNPLKDENGEPIKLKTGKSRKERLFRHRVVTEYRSWQERLKAANGESDKYVSQGWKRTVDASAPSYGEAGFINLGAVDHNYAAIENNPFTDGEIVLKMVIQGNWHRLIFRFDNMRFTEGKVALPLVKIENGKPVFIFSVVTDNPVVQFSGEYIIGVDVGINDYATVVVRNSSTGRIVHETTLSQRVHSLWNSVRASERQVCALNKKADKLLYDRQARMSAIDEAQLHREAASRKKRELAIVAAQEIAYLSHQFDNAVVAVEDLGWVANTMQNGRWNRGAFTQWLNHYVTQNGGWVIAVNAANTSQVCHLCGERVAHPEHKVSICPKHGMLDRDVNAAANIAARDVPKVEKARKTRAKNRKLQRQVALKTPVIRCSLKYPGRDRTKHAPTPKRKNRTSREVNLHLSPARVNPTSVLADCGAYGAVETDMAAINQGNVTCECKLCSLN

SEQ ID NO: 14777 - protein, 470 aa, Desulfotomaculum sp.
LLARLEAARQLYNACLGEAVKRVKLIQQSRLWQKAWKAGDKDQRNALIREACSKYGFTDAALQHYAIETRRSCWIRDHLDVHVAQKLGTRAFRAAQRVLFGQARRVRFKGKNQMDTVEGKSNDAGIRWRDGCVAWKDLILPAFIDPEDPVIRHALSCRVKYVRLVRRKVNGRNRFYAQLICEGAPYQKPENALGEGTVGIDAGPSIIARINSKEARLDRFCEELAEKEAEIRRLQRRLDRSRRTNNPENYNPDGTVKKGPKQWKKTKTYLKTQARLAEIWRKLSAHRRSLIGRMVNETLRMGNVFKFEKLSYRALQKTFGKSVNTRAPGRYFQELARKAESAGGKILEFPTRLKVKGTETHVGLSSYCICREHKMKSLSERWHICPCGVKCQRDLYSAYLACFVEEAGEDHFELDAGAAARQWPGRSRSCKRRRAVFPTPECPVPPDSPARGQRESLRKGGQPRPRPGMV

SEQ ID NO: 14778 - protein, 229 aa, unknown
  TnpB Polypeptide
LYKNSPKYFCLKKIHRHSPIIGKCIGYCESILVIVKQHLLEGIFWVLWTGILCLFRGEMFYYAPKYLRKSERQLKKLQRIVSRRKKGSNRHKKAVALLVKKHEYIANQRRNNAHKVSRQLINHYDLIAFEDLKITNMMKNHHLAKSIVDSGWNQLVQFTTYKAESAGKRVVLVDPQNTSQQCSNCGETVKKTLAVRTHRCPSCGFECDRDVNAARNILKRAVQQLQNGS

SEQ ID NO: 14779 - protein, 380 aa, unknown
  TnpB Polypeptide
VKDMIKAIKIRLKPTKEQEILMWKSVGVARFAYNWALAKEKENYKNGVKFIFCRKLRDEFTKLKKTKEFIWLNEISSRTINQVFEDLQTAYNKFFKGLAKHPKFKSKKKSRKSFYVRYDAIKFKNGKVNMEKIGKVEYKTNYDIPNLLKYVNPRCHFDGRYWYLSLGFEQGENQVKLNKDLSVGIDLGIKDLAIVNCLDKPIKNINKSSKVKKLKKKLKRLQRQVSRKYEANKQGKKFIKTNNIVKLEKKIKLIHRKLSNIRLNHIHQATNKIIKLRPYRIVMEDLNITGMMKNKHLSKAIQEQCLYEFIRQMKYKCEFNGIEFIQVDRFYPSSKTCSRCGSIKKDLKLKNRVYVCSECGLVIDRDKNASINLGNYKLVG

SEQ ID NO: 14780 - protein, 466 aa, unknown
  TnpB Polypeptide
MKIQRVEQHQIKKSNPMWKIIDKLCFKSKNVYNYGNYIIRKIFIITSKLENNQFIDKEQIDFLKNINIKVDEYNKFRLENLKKKQIRSKCFNKQYKPLKYFNNTHKVCNYDFLNFILKDSEPFKNLGSNSSQQTLRALDKAWKSFYVTIKDWSKNSNKYLGRPKLPKYKDVNKGKFPLYLCNNQFKIIDNYIYFCWKPLKAFNNTFKTNIPKDSKLIQLRFIPRNNIYMMELVYEKIIPDINIIQTQRICGIDIGIDNFATLTNNVNKKFIIINGKIIKSINQYYNKKLAYYKSILKKVNNKNWSNKLDQLTIKHNNKIKDYMHKTSKQIIEYCKIFNLDTIIIGNNPEWKQNSKLNKKVNQIFVQIPYENFIDMIQYKAEDNGIKVIITEESYTSGTSFLDEELPIKENYNKNRRIFRGLFRSNTGRLINSDVNGSLQIIKKVISNAFSGYEIEGLDLTPLVMNL

SEQ ID NO: 14781 - protein, 382 aa, Unicellular sp.
LFVRNACIRLWIDGKAKSRNDLYKHCKTLSDNPEFPWAKKLNSQARQASAERAWASISRFFENCKRQIPGKKGFPKFKKNRPNHGSVEYKQSGYKLSEDRKFINFTDGFKAGCFRLWGTRDLHYYQLNQIKRVRVIRRADGYYVQFLIDHQRIEKREPTNTTIGLDVGLNHFYTDSNGETVDNPRYLRKSERKLKRLQKQVSKKFKKGQPQSNNYKKALARLARKHLQVSRQRKDFAVKTALCVVQSNDLVAYEDLKVKNMVRNQRLAKSISDASWILFREWVEYFGKVYGVATVAVPPHNTSQNCSNCGKKVVKSLSTKTHKCPHCGYVADRDENAARNILEIGLRTVGHTGTYASRENDLCLEGAIPAIKPTQRKRKPKE

SEQ ID NO: 14782 - protein, 416 aa, unknown
  TnpB Polypeptide
MYLTVKQQLKHLSKEDYENLRSLCHTAKDLTNQAIYCCRQYFFNEHKHLGYEKVYAELKSCDNYKLIAANMSQQLLKEVDGSFKSFFGLLKLVKEKGYPASAVKIPHYLPKDGFTPLVVQEFSIRDGIFVLPYSRSYNKDHSKVKIKVPPILEDKKVKEIRIIPKNNARFFEIQYTYESTVKIKELDKSKALAIDLGVNNLATCVTSEGDSFIIDGRRLKSINQWYNKQNARLQSIKDKQKFGKGRTEQQKRILRKRNNRVNDYISKAAKMIVEYCLAHNIGNLVCGYNVTFQQESNLGKVNNQNFVNLPFGQFRDKLTYLCELNGIIYTEQEESYTSKASFWDENKIPVYNADNPQHHTFSGQRIQRGLYRTATGKILNADVNGALNILRKSSVVALSGLYSRGEVTAPVRIRIA

SEQ ID NO: 14783 - protein, 451 aa, unknown
  TnpB Polypeptide
MLVTHAYRFALDPTPRQVGVLLAHAGAARVAHNWCLARVLANLGQRAAERSYGVAEDDLTPACPWSMYSLRKEWNRVKGEVAPWWAGNSKEAYATGIDNLARSLKNWSDSKKGKRKGPPMGFPGFKTKRETTPSCRFTTGTIRLEDDRKHVTLPVVGTLKTHENTRKLHRRIVNGTARITSATVKREAGRWYVSFCVEVQKRDRVPARPDAVIGVDLGITTLAVFSDGRPAVGNPRHYDTARRKLARLSRTVSRRVGPDRRTGRPPSKRWQRANQQRNRVHHRTASLRRDGVHKLTTALAREYGTIVVEDLNVSGMLRNRSLARVVSDAGFGEIRRQLTYKTQWNGGRVEVASRWFPSSKTCSGCGAVKTKLPLRTRTYVCDQCGLVLDRDENAALNLAALVKRQVAGSGPETRNGRGADRETGPGPAGGRETSTLHRTSRGSGQARTFAQ

SEQ ID NO: 14784 - protein, 429 aa, unknown
  TnpB Polypeptide
MTAVGKVLVTDDSTALLLGLLGYSATKLWNTAVWHAKEAWKTTGKIPSYAKMDVVIKQEHPLWYRRLHSQSAQAVLEELWQSYRSWFALRKKGDEKAKPPGFRRKTNLSSVTFKQNAVKWNPRMSMVRFSIPKDIYGKQFLYLKVRMPKGTCLAEDNIQLARLIHHNDTWSAHFVYNITFPELKGVGETMAIDLGMKHLAATACTDGDTTLWSGGELAALERHFDKQKSKTTRSRSRKTHVLNKKRSRQRTHLLHSFTKSLVSDADARGVSTIIVGDLTDIRDGKNWGDSGNQQLHKWPFDKIIKMLTYKARLKGIPVVKESEDYTSQTCCICGTKCKSNRVHRGLYVCNQCGAVINADVNGAINILKRYLPEQIGASWSSGCLAQPAVNRFAWRKTRPLVSAHKPGTWQTSLPHPRTESATALSSNRA

SEQ ID NO: 14785 - protein, 423 aa, Okeania sp.
LLVIEAKLKGSQNQYKVLDEMILTGQFIRNSCLRYWIDNKNVKRNDLQKLCAVLAKDNNFPWAKKLNSQARQASADRAWQSINRFYQNCKLNKPGKKGYPKFKKFTRSVEYKTSGYKLSPDRKTIEFKDGFKAGKFELWTSRDLVWYSEQQINRVRVIRRADGYYCQFLVDIERKESHNFQGDSVGIDLGLNAFYTDSNGKAINNPKYLRNSEKRLKKLQRRVSRRHKKGKTQSNNYHKARIQLAKKHLQISRQREDHAIKTARALIQSNDLVVYEDLKIANLVKNHHLAKSISDASWHQFTKWLEYYAKLHGIVCVAVPPHFTSQECSNCGRTVKKSLSIRTHKCLHCGYIADRDHNAARNILAKGMEMLGVIFNSTEGHSETGDKIPNATGEFDRWIDNSNIVNVSHLNECRIINDENPAS

SEQ ID NO: 14786 - protein, 534 aa, unknown
  TnpB Polypeptide
MPKGKPPKLFQGVHARLVFLKEEDERAVLDLMRRFSSATRYAYNRLLEGRDRKELKRESGPLCTLFGLNTRYTDGAIEKAQALIASAEELGQDPRKVVFGGRELFEQLKRKHLSGKALLALKREWKEKRQGLLYSRGDSAKKGNANLRLESRDGALWLRVNLGNGSHIQALVKTAHPQREALLQRVYASLPYNVTLRLEDGKVYAHFTWSEELPPPVHTKANGVLGIDVNADPYHLALAVVSPDGNLVRYLTLSLEEVDSAPNKGAKELALWKVAHQVVALAEEHGVAIATERLKRLRKSRRGDGSGRAFRKKQHRFAYRSLLEKVHSLAQRRGVEVIEVNPQDTSTIGALKYAPQLHLSKDVAAAYVIGRRALGFIERLPKGYKALLKDDAFYANAQGFYKIRLQELQKLKEAEKNPYHRRKLSREIGKARKALSLFLSFSGRQTGQKASLRGSPGSQKGSTKGRNPSGANPWRVLRAGLFLPLLGLEVPRDLSRLKSILHLAPPTQGSWKGWKVGLGPHPGGGPACSNVRFG

SEQ ID NO: 14787 - protein, 482 aa, unknown
  TnpB Polypeptide
MLEYITTRTYYSKKLDDQTLLELKQIAKRLGILRKIIWHQFSSNPKKLNDRKIRDQWLNARNNETNFYPKIIDQIPARLWKETLRDTISSINAYFEAGFANAIKFLYKKHGKQKGKELAKQLKLDYKSNNELHRLIRKTIPKGCSKSDNIICLDADCYSFDKHNDNILLISGLTKNRRLSIPLTTKHKPQGSFKIILKDDRCELRVNFKYEIKAQINKPYEAIGVDKGYTEVFTDSTGERHGNGLGKLLTAKSDFLNQKYKNRNKLYTVMRKAEAAGNTRKVNNIKKHNLGNKKLNRQKEIMKTQLKEKIYSAAKTLAQKANIIAIEDLSFKSKKTKNKDTNRRLSSWIKSVIDEAITKYCFIYGTKLVYVNAAYTSQGDSRFNCALTGKRDGNFFIAFDGVVLDADVNAALNILARLYDDEISLYTSAKEVKEILTKRANAVLASVETAQLRLQDIASVNYELYAKSGLSGNFIENLARDS

SEQ ID NO: 14788 - protein, 368 aa, Microbispora sp.
VAQIVKRAYKYRFYPTPEQAEELARTFGCVRLVYNKALEERTRAYSTEGRRVSYMESSAALTAWKRTGELGFLNEVSSVPLQQALRHLQAAFANFFAKRAKYPTFKSKRKSRASAEYTRSAFRWRDGQVTLAKMDAPLDIVWSRPLPEGAEPSTVTVSKDAAGRWFVSLLVEETIRPLDPTGGTVGVDAGITSLVTLSTGEKVANPRHERADRRVLAKAQRNLARKAKGSSNRAKARAKVARVYARITDRRRDFLHKLSTRLVRENQTVVIEDLTVRNMVRNHSLARAISDVSWRELRGMLEYKAAWYGREVIAIDRWFPSSKLCSACGTMHDAMPLNVRSWECVCGAVHDRDVNAARNILAAGLAER

SEQ ID NO: 14789 - protein, 490 aa, unknown
  TnpB Polypeptide
MPKRSIGSKSRRNTKSFIHELKLRPSKHAQRKLNIKFNCLRELYNNVLGECFKRLRQLRFDPLYAVAIDYYKSKEKEKGQAILKELNIKYGLTKTKLQTLATSIKNNTYMADHLDGDTVQVISDRAFDAFSDWMFKKGGRPRFKSWKNALSSIQGKKNSCILFKNGKVKWKDLKINVIYDKKDKHGIEAYALNQRVKYCRLKRRFIKGQYHYYIQLVLEGVPKSKIKPPNKKVGIDIGVSTIAAISKNKAILKPFCHNLESIQQDIKIIQRKMARSQRKNNPNNYNDDGTIKKGKKIWKNSNNYLKLQYQLKELYRKQSDKRKMAHNLLVKEILLLGKKIHIEKNNYKAWQKGWFGKTIGFRAPSQFVSTLKRKAESAGGTWEEINTFTTKLSQLCHVCDNYTKKPLSQRTHQCCEITVQRDLYSGLLALYYNPTQQSVDTKSLRKDFRGYDQILNNAVSALNKLQIRGIIPSSLGRLESREEQFAFKCS

SEQ ID NO: 14790 - protein, 398 aa, unknown
  TnpB Polypeptide
VNRSYKYRLKPTKAQIEYFEKSFGCARYIYNWALAIRVEAYQKDGTRLSYPDLCKMLTSLKKDEDKRWLAEVGNDSLQQAIRCVDGAFTRFFREKQSFPQFKTKKKSRKSFQCVNNIIIDQDAHKIRIPKVGWVKYFKDRTFSGRVGTVTITKSPSGKYYVSINVDNGLTYPEKPHISVETAVGIDVGIKDFAVLSDGKVYPKNDYFKDDEKRLKVLQRRLSKKVKGSNRYESQRLAIAKQYEKIKNKRENYLHQVSARIVSENQTIIVEDLSVKNMMKNPNLSKPIANASWSSFFKMLEYKCDYYGKNFVKIGKFDPSSKMCICGHINHELKLSDREWVCPTCGRLNDRDLLAAINIKRFGLQGQNLIGVKSPSVGGEEGVEWSALVDTVKRQYVKP

SEQ ID NO: 14791 - protein, 402 aa, Tolypothrix sp.
VLVLEYKLRGKQQQYRAIDEAIKTTQFIRNKAVRHWMDAPKEAKVDKIALNKYSTALRKEFGFVKELNSMACQSATERAWLSIARFYDNCKSKKSGKKGFPRFHKDNRSVEYKTSGWSLHPTKRRITFTDKKGIGEVKLLGKWDIHTYAVKLIKRVRLVRKADGYYCQFAVDIEVTTESRMADGELGLDVGLEYFYSDSNGYHEESPRFLRKAEKAIKHAQRQIYKKEKGKNQRRKARQRYANKHLRVNRQRNEHAKRIARNLCKANALVAYENLNVKGMVKNRCLAKSINDVAWSLFRRWLEYFAVKFNTTVVAVNPKYTSQKCSDCGTIVKKSLSTRTHKCGCGCELQRDVNAAINILNLGKQARLGHNRSNATGVASSTLLGASLVEQVATLSVESPRL

SEQ ID NO: 14792 - protein, 404 aa, Tolypothrix sp.
MLNLTYTYRLKVNQQQFQTYETWLETSRRVWNFALAERKDWYQSRSCRIDACSLVRSYIIPADAPRPTFASQCKALTQARKTNPDLNAAHSQMLQQVLRRLEKAFIGMWETGRGFPRFKKQGRMRSLLFPQLGVNPIQGSKVKLPGIGWVKMQLSRPIPDGFVAKQAQVVKKASGWYVMLTLQSEVDVPSFAPHGQPLGVDVGLKSFLATSSGEQIARPRFFALLQRKLKLLQQRASHKKLGSNNWRKAQHKVSKLHEYIHNTRKDFHFKLAHKLCDQSGMIFVEDLNFKTWAKGMFGKHTLDAGFGEFFSILEWVCWKRGVYFAKVNPNGTSQTCPNCNHHTGKKELNERIHHCSECGFQTERDVAAAMVVMQRGLAAVGHTVKMLGEGLSNSSPLTQESPLL

SEQ ID NO: 14793 - protein, 402 aa, unknown
  TnpB Polypeptide
MDMQLRYRFRLEPSKAQQQALARTFGCVRVVWNDALALSQRLHEQGEKYPGATALQKLVITDGKQTAERQWLADAFSHTLIQSVRDLDLAYRNWWKSLSGKRKGPKLRAPRFKKRTAAQSARFTREGFRVLDSGKLRLSKVGDIKVRWSRDLPSDPSSCTIIKDAAGRYFASFVVEIDRPKLESNGNTVGIDLGLTTFATLSTGEKIDAPKPLRAALKRLRKLQRNLSRKVKGSNRRNRARVKVARLHARIADTRKDFLDKLSTRIIRENQTVVLEDLRVSGMIRNRKLARSIADAGWRQFRTLLESKALMYGRTVSVISTWEPTSQRCSACGQLGGKKPLNIRAWTCLHCGAEHDRDINAANNIAAAGQVEALNGRGAKRQTGLPAAGVEASTRQEVTSHG

SEQ ID NO: 14794 - protein, 239 aa, unknown
  TnpB Polypeptide
VIYDVKDVEKMQDNGHYLSIDLGLHNLITCYDSAGTSFILGRKYLEISQKYDKEIARLGHQWNSCQSAGGIKYPKPSKHMLKVYKKKRNCIHDYLHKVTRAVVNYCKANDIHTVIIGDITNIRRNKNLGKVTNQKLHALPYAKIYGMLEYKLAMHGITLAKQTEEYSSQCSPHAPQVTKEYAKKCNRTSRGLYKDQLSVYNADAVGAYNIMRKYFAGCGKEKKISVTGLSSPLIIKVAV

SEQ ID NO: 14795 - protein, 146 aa, Lyngbya sp.
LSPDKKSITFRDNKGIGKLKLKGTWDLWRFDKKQIKRVRIVRRADGYYVQFCVSVDINEKLKPTGNTVGLDLGLKDFYTDSDANTQPNPRFYRTGEKRLKFYQRRVYRKNKGSANRRKAINKLGRAHLRISRQREEHCASNPSHVA

SEQ ID NO: 14796 - protein, 511 aa, unknown
  TnpB Polypeptide
VTKAHHPIVCAECSGSSSCGSCGSRGVGRVVHQKVYVVVLAVELHQFRLEVGAHAANTTRRSSMISVVNTPRRYLVTKTKCTCITKAQCHPRRILLSVVIDQSIFSAMERLQAFKFEFMPTGEQARKMRQFAGAGRFVFNRALTEQQKNREAGGRFVGHAGTCKWLTEWRRSADTPWLKDAPVHTQQQALKDLDRAFVNFFEKRTDFPRFKRKGMADSFRYPDTKQIRLERENGRIFLPKLGYVRFRNSRTVLGEVRSATVSLRAGKWFVSILTKREVEQSVPHGPAVGIDVGVARFATLSDGSFIAPLASFKKHEHRLAKYQRRMSRKVKGSSNWKKAKARVQRIHARIANARNDFLHKASNTISKNHAMIAVENLQVRNMSRSSRGSVEAPGRNVRAKSGLNKSILDQGWFEFRRQLEYKTAWRGGFFVAVPATNTSRMCPCCGHISAENRRTQSLFACVRCGHEANADHVGAINVLERGQRLLACGERAQSGRSKKQGPAEVTQTIAA

SEQ ID NO: 14797 - protein, 361 aa, Megamonas sp.
LYKAKRNRKLHKVINIAGIIYNHCIALHKRYYRLFKKSLNIYKLQKHLTKLKKIGKFSYFKEVGSQAIQDITQRIDRAYKLFFRNLKHKIRTAPPSFKKIRKYKSFTLKQAGWKLLKGNIIEINKQKYKYFKSRDIEGIVKTITIKRDTLGDIYLYFVCETNENKVLARTGKSVGYDFGLKQFLTASDNEDIKAPLFFKQNANDIKKANRILSRKKKTSNHRRLAKIALARLHKKISNQRKDFHFKLANKICSEYALICIEDLNIKGMQKRWGRKISDYGFSEFIKILEYKAREIGSIVQKIDRYYPSSQICHVCGTKNPETKNLAVREWICAKCKTNHDRDRNAAINIWKVGASTFFGEI

SEQ ID NO: 14798 - protein, 263 aa, Megamonas sp.
MIKRQVIVVKTYCFKLYKAKRNKKLHKVINIAGIIYNHCIALHKRYYRLFKKSLNIYKLQKHLTKLKNLARTGKSVGYDFGLKQFLTASDNEDIKAPLFFKQNANDIKKANRILSRKKRGSNHRRLAKIALARLHKKIANQRKDFQFKLANAICSEYALICIEDLNIKGMQKRWGRKISDYGFSEFIKILEYKAREIGSIVQKIDRYYPSSQICHVCGTKNPETKNLAVREWICAKCKTNHDRDRNAAINIWKVGASTFFGEI

SEQ ID NO: 14799 - protein, 256 aa, Megamonas sp.
MEKAYKFRIYPNKTQECLLQKTFGCVRFIYNYFLDKRIKAYEQNKKTISYNECSKELTQLKKEKKWLKEPDKSSLQNALKNLDIAYKNFFNRQKAGFPKFKSKKNRYKSYKTNMTNNNIVFLGNKIKLPKIGKIKIRDKYCQIEGRILSATVSQTPSGKYYVALCCTDLPQPEFIKTNKYVGLDLGIKDFVITSDAVKYSNPKYLQKSLTRLAKLQRKLSRKTKGSSNWEKARVKVAKLHDRIANQRHNLLHQVTC

SEQ ID NO: 14800 - protein, 649 aa, unknown
  TnpB Polypeptide
MKIKIFINMTEPPDKDFYKTIKVPLKHIIKNFEINQPKINDLTIMAHKIVIHTLQFMKMYLINYYNINNKLPTIDASFINCCMKILCKEKATGRPTKTEIKELKDTLTLFYNQHYKQLQLDELEYTHMNTILDYLSISIITDYENNIKCHYVEYVERYVNVIWKKKFIIEKIRKIKKTKKEKDDAINRLNSDLRKIKNDLLNVENTNFKSKSFYHKWIKEQKKLILPIKEFKKSNLYYDIQCAPMDYLPKMIYMMRLIEKEGLTINNPFPLRTDIIPKHIRIDTTILVHTLLTKKYGNKSDYLFKGNLKKNEDKIWEFFFRTERQCFIKPNYSFHHMIETDGISASILLIRKDKVGKRIVSRECKTTSNEKYIDELNDITYNIIKNKKIVAIDPGKCDLIYCVDGDNKEANTFRYSQDQRRKETKIKKYNKLIIKEKETKIVGKTIIEYESELSNYNKKSLDLDKYKDYVKNKNKINKIIMDFYSKSLFRKLKLNGYINIKRNEQKLIKNFSNKFGVKEDVIVCFGDFEQKKHMKFKEPIKGKGMRTLFRKNGFITYLVDEFRTSCRCSSCEGLNEKFKVMENPKPYRSGSVLVHGLLKCKSCSGVWNRDCNGATNIYKIVKNAINKIDRPSYLCRRNNSDTLEEVSHP

SEQ ID NO: 14801 - protein, 455 aa, Rhodococcus sp.
MAGRVVKRAYKYRFYPTAVQAEQLARTFGCTRYVYNRALAERTRAWSQEQRRVTYADTSKMLTDWKRDTETAWLSEPSKGPLQESLRQLQGAFDRFWRKQTGYPQFKKKGRSKESATYFSNCFTYRGGQIRLAKQTEPLDVRWSRPLPEGAVPSQVTVSRNARGQYHVSILVEDTIPELEPADRVVGLDAGITSLYTLSTGEKITNPRHERRDRARLAKAQRVLARKEKGSRNRAKARLKVAKIFGRIADRRRDHLHKLSTRLVRENQVIAIEDLSVRNMVKNRSLSRAISDAGWSEFRSMLENQADWYGRRVVVIDRFYPSSKTCSVCGVLASTMPLTVREWACRCGTRPRPGCERGEEHFGRRTDGDSLRRWCETAPRLGCGEATVGETGTSGRESRGDSRSFTAERTSSGTTPATGWCSWRSGSSPERTSRTERYGSARPVASNGVPVRALR

SEQ ID NO: 14802 - protein, 369 aa, unknown
  TnpB Polypeptide
MRKAFKYRIYITKGQRRMLEQQLEECRWAYNETLAYRKQAYEEEQRTANWYETKRLLPVWKLTRPALKLVHSQVLQNVTERVDLAFKAFFRRVKEGAEVVGFPRFKGFGRYDSITYPQYGNGVRLEGERLILSKVGAVHVVLHRPVEGTPKTVTLTRSRTGTWFACFSCETEAAPLPPTDAVVGVDVGLSSFATFSDGQQIANPRFYRRDEADLKRVQQRKDAAKNAQNWPENAKQKGMLAKIHARIANRRADFAHKQSRALVNAYQVIVFEDLAPMEMGRSRGMRKSILDVAWSQFIRMTVSKAAEAGRRVILIDPRNTTKLCSSCGELVPKALRVRVHTCPHCGLVLDRDENAALNILQRGLQALRL

SEQ ID NO: 14803 - protein, 547 aa, Kitasatospora sp.
VTRPKKKLRRIDAPFVSLGPPGVTVRDRLKGLTPEDEKVLRLVGAHMGALASRDLKVRCADGLDHDNGTWAGRKRDLTVWSSSRWAGSVTKATHDQWALSRRCQAVHLDSLDAGIGMLRHRLSLPVGEKGTKRAPGGYRSRHEWFVKCRRLAALQERRARVAADREAGVVHVVRGGRKLLNTRHNLAAADLTEARWRQRWEVSRWFLSADGESGKRYGNETIRVTPDGEVSIKLPAPLGDLANAGHGRYILAAKVSFPHRGTEWADRIEGNRAVAYRIHYDAARGRWYLDAAWTRPVVQTMQLATARAQGMVGVDTNADHLAAWHLDVHGNPVGNPHRFPYDLSGSADHRDAQIRHAITRLLHWAKRCGVNAIGLENLDFTAETTREKHGRKKRFRQLISGIPTGKLKARLVSMAAESGLAIVAVDPAYTSVWGAQHWQKPLATPRRTTTRHDSAAVAIGRRALGHPVRRRTTPPRAHQSDAHGHRTVQAQPGTRGREETRHPTTERAHDARSRTGTTRTRATSAPKTVRDPRSARTWVQDPLLPTG

SEQ ID NO: 14804 - protein, 421 aa, Kitasatospora sp.
VVYNDALTMRKRAWKADRSKVPTGALAKSVITDAKKTEARSWLGSVSVDALQSSLRDLDTAYRNFFDSLSGKRAGRRSGLPRFKSRKDNRQSLRFSRNGFRLRSNGKLNLAKIGDVRVKWSRVLPADSSSVTIVLDPSGRYHASFVVDVEPDHLPELDTEIGIDLGLTTYAVLSDGTVIDNPRFLRKAEKTLKAAQRALSRKAKGSKNRAKARRKVARAHAKVADTRLDWQHKQTTRLIRENQAVYLEDLNVRGLARTWLAKSVHDAGWSTFRRLLTEKAARYGRHVGVIGRFEPTSQVCSACGVLDGPKPLAVREWTCTACGTLHDRDLNAARNILAAGQADRLNACGGPVRPGVAIPRQVQPVETGTHRNAGRTGRKPRALARGGCQQVSFPGSSGTIGNHPALDRRRPAGHAPVPRKG

SEQ ID NO: 14805 - protein, 189 aa, Kitasatospora sp.
MVFTTSTGYRAAGRGLNRHRRRQLDLRRKLQAKGTKSARRLLKKRCRKEARHAANVNHIVSKTIVTTAERTGSGIALEDLTGIRSRVRLRKDQRTTLHSWSFRQLAAFVEYKAKRAGVPLVYVDPAYTSQECSECRHIDRLSRRSQAEFACRACGSVMHADHNASRNIARKGEAAWIVGRESRVPATST

SEQ ID NO: 14806 - protein, 418 aa, Kitasatospora sp.
VHLRYSYRVYPTVGQRSALARTFGCARVVYNDALALRKAAWKADRSKLPSGALAKTVITDAKKTDARSWLGSVSVDALQSSLRDLDTAYRNFYDSLSGKRRGRPVGLPRFKSRKDNRQSLRFSRNGFRIRGNGKLNLAKIGDVRVKWARALPADPSSVTVVLDPSGRYHASFVVDIEPEHLPALDAEVGIDLGLTTYAVMSDGTVIDNPRFLRKAERRLKAAQRVLSRKAKGSRNRAKARRKVAKAHARVADTRMDWMHKQTTRLIRETQAIYLEDLNVRGLARTRLAKSVYDAGWSTFRRLLTEKAARYGRHVGVIGRYEPTSQVCSTCGVPDGPKPLNVRTWKCGACGTSHDRDLNAARNILAAGRADRLNACGGPVRPGVAIPRQARPVETGTHRNASRTGRKPRAAGAAGIPTP

SEQ ID NO: 14807 - protein, 406 aa, Kitasatospora sp.
MVTTHVRRAFKYRFYPSDAQAAELSRTFGCVRKVYNMALQARTEAWTLRQERVNYNATSAMLTVWKKTEELAYLSEVSSVPLQQTLRHLQGAFTNFWQKRAKYPTFKSRKRSRKSAEYTSSAFRFRNGQLTLAKMAEPLAIVWSRSLPDDTRPSTVTVSQDAAGRWFVSMLCDDRPTMPEAPNKAVGIDAGITSLVTLSTGEKITNPRHERKDRERLAKAQRELSRKAKSSSNQAKARIKAAKIHARIADRRRDFLHKLTTRLVRENQTLVIEDLAVRNMLKSRKLSRAISDASWTEMRSMLEYKAGWYERELVVVDRWFPSSKLCSTCGTIRAKMPLNVREWTCSCGTTHDRDVNAARNILAAGLAVTACGDGVRPQRSTPGGQSSVKQEVVPPQRTRAAAQSRG

SEQ ID NO: 14808 - protein, 428 aa, unknown
  TnpB Polypeptide
MPVMQRLQAYKYELMPNGEQQRDMRRFSGSCRFVYNKALALQKENHEAGKKFIGYVSMAAKLPVWKREKGTEWLKDSPSQALQHAIKDLERAYKNFFEKRADFPRFKKNGVGDSFRYPDPKQIKFDQTNNRLFLPKLGWLRYRNSRDALGELRNVTVSQSGGKWFVAIQTQREVEHPIHPSTSIIGIDVGIARFATLSDGSYIEPLNTFRKHQQRLARYQRSMSRKTKFSSNWKKAKARITKLHTRIGNVRHDFMHKATSTISKNHAIVCIEDLQVRNMSKSAAGSLDAPGRKVRQKSGLNKSILDQGWGEFRRQLEYKQAWLGGGVLAVPPHNTSRTCPACGHVSAENRQTQARFECVECGYQNNADIVGAINVLQAGTLRAFSARSSECLVASSERGHRLLACGETAQSGRSVKQEPAEGITQISA

SEQ ID NO: 14809 - protein, 418 aa, unknown
  TnpB Polypeptide
MANAHRIERVRLYPTAAQRRQLENYAGAHRWTWNWALAAREAHFAAHETSLSYYEQNRALTVRQQQPDTVWLTGIPRRVKVGALRDLDKAYRAAFRRVQRGERPGFPRFKARKRGDASFEIPAETRFDGHRVKIPGIGWVRARGGRAIAMSTTTARYFRDGVGDWWAALRYTVPLADADTSEVSAIGVHLEPGHAMTLSTGETVNESRYVSRSERKLRCLKRAVRRTQPGSGNRRRARRRFARATRHIANQRRDWQHQVSRRLVDIHPRLVMQEPGTTAHANDPESQRAVWGGRARRARISDATWGGLTRLIREKAVSAGCAAVMIPAEMPTDVTCCRCGHVRATLPELVNIWLCEQCGTLHERGMNAARNILSVGVREDARSERRREAPGDAKRLWTHDKTLAGAGEERLASASRKQ

SEQ ID NO: 14810 - protein, 362 aa, Clostridiales sp.
MLTYRFKLYKSKNDKYLEAYNNIACEIWNHCIALERRYYRLFGKHQNKYALMKHLTKLKRLPKYAHWKKLNSQAIQNVVERIDRSYKAFFDHVKQKKGGRKSPPHFCKKKNYKSFTLKQTGYVIDGNSAYIMGRRYKLFKSRNIEGAIKTVTVKKMPTGDWYLCVTTDHEAKRNYARTGNSVGMDFGFKDFLVLSDSVKIQSPEYLKQSLSELKRLSRNLSLKTEGSRNYEKVKRQLAKLHEHIASQRRDFFFKLANDLCRKYDIIGIEDLSLKGMQALWGRKESDLAYGEFVQILEYVAASADKKVVKIDRWAPSTKTCSECGCRVELSLKDRTWICPHCGAVHDRDVNAAINIRNLALAA

SEQ ID NO: 14811 - protein, 360 aa, Sporosarcina sp.
VNYLQTITLKLELRKPTKEKVSMFQKMTKVNTAFSNWLLDFEGLQTATSKVFHLYSDEPFPSAIVNQTIRTVKSKKKNQKAKVFRRLWCGFNNQNFRVEKENGLYKVSFPTLNKRIGVPVVCKEHQQRWLDRLLSGGAKQGATELYEKRGRWFVAVTLSFEVKQKQADPPKIMGIDIGLRQLAVASIGTTSLFFSGNEMAYRRRRFAARRRKLGNAKKLDAIRKSKNKESEWMKNTNHKISRQIVDFALENGVHLIRMEDLTGIRHSRKSKKEAGRNLHSWSHYQLQQFIEYKAKIAGLLVQYVDPKYTSMTCKCGHTDKHNRNKDSFLCVKCGYLSHADVNASINIAKAISGLSTTKIV

SEQ ID NO: 14812 - protein, 192 aa, Sporosarcina sp.
VCSNHLVFPTINKERRIIQLEKQLKRQQRKLSRSYEQNKNRKDGEFCAKNRQKQRLVVQKLHARIANIRKEYIRFVVSVLVKTKPAYIAIEDLNVKGMMKNRHLSRAIAAQNFKQFREWLIGKCLEIGIEIRLVNRWFPSTKRCSACGEKNHDISLADRMFTCAVCGLEMDRDFNASLNLKYTNDYTVVTTN

SEQ ID NO: 14813 - protein, 371 aa, Ferroplasma sp.
VLKTLQIKLLPEDNQKDILLNTFKKFNEACNFVSKIAWDNKIYNKISLQKLVYYDIRNKFGLSAQLTIRVIAKVVDTYMVDRSIFHEFREYGSIVYDQRIMSFKGMDEVSLNTIKGRIKIPITIGKYADIPFDMVRGQCDLVRKHKIFYLMVSVDIKEEPVIEPKNVIGVDMGIANISVDSTGKYYSGDEIKNVREHNLDLRSRLQSVNTRSAKRHLKKLSGKEHRFATNTNHIISKEIVNKAKGTSSAIAIEDLTGIKMRTTVKKGNRYIHNSWAFYQLRLFIEYKAIEAGIPVIVIDPHNTSRECPNCHTISKKNRPERSIFKCISCGLKGEADYIASLNIRNRAVANQPIVAGDFFVHCDTLVASSLL

SEQ ID NO: 14814 - protein, 297 aa, Ferroplasma sp.
VDTYLTDRSVFHEFREYGSIVYDQRVMSFKGMDEVSLNTINGRIKILITIGKYGEIPFNRMRGQCDLVRRHKLFYLMVSVDVPEQPSIKPKNIIGVDMGIVNISVDSTGKYYSGEKVKEVRGHNLDLRSRLQSVNTRSAKRHLKKLSGKEHRFATNTNHIISKNIVKKAKGTSSAIAIEDLSGIRMRETVKKGNRYIHNSWAFYQLRLFIEYKAMEAGIPVIVRDPHNTSRECPNCHTISKKNRPERSIFKCISCGVKGEADYIASLNIRNRAVANQPIVAGDFFVHCDSPVASSLL

SEQ ID NO: 14815 - protein, 466 aa, Ferroplasma sp.
MRKRAMMSEERRNKIKNSLRITRERRKTQDVIILKLKIDNDKLNNNTIKALNTIFLEAKWLYNYVINKEFNNDIFNIDPKIKNVNVYVKDHYETRKLKYLSSQMKEEIINRAMDNIRGLHKLKEKGSKIGKLKFKSFITSIPLNQYTITYKIINNNYIKIQNIKQLLKVNGLDNLEYYYEPASALLINKNSYYYIYITAYKNKYILEKPVNNQKIISFDLGIKNQLTCSNGSILNYNIPKSKKEIRLQRSLSRKAKYAEGTKKLSREQSKNYYKNKNRLNREQTKTANKRKDTINKIVHYLTSNYDIVITQKDNISGWKHLFGKRIENTGIGEIIDALKHKASTLILLNQFIPTTKECSNCHNKYDIKLDERIYNCPKCGFIIDRDYNSSLNDMYYGIKKLNELLKIKNRKLNNYFKKYNINLNVPMERRELTPVEIIASGFEGLNISPYVKLSMVNEAGSLNALA

SEQ ID NO: 14816 - protein, 349 aa, Ferroplasma sp.
MILTYKIKHGKDFSEELNKARLIAEFAIKTKSIISRDVKQFGLKSAISNQILRKYSRNSKAKDVHKIKLTVPHQGIKCNQIDRTINITPLKLTLNYYFRNDFDKISQIELDNKFAYVSINIPDNDLIEPNGYLGVDRNTTGHIAVAGNPETGKIIKLGKEAGHVHKKYKNMRKNLQKKGKYRKAKRIKNRESRIVKDINHKVARKIVQEAKDNGMGIKLEYLNGIRNAKSGRSFRYSLNSWSFYELKNMIEYKARLLGIPVAYVDPYNTSKEYSRCGQIGNRSGKSFKCNNCGHVDHADANASFNIALRPVFEEGIDQLYVDRDAYKGNTGIPEEATLGTMATLEPHML

SEQ ID NO: 14817 - protein, 595 aa, unknown
  TnpB Polypeptide
MILRYGYLSRHPRVFLTMTGVPIIVFDELVRDLLPAYVAADQARLNRPSRQRAIGGGHPFALCPRDQLLLTVVWLRQYPTQEALGYFFGVSDTGARAVIERVLPLLEAAGRDTMRLPDPGRKRRRHADVLLADIPALTVLVDSFEQRVQRPAVGQKEYYSGKKKAHTVKVQVAVDPETGKIVDVSESVPGPTADITLLERSGLCKRVPPEGGIGGDKGYRGIDKLHGGGATPRRKPRDQEQSEEDKAYNRAFARAHHRRARHPARASLRMPEPDGPALPRHAHGARARRGWFGQPSPRPPTTAPGGVIRSQGRGPCVSPPIPKMNYWFVTLVAHQEIEDKPKAILTEENTIGLDLGLKDACVTSEGKIIPALRSYRKTQVRCRKAARVVSRRKGAKKREKPSNRFKKAKAKAARIDRKAANQRADFLHKLSTGLVQDHDGIVIEDLSVKGLGKTNLAKSVFDAGMGLFRRMLEYKADRGSRTIIVIDRWFPSSRLCSVNGCDYRTQVLTLGDRVWTCPQCGTIHHRDVNAARNIEAEGLRIYRTWAQDQSPLDRGVVAAGQVETLNARGCCVSFPNGSSGRNTDVVGQKRESHEL

SEQ ID NO: 14818 - protein, 565 aa, unknown
  TnpB Polypeptide
VSKLYRILHSFDSRTAARGGCGALPRIAGFVGRGLQGSWAADCRVRAPNFRPVPPRLGASPNQVSKTLGLDLCSTGAGTGVCAPPLTVCVRWARVSGRRAPTVTPMSRPAPAPETSMASVRLRLKPTNAQSSVFLRAAGARRFAFNWAVARIKANQNQWAAEATYDILKSDRTRPFSHFDLVGLWDATRDEVAPWHREQSVWAFRYGIRAAQEAHADFLKGKSRFPKFRARHRDRIRFTVAGPGGLHLQPGRLRLPKYGWVRLAAPCRAQAKLRRLLVRGRARIMNVTVSRDAGGAWYASICVERTLAADPALYSRPAGPAVGVDVGIKTAAVVATSDRAPGTPLEASRALRDELSHIKHLQRALCRAQKGSANRAKARRRLGRAHVKVAALRNTRLHQFTSKLAKDHGVIVVEGIATANLMRNHCLAQAIGDQGWGELARQLGYKSVRAGGITLPAPRFFPSSKMCSACGAVKSKLPLSVRVYKCDACGLVVDRDINAAANLAAWGEQQQGISPVVDTQVGDRHPGGPSAQLAEHACGGSNEPASMAAGAFVEAGTSRPRTRAA

SEQ ID NO: 14819 - protein, 131 aa, Photorhabdus sp.
MVDENQAIIVETLKSANMMKNRHLARAIGDAGWHGFLMKLEYKAAAAGVHLVKLDQWFASSKTCHCCGHKMPEMPLNKRIWPCPFCRVEHDRDINAAINIQRKGITELQAAGLVVSAHGGQRKSVIKTVAA

SEQ ID NO: 14820 - protein, 416 aa, unknown
  TnpB Polypeptide
MYLTVKQQVKHLSKSDYNTLKELCHTAKNLYNQGLYNVRQHYFENKEFLKYESNYHLLKTSDNYKLLNSNMAQQILKEVDGAFKSFFGLIRLAQKGEYSFKDIKLPGYLKKEGFTTLVIGFVRTNDNKLKIPYSNVFRKTHRPITISMPPILADKKIKEIRIVPKANAKFFEIQYTYEVAAEERKLNIDNALAIDLGVNNLATCVTTTGKSFIVDGRRLKSINQWFNKRNAHLQSIKDKQGMKKDTTNLQKTIRRKRNNQVSDYISKTARLIINYCLENDIGNIVIGYNKTLQRSCNLGKANNQNFVSLPLGNLKKKIFYLCKMYGIKLTIQEESYTSKASFFDGDMIPRYCVNNPKDYLFSGSRTKRGMYCTANGSNLNADINGALNIMRKSNVVPLEGLYARGEVDTPIRIRIA

SEQ ID NO: 14821 - protein, 461 aa, Deinococcus sp.
MGGRTPAVQLRRLPLPDVHITRYTPYVKLTLTAKLKLCHSREQKTLLDQVTLAYRDALNYTSQKAFEMEKTSNAAKIQKEVYATLRQRFKLGAQMACSVPRYVGATYKTLWTKVKQSQVARELNPKARRYKGLDNAPKFVSRTLSYQYQRDYSFKKGQQVSIMTLQGRLVLAYEGQAKHLESITNGAEMGTGKLWYNKAKKQYYLLVPLTIDLPDPDPSTHKQVVGVDVGMRYFATASSTSGKTLFKSGKATLRKAERFAKARKSLQQKGTRSAMRRLVMLSGRERRFIADTNSSLAAQILKTFPQAFIGVEALTGIRDRIERRSRPNSSEKQRKANRRRTRWSYAELLGFLAYKAPLRGSMVVKVDAHYTSQTCPRCGHCSRGNRPEKGLMFGCESCGYQLHADLVGARNVGLRALLVRQDWASTGCLSCIPDVSDIETKVERLKRYSELRWSPDASQRL

SEQ ID NO: 14822 - protein, 447 aa, unknown
  TnpB Polypeptide
VQSSKLTQTLSFGLDIHTGSGDDLQHGCLEARRIRNETNRLDKHGWDWNAIKPTVVDKADHVKNTSQLIVDKALGELETYHDNKDDDWGRPYPYIDETYPMVMNHGEGYRLFLEDNGTVRFRITATRGTHVKGELRGSPGHFDRLRTAFADENWRVGTAEVVQKHDEWRLHVTVTHETHRVANKHNSDTIVGVDVNEDCIALVAMSRSGSVKDSVVFEYPSVKEQRHEFFTKRKRMQKAKQTAFETVVQTEERDYVHDCLHKVSREVVEWVSQFSDPVIVFEDLKDMRDSIDYGTRMNRRLHSLPFAALQEMVSYKAAWEGIPSDEVDPSYTSQRCPRTECQHIERANRHKKRFKCCQCGFQDHADRKAAVCVVQEWFDEQKNENVPSLETLPMVKKVRRTASGAGGGPDSHGPDLGSGVHRHGTSAQDSLSQVREELKSVASAVRD

SEQ ID NO: 14823 - protein, 378 aa, unknown
  TnpB Polypeptide
MKRAINIRLFPSKEQEVLMWKHIGSMRYIFNWGLDRQIKYYEATKKKLSVANLGKELTEFKNQQGYEWLYEISNATLKEALRDLDKAYKNFFNGSGFPKFKSKKKSKDKFYSRYDKVYFKNDIVNLEKIGKMQCKHNYDIDLSKVTKFSNPRVSFNGRVWVLSVAIEMENEKEQLNDFSIGVDLGIKNLAITNVDELDAKNINKTQKVKKLKKKLKRLQRQCSRKYEMNKKEVCYQKTKNIAKLEKRMKRLHSELAHIRENYIHQTTSKIVKTKPFRVVMEKLKVSNMMKNKHLSKAIAEQGFNTFINQMKNKCEKYGIEFIQVPTFYPSSKTCSHCGSIKKDLKLSERIYRCSCGFTCDRDKNASYNLAKYDLEISS

SEQ ID NO: 14824 - protein, 391 aa, Salinisphaera sp.
MLKASKVRIYPMTEQAAFLNRQFGAVRFCYNTGLRIMSHRYKRHGHSLSARHDIKKLLPVAKKSRKYGWLKEADAMALQQSCINLDQAFQRFFDPRQKVGYPRFKSKRGKQSSTHCVGVKAGDSWIKVPKLGPIKAKVHRPVDGKLKSITLSRTVTGKHYASLLYETEQAAPAPLKEVDADGVVGLDVGLSHLAIDSTGRKIANPRFLKQAQKNLKRKQQALSRTKKGSANRAKARLLVAKAHERAANARKDFQHKLSRQIIDDNQAVIVETLKVKNMMKNAKLAKHIGDASWYALTAKLDYKAKEQGKHLVKIDPWFASSKTCHVCHYKMSAMPLSVRSWACPACHTQHDRDINAALNIKHQGIVKLKAEGLSVSAHGGLRKSGMAPAAA

SEQ ID NO: 14825 - protein, 445 aa, Salinisphaera sp.
MNIVRSDRLALKADTAPQREALRATLAIYRALVRDLMGVVIAHWHTLGAHSDNAIVAPIEALIHPTAKRRVVRYGYFAKRYYKFPSYLRRAAIMDAAGQVRSFMTRYDAWQIGERKHPNARPPRLTCATGTFPSLYSGQCIQFDADMRSCRIKVRHHNDWVWMDFKLQGKPRYMPKGTIRSPSLTVRGARWFLSVPVTTTVTLPEPAHVECVLSVDVGINTAATWAVVDATGTVHDRGFLDRSDKDRSHRIMARIRSAAVTHTRHGCRLPSGFAAADHRRLRQLSNNQAHQISRQLVNTAQEHGCQAVIVENLKGWRPKAGRRRSTMKQRFHRWFHRQLVGCIESKATEAGLRCQAIHARGTSRQAFDGSGPVRRDAGNASLCSFATGKRYNADLNAAYNIAARGLVHFRRRRKATAGGRRPKSGATPGNPVTLSTLWAAQPTTR

SEQ ID NO: 14826 - protein, 251 aa, Deinococcus sp.
VDEGRRINIPKIGAVKCKFHRLLEGTPKTLQIVLDVNEWYAVYTCEVPVQPLPETGSTVGVDVGTRYFAITSDGEFVHNPRHLGSALKKLRVQQRTVSRRKKGGNRRRKAVGQVAKTHRKIRRSRQDFHHKVAVKLVRENDLIAHEDLRVSNVVKSNLARSISDVGWSAFFDILRGKAESAGRVVVRVPPQYTSQRCHACGHTCRENRNNEVFKCVSCGHEDHADWNAAKNILGRAVPSGVNGSGVSHAVA

SEQ ID NO: 14827 - protein, 377 aa, unknown
  TnpB Polypeptide
MTMLSRKRSGVKVQRGYKTELQLNNVQKTACLKHAGAARYTYNWGLNQKKIALEAKTKVPNAIELHRRLNALKPTELPWMYEVSKCSPQEALRNLDRAFDNFFKKRGKFPKFKSKKNGIGGFRLTGTIKVYDGHVQLPRLGRLKLKERGYLPTDAKILSASVSERAGRWFVSIQVEEDLPEYQGVKDEHDVVGVDLGIKTLATVSDGTRYENPKPLKTKLRKLRRLQQSVSRKVKGSNNRKKATKKVARLHLRISNVRKDVLHKMTTTLAKTKRVVGIEDLNVSGMMKNRCLARSIADLGLFELRRQLSYKGGWYSCKIVPVDRFFPSSKACSVCGEIKEDLALADREWTCLCGVHHDRDHNASVNLENVAASLSET

SEQ ID NO: 14828 - protein, 365 aa, Macrococcus sp.
VRAYKSEIKPTGEQARLINQTIGVTRYVYNLFIMKNQDRYKRNLSFMSGYDFSRWLNNRHSKQNQWIKDVSSKAVKQSIMNADKSYRGFFSKKTGFPSYKKKSLKGSFYLIGTIKVGRHRIFLPKLKWIRLKEYGYIPNDNIKSATVSREGNRYFVSVLVDESPTQTISTEKSEPIGLDLGLKETVYLSNGQKLMSIYRNKQLLKLNQSLKRQQRKLARKQKGSNNRYKQLLKTNRLYQRISNIKSDMKRKFIHAIIATNPQYITIENLNIKGMMKNRRLSNALQQTGLGYIVEWLKLKSKQSDIELRQVSRFYPSSQLCHCCNHRQKMPLNKRIFRCENCGNETDRDLNASINLVNARDYVVLT

SEQ ID NO: 14829 - protein, 524 aa, Streptomyces sp.
VHTTAQDDQVLTLVGRHLGHHQRADLARRIEIGKVRVKDNQRTERKHSLTKQSSSRLAGAMTRASEDQYQLSLRCLYDEASSLRRAIRTITQRLAAPCGGKKGKASGYRDQGERFGKQRRLQVLTARLARVEQRIASGKPSIAIGGRRLAKARHNLEKAQLTEAQWREQWDAARLFLTADGESGAPFGNYTICVNPNDGSVTIVLPEPLRHLANAPRGRYQLSCTVQFSHRRDEWLDRVTVNRAVRYDFVYDPVRGRWYLDASWCADKAVLPTPEEIRDFDERTIGIDLNADHLAAYVLDPHGNPIGQPHTIPLDLIGPALQRDGRLRDAISQLIKLARQHGCAGIVVENLNFDDARSTGRERMGRGGRGKKFRKTVAGIPTARFRERLRGMAFHAGLVVIAVDPAYTSNWGERYWKTPLQQISKKTTVTRHHSAAVAIGRRGLGHGIRRRPGVTASDQRIAARRATGQTAFVPRPRGTASPPRTASTPVRGGKTRLDQGDQLALFPDPRRPFAGSPDHKSGLP

SEQ ID NO: 14830 - protein, 446 aa, Streptomyces sp.
VRFWLCDHKVSTILRGVKADMGRRFRLYPTRAQERSLTGWGHATRALWNVALAQRVHVYEQRGRTLRAVEQCKYLTAARADPDLAWLAELPAQAGQQVLRHLDRAYDNFFNPQHPAVFPTFKKRGHRLAVPLPGQAVEVRKLNRHWAEVRLPKIGWVRFRLSRALGGAIRNVTVSRDGVGWHISFGVATGIKPATPNGKPGCGVDFGVASSAYVSTENTPRIKPAGLAGRERDRLLCLRQRMGRQITYAKKFSGGRYSNRLRRTITALAKLKAREANRRADFTHKLTTDLAKNHGFVGIEDLRVTNMTASAKGSWEQQGRNVRQKTGLNRSVLDNCPGERRRQLEYKCWLYGSELRPVPPFHTSQTCGNPACGRVDPASRQGGGRSFACVHCGHEDDADHNASVEIEARARRTGGSVTNSTRRRHTVPSPAPWRRRMREAQPVTHG

SEQ ID NO: 14831 - protein, 386 aa, Streptomyces sp.
MKLVVQVKLMPDAVQAAALGATLHAVNDRANWVSAVAFERGVPREYELRKHTYAELKASGLGAQAAQHTIKKVRDAYTTLKANIKAGNLGKPGSRRRSKAESKPIGFRPDAAHPYDDRCLSWQYDARTVSIWTTSGRLRNIPFTCSADALKTLREHRKGESDLIERDGTFYLIAVCEVPEAPLNENPSGFIGVDLGIVNVATTSTGYRAAGRGLNRHRKRQLDLRKKLQAKGTKSAKRLLKKRSRREQRHAANQNHIISKTIVTTAERTGRGIALEDLSGIRDRVRLRKDQRTTLHSWSFHQLAAFVECKARRAGVPLVYVDPAYTSRQCSECGYIDRKNRVDQATFACRSCGTLMHADDNASHNIGCRGEAVWTAGRESRVPATP

SEQ ID NO: 14832 - protein, 573 aa, Streptomyces sp.
MAEKNRLRPIGDPFVVAGPSGVAIRGRLKHLTPEDEKVLRVVGEYQGRLACRDLKVRCRAGNDHGNGQWAARKRSLTEQSSSRIAGAITKATHDQWALARRCLLAHIHNLEAGIRTLRHRLSLPIGEKGSKRALGGYRPKGEWFHKSRRLACLEGRLEQARADWESGRVRVVRGGRKMARNRHNLAAAQLTEAQWRRRWEAGRWFLAADGESGKRWGNETIRVTPDGEVSIKLPAPLAHLSNARHGRYVLASKVAFAHRGEEWRERISGNRAVAYRIHLDVERGRWYLTASWQRPAVRTIPLASARAEGMVGVDTNADHFAAYRLDGHGNPAGDPRRFFFDLSGSADHRDAQIRHALTRLLHWAKRCGVAAIGIENLDFAQEKTREKHGRRKRFRQLISGIPTGKVKARIVSMAAELGLAIVAVDPAYTSIWGDQYWRKPLTSKTRKMSRHDAASIAIGRRALGYPVRRRTAPPHDDRSDLRGHRTVQADRVVREREEPRPPATERAHDARRRAGTTKTRGTSAPNTVRDARSSRTWIQDPLLDTVEERLTTSSASSTVSTVTSPMSALQAMW

SEQ ID NO: 14833 - protein, 484 aa, Streptomyces sp.
MADCGLRPIEVPFVAPGPSGVAVRDRLKGLTPEDEKVSCQLAHIQSLEAGVGMVRRRLSLPVGKKGSKRAPGGYRSRQEWHAKTRSLCVLEDRLDRERADRQAGVVHVVRGGKRLARNRHNLADAGLSEAEWRERWEAGRWFLQADGESGKRYGNETIRVTPEGRISIKLPTPLAGLANARHGRYVLTARVQFPHRGNEWADRVEANRAVAYRIHFDMPRGRWYLTASWQIPPARTIPLGAALAEGVVGVDTNADHLAVWRLDVHGNPVGEAKTFGYDLSGTAQHREAQLRHALIRLLHFAARHGLAVAVAVEDLDFQAEKTREKHGRRKRFRNLISGMPVAKLRARLVSMAAELGVTVVAVDPAYTSRWGAQHWKHPLTSKNRKTSRHHAAAVAIGRRALGHPIRRRTAPPPHDRSDRAGHRTVQAAPVAPGREGPRPRIPGPRTRSVRAGTERKRVTSVPSTVRGTRLSMGPDNRTHSRSVF

SEQ ID NO: 14834 - protein, 426 aa, Streptomyces sp.
VIELGLEKRQFGHRARLALRPAEACKADEQAHAARTLWNLLHAWWRMMPKEKRTLANADAAIRQARKDIGFLAALPAQAAQAVLKTYYRAWVNCWEGRAEAPGFKSRVRSVMSVDIPQGRDLNIVRVHRRWGMANIPKVGRARFRWTKDLPVGKRADADTRITGARLVKDALGWHIAFRVQTVEPQPGPHSGPEVGIDVGVAVPIALSDGSTRTHGEWLTAREQEKLLRLEQRAARRKQHRKPGERTSRRLHRTYDQIQALRAKAKRRHLDWQHKTTTRIADTYSTVVVEALRVTNMVRSSRGTVDRPGKNVAQKSGLNRSIHAEAWGRMVVMLGYKLARRGGTLVKVPAPGTSQRCSVCGVITPGSRESQAVFVCKNPDCGWSGNADHNAARNVLHLYRMGLALIPAAGRAVARRARRVKPAIAR

SEQ ID NO: 14835 - protein, 689 aa, Streptomyces sp.
VWCRRLEVSVLLVGHEERLARFGTGVVRDVMLPFFDVGLEITGTDEALDPWQELELVREILAVVSSFSGGLCGQRSVKARSLTKAVKSTVCHPDLWYMFGHSLWSDLVDRGGGRPVTRKKRGKRLRVLASPFTVDAPSGARIRDRVHGTDAEFEVLTLVGRHLGHHQRADLACRVEIGKVPVKDNQRTERKRSLTRVSSSRMAGAMTRASEDQYQLSLRCLYDEASSLRRAIRTITRRLAAPCGGKEGKARGYKDQVERFGKQRRLQVLTARLARVEQRIASGRPSIAIGGRRLAKARHNLEKAQITEAQWREQWDAARLFLTADGESGAPFGNYTICVDPNDGSVTIVLPEPLRHLANAPRGRYRLGCTVQFSHRREEWLDRVTANRAVRYDFMYDPVRGRWYLDASWSTETAVLPTPEEIRTFGERTIGIDLNADHLAAYVLDPHGNPIGEPHTIPLDLTGPASQRDGRLRDAITHLIHLAKQHDCAGIVVENLNFDDARAVGRERMGRGQRGKKFRRTVAGIPTGRFRERLRGMAFHAGLVVIAVDPAYTSIWGEKYWKTPLQQTSKKTTVTRHHSAAVAIGRRGLGHGIRRRPGVTASDQRIASRRATGQTVSVPRPRGTASPPRTASTPVRGGKTRLDQGDQLAPFPDLEDRSRGHRITNPVCRDPANHDRNSSGPRGWCTCSP

SEQ ID NO: 14836 - protein, 392 aa, Actinomadura sp.
MLWSRIVKLVVQVRLLPTPEQAAALTDTLHQVNTAADHVSAVAFARFGLRARELPLRRLCYGDLKAGGLGAQAAQHVIKRVVDAYTALRAGIRGGGLGGPGSKRRRKAEAKPIAFRPEAAHTYDDRCLSWQLDAGTVSIWTVRGRAKHLRFACSPEQAKTLAAHRRGESDLVHRGGKWLLIATCDIPEPQVYEPADWVGVDRGIVNLATTSDGDNHQGRRLDRYRRWQARKRAELQAKRTRAAARLLKKRARREARHARHVNHTISKQVVAVAARTGRGIALEELGGIRGRVTVPRDQRARLSSWPFRQLGAFIEYKARRAGVAFIEVDAAYTSQRCPRCGHTARNNRPTRDHFHCRRCGLAGPADVVAGVNVRDRARSAWVFVNMPQPAPA

SEQ ID NO: 14837 - protein, 451 aa, Actinomadura sp.
VIRAYKFLLRPTSRQRQALAEMLRDHRSLYNAALQERRDAYRHPSKTTIRYGEQSAQLKEIRAFDPECQGRWSFSSQQATLRRLDKAFAAFFQRLKNGASPGYPRFKGTGRFNTVTFPKDGDGCRWDSTPHDRQTRVRLQGVGHVRVHRHRAVQGRVRTISVKREGTRWHVIIVCADVPAEPLDPTGAVTGIDMGVTHFLTTADGEHVPNPRFLGAAATELVEAQRHLATFPKRTRQRTKRHRAAVRRVAKLYAKVRRQRLDHHHKTALRLVRDHDVIAHEQLNTAGMVKAPAPKPAPGNGGAFLPNRAAAKAGLNRNILDAGWGQFLTILANKAESAGRHVIAVDARNTSRTCPECGHVSAENRVTQAGFRCTACGFAANADHVGALNVLNRAGLARCDVAWPPTQEARAFTRGWSHGVSPSAPATSWRPPHGGTRPQRLHTMSEDAVRF

SEQ ID NO: 14838 - protein, 273 aa, unknown
  TnpB Polypeptide
MKLTLQIKLLPTDEQGKALLETIKKSNLICNKISDAIWEKKVFNQFKVHHLVYHDLKKISGLSAQMLIRCISKVVNAYKLDKKRKRSFNPLGAITYDPRILSYNIDKQIVSIWSVNGRLKIPFICHNPKYLPYIKGEADLITKKGKFYLFQIVDIPEEDIKDVEEFIGVDFGIRNIATLSDGTNFNSKQLNEVRDKYFKVRKSVQSKGTKGAKKLLKRLGGREQRFATITNHTIAKQVVEKAISENKGIAIENLTHIRERTKVRKAQNRFSFN

SEQ ID NO: 14839 - protein, 153 aa, Okeania sp.
MHEDLKLVNIKSRSAKIGKLKIVWSRELPAAPSSVTVIKDSAHRYFLSFVVEIQPEVLPETDSSVGIDLGIKTFATFSDGTKVDAPKPLKKRIKKLRKLSKSLSNKTKGSKRHEKARIRVAKFHAKLKDTRTDFLHKLSTKIISENQTVVLEV

SEQ ID NO: 14840 - protein, 460 aa, unknown
  TnpB Polypeptide
LKLTRIHHCKNLNREKYKQLEKQATLLGRVRSEVWCKYGAVSGLNVSDRTIRDAWMSEGRAFNVSANAWKETLRDCISDIKAYREAAKEKVKQAIRKRASCDNEWKRLYTLLKKDAWMEDNFLHRQMRKHFRHGVNHTHNQIIVRADMCKTFELNSQCWLKVPSLVPRQTIKIPLNTTMEFAPQGTLRIILRNGNVEVHSTYDAIETKDCGKATIGVDKGYSEAFVDSDGDAYGQGLGKLISSESDYLNRKYKNRNKLRAIAKTKPHKRQAIEQNNLGQKKLDKRQDTQKSKLKTLIYTATHRLVDKAGLIVAEDLTSPIQSKRSYGKKTNRRLNTWVKGMLADALTIVSHRRGSVVHLVNAAYTSQIDSLLHGLLIGTRKGDQFHRFNGEVVQADWNAARNVLARLNDPEISRYTPYREVKRVLQERTDRYKSELTDLGSSYMLGNRTLTECELVLDYV

SEQ ID NO: 14841 - protein, 405 aa, unknown
  TnpB Polypeptide
MILRAYKTEIVVTNNAQKTDLMKSLGAARFAYNWALNIKKEAFDKKEKTPNAIELHRELNKLKKTDIPWMYNSSKSSPQNALRDCDKAFQNFFTRCKKKVKGKKGFPKFKSKKNDKQSFRLDGAISVESGCIKLPRIGKLKLAEKDYIPTDCKILSATVSKKAGRWFVSVQVETPDREPTNAINDVIGVDLGIKTLATCSDGTTYENPKALKKNLNKLKLKQRQLSRKKKGSKNYGKAKQKLAKLHNHISNIRKDCLHKITTKIVRENKTIVLEDLKVSNMMKNHCLAQAISDVGLFEFRRQVEYKAKWSNRKVIFADTFFASSKLCSCCGWKNESLTLTDRVFECKVCDNKMDRDFNASINLKNLAVSSTVSACGEQSSSNESLVSCSVKQEFNKKSRVYILKI

SEQ ID NO: 14842 - protein, 367 aa, Micrococcus sp.
IRLKPTKEQEVKLWKSVGTARWVYNWVLERQQENYKNGGKFIYDNDLRKEITQLKKQDSHKWLNNVSNNVAKQAVKDACNAYKRFFKGQSSAPKFKNRRRDNKSFYNDTAKLKVKNKSVLIEKVGWIKTSEQLPMNVKYMNPRVSYDNKYWYLSISYEQEFTQPELINEVVGIDLGIKTLAVCSNGMEFKNINKTAQVRKIEKRLRRLQRSASRKYEMNKEGNRYVKTCNIIKIEKQIQLLHRRLSSIRNNHLHQTTNAIVRIKPSKVVMEDLNVKGMMKNRNLAKAISQQKFYEFKRQMEYKCKKYGIEFIQVGRFFPSSKLCSNCGQINKNLKLSDRVYHCNCGLHIDRDLNASINLANYGKSVK

SEQ ID NO: 14843 - protein, 309 aa, Geobacillus sp.
MYRTLKTRFRAKKEVIDKLFECNRISAEVWNECLRLAKEHHLKTGKWITKTELQKATKGRFPIHSQSIQAVVHKYIFARDGAREARKKGEKTKFPYKKKKHFNTKWAKDGFVLHEDGTLELSLGIWKRKRQSPLVVKMDKEQIPKGQVKEIELVYDRGLWLCLLYEDGKEPKENKNQNRVAIDPGEIHTIAAVCENGENLIITGRKIRSIHRLRNKKLKELQKLMSRCKKRLQTMEKVQSGKTICTFEIRGTTKGCVAQNHETICSLVFGKPSERSRHWGCRGGTTEHEKETKQKDQSEIIQLVVWKTI

SEQ ID NO: 14844 - protein, 397 aa, Spirillospora sp.
LRIVTRRVHRAFKFRFYPTAEQAHLLNRTFGCVRKVYNLALEARTTAWHQRRERVNYNATSAMLTGWKKTEDLAYLNEVSCVPLQQALRHLQGAFTAFFDKRAGYPRFKSKRKSRASAEFTPSAFRWNDGQLILAKMAEPLDIVWSRPLPEGPAPSTVTVSRDAAGRWWVSLLCQDTITPLPASGNVVGIDAGLHHLVTLSSGEKVANPRHERSDRDRLARAQRELARKDKGSANRAKARVRVARIHARIADRRRDTLHKLSTRLVRENQTLVIEDLAVRNMVKNHSLARAISDAGWRELRSMLEYKADWYGRELVVIDRWHPSSKTCSACGAIAEKMPLNVRSWTCPCEAAHDRDENAARNILAAGLAVTACGAGVRPQRDSSRTGRSAAKQETRG

SEQ ID NO: 14845 - protein, 443 aa, Spirillospora sp.
MLGGMSGDTVVEGRSGHRARLWLSPGQVAVLDAQAHAARAMWNLLHEWWTMMPQGHRSLQAADAAIRQARKEVDWLAVLPAQAAQSVLKTYHRAWINCWEGRAGAPNFKTRFRSAMAVDIPQGGHLHVKRVHRRWGMVNIPKLGRVRFRWTKNLPVGKRANEQNRITGARLVKDPLGWHIAFRIQTLEPQPAPHPGPEVGIDAGVTIPLALSDGNHQDHGRPARLPDGKADRDKWLNADEKATLLRLERRAAHRKSFRKPGERTSNRLRRTYDQIASLRARAKRRATDWQHKTTTALARTYGVIVVEQLNIENMVRSARGTIDEPGKNVAAKAGLNRSISQEAWGRTAAMLAYKTAQRGGRLHKVPAPGTSLACHACGVTTPGSRQDQARFVCKNTVCGWDGNADLNAARNVLHLYRTGHALVPAAGGAVARHARRVKPTTAR

SEQ ID NO: 14846 - protein, 355 aa, Cylindrospermum sp.
MINAAGVIYNHCIALHKRYYQMWGKHLNCAKIQSHIAKLRKRNSFWQSIGSQAVQDICQRIEKAYQLFFKHNKKGVRPPGFKKIKKYKSFTLKQAGYKFLSSNRVKIGNRVYQFWQSREIEGKIKTLTIKRTALGELFMVVVVDNESEPEIKSTTGKIAGFDFGLKTFLTCSDGTLIDSPQFLKQSLNAIKKANRSHSQKVRGSNNRERARKNLVRKHEDICHRRRDWFWKLAHQLTDKFDVLCFETLNLKGMQRLWGRKISDLAFGEFLPILEWVAKKKNKQVVYLNQWYPSSKTCSHCGHILSSLDLSVRQWRCPSCQSINGRDENAAINIQMVGASTIGLGDVRLATPAIAV

SEQ ID NO: 14847 - protein, 383 aa, Actinomadura sp.
VKLVVQVKLLPDAATEAALRETLKLCNQAACHASRRAFAAGVKGKTALQRLVYGELKAMGLSAQPAIHCIRKAAGAYASLAENLKAGNYGPQGSRRRARAEGAPVRFRKDAAQPFDDRSLSWQLDAGTVSIWTVYGRLKSVPFACSPSQAKMLAAFRRGESDLVRRGGCFYLYATCDVPPAPEYVPDGFCGVDLGIVNIATTSGGTVHLGAQVNQVRHRNRRLRKRLQAKGTKSAKRLLRHLSGRGARFAADTNHRISKQIVTEAQRTAHGIALEDLGGIRARVRLRKPQRVTLHSWSFAQLGAFITYKAQRAGVPVVFVDPRYTSQGCSACGHIHKKNRPDQATFHCTSCGFAEHADVNAARNIAARGAAGWAVSHAADDAA

SEQ ID NO: 14848 - protein, 423 aa, unknown
  TnpB Polypeptide
MQLVERHLIKPSHELYKTLDDLTFKAKNLYNHGLYLYRQSYFEHKKNPNVPVLIWNKIDNLLRTQGHKDIRALPSKVANTVLKNLGENISSFWKLVRLKNSGKLAQKPRLPHYLHKTEGRYPVSFNYQTFGKKRGANNELFLCPKGINLPIPTKVANPKQVRIVPDHNNFIIEVIYDAQERAPKSTSKYAGIDLGVDNFATITFSTQNKPLIIKGLELKSINQGYNRLIAKAQSLLPDSLKISKPIHRLWSRRSWILKTKIHQMTAFLSTLFDEMQVEKVFIGKNTGWKQNLPFGKKVKQRFAYLPYETFIEQLRYKCQLRGITVVVQEESYTSKASFLDNDNIPVYGETENPQFSGRRIKRGLYRSGNGQLINADVNGSYNILRKGLANSRLPFEADSPLIHPLVVKGIGKEPNDKLVQLYM

SEQ ID NO: 14849 - protein, 388 aa, unknown
  TnpB Polypeptide
MLRTFQFRLLPNATQRAALEYILADCCESYNAALSERREAWKLEKKSVTYRNQQDQITELRKDERFTKIACDIMRDPLRRVDRAFKAFFRRCKVRQGKAGFPRFRSWSRYDSFSYSLPRFGIRGIKVPNLGEIRARSGRTISGRAKLCTIKRDGKRWTASVVCDIGPAPEKLIVSKAVGIDVGLTALATLSDGTVIENPRWTRKHERRIAEANRTLARKQKRSKNRLRAKEVLRRAHQRAGDARRNFTHHVSKWLVSNYDLIAFEKLNIRNMSRSAKRTVESPGKNVAQKSGLNRSIMDAAWGILLYQLHYKAANAGVHVLAVNPRGTSIRCSGCGEPVPKTLADRQHICGVCGLSLGRDLNAARNILRAGEQCCGRKPSKSIEAAIR

SEQ ID NO: 14850 - protein, 406 aa, unknown
  TnpB Polypeptide
MQLTQKLRVIPTLSQELVLNALSEKCRLCYNFALKERKEAFENNIKISYIDQQNALPKIKEKFPEYKWVYSKVLQYALRNLDSDYKSFFALYKKGDKSAKLPKFKGKQFFTTMVYNQSGFKSGKGWIELSHKHPIGTKLWFRIPEQFIFKKIYQVSIFKSKDDYFLSIVYDKDAPKFVDNNLIQTFDLGLIKQTAINLSGKFVEFANARPDTYWQKPIEELQSRIDHCKKYSRKWYSLKKSFNHCSTKSVNQLKDAQHKLSRKIVDNTHANTIIVGDLNTKEMSQKSKSKGMRRSLQNTGSIGRLVRFLIYKAKLVGKRVIEISERDTSKTCCLCCAKKDMPLKERQYVCDCGNNIDRDKNSAINIMLRYLSQNGLWTAYWQFVSNLRQTGLKIVSHSQEALTSKC

SEQ ID NO: 14851 - protein, 406 aa, unknown; identical to SEQ ID NO: 14850
  TnpB Polypeptide

SEQ ID NO: 14852 - protein, 378 aa, unknown
  TnpB Polypeptide
MPTSVPRTTLAVKYRLYPTPAQETVLRQNLAVCCAVYNSLLNWRRHDYEVQGSRPSYYEQKKALPLWKQTHPGLSCVHSQVLQDVCKRVDLAFEAFFRRVKSGETAGYPRFKGEGHYDSLTYPQEGGFQVGEESVTLSKIGAVKAVLHRPLPGKAKTCTVRVQAGKWFACVTCEVEAEPLPSSAEQVGIDVGLEHFAATSNGEFVANPRFFRKDETALAKAQRKVERLKTCRKQQEKAALRKARRVVSRIHERIRNRRHDFVHQTARRLVNRFGWIAVEDLNVSGMVQNHCLSKSIADASWRMFRAVLAYKAESAGRQMVAVNPAYTSQACAACGHRVPKTLSERVHACACCGLLLQRDVNAARNILKRAVGLHSVPA

SEQ ID NO: 14853 - protein, 334 aa, Lactobacillus sp.
RPTACKVRDELVANKQDWQYQLSARCLQLAITDLGKAWQNFFDQSLPDWGKPHFKSKKAPRQGFKTDRAKIVNGQLRLDKPHGIASWSDIPFRGACHLTGTLKVVSIYRENGTYWASLSFEIAEIVAKPKTGQVTGVDVNIGHLNYIDGVFNVCPQRLQRLYQRIKHYQRALARKRVANGRIKGTKSKNYTQTKAKLQRDYRKAANIQHDLIQKFTTQLVNQYDKIVIEDLDVKKMQMTHIASKGLQRSLFGYFRQVLTYKCAWYGKTLLLANRYYPSTQRCSSCGHVKQGSDKIGLRGNAKHQTKHHEYVCYKCGVTLDRDENAVQNLLQLAL

SEQ ID NO: 14854 - protein, 299 aa, Haemophilus sp.
MQLRKAFKFEIIPNGEQIRRIKQFCGCSRFVFNRALAWQNEQYEQDNSVKFSYTKIANLLPHWKKELLWLKDCHSQVLQQSLKDLESAFKNFFQKRADFPKFKKKGLKERFRFPQGCKLEQQNNRLYLPKIGWVRYRNSRAVVGEIKNVTVSQKCGRFFVSIQTEFECEIPTHQGGEIGIDMGVARFATLSSGEFFEPLNAFKTYKGKLAKLQRQLKNKVKFSQNWQKLKAKIAKLHHKIANCRKDFLHQTSSKISKNHAMIYVEDLQVSAMSKSAKGTAEEHGKNVKQKSGLNRAILD

SEQ ID NO: 14855 - protein, 385 aa, unknown
  TnpB Polypeptide
LIVNKSIRLALRGDFRSRASLTRAAYADLSRDHVIHKKYIPCAFEVALGVLKAHRRRLRKGRCSLNPYIRRPILKAENQSYWLDRETGRLRIPLQRTEGVQLLLPISKWHRSFLSDSTWGLGSLTVVPGKILVVVRKEAPPIYQPTSAMAFDTNEDSLDGVLAEGADGCPVTLSLGGVRQIQATHFRRRRRLARQKAHDRRVQRKLLAREGKRERNRVRQRLHLTSKLLVDMAKAFGSAIVLESLTLRGTRGRSRRMNRRLSSWPRGEIHRQIEYKAALAGVPVIKVNPAWTSKTCPVCGARRRDRVGKDFVCLVCDWEMDRQINAGLNILKTALASNEALARAVRFQPGALRHDVVSPLYDLLREGGGAREEPSGVESSPSRIA

SEQ ID NO: 14856 - protein, 208 aa, Methanosarcina sp.
LKLILLWNYKKQDYSVGVDVGIKSFLTLSDGNYVPNPRFFVTEEKFLAKVQRKLSKLEKGTPERAKALKAVQRVHERISNKREDFVQKVSLNLVRNYDLITFEDLNIKGMIKNHKLAKHIADVAWNKLVTITSYKAEWAGKRVELVNPCNTSQMCSGCGEIVKKELSERIHSCPYCGLTLDRDHNAAINIMRLGLQSLQNSGRCPSLQ

SEQ ID NO: 14857 - protein, 270 aa, Methanosarcina sp.
MTKQVESAFTRFFRGKTGFPKFKSKKNPIQSFPVPQHYSVDFEKNTIKLPKIEPIKAVFHRKFEGELKTATVSRTCKGHYYISILVEDGKELPVKEAFAESTTIGIDVGIKDFAVLSNGEKKQKGSKNRAKAKQRLAVLHDKITNQRNDFQNKLSFKLISENQAVALETLNVKGMVKNHHLAQSISDSAWSSFVTKLEYKAEWFGKTILRIGQFEPSSKLCSVCGYHNKELQLKDREWTCPDCKTKHDRDINAAINIKKFALVDQNLIGL

SEQ ID NO: 14858 - protein, 434 aa, unknown
  TnpB Polypeptide
MNSIRAYRFALVLQPAKARLLRRFSGSCRWVWNEAIREQQRRYAAGEKFSPYVAMAKWLTAWRNAPATGWLAETPVHPQQQALRRLEASYKRFFAKQGGYPSFKRYGDDAGLRFPDPKQCAVDRQNERIKLPKLGWLRMRMSREVEGVLRNVTVRREGDQWFASIQVEGAEIVPMPVQAPTLGIDLGLTVFAATSEGATVAPLRAMGDGQKKIRRLQRYVSRKVKGSANRKKAIKRLGNWHRKIARQREDWLHQLSTRIAGEHQVIAVEDLKVKNMSASAKGTAANPGRNVRQKAGLNRGILDASWARFMNQLTYKVEWRGGQVIAVNPAYTSRMCRICGHESAENRKTQAVFSCVACVHTENADVHAAKNILRMGTEAHEHAQQLLQREATESINAVGHTVSACGGVVRPKRRASVKSAAPLKQEPTDATVHA

SEQ ID NO: 14859 - protein, 367 aa, unknown
  TnpB Polypeptide
MTTYKFKLYNDEDNHHLHDIVNVAGIIYNHCIDLHNRYYQDTHKYLNKNILKKHIAKWKHRHYSFWGIVNAQATQNITDRIDDAYKRFFDNVKKGSKRRVSPPSFQKVKKYKSVTYTQTGYKFLEGNVVKIQGRKYRYHKSREMEGTIKTMTLKRTPLGEFFIAVVTDHVATGKTENMSRTAIGIDFGMKTFLNLSTGEKIDSPLFLRQSMMDLKKAGRNHSTKKKGSANRNKAKLHLLRVHERISNQRRDWFWKTSKDLCEKYETIVLEDLNLNGMQRIWGRKISDLGFAEFLGILEVQARKHNTKIVYVGRFFPSSKLCSSCGAINRNLELRDRVWTCRICGEVLDRDLNASRNILKEGLRLLAG

SEQ ID NO: 14860 - protein, 478 aa, unknown
  TnpB Polypeptide
LIGRTPQTLRNWDKSGKLTPSHTGSNGYRYYSHQQLKEVLNIENDSGENRIVIDYCRVSSNKQKVDNLNNYLVSLNTRKEMICVKMTRGIKVMLVPNNKQNTLMFQNAGAKRWAYNWALNKEKEGYVNGGNFISDNDLRKELTQLKQTEKFSWLNNISNNVTKQAIKDACIAYQRFFKGQAKFPKLKTKKKSSPSFYQDNIKIQFTSTHVKFEKFAKNKKANKQKLNWVRLAEHNRIPFGKDVKYINPRVSHDGLNWFISVGIEYPDNLNIPMNNGIGIDVGVKDLAICSDKKVYRNINKSKKVKRLEKQHKRLQRQISRKYEINKDGLKYIKTKNIIKLEHKNRKVQHKLNGIRNNYTHQTTCEIVKRKPSYITIEDLNVSGMMKNKHLSKAVQQQSLYEFSRQIKYKGLWNNIEIRIADRWYSSSKICHECGHINKILALNDREWVCKSCGSVLDRDYNASLNLRDTDNYKIFKVA

SEQ ID NO: 14861 - protein, 384 aa, Methanomassiliicoccaceae sp.
MVGRDIMEEMEGGSAEKGHVTVVYPAYPNGAQERELLRTLDVVRGLYNHFLAECIADVVEGDRFPTPREMNKGITVMRGQDAILRSVAVFTLRDAPLRVHAAMTSFAKLSARSGELRLPRFKSESRYRSLAIDPRGVRFDGRRIVLGKWMGLRCGNLDRSRRLHRPEGGRVVTARVVRKGSGRWYVHITFEIDKRYRGEIDLSEPAQPEAPDLYARHENEIARLQRQIESMEDGPKRRRKQRRLSALHERIRRRRDGYLDRVANRMVSGHSAVILEDLRLRRMMERDDCPAPRRKLFTEVALGILVRKVEAKAERACIPLVKVDPAYTTRTCSCCGLVGEKMPLTQRVFSCPRCGLEMDRDHNAALNILGSGMGTLRGSAEPSG

SEQ ID NO: 14862 - protein, 385 aa, Methanomassiliicoccaceae sp.
MVGRDIMEEMEGGSAEKGHVTVVYPAYPNGAQERELLRTLDVVRDLYNHLLAECITDVMEGGRFPTPREMNKGITVMRGQDEELRSVAVFTLRDAPLRVHAAMTRFAKLSARSGELRLPRFKSESRYRSLAIDPRGVRFDGRRMLHRPKGGKVVTARIVRRRSGRWYVHITFEADKRYRSEIDLSEPAQPEAFDLGLCDIITDSKGEKIEAPDFYAECENEIARLQRQIESMEDGPKRRKKQRRLSALHERIRRRRDGYLDGVANRMVSGHSAVILEDLRLRRMMERDDCPAPRRKLFTEAALGILVRKVEAKAERACIPLVKVDPAYTTRTCSCCGLVGEKMPLTRRVFSCPRCGLEMDRDHNAALNILGSGMGTLRGSAEPSG

SEQ ID NO: 14863 - protein, 392 aa, Methanomassiliicoccaceae sp.
MGRRGGGSEDRWFVTRVYPAYPNRTQERELLRQLDVARGVYNHFAEACIHCLIDGVHVPDPMEMNREFTLMRADDCMLRSVNSYTLRETIGRVWQAVERCERRSLADGELHVPRIKTPPRFRSICFDPRSSKMESNRIRLNRDLWVRCRNLAKPRNGRAVTVRAVRRGTGRWYICITYETDRVVRGEMDVGEPVRAEGYDLGLVDLITDSKGNKIRTPDFFREAEAELAHLRRQLSKLEEGTAKWLKKRRRIARIEERIRRRRDGYLDRVADWMVSGKTTVVVEDIDVRRLASREDGTLVRRKRFTEAAWATLVGKAERKAGKTDVRLIRVNPAYTTRTCSRCGHVGDGIPLSERMFRCPVCGLEMDRDRNAARNILGSGMGTRRYAAEPSG

SEQ ID NO: 14864 - protein, 336 aa, unknown
  TnpB Polypeptide
MEKEKSFFKTVSQPSSSAIAEGPGSGLHQFFRKQSNFPKYKKKFRHDSIRFPQGVELDEAKQQIRLPKIGWVGYRKSRDIIGRIKNVTVSRRGEKWDVSIQTEYEVVSSAPNPSEIGIDMGVKRFVTMSNGDFVEPLNAFKQEQEKLAKLQRKLVRQKKGSRNSRKTKRKIVRLHRYIADSRRDFLHKTSTKIAKNHSVIYVEDLKVSNMSASASGTKESPGKNVRQKSGLNRSILDQGWYSFFRMLSYKLKQRGGKLIKVDPRNTSRTCPRCGLVSAENRKSQATFACIGCGFRSNADEVGAINVLRAGRARLACGMSGAVRLLSAGTRGDLLQH

SEQ ID NO: 14865 - protein, 397 aa, unknown
  TnpB Polypeptide
MKVANNVLKTIRVMLIPNNKQKTKLLQYAYTARFAYNWALAREQENYKNGGKFLSDTDLRKEFTKMKHTQKYVWLNDISNNVTKQAIKDACDAYKKFFKGLTNFPKFKNRKKSTPSFYQDSVKIQFSETHVKVEGFTKSKKKNKQKLNWIRLAERNRIPTDCKYYNPRIKFDGLNWWITVGVEYPDSVNIPNKEGIGIDLGIKDLAICSNNYKYQNINKSQKIKQLEKKKRRLQRSVSREYLKNKKGDSYCKTSNIVKSEKKLLKVNHKLTNIRKNYLHQITSEIIKREPSFICIEDLNVKGMMKNKHLSKAIQQQGFYEFRRQIKYKSKWNNITVIVADRFFPSSKLCSCCGKIKKDLKLSDRVYKCDCGNMIDRDYQASLNLKRYGENVLNQSVS

SEQ ID NO: 14866 - protein, 205 aa, unknown
  TnpB Polypeptide
VSILVETEHKELAHTNHNIGIDLGIKDLCITSDGKVYENLKIIKKYEKQLVKLQRQLSHKGKRSKNYYKTKKKIALCHEKIRNIRKDYLHKVSHEIISENQVIVSENLQIKNMVKNHHLAKAISDVSWYELTRQLEYKAKWNGRKYIKIDTFYASSQLCSVCGYQNPDTKDLSVRTWICPKCGAEHGRDINAAKNILTEGLRQMA

SEQ ID NO: 14867 - protein, 405 aa, unknown
  TnpB Polypeptide
MGFFKKRTNQTPITVELKLIPKKKWQREYLRRLFREATWLRNWTIDRLNSGWRFNWSKANKIKKVRIKTEHGFEMRRLEVLASQMKQGIQCEILQNLTALSELKKRGHKIGRLKFQREHRMIALTPQMFKFPKTNRVRFAKLPRRKSIYVRGYDQIDYWKQLDPNAEFGDSKLLKRADGYFLHVTVWINKNAYSQLHNAQFDSVGVDFGIRHAVTCSNGIQIDITGLEKPKRIRRLHRKVSRRKIGSSNRQKARVKLRRAYRKWVNKKRDVRNRIWSYFRKFKHVAFQDELIRFWKLLFGKQIEQTTIGSIVGCLKQRHPGSMVVDKSMPTTKTCSNCGCIQHVDWGQTVFRCYDCGFNIDRDINAARNMLILVGLEQTEVTPVEYETSVRIFGPSPYIRISLVR

SEQ ID NO: 14868 - protein, 255 aa, Moorea sp.
MRKAHLGKVIGIDLGIKDFAITYDGEKTSKFGNPKHLAKYEKKLAKKQRIAARKKKGSSGRRKARKIVAKVYERIGNVRQDYLHKLSRKIVDQNRVVVVENLNVKGMVRNHKLAKAISDLSWGTFVNFLSYKCEKEGKVLVEIDRWFPSSKTCSNCHYRIKELPLDVRTWTCPSCGTHHDRDGNAAKNIRAEGIRMLSSSGTGEVNASGEEVRPRRGRPSKLRHSSVFAKRGHSRSVAQRPRPSWKPQALRSRLG

SEQ ID NO: 14869 - protein, 446 aa, Lachnospiraceae sp.
MKIFSTYSVKIKYFNHIFKETVALYREAVDYLIEVCLNEWDDISVIKGSLNQQRYVECLCHETADNTNVRYSYFDKGFYKFPSYLRRGAINEAIGKVSSYKSNLANWEKEDKCLRGRKPSCPKAGYVYPCLYKTIMYEETGTYEAKIKVFIRNTWDWITVELRKSDIDYINRRCTTRKKCAPTLQKRGHEWFLDFPFEEKIKLADTDIHEQTIVAVDLGINSAATVSVMHSDGTVKGRKFLKLPKEYDSLNHSINRIKKAQQNHNHRIPRLWSKAKGINDDIAVKTANFIIDTAVLYNADVIVLEHLDRDGKKRGSKKQRLHMWRSQYVQSMVEDKAHRHGMRVSHVCAWNTSRLAYDGSGEVLRGTKGDLDSYSVCRFNSRKIYNCDLSATYNIGSRYFIREILKSLPVRERLELEAKVPQVTKRSTCTLSTLISLNTELMSFVA

SEQ ID NO: 14870 - protein, 552 aa, unknown
  TnpB Polypeptide
MKFNKTKGIVFRMYKTKGPDLLLPLYNILQGELDRILSTPTYVEALSKIEFKYKDENGAEQSKLNGVLWREIHEIIGDSLKGKVPDDWYIRILYHNIISLLKSRQEQIKIYEILKSNQYKIDNTLRDKLAQEKLYPTNYYLETLAAAKNMPVLPKRKTFILDFSVSDKQMFRVGKNSNAYEIKIYSRKEVKDYNLETGWLSFEMYLPTYIRESFTGKTAKPQFYWDRNKDEFVCAIPCEIRKLPNEYENIMGVDLGKVKVYSATVVRKDNSISDEYIPTEELQNLVDKLKRMNEHINLVYEKLKRSSKYGNFTNRQDRRRLDYKRSRYKRTKLQFAIARLVAVEVVNIAIKEQCKEIHLENLSWVKSSGGKWNFAQVQARIEEVAELFSIKVIKVSAKNSSKTNPVTLEIGKISNRDVIFKDGQKVDRDQLAGLNLALREPKKVKQRKIKTLNIRDSVVIQRQSRRFNNYLMKKSVMSEIKSKRKIYKEFLKSKEESSRPDLIKKENKKIVMFSHDKAKSDFAIVSVYKSSNLKLKYYFTNNLQFKHIYTNL

SEQ ID NO: 14871 - protein, 350 aa, unknown
  TnpB Polypeptide
MTCSAIRSVAAAYRSAAKNGKPAQQSFQFRNKAALFLIGCRGRDAEIFPGNELRLWTKQGKKSLSFTVPAYFQERFEQAVEFDSLLVIERKGQLVGRLVLTLDVPDPEGDQPCGIDRGELNAIAAVDAEGKPFFRSGKRYRQKNKASYKQRKRLQKRLALRKAERQDTRSVRRLLKRLSSKSSNRTKDFVRTTAKRLINSLPEGSVLVLEDLSSIPQPLRTKKDKDGNLLQKGNRRSKSLRRRLSRWQYGLLQKALIARAELLGIAVVFVKAAYTSKTCHRCHKRGVRQRHRFCCASCGLCCHADVNAAVNIRSRYDTFCRVYARWAASQSAPKPWNGEMFPITRASCCL

SEQ ID NO: 14872 - protein, 416 aa, Clostridium sp.
MYLTVKQQIKHLSKEDYNSLRELCHIAKNLTNEAIYNVRQYYLTEGKYLNYQKNYALLKISDNYKLLNSNMAQQILKEVDGTFKSFFGLLKLAKKGKCSFKDCRLPKYLPKDGYVALVIGFVRLNGNKLILPFSNTYKKTHKSIEITIPPVLLDKKVKEIRIIPKANARFFEIQYIYEAECVKRNLNTSNALAIDLGINNLITAVSSKGDTFIIDGRRLKSINQWYNKENARLQSIKDKQHYSKKPTNRQKAITRDRNNKVNDYMSKVARKVIDYCILKDIGTLVVGYNETFQRSSDMGKSNNQIFVNIPYGKLREKLEYLCKLNGIIYVKQEESYTSKASFWDRDEIPVYNDDNPKTYTFSGKRIHRGMYQCTNGKVLNADVNGALNIMRKSNVVSLDTLYSRGELDAPVRIRVA

SEQ ID NO: 14873 - protein, 492 aa, Dolichospermum sp.
MKLKVKNQLTVTRIAILGTKKLNTWKSNELDLIALRLGQLRSDLWNEFGSLKAWGISKFEIDKQLRTSKDKYQLPAKLWDSTLYDVIDNIHLVQAACVEKVMKSLGQSFQSFQSKKGVLQLTLESREWLKHPKLCTLVRKFWYRGHTKVCNQIILRAFDTKLDNKGVVWLRFGGLTKGKNLKLPTTLPTEVKCQLRLIKRNSRWEIHYTTDIQKAEKKTEGKIIGCDRGYTEVYATSSNDGARFLGNNFGKIQTEETDYRTAKQVKRNKIKSVFDKSIAKGNSAKADRIKRNNLGKIKWNNRETSFKGRIQTIVFTATYHLMTDAIKVAFEDLTEAIKSKKPLKKRIKRNVSSWCKGVVADALKQVSTRVGCTVVSVNSAYTSQLDSRFATLTGSRNGDKFTGHDGVVMHSDTNAADNILARMSDVEITRYMKHSDVKKILLKRSQKFRDSLMETAAITGKDQPQTLEPESNFTSQVNQRANYKQLTLFDLG

SEQ ID NO: 14874 - protein, 389 aa, Cohnella sp.
MIRCVKAAFRTSKADLDRLFACNRVSAEIWNQYLSIAKNYSLQHNGSWIGKTELQTALKNQFPLHSQSVQAVCHKYLFARDSAKQAKNQGVNTKYPHKNKKHFNTKWVDKSFKIEGNTIQLSLGIQNGKRQQPIQIIVADLPDAEIKEIELVYDRKLMVSMIYDDGKIAALNDGSEVAGVDLGEIHSIAATTTANKSIIITGRKARSIHRFRNKKLAELQKLMSKCKKGSRQWKKYNRAKTYMLSKSERQLKDIIHKTTKQFVQWCTQNDVKEVVIGKVEGVQRNTKKKKRKNVTQKLSNWSFGKIEKQLGYKLEEHGTSVKTIDESYTSQQCPCCGRRKKTSTRNYKCSCSYKEHRDIHGSKGILSKYLHGDIRYLGETKSIKYLRIA

SEQ ID NO: 14875 - protein, 618 aa, Acidimicrobiaceae sp.
VATNEPVCFSVLRCRLMPDENTRRRLDVAFVAAGHLERALTRWALTNLDSMRHTTRWRDACALSTGLSASGEVNDAAARRTRNAALNALRKEFCLSEYDFTKRILELRRDSHWIGEHVPSSSALVHATQVWESFAAHLFRGAGRPTVPRPWENRVLHGYFRDEGRAAATEEEVEKFAAQGKEPPKARSAGWTGLSLRTSEDGVFALHLHPSRDRARHLVIPVVTQGGDQASREGWYLNDPTSWRQVKIVRREVRKHFVYEAHLLCAKESYRDPSRYGCAPDGVVGVDLGVSTLAAVGIGPDGELTDALLVRASAQELEQRRFVARQRRRTQRALERSRRATNPFAYGPDRRGRAGRGSRLPGTRLATSKAYRDRRQVLRDERRRDRESRVITTNRAAIAVLQRCGTNIITEDITVKAWQRTWGGSISYFAPSEMISALERETRLAGGSFTKVPCRLGLTQTCHCGTVKKKSLAERWHRCEACGSGFKTAPVDRDLHSAYLTAFVTVTSSPIAAILDTDRALAAWSGAEAPLVAVSGDPQSRRTSQPHSRGTSCWSRRKASNRAGRAIASDVDPDSLGRAEDPFLSDVGVRKAHAERLRYEASTTETDRPRGRQLRLDG

SEQ ID NO: 14876 - protein, 419 aa, Methanonatronarchaeia sp.
MKLDVDSDDAALLEDTVDTFLWSAQYVVDHAFEGEYVTTSKTTLDDETYDDVREKTDGFNGGLVQAARNKAAEACKSVVARWKQCKKASMPHFTSPHVVYDHRTATFHDEYVSLATVDGRIEADYALPDKERNTPHAEYFFSDEYETTGAELHYSNGNWMLHIHCKREVESDTPTQATTENRTVLGVDLGVNNLAVTSTGTFWTGDEFDHWRQEYEKRRSKLQECGTRWAHQNIQSVGRKEEGRFKQTLHRISNELVAEARENECSVIAFEDLTDIRERTGASWGHKWAFNRLYEYVEYKAEEYGIDVEQVDPKNTSQRCSECGFTHPDNRDGEDFECLKCGYENHADYNAAKNIGLRYLRRNQTGSGGGAPVGVRLNSGMLNVNGGYSPAEESARTGVHAESHDFSPGLAYTLNFYTT

SEQ ID NO: 14877 - protein, 384 aa, Providencia sp.
MLRATKVRIYPTPEQAEYLNAQFGAVRFVYNKALNIKKQAYQRHGVNLNPRKDLKPLLAVAKRSRKYAWLKEYDSIALQQAVINLDIAFSNFFNPKLKARFPSFKRKHGKQSSYHCVGVKVLDGAVKIPKIPAIKTRLHREITGTLKSITLSRSATGKYYASLLCDDGMEEPSKPTLISNITGLDMGLTHFAIKSDGAKVANPRHLINASRNLRRKQKALSRKKKGSANRRKARIQVAGVHERVANARADFQHKLSRAIVDESQAVIVETLKSANMMKNHHLARAIGDAGWSGFISKLEYKAAEKGVHVVKLEQWFASSKTCHCCGYKMPEMPLNRRIWQCPECEVEHDRDINAAINIRQKGMLELCAAGLVVPAHGGQRKSVI

SEQ ID NO: 14878 - protein, 413 aa, unknown
  TnpB Polypeptide
MIGMEVRRTVPVKLDVADSDADLLHETIRQFLDAANYVVDAACDGEWVETRKSLLHDETYSEVRNRTELHSNHVQSARDRAVDALKSVVAKWSKGEYASLPTFTTPSVEYNQRNATFNADHATLSTVEGRITAEYVLPDESRDTPHSEYLFSDEYETTGATLHYRNGEFFLHVRTKADVDAPEQPENGTVLGVDLGIENLAVTSTGTFWTGDGLDHWRTEYVERRRSLQECGTRWAHENVQSVGRKETGRFEQYLHRVANELVGEAVEHGCPHIAFERLTDIRDRMPRARKFHEWAFNRLYENVSYKAEARGISVEQVNPRYTSQRCSTCGFTVEANRPSQDSFCCQSCGYQNHADYNAAKNIGLKLLRSQIGTEGGAPVGVRLNSGMLNTSGLTSAPSESVRVGVHAECHGR

SEQ ID NO: 14879 - protein, 443 aa, Okeania sp.
MYCCQQVLVGKNPELIATLTFLCEQSHKLTNMGIYYGRQLYFKSQKGIGKFDLEKVYKNNNHYKVLHSQAAQQVLSTVAESFRSYYSLIKAYTEGKIADRPRIPNYRKKGKGGLATVSYPAQALKLKGNQIRVPLGNTCKRWFGLDCFYIPMPSNLEFNALKELKILPRNRYFYYEFVYEKEVVKPQLNQENVLGIDHGVNNWLTCVSNVGTSLIVDGKHLKSMNRWYNKQISTIKENKPLGFWSNKLAAITEKRNRQIRDGINKAARIVINHCLEHELGTIIFGWNKGQKNEIKLGHKKNSEFVPIPTARLKERIAQLCSEYGIIFIETEESYTSIASFLDGDYLPNYGEKPNDWKPSGKRIKRGLYRSGNNCFVNADCNGAANIITKVSRKLGLNLSRLCRGALTCPQRVYLWSAKNKRSNKDLSVLRSLNLESPWLQSGE

SEQ ID NO: 14880 - protein, 371 aa, Bacillus sp.
MILSKKIRLKPTPEQETLLWKSVGTARFIYNWTLNQQDINYSSGGKFLSDNVLRKELTQLKKGELIWLNEVSNNVAKQAVKDACNSFKRFFKGQSKFPRYKSRKRSKPSFYNDTSKLKIKVGQVLIEKIGWIQTSEQVSMDCKYTNPRVSYDGKYWYLSVGVEQIFEEVELKDFSLGIDVGIKDLAICSDGSIFKNINKTRTVKKLEKRLRRLQRKVSRKYENNKEGNRFAKTCNIIKIEKQIRLLHRRLTNIRKNHLHQTTSAIVKTKPSRIVMEDLNVSGMMKNKHLSKAIAQQGLYEFGRQIQYKCEKYGIEFIEADRWYPSSKTCSSCGSIKKDLKLSDRKYICHCGFELDRDLNASINLSRYQLAM

SEQ ID NO: 14881 - protein, 422 aa, unknown
  TnpB Polypeptide
MQLSRKVKLYPNQTMTKVLDDLCNYRRYCWNQGLELWNELYDQRVEMVPASLRKKSQLAIKDKTIKFSKEEQELLDMFQSPSHHIVLNLLVKDKEDWQYQLSSRVLQLTIKDLAQSWSKFFNSQKSKSKTKSKTKKLKVGKPSFRSKKNPKQGFKTDRAQIKNGKLVLDKPRAYKDNWYDIPFRGYNLPDGKIKYCSITKINDSYYASLVIDCPEQPLPKTGKKTAIDANVNHFDYTDGSFAVCPKELDVLYGQIKHYQRLLARKRKVNGKKATQSNQYFEVRTKLQRCYERVTNIQDDLLHKFTTMIYHNYDTVVIEDLNVKAMQMSKKAKNLHRSLFGRFRMFMEYKAIKFGKELIMADRYYPSTQKCSNCGYVKTGDDKITLSGNKKHGTKHNEYICYECGFEADRDYNAVMNLLALAN

SEQ ID NO: 14882 - protein, 462 aa, unknown
  TnpB Polypeptide
MPSEHILENNELDKFNLSSIIKSFKVRKVRGFISANQFENLKSQLKHQTKLYNFTLKYLYDHFGRFNINRYLNDSTTNIQYLVLDIRQRYMLDLTNGKKNRWNIKLTGIHSQAAQEFIGQTIRNFIMYRKTYLIPRSKWSDEAKAQYKAKNGKAWYRAGALKFKNPNETTEVLTLPNNRQIKFLDRNCLYIQSIGHVMVNYDLSKLDPSDIAQVKFRIRGNGDVEVQLVIPYEVERQEAKTAVGYDWGMFKNTVWTSNTGEKIKLEDAFLEELKVLERQIQDLDKQMKLHRKGTPKYKKLAKKREKLYAKHTNKRENQFRHDALTMLESIDVVALENLDSFTMRKPGKANAKTKGFNSKLSVLSPYKQIQFIIQLANRLGKTVLLVDSKYTSQFDHGTTNYRKHGLDERGWYNELGEWIDRDINAAKNILIWALNPELHGRLIADEEFKAKYTDWTQLVKVN

SEQ ID NO: 14883 - protein, 409 aa, unknown
  TnpB Polypeptide
MTESDKILVEKQIIKLEHPLYNKLDKLCLLSKNLYNVTLYTVKKHYFKTGKYLPANAVITQFTKKNQKDFRALPAKVSRYTIRFVEQNMKSYFKLLELKSKGNHSKPIGLPKYLHKVKGRQALYYHRQALVLKENGKVKLSKSDIILNTTVPIKNIQYLQIVPCGNHIKVFIGYHKTKPIKKQSSKRFASIDIGVNNLMTVTSNVFHPIIYNGKPMKSVNQFYNKIKAKEVPRLKKVNNTKDSKKLSKLSLWRENQISNYFHKVTSDFVRVCKENDIDTVVIGRNIGWKENLNLGSRNNQQFKMIPFLLIYNMLSYKLEMAGINYVEIEESYTSKCSFIDKEELTHHDSYVGRRVKRGLFKSKNGKKYNADINGSLNILRKYLTNQNTYSDELHEELVRHMTNPKRITL

SEQ ID NO: 14884 - protein, 416 aa, unknown
  TnpB Polypeptide
MYLAHKVRLYPNKSMSAVLDNLCDYRRFCWNQALDVWLSLYRQRQEHLPNDLRLKARQAVKDKSISFTDNEKTLLNQYPAPTYYTVRGLLTKQKQEWQYQLSSRVSYLAVDDLAKAWKKFFNNNNKKNKVLRAGKPTFRQKKNPKQGFKTDRAQIKNSRLILDKPKAYKGDWYSIPFKGYDLPDGKIKYCAITKINNTYYASLTVECPEQPLPKTGKITAIDANVNHFDYTDGSFVVCPKRLDYLYEQIKHYQRMLARKRKVNGKKVMQSKQYFEVRTKLQKCYKRVTNIQNDLLHKFTAEMYHNYDTIVIEDLNVQAMQMSKKAKNLHRSLFGRFRFQMEYKAKKFDKQIIIADRYYPSTQKCSNCGYVKTDDDKIGLDGNKKHGTKHNEYICYECGFEADRDYNAVMNLLALAK

SEQ ID NO: 14885 - protein, 447 aa, unknown
  TnpB Polypeptide
MTENNSQETLALTLKLKILPESQEQVTSFKQTMTTYKDACNIVSQYIFDNIPKAAETKSMSSLLSAMNLQKVATINNERIYTILRTNLELPSQIANEVFKTVVSNYKTVQTMLKKQTVANDYQYDSDGNILLYKNGRHKGEPKLAYVYKDLTFLKKPLCYKKPQLALPVNRSYSFINDFSKASISTINGRIKLSVKLTAKQKELFTNPDWKRGRARLVQTGNKWFLHVSFTKNVSKPDIAAFDNIIGIDAGLRQIMTIYNSKTGQTSFKNGQFVKKKRQHYAKKRQSLQSKNTKSAKRRLKRLSGRENRWMTDINHCLSKTLVSENPNTLIVVEDLTNVTFDTVNNRKKENRYEHHSWAFYQLQQDIAYKAREHGSYVIKVNPAYTSQRCPKCGKICKENRDKTNHIYHCNNCHYQSNDDRVAAMNIVQLGQMKQKGIKKPSFKTIN

SEQ ID NO: 14886 - protein, 412 aa, unknown
  TnpB Polypeptide
MTDNTMLLVEKQIIRPSNPLYKELDHLCFLSKNLYNATLYTIRQHYFETNKYQSFFTTVKNFTKENQVDFRALPANVSRYTVLLVDQNMRAFFALLKKKKANQYTKPVRLPKYLDKINGRQVVHYNKQFLGFKKDGFVKLSKSDIEFKTKVPKSSIQYLKLVPCGNHIKVLIGYYKTKKKTKNTQKRIASIDVGQNNLMTVTSNVFHPVIYNGKPVKSVNQFYNKIKAKEQSRLNKQNNVYWSKKLGQLTLWRENQINNYFHKVTHHFVNYCIANDIDTVIIGRNQQWKDSINLGKKINQNFVSIPFGKLYDLLKYKLELNGINYIETEESHTSKCSFIDKEEITHHDSYVGRRIKRGLFRSKEGIKYNADINGSLNILRKYMTKTGTYTDDLHEELVRHMTNPRKLKVKNK

SEQ ID NO: 14887 - protein, 429 aa, unknown
  TnpB Polypeptide
VISYAINKKVVLYPNKTMAKTLDNLCDYRRYCWNHGLELWNDLYDQRTEMVPASLRKKSQLAIKDKTIKFSKDEQELLDLFPSPSERVVRNLMVNDKDDWQYLWSSRVLQLTVRDLAQSWSKFFDSKKFKTEVKTKTKTKAKTKKIGKPSFRTKKNPKQGFKTDRARVINGKLVLDKSRIYKGDWYGISFKGYDLPDGKIKHCSITKVNNKYYAYLVIDCPEQPLLKTGKNTAIDANVNHFDYTDGSFAVCPKRLSTLYAQIKYYQRLLARKRKVNGKKATQSNQYFKARTKLQKCYKRVTNIQNDLLHKFTTEIYQNYDTVVIEDLDVQAMQMSKKAKNLHRSLFGRFRLFMEYKADKFGKELVLADRYYPSTQRCSNCGHVKTGDDKIGLDGNAKHGTKHNEYVCYECGFEADRDYNAVMNLLSLIK

SEQ ID NO: 14888 - protein, 365 aa, unknown
  TnpB Polypeptide
VKLTAQVKLVVTSDQADALKRTMQAANAVCNNISAWAWTNQTFRQYPLHKAQYAAQRAESGLTAQVIVRAIAKVADSYKLDKRTQRTFQPTGAIAFDDRILNWYVDKEQVSIWSVDGRLKLRFACGEYQRGLLAFRQGEADLAFVNGNFYLMATVSIPDPPFIETDGVLGIDLGIVQIATDSEGNQYSGEAVKACRRRSRAHRSVLQKTGTKRAKRTLKKMSRKASRFSRHVNHVISKQLVQSALSSRKALALETLTGIRERANGFSREMRWQMGNWAFDQLKGFIAYKAKKAGIAVYFVDPRNTSRTCSACGHCDKANRKSQSQFLCLQCGLQANADMNASVNISRKGLEARANVRTPKVAAFG

SEQ ID NO: 14889 - protein, 371 aa, Clostridium sp.
MILSKKIRLYPTKEQEQKLWQSVGTARFIYNWTLNKQEENYKNGGKFISDNNLRKEITQLKKNELSWLNEVSNNVAKQSVKDCCNAYNNFFKGLADKPKFKSRKKSKPSFYNDTSKLKAKSKAVLIEKIGWVKTKEQVDINIKYTNPRVSFDNKYWYLSVGMEVEQPITQLTDESLGIDVGVKNLAICSNRMTFKNINKTKEVRKLKKALKRKQRQCSRKYDMNKKGKEYAKTKNIAKLEKQIKLIHRRLSNIRLNYIHQVTTKIVKTKPSRVVMEDLNIKGMMKNKHLSKAIAEQCLYDFKTKMKYKCEFYGIKFVEADRYYPSSKLCSCCGSIKKDLKLSDRVYKCSCGLNIDRDYNASINLSRYKLAI

SEQ ID NO: 14890 - protein, 208 aa, Azotobacter sp.
SFARHQQRLARAQRQMARKTKFGHNWLKAKARVRRIHRQIVNARQDYLHKASHAISKSHALACVEDLQVSNMSRSAKGSAEQPGRNVRQKTGLNRSILEQGWGEFRRQLDYKAQWAGGWLVAVPPQHTSQQCPECGHTDADNRQTQSLFLCVACGHSENADRVAARNIRERGLKTLEGQDDARFACEVSGAVMPPAAGTHRGESALLG

SEQ ID NO: 14891 - protein, 408 aa, unknown
  TnpB Polypeptide
LNFVSRYAFAHGKMSNKIGLQAGTYAELRATFRLPSQLTCSVSRQVGATYKGLWTKVKQNTQARRDNRTKKRYQGLDAAPKYVSPTLTYQYGKDYSFKKDQHVSVLTLDGRVVMPYTGYNKHVALIHSGGNIGAAHLWYDKPKKTFYLVVSLEVETADPSPDVQTRVVGVDVGVRYLAVTADLTNGCTFHEDKRVVAHANHYERLRKRLQQKGTRAATRRLVAVSGRERRFKQDANHVVSKRIVDQYPHELIGLENLTDIRERTRRKRGKNATAKQRKANARQSKWAFAEVQSMIAYKARMQGSLTVQVDAHYTSQACPLCGHTARDNRPHKGLLFVCRGCGYTLHADLVGARNIALRTSLIRQDWVRTGELSVRPDASDEEAKAVRLKRYAELRWSPDTSPCVPRVG

SEQ ID NO: 14892 - protein, 476 aa, unknown
  TnpB Polypeptide
MTTTIQISHKIEIASPSNKFKTYCRKAFGISRFAYNWALGKIIEQREQAIASAYKITAIIGPISPINKAYEFIAPPIIKPKKKIPFYDVMALKKEFNAIKKKEFPYCMEVTKYAAQQPFLNLQKALKAHLDSYKKGSTRKVGFPKFKKKSATSGSFYIGGDQVVIKEKQTNCKSKDSKIKISENKQYLKIPKFGWVKLTENIRFKGHINSCVISQQGERFYASFNIEISEDEYKRTHKGNEENTEHTIVGIDVGLKAFVTTDAGLLIQAPKPLKRLELRLKRAQRVLSRRVHPKAKGDTTKCSNRYKKQRLYVSKLQRRIANIRKDYTHKVSSLLIRHYQYLSLESLRVQNMMKNHKLAKAIADVGFSAFKTQLLYKAQYNHREVFEADTFFPSSKLCSNCGAIHKHLTLADRTYVCPSCGFTIDRDINAAINLREKMKKTLVGGVTAEFMRVDPHRLHEDLAINQVKTMAYEARI

SEQ ID NO: 14893 - protein, 650 aa, unknown
  TnpB Polypeptide
MSHTGNLKTSTMYNRKLSENGLVKDLSAINLFSTLLGLPGFTTWTPSESLFADPALQPLMNLILPHPKSAEYCMLVYLVKNNQMTLLDKLKYLKHDSLTQKLSVISGQELIIRNPASPSWWTESVAEKSDKLWLPTKTVFLGSDMNCLKECVSTMGVKSWFSVKKTRSTLDLNLKPKSYKRTYSASLMSSLPDKTVEGQLNSEKKKEATVNGIMKIRLYPTQHQKEKLQQIFNANRYAYNKIVEVIGDKLFDLNLKTPEFTLIKKHARRYVVKTDMRKMKSNNELNVSDDIINAPEEALDSGFRDVIKARKSTIALSKAMKDKTGKGFKLNKLKYRSKKYSYSETIEIKSRGVKQVENNGLFVKFWPEFFGPEKVKKADASGPPVKKRRTKIQIAEDKLKKENEEKRIEYMKQIRIMEPLPELISSIRLQKIKPNIYYLCIPVIKQTTPITTNKICSIDPGVRTMLTVFDPEDKQVYMIGNNVDELVKRSKIIDKMKSRLRNFKGKRNARYKLKKEMQFVQRKIKNMTHDMHHKTSKFLSDNYKTIIYPKFNVKGMCNKKYRNIGKDTARRMYLWAHYKFRELLKYKTALRGGKVVDCTEEYTSKTCSYCGRLNHALGASKTFKCPFCKYEVDRDVGAARNIYLKNHHLV

SEQ ID NO: 14894 - protein, 557 aa, unknown
  TnpB Polypeptide
VRRCRVSGLRPIAGPFVAAAPAGARVRARLRVSPQDEAVLRAAGTHLGSLAGRDLAARCAEGRLDAQGRAGSRARRKRALTAESSSRWAGAITRTSEDQVRLAGQNLRAERNTLLARIRKIEARLPVPAGGKACRVRGYATPAGRHAKTVRLHALKARLARVDRQLEAGAVSVARGGKTLLRKRSNLAAARLTQEQWRQQWASARLFLTADGEKDKAWGNETIRWNPGEGWLEIKLPAPLAHLANRPHGRYRLSCPVAFAYRGDEVAAQAASGAVRYDISHDPARGRWYIDASWKAAPVPAPSLEDLRRHPVLAVDLNHGHLAAQAVTPDGNPSGPPVTIPLALAGLPASQRDGRLRAAISSLTCLARQRGCRAVVIEDLDFTDAREQGREHYGSRPSAGRRGRGFRRLVAGIPTGKFRDRLTQMAANAGISVIAVDPAYTSRWGREHWLAPLRQQASPIATGHHAAAVVIGRRALGHRARRRAGVTGGDQRISRRRAAPRAPVAGQATRNGRPREAQRQPPRWPKTATADRTRPLDQATQDRPGPPASQDHVPLAR

SEQ ID NO: 14895 - protein, 395 aa, unknown
  TnpB Polypeptide
MLAVKVVRQRYQASADLLRLLDEFRRMVNICVAIGMQENVSSLKTLSLRSYRHLSHDMLGYYRLGAISTATRMLRNHRSVRRKNPRTRLPYARKLMLTTCYGFKIENNLLRLPVKPRHYMSVKLNSHTIRALSGFDARSITLTPVSVSISYSKERVEIEPEGYVGVDRNLDNVTIASPDGTVRRFDLPKATEIKSTYRLVKSRFIRNDARIARWLFRKYGEKQRNRVQSLLHSASKRIVEEAKTKRYGIVMESLTGMRRLYRKGNGQSRNYRARMNSWSFGLLQRQIDYKARWEGVKVIYIPARNTSKRCSICGYKTLEGIQRTLWCPKCGTILDRDENAARNLAAGGLRFSPNGPPYEAMVEERELENATLILKVDGGKLSQQPTTKRINPTET

SEQ ID NO: 14896 - protein, 447 aa, unknown
  TnpB Polypeptide
MKKGKGSAKPEQNETLTTEDCKTMQLVEQQVIDRKDPRYKLIDDAAFKSKNLYNAALYEIRQAFIHQSLYLSYEEMDKRMQQHEAYKALPAKVSQRVIKQLADVWKAFREAQATYKEDPSRFTGQPNLPKYKHKTKGRNLLVYTLQAVSGGETLHKRGSKNALLQGKIKPSRLPIEVKTQQDTFTIDEVRIVPCNGYYIVEVIYSKEPVQAQVDPSFCVAIDLGVTNLAAITSNREGWVPRLVNGRTLKAINQWYNKRMKELKLCLPKAERERVTRQMERITNKRNRQVNHYLHAASKVIIDFLVKEGVGTIIIGKNPLWKQEVNNGRHNNQNFVCIPHARFIDILTYKASLVGIQVELQEESYTSQASFLDLDDIPVYKPNDVTKSTFSGKRVKRGLYRAKNGTVINADVQGSYNILRKRRPDAFSKAKGVAGYVVHPVRLAVSTG

SEQ ID NO: 14897 - protein, 407 aa, Streptomyces sp.
VGRVIRAYKFLIRPTVGQAAALTAMLVDHCSLYNGALQERRDAYRHPSKTSITYGQQSAQLKDIRAFDPERQGRWSFSSQQATLRRLDKAFAAFFRRAKTGEKPGYPRYRGVTWFDTVEFPKDGDGCRWDSTPNDPVTRVRLQGVGHIKVNQHRPVDGKVKTVSVKREGRRWYVVLTADQVQPEPLPATGSVVGIDLGIASFLTTSHGEHVENPRHARKAAAKLQAAQHKLARFAHVRRDKRTANHQRAVRKVANLHGKVRRQRLDHAHKTALELVREHDFIAHEDLKICNMVTTVAPKPDPERPGGFLRNGAAAKTGLNRSISDAGWGVFLTILHAKAESAGRDVIAVDPRNTSRTCPECGHVSAENRPTQEKFHCVSCGHQAHADHVGALNVLRAGLVRRVANPA

SEQ ID NO: 14898 - protein, 423 aa, Thermus sp.
MWVNQAFRFELSPNATQRRALAQHIGAARFAYNWGLEMALKARAEGRRLPSAPELHKAWNAWKRENAPWWTEVSKCAPQEAFRDLEKALKNWQKGKSRFPRFKRKKLTPDNGARLTGSIRVFSRHIGLPRIGKVKSKEPTNKLLKLLEERKARILSATLSREADRFYVSLTCEVERPDPKPKEVRSEDDVVGVDLGLSSFAVLSDGTRIEAPKPLAKKLKLLKRRSKQLSRKEKGSNNSKKAALRLARLHRKVKNLRRDFLHQRTTWLARTKPVIVVEDLNVRGLSRGWLSRSVADVGWGTFLRMLEYKAKWHGATLIVAPQSLPSTRLCSRCGHLHGKMPLSQRVFRCEACGLEIDRDLNAALNLKAYGLAHLTGPTASSAGSHAPGDSSGGGTAPLSRSTSHGSMKQEVAHRHRPVEGRNR

SEQ ID NO: 14899 - protein, 412 aa, unknown
  TnpB Polypeptide
MPAIVKDEMLVKGIVFYLDSDLPTEAKFLVEDFRLAVNNAIRAGLQARVTSRNSLVKIAYKDFREQHPRMYAQHLVSALEVAGGILKSHRRRVRKGVACRIPYVKRLMMKAENQAYKLDRRSGVIDLPIRAGCHVELRLVVSHYHRRYLDDMALTLGSLTVLPDRVIVAFRKDAPKPYTPDSVISLDTNERSLDGVFLEGDVAKAVKAEFPDIAMIQQRHHYRRKRLQKKKAHDRRVSKELCGREGAREHHRIDYRLHKVANSVLKFAEERRSAIVLEDLKGMRPKRNKELNRRLSMWPRKKLHQIIERKAQWKGIPVVKVDPRYSSRTCPICGRIQYSRMGAEFACECGWHLDRHINASINLLQTAISKGMAGGLRFSPGAFQHDVMMILYEPAMAARSEPNGTSGIVGVT

SEQ ID NO: 14900 - protein, 216 aa, unknown
  TnpB Polypeptide
MRSDGTVLGRKFIDFPSEKDRMYRVLGRISRFQRKHGSVQVKSRWAYAKRLNTELGRKIAGAVTGYAEENHADVIVFEYLEIKGKISGRKKQKLHLWRKRDIQKRCEHQAHRRGMRISRICAWNTSRLAYDGSGTVVRDPGNHSLCTFQNGKRYNCDLSASYNIGARYFIRELLKPLPATERSLLEAKVPSVKRRILCVYADLRELFSEMELLKTA

SEQ ID NO: 14901 - protein, 392 aa, Scytonema sp.
MRTAYQYKLRPTKQQAVEIDRWLSMLCAQYNYLLADRFNWYEQNRCPINVCPLVCHLPELRDNPDYYSQKKTLPLLKKSHPHYSDIHSQVLQDVVKRVKVTFDRFLSGDSNGKRSGRPRFKPRDRYRTFTYPQMKDDCIQGNLINLPKLGSIKLVLHRPIPTGFKVKTASVTKKADGYYVTLSLEDSTVPTVKPDINPNSITGIDMGLKEFLTTSEGEPIAIPQHYRKSQKRLRVIQKRVSRRKKGSNRRRKAVKQLGKQHKKVADKRKDFHFKTAKQLLSKYDVVVHEDLNVKGLSRTRLAKSVHDAGWSSFLSILANKAENAGLLVIAVNPRNTSQDCSSCGMKVPKKLHERWHSCQCGCSLDRDHNAAINIKNRAVGHSVLKAKSLRAQ

SEQ ID NO: 14902 - protein, 509 aa, unknown
  TnpB Polypeptide
VKYYDTVTRHRFTAENGVDAEQVERDLAQMIAWMAQAEREVLASSEFHDLALGALRGDRPTGSLNSWGRKRLSRYEFSFQKHNMNEILVSNVVGALKLYTMNVGLFQVMSAHPKETKPEGILSYYRGTYPDAPQPTSGMVRAHLIRFHKKGERKALLPGVSSNLNLAVCDTHFAPKTFRDEKDPLNVIVQVKTPTYGLTRIFLRLPENSERFSEGKICRPTIRLNNKGQVVFDIAIEHEVNTRQTKKVVGVDLGKVEPFVATVIDPRTKCRSAPHHANYKRRLGSLVKKEQQRRTLATHLYERAEVCERYNRAQHAQVLRTEAKRVSAKATRIKHEISQCIASQVVGIAEKSDAHLSLENLSWLDARGGRWPHAEIQHRIENTAKRYGLKVVKVSAKNTSRTCSRCGGKASNNSRTRVGSCIACGFELNRDVSASREIALRAISNTRNRERMRSLLRQRSLERSSAVTRQSKPVNALGGIQGHTGTSNNCLEATLIMVRETLDSRRSPT

SEQ ID NO: 14903 - protein, 510 aa, unknown
  TnpB Polypeptide
VRFYDTVTRYRFTTDDGVDAASVSADLAQIIAWVAKAEQEVLASQEFHDLAMKVLRGNRPTGSLNSWGRKRLSQYDFSFQKYNMNEMLVTNVVGVLEAYAVSVGLFQVMSTHPKETRPEKILSCYKNTYPDAPQPTSGMIRAHLRRYHVKGDRKASLPGVSAKMNLAVCDTHFAPKVFRDDSDPLSVVVQVKTPSRGLTRLYLRLPENSERFGEGKVCRPTIRLNSKGQVVFDIAIEHKVHQRDTDKAVGVDLGKVEPFVATIIDPRTKHRSAPFHANYKRRLGSLVRAEKKRRDLSAHLYEKADLCERYNRTNHANVLRTEAKRVSAKVTRVKHEISQCIASQVVEIANKSDAHLSLENLSWLNSLGGRWPHAEIQSRVENTAKRYGLKTIKVSAKDTSRTCSRCGGKVSNNTSTRVGTCSVCGFSLNRDVSASREIALRATSPSSRSQERMRCLMRQRREKRSSAVTRQSKPVTALSGIQGHTGTSSNCLGATLMMVRETLDSRGFPT

SEQ ID NO: 14904 - protein, 400 aa, unknown
  TnpB Polypeptide
VQLRYNYRLYPTPGQRQALARAFGCARVVFNDALRARQTAYAAGRPYIGDAELSARLTAAKKTPERAWLGEVSAVVLQQSLADLNAAYRNFFASVTGERKGPKAGPPRFKSRKDRRQAVRFTANARFRVLPNGELRLPKIGDVPVRWSRDLPSAPASVTIIKDAAGRYFASFVVQAGPARFPAPGAGAEVGIDLGLTSFAVLSDGTVIRSPRFLRRAERKLRRLHKSLSRKAEGSSNREKARVRVARAHAKVADSRRDFHHKISTAIIRDNQAVYAEDLCVTGLARTPMAKSVHDAGWSAFVTMLEYKAERYGRHFGKIGRFVPSTGPCSACGVNSGSKPLNVRQWTCPACGTVHDRDLNAARNILALGRRERLTACGDGVRPPLAVAAVRETGTLPGAA

SEQ ID NO: 14905 - protein, 331 aa, Lechevalieria sp.
VRTAYRCRAYPDPEQAALLSRTFGCVRLVWNKTLCERRRAYRAEGKQVSYRQTDATPTVWKKTEKLSFLSEVSCVPLQQTLRHQQSAFQNFFAGRVRYPRFKSREGRQSAHYTRSAFRTRNGELMLAKTSRPLRFVWSFGGTDVTMLDPTTVVISREPDDRWYVTFAVDVDTPPPAEPAGHELGVDLGLTDLLVTSDGERITNPRHLVRKARNLARYQRRMARCLRGSHNRRKAKAKVARAHRKVRNARQDFLHRNTTALVRSADVIAIEDLNVTGMVRNRHLARAISDAGWGEFRRQLEYKCTRMGRALVVINRWYPSSKTCLGLRLSAG

SEQ ID NO: 14906 - protein, 397 aa, Catellatospora sp.
VKRAFKYRFYPTGAQAAQLSRTFGCVRLVYNMALQARTEAWTQRRERINYNATSALLTAWKKTDDLAFLNEVSAVPLQQALRHLQTAYTNFWAKRAKYPTFKSKKRSRRSAEYTTSAFRWRDGALTLAKMTEPLDVVWSRPLPDDASPSTVTVSCDAAGRWFVSLLCDDVIAQTPAAGRVGIDAGIDSLLTLSTGEKITNPRHERTDRQRLARAQRNLARKQKGSANRAKARVNLARIHARIADRRRDHLHKLTTRLVRENQAIVIEDLAVANMVKNRRLARAISDAAWRQLRTMLEYKAAWHGRDLVVVDRWFPSTRLCSACGALGDKVALDVREWTCRCGAVHDRDVNAARNILAAGLAVTACGDGVRPQRESSRTGQSSAKQENPRATKGIPVL

SEQ ID NO: 14907 - protein, 393 aa, Catellatospora sp.
VAGHRVRVDLPHRITVTPAEPTGHRLALGLDWGVNTLLTGTIGRLTEHGRVVTDGRALRYDATPISAKLHRLRGHREHLAARRDRYTALLSGLPATDPRTAKLQALLARTSGEHDRVCARIRHLNKTLAWSAARWAVDQATAVQATVVYVEDLATLQARGRRKGNARLSGQVRGTIVDAIVHLAAKAGLAVVTVPARSTSRHCPRCGTGRTELAHVMAPDRTHQRGWKWATCPRCGLSADRDHAAAKRITARGLLAQANVRTDRKTGRHTTTAVVEGNVATVRRTAPRPVTQRTAAARVAKTGPTPKRPSASKLSHRVPDRRTAPAPPTGGQRPAGQEPKNHHQQVVASGPAHDLLKPQHHRTGFHHVRATPVIPLSGDFGPGTTRPRPARNV

SEQ ID NO: 14908 - protein, 367 aa, Bacterium sp.
LNKAYKFRIYPNKEQEVLLSKTFGCCRFLYNAMLSDKISEYQATGKMLKNTPAMYKKEYPFLKEVDSLALANVQLHLEKAYKNFFRSPSVGFPKYKSKHKSRDSYTTNVVNGNIVFGDGKLKLPKLGKVRIRQHREIPEGYHLKSVTVSREPSGKYYASLLYEYNCGEKQAADCTYGHTRILGIDYAMHGMAVFSDELNAVYPGYLRQAEEKLAREQKRLSHCQKGSSNYKKQKRKVALCHEKVRNQRKDYIHKLTRKIADTYDAVGVEDIDMKAMGRCLHFGKSVMDNSYGMFRNILTYKLEEQGKKLVKIDRFFPSSKKCCKCGSVKKELKLSERIYRCNCGSVMDRDKNAAINIREEARRMLTA

SEQ ID NO: 14909 - protein, 331 aa, unknown
  TnpB Polypeptide
MALSESASWWLHFEVLKSCSPPFFRRPFGSLRNAAQRGDHLPSRYLIPEATLTRLKTAKNGQKRPGHPEGCSILYKRSSSHDTIADSRIIHLHQKNEQKIKGKRGDGLPKLRQRMQKWVYKGLLQKIEIVARRNGIQVIKVNPAYTSIIGKFKYAPLHNIDKDTAGAYVIARRGLGFKERLPKNYKELLKDAEFLSYAIAKIEDKIAKLKQEIRDEKNEYKRNRLKSVLWKTRKELDSLLRYLRESGESKSAAQQTVDRKMERVRGRAQALQKSWQVLSVALAFSCLESLRDFSPLKRVILLRDWVGAAKQNGLVPLPGQGTTILDMYSFV

SEQ ID NO: 14910 - protein, 387 aa, unknown
  TnpB Polypeptide
MNTFNHIYSKKIKIYPTKNQKETFDFWIRKCKYLYNVALEEKIVYYKSTGKYLNIYEQKKELVDIKDFDSSWKDVPNKSLQEIIFRVDKSFKSFFKGGGFPKFKSDLNSIEFVKNDVRLKDDKLYLPKIKSSIKFSENIKNNWTSVKLNKNKDNYYLIFYYLDEKEINLINNDILGIDLGLISLYTDSNGKKVNRFSKKLVGKYYSRISELKKSLSRKMKGSIKSKKVKKLLGNTYDRLKTTKNDYLHKESLNLVKNSKESIISLGDIKIKSIIGSKYSKRGLIKSFYLNSLGIFKQYVVYKSTKNNKLCLLVDERMTSKTCSCCGNKKYDLKLSDRIYNCLVCKNSIDRDENSAINMKLLGSSSLSKDKLVSLTGNNKILTFGYNL

SEQ ID NO: 14911 - protein, 412 aa, unknown
  TnpB Polypeptide
MRSQKIRLKLTKKQERLAWWYSKVSRNFWNLLVDIDKRNNKGEFDKILNKNGNQTYYSKFYDRNIYHLNQSDYLKLAKIVVAKNYEENNQKWSWYYQPNQSFIYAFLVGELVKIRKQNKGKLNFKNVNNIEPNFNIRCDVSSDKKRPSRIYLKKNEKLQIPTLGDVRFGSIRADFDLSCKKQIAKISFDGKYWYLSYTEDVDTQITNLPRYTDGIGIDLGIKTLATVSDGTTIPNIKTFRRIRILNKRLKRLQRKVSRKYRINKCNKHNKTKNIIKLEKQIKLIHRSIRNIRINHIRKFVSDLVKKQPQYIAIEDLNVKGMMKNKYLAKDIANCAFYTIREQLIRKAKERQIAVRIVDRFYPSSKTCSNCTHYKKDLKLNQRVYHCSNCHVKIDRDFNASLNIAKTDQYVLA

SEQ ID NO: 14912 - protein, 510 aa, unknown
  TnpB Polypeptide
VAVHNVLVHPAGEFGPQSARGHALETVHQRRDGHLRRVVDQQVHVVVLAAELAQVRAEVPADLPHGMLAGVQHRSVEHAATVLRHEDQMNAKRGNDVSATAVILAVCHRPTICSGIVKVRYRYRIYPSPGQQQALARVFGCARVVYNDCLRVRDEAYAAGEKISDTEVQRRVITLAKLTPERVWLGEVASVALVQACQDARRAYKNWYDSLAGRRKGRQIRHPKPRRKHGRQSVRLTRNGFALHRQRLYVAKVGDVRVEWSRDLPSVPSSVTVIREPDGRYYASFVVERQATPLPACNREVGIDLGLNSLVVTSDGEVIANPRFLRAAERRLIRAQRVLSRRQKGSANRAMARRRVAAMHRKVRETRLDHMHKVALRLVRDNQAVYAEDLCVSGMARTRLAKSIFDAGWSQLLRCIEEKAAQYGRTFAGIGRFAPTSQVCSTCGVKDGPKPLSVRTWTCAACGTVHDRDVNAAKNILAAGRADNPNACGAGVRPHPVAADAEAGTHRSAA

SEQ ID NO: 14913 - protein, 297 aa, unknown
  TnpB Polypeptide
LDTAYQNFFREIKKGNKNQGYPKFKSKKDNKHSYRTQCNYFKNKVPSIEIKENKIKLPKLKWVKFKKSQEIKGIIKNVTISKVPSGKYFALILCEVSESQKINKSLNNIGIDLGIKDFVITSDGEIIKNPKYYHKYEKKLIKFQKQLDRKQKCSKNRNKQRIKVAKIHEKITNTKTDFLQKLSSQLINENQVICLEDLQVSNMLKNHNLAKAISEVSWYKFTTMLKYKAQWYGREIVIIDRYFPSSKLCNICGWKYHDLSLNIRKWICPECKTNHNRDINAAINILKEGLRLLNYNT

SEQ ID NO: 14914 - protein, 475 aa, Mycobacterium sp.
  misc_feature (179)..(182): Xaa can be any naturally occurring amino acid
  misc_feature (380)..(463): Xaa can be any naturally occurring amino acid
MARLKVPEGWCVQAFRFTLNPTQTQAASLARHFGARRKAFNWTVTALKADIKAWRADGTESAKPSLRVLRKRWNTVKDQVCVNAQTGQVWWPECSKEAYADGIAGAVDAYWNWQSCRAGKRAGKTVGVPRFKKKGRDADRVCFTTGAMRVEPDRRHLTLPVIGTIRTYENTRRVERLIXXXXARVLAITVRRNGTRLDASVRVLVQRPQQRRVALPDSRVGVDVGVRRLATVADAEGTVLEQVPNPRPLDAALRGLRRVSRARSRCTKGSRRYCERTTELSRLHRRVNDVRTHHLHVLTTRLAKTHGRIVVEGLDAAGMLRQKGLPGARARRRALSDAALATPRRHLSYKTGWYGSSLVVADRWFPSSKTCHACRHVQDXXXXXXXXXXXXXXXXXXXXXXXXXXXXXXXXXXXXXXXXXXXXXXXXXXXXXXXXXXXXXXXXXXXXXXXXXXXXXXXXXXXXRSLTCNGLVSIR

SEQ ID NO: 14915 - protein, 415 aa, Mycobacterium sp.
  misc_feature (85)..(144): Xaa can be any naturally occurring amino acid
  misc_feature (290)..(403): Xaa can be any naturally occurring amino acid
MARFEVPEGWCVQAFRFTLDPTEDQARALARHFGARRKAYNWAVATLKADIEAWRVTGIGTVKPSLRVLRKRWNTVKDEVCVNAXXXXXXXXXXXXXXXXXXXXXXXXXXXXXXXXXXXXXXXXXXXXXXXXXXXXXXXXXXXXTGAMRVEPDRRHLTLPVVGTVRTHENTRRIERLIATGRARVLAISVRRNGTRLDASVRVLVQRPQQPNVAQPGSRVGVDVGVRRLATVANEAGAVLEEVPNPRPLDAALKELRYASRARSRCTKGSRRYRERTTEISRLHRRVNDXXXXXXXXXXXXXXXXXXXXXXXXXXXXXXXXXXXXXXXXXXXXXXXXXXXXXXXXXXXXXXXXXXXXXXXXXXXXXXXXXXXXXXXXXXXXXXXXXXXXXXXXXXXXXXXXXXRVTTKDRSLATA

SEQ ID NO: 14916 - protein, 400 aa, Alloactinosynnema sp.
LIGMSRFRLQPTPAQERVLLEHCGHARFVWNLAVEQHSHWRQGRKAAPGYTEQCRQLTEARAVNPWLAAGSVIVQQQALNDFAQAKANFFSRTHRRPTWRRRERSEGFRIVAVKPGDLRRRSRNIGEVRVPKVGWVRFRWSRAVAVDVKSYRVTRDRAGRWHVAFAVAPESIAGPGTGAVVGVDRGVVVSAALSTGELLSVPTLRDSEKARLLRLRRKLARAQRGSKRRGKVKAAIAKLKARETDRRKDWVEKTSTRLAREFDVVGVEDLKIRDMTRSAKGTVDAPGRGVRQKAGLNRGILANGWGQLVTRLEHKAPGRVVTVDPRHTSQRCSACGIVDREARESQAVFRCRSCNLACNADVNAALNIRLAAGHAVTARGGPPLGGPANREPQRDLLLVR

SEQ ID NO: 14917 - protein, 591 aa, unknown
  TnpB Polypeptide
MPEEKKLAFCESKEVMCFNPDTVKCEKEDCKRTSQIKRQYEQIVCDQSRSNAIADNADIFTINRDVEMFYVQRIQIPYLECLNEICQLANQLRKKAVFIGRQTHFFRTRKNYADLSKRYPDFAKRILSFMETKLDDPNLTDELKRKLQNPALELSETVRRALGKFKQSESLDEFLKFELVYKKLGAIYSPLPQQVLKYVANSWTSYYEGHAIWEKNPELFDGEPRIPSTRKKEKEFLISFPAGTFTKLKNQTEHYNATRQPTRRSKKRKYVQYRESGELLLPSAFLKHFSDFPKIRTTIDLKSIIEVRIVPKKCCYEAQIVYKIFKKPKNLDDKKAYSIDIGANNLIALTNNFGEQSMLVRGRPVKSNNQWMNKKIGTLRSAQTKGIIFKKGQLLSETLEMAKIRRKRDNIINDYFHKASRFIIERCLNSGTKNLAIGYNSGWKKDLLNTEDKKMGFKQRQNFAYIPFLKLIEMIQYKAELVGINVSIIRESHTSKCSAVDFESIEHHDEYMGIRGISRKGKNKKKLIENDKPEFKRYKARGLFRTKDGYIIHSDVNASYNIGRRAFPELFNERILSIRAMLKSPISVRIV

SEQ ID NO: 14918 - protein, 316 aa, Cyanobacteria sp.
VRTAYQYKLRPTKKQAAEIERWLSMLCAQYNYLLADRFNWFEQNRSPLNSCPLVCHLPELRDNPDYYSQKKTLPQLKKTHPWYGEIYSQVLQDVVKRVKVTFDRFLKGDSNGKRSGKPRFKARHRYRTFTYPQMKEGCWQGNLINLPMLGKVKVVWHRPIPNGFKIKTASVTKKADGYYLTLALEDKTVPEIKPDFAPESITGIDVRLKDFLTTSEGETVAIPQHYRSSQKRLRVIQKRVSRRKKGSNRRQKAIKQLGKKHKKLADKRKDFHFKTANYLLSKYDVVAHEELNVKGLARTRLAKSVLDAGWSSNSRY

SEQ ID NO: 14919 - protein, 411 aa, Haloferacaceae sp.
MQYNYKYRLAPDEATRDELRHHIDVCRQLYNHCLYELNESTDGIPARYDLQGQLPDLKKWWIDLKGVHSKVLQMVVKRVYDNLSTLKAQKDNGRAVGMLKWKRPRDYRSLTYNQTGFKLKNTSGRPLLWLSKIGDIPVRLHREIPDDATLKQVTLKKEPTGEWYATFGVELDREPPAKPENPERCVGIDIGILSYTHDSDGFSVGSLDLSEERDRLERAQQKLSRKEHGSNNYRTQRRVVAKRHADLKRKRRDFLHRLSNHYAREYDLVAVEDLDAKGLMELPSNSRNRASASWGTFLRMLEYKCEREGTHFVAVDPRGTTKECSKCGVSTDKPLWVREHSCPSCGFEADRDLNAALNILSRGLNQVGVVHSESTPVETALPTGTVAVPAKRVVEAGSPGLTERTASAVSE

SEQ ID NO: 14920 - protein, 430 aa, unknown
  TnpB Polypeptide
MRQVERHLIKPSSNLYSICDDLTFKSKNLYNAGLYQIRQSIFERNKSDKENKKPVLRWSQLVSEFRKQDQTDMKALPSKVSTNIIKMLGGNISSYYQLLKGYNDKSNKKITNKPRIPGYLHKTEGRYVVEFTNQTFAKKRGENNELILCPRDLRISIPTKVDNPKCVKIIPQNGYFFIDVIYDVKEKSLKRTQKYASIDLGVDNLAAVTFSDGTNPLLVKGLKVKYINQGYNRLIAKSQSKLPKNQKTSKHIHRLFRNREMKLQSEFHKITGFLAEFFDEMSLEKVFVGKNVGLKSGISIGKKGNQNFVQIPYNKFISQLKYKCQLLGIEVVEQEESYTSKASFIDSDVIPVWKNDGKKYQFSGVRVKRGLYKTKSGKLINADVNGSYNILVKGLNNLGISLKRDKVSFHTRSLNCCNILSNKKLIKKYT

SEQ ID NO: 14921 - protein, 388 aa, Hassallia sp.
MGIDYLHYERYHIYMKTLKFKLYSHKRNRFLKRSINAAGVIYNHCIALHKRYYRRWGKHLNCAKLQAHIAQLRKRNSFWQSVGSQAVQDICQRIEKAYQLFFKHNKKGVRPPGFKKVKKYKSFTLKQAGYKILDGNRVKIGLRIYQFWKSREIEGKIKTLTIKRTPLGELFMVLVVDDVSNPLVEVKTSKIAGFDFGLKTFLTCSDGTKIESPQFFKQSLNAVKKASKHHSKKRHGSSNRGKALVNLVRKYENISNQRRDWFWKLAHELTNKFDVMSFETLNLKGMQRLWGRKVSDLAFGEFLQILEWVAKKKNKFVVFIDRWYPSSKTCSNCGHILHSLDLSVREWRCQECQSINGRDENAAKNIQAVGASTVELGNVSRAVPAIAV

SEQ ID NO: 14922 - protein, 201 aa, Hassallia sp.
LQGKPIKGFAPTSADYDARIFSFREMDWTVSVTLVEVRERIKLSIGNYQRGKLKGRVPTSAQLCKHSNGRYYIHIQLKDETPEPIQSDKVVGVDFGRRDIAVTSKGDKWDGKPIQKVRDKYAKARGSIQQKSTKGTRSTRRRCRELLKRLSGKERRYQAWLNHNINKFIITDARVASAIVAIENLTGIRERTNTLPRNKTE

SEQ ID NO: 14923 - protein, 277 aa, Hassallia sp.
LCFRNAGKNPLGQGVIKLPSIGWVKFRQSRPAPDGFDIKQARIVKRASGFYLMLTFQADTDIPDTPITGHVVGVDIGLQYFLSTSDGLEVERPRFFVEMQRELKLLQRRLKGKEIGSSNWRKTQKKVARLHERISNTRKDFHFKTAHRLCDGGETIAVEQLNLIGLSRGFLGKHMLDAGHGQFMNQILPWVCWKRGIAYRKVDARGTSQECPDCGAIVSKILKDRWHQCENCGSSKPRDVASAQVIRNRAVGRTVLQNACGDGLAGIGVKANLAKSR

SEQ ID NO: 14924 - protein, 425 aa, Halorubrum sp.
MPSKQALVKTLDFQLEIQSGNENLLYGACIESRRVYNETIRLAKNGVDWDMIPDRVAADVDLVKNTTQRVVAKALGAMENYYEYDNFDQPSHTKDGIYPLRANYEEGYNLFLTDDGDVAFRISAKPYQHVEGLLKGSDAHLDILKVGLESDEWEIGTAEVLFHNDSPELHVNVTNTDQTVRDKQDSQTVVGVDVNEDNVALTAFSEDGIKDTIVIEFPEIKFERHRYFTIRKRVQNAGKRSVHDTLEDQEERFVRDRLHKVSRHIVKWSRQFEDPCIVFEDLKEIRDSLDYGTRMNRRLHHLPFRALQHYTSYKAGFEGIPTAWINPEYTSQECPMCGHTERTNRNKKRFKCRDCGHQDHADRGASVNIAAKGIKNHQEWTVPALNSLPTVRTVRRQASGAVDAPTVTHDTVRGYQTDGITGVSD

SEQ ID NO: 14925 - protein, 419 aa, Halorubrum sp.
MNYNYRYRIEPDEAVQSELERHIDACRQLYNHYLYELRNTDEYLSYTAMQNMLPDLKDWWDDLNDVYSKVLQMVARRASDNLDRLKEKKDNGRKVGMLNWKSPREYRSLTYNQSGFELKNTSDQTILSLSKIGEMPIHLHRDIPDNARVKQVTVKQEKTGEWYAIFGIETEDDAPEKPALDEVDREDMVGIDVGIIKYAHDTDSTMVGSLDLESEYERLEREQRALSRKQEGSQNWHEQRRRVACIHARIVRKRRDFLHKLSNYYAREYDLMAVEDLDVHGMMQLPSNSRNRASASWRTFIDFLEYKCEREGTHFVKVEPEGTTQECAECGVEVEKELWVREHSCPTCGFETDRDENAAYNVLQRGLSELGVGHAEVTPAETALPTSATGGSSTVVDAKCVVETGSPTLKERTALAVSE

SEQ ID NO: 14926 - protein, 406 aa, Moorea sp.
MLMMNYRYRIYPTADQQAQMLEWLETCRKVYNYALRELKDWLASRKCDVDRCSLSKEYIIGADTPFPSYHLQQNNLPKAKKVNPQLKNVHSQVLQTTIRRLHDTWDGFRSRGFGFPRFKKWGQFKSFLYPQFKKNPIGNGRIDLPKIGKVAINLHRPIPDGFQVKQVRVLSRARHTQWYVVVTIAKDVKIPDNPPCGRGIGVDLGLEKFLTTSDGFTVERPKFFKDLKGKLKLLQRKAARKQKRSKNWEKAQVKVARLHLKIANARQDFHLKTAHLLCDQAERIFAEDLNTVGLNRGMLRKECIDASFGQFLDLLKWVCWKRGNYFERIDPRGTSQTCPLCGATVQKSLSEREHICPECNYRTHRDHAAAQVIRLRGLELVPTDCGEWKLPGHGVLSGERNLIGKC

SEQ ID NO: 14927 - protein, 406 aa, Moorea sp.
MRTAYQYRLRLTKNQEVELERWLDMLRCQYNYLLADRFAWYEQNRCSINACPLVCHLPELRDNPDYYSQKRTLPQLKKNRPWYKGIHAPVLQDCVKRVDLAFKRYLKGDSSGKRSGRPRFKGKNRYRSLTFSAFSKNPVNGNRLNLPKFGWVKMVYHRPIPTGFKIKTATVTRKADGYYVTLSLQDDTVPKIIPIEEVSNPIGIDMGLKSFLIKSDGTDVPIPQYYRKAQKRLKKVQKAVSRSKKGSNNRKKAVTKLGKAHKKVADTRKDFHFKTAKELLDNHDLVAHEKLNIKGLAKTKMAKSVLDAGWGQFLSILSTKALNAGLVTKAVNPRNTSQNCSNCGEKVPKKLKDRTHSCSHCGYTEDRDVNAAKNILKLAVGHPVCSKAYRASKALAGVGKKPTLNL

SEQ ID NO: 14928 - protein, 271 aa, Nitrososphaeria sp.
MKPSEAQLVLKDDGNLYLNVVFRQTIVLPEINTDAKVIAIDINENVVVYGNDDFIERFETNEGIIRTRYFLKRRKIQTKIRGRGLRARLLEKYKGRERRRIKEIYYKVAKEIIGKAKEVGATVIVMEDLEVCKENKDSRELNGRIHRWSYRRFQEILEYQAKLHGLNVKYVDPAYTSKTCPICGSELEESSNGHRLMKCQRCGLEEDRDAIAVRNLTRRYYEECMNRKTLRSFDCRRRIDVGSLRSPRKPPNEKREEGLKAQNTPLYYPFV

SEQ ID NO: 14929 - protein, 402 aa, Enterobacter sp.
MKRLQAFKFQLRPDGQQERDMWRFAGACRFVFNRALALQNENYETGNKYIPYTKMAFWLTAWKADPETEWLNASPSQTLQQSLKDLERGYRNFFQKRAAFPRLKKRGKNDAFRYPQGVKLDQANSRISLPKLGWIRYRNSRKITGEVKNVTVNQSCGKWFVSIQTECDVAEPVHKAASIVGLDAGVMKLATLSDGTVYKPVNSLKNRQLKLATLHRQLSRKVKFSANWKKQKRKLQSLHSHIANIRRDYLHKITSEISKNHAIIVIEDLKVSNMSKSAKGKVELHGRNVRAKSSLNRAILDQGWYEMRRQLEYKQRWRGGQVIAVPPAYTSQRCANCGHTSKENRLSQSKFVCQICGYRANADINGARNILAAGHAVLACGGMVQSGLSLKQEPTEASQVSI

SEQ ID NO: 14930 - protein, 404 aa, Streptomyces sp.
VCAGGVRRRGRRPGAGPAGGCRVSERGRAVEDADHRGEAEPRAAVAVRGVGSHPAAGAAGREARLHELLLLFERIPPGGTGGGAALQVEAGCPPGDQVHRECPMEDHRGGAAASAEDRRGKGALVTQAPVPPVERDGDPGRSGAILRLLRRGERPGRRPGADAGGRRSAVCGDRLGPDPPPSSQLRSSRGTPIAVLSDGTKIDSPRFLRRAEKKLKKVQRELSRKQKRSKNREKARLKVARAHAQVADARREFHHQLSTRLIRENQAVAVEDLAVKALARTRLGKSVHDAGWAQFLAMLEYKAQRYARVFVKAGRFEPTSQVCSVCGVKDGPKPLHVRTWTCTHCGTVHDRAHNAAKNVKQAAGLAVTACRAQVRPELVPAQREEAGSHGIHTGVRAAQRHSTR

SEQ ID NO: 14931 - protein, 345 aa, Streptomyces sp.
MPSASTRSPVSVLRWRGRSGARVVYDDAVAAREPARREGAAFPSAGALSKTLITEAKQSPGRQWLSEVSAVILQQALRDMERACTNFFSSLKGARQGARVGAPRFRSKRDARQAIRFTANARWKITEAGRLLLPKIGEVKVRWSRRLPSLPSSVTVIRDAAGRFFASFVVESDPDADLARMPDADGLPAVGIDLGLTLPQALNSVRVGGTPIAVLSDGTKIDSPRFLRRAEKKLKKVQQELSRKQKRSNNREKARLKVARAHAQVADARREFHHQLSTQLIRESQAVAVEDLAVKALARTRLGKSVHDAGWAQFLAMLEGRLREEGSGGSRRRNRVPRYTNRIGG

SEQ ID NO: 14932 - protein, 274 aa, Streptomyces sp.
VKLVVQVKLLPTPVQAAALEATLRACNEAATWASGIAFERNVKRNFALREHTYSTVKARWGLGAQAAQHVIKKTCDAYATLKANLRAGNLGKPGSKRYRRAVEKPVVFRPKGAQPYDDRMLSWQIAERRVSVWTVAGRVKDVAFTASPEQLATLALYRKGESDLVCWDGMWFLLSTCEVPEAPLNAEPSDFLGIDLGIVNIATTSDGEIMAGREINRIRVRERKLRSKLQKKNTPSAKRRLKKRRRKEARRAKDINHKIAKHVVAEAGGTSHAL

SEQ ID NO: 14933 - protein, 238 aa, Streptomyces sp.
MQLRYAFRLDPEPGQRVALARAFRCARVVYDDAVAARERARREGAAFPSAGALSKTLITEAKQSPGRQWLSEVSAVILQQALRDVKRACTNFFSSLKGSRPGARVGAPRFRSKRDARQAIRFTANARWKITEAGRLLLPKIGEVKVRWSRRLPSLPSSVTVIRDAAGRFFASFVVESDPDADLARMPEADGLPSVGIDLGLTLPQALNSVRAGGPPSRSCRTGRRSTARVFCAGRRRS

SEQ ID NO: 14934 - protein, 458 aa, Clostridiales sp.
MDKPSGEMKIHTCYTVRIRSQVEDGRDRPVDDSLMKESADTCLAALRFCTAAYLAFWAEELEPLSGVRMRKRGEELIHTTKSAPAVCPGFDRQFPYMPSGMRRAIVADALGMVKSYKSNLKNWEETDPKDRGRKPDIGFPKRYELTFYFQERDVSRISEGLVRLKLFNGKTWDWYTFRIAPAEARYISTVAETRKMLSPVVEKKRGRYFIRFCFEEQRKLIDTEPITYRILAVDLGINHAASWCVMEADGTVHARGVISLPAEEDRLRHLANRIRQYQHAGKKSRCVYRWCNSANKALAIETARAIIKTAELYDVDCIVFEHLDTHGKKRGRRLAQRLHLWRANDVQNRVTVMAHRDGMRIRRVCAWNTSRLAFDGSGKVRRGEYFQNGKRRYNYSVAVFPNGKQYNCDVSASYNIGARFFLREYLSLHPDEPLPAATQRTYRDLVSIQIRKEAASAA

SEQ ID NO: 14935 - protein, 382 aa, Chloroflexi sp.
MIKAHKIRLNPTPEQAHYFTKAAGTARFCFNWALAEWKRQYEAGGKPNAKALKKQFHAIRKQQFPWSYDVSKSVVEGAFMDVASAFTNFFEGLQTGKKRGYPKFKTKRKAKPAFYLANDRFEVGDHWVDISKLGRVNIAEKLRFSGKMLSARISKTASWWFISITVELPGNPVEAHPLPSVGIDVGLNRLATLSTGRQFENQKPLRTLLKHLRQANKRLARRVKGSKNWYKAKEKLARLHYRVACAREDLLHKLTTEIATTYGFVGVESLHVKGLMQNRKLALSFSDAALGRLLTLLTSKVTSVGGTVVKVDRFFPSSQLCHQCGWRWEEITLADRIFVCQHPQCRWQGDRDVNAALNILNEALRLVGQIDQVVSAVAATTP

SEQ ID NO: 14936 - protein, 451 aa, Moorea sp.
MILTYCHRIKPSPEQIAIMERWLELLRRHWNYALGQRLDWLRRTRCPIDRCSVSYEPIGEIPELVNYYTQQAALKETKRLFPEYKKIYAETQQVNLQRLNKAWDKWRKPDASGKRGGRPRFKKSGELRSRSVTFGQSFVFPRVNSSKAGAHLVDGILKLSRIGSIPVVMHRPLPKGFTLKQCTVVKKADGWYCCISMKDDTVPEILPVDSIKSAVGIDVGLEKFLTTSDGEAVPIPQFYRKAQGKLAQAQKVMSRRVKGSKNWKKAKHKVALLHLHLTRCRKEFHYQVAHWLCNKYDLIAHENLNIKGLARTKLAKSIHDAAWGAFLETLQAVAVKRGLLVQEVNPRGTSIECFNCGSRVEKTLSDSAKPTLRERVHCCSSCNVKIDSAKPTLRERDWNSGINILNRGLLAVGLSLNGCGKSVQDIVRVAEAVGQEQQVSFVRLRSPHHNL

SEQ ID NO: 14937 - protein, 500 aa, unknown
  TnpB Polypeptide
VSRTYPRVPYAAFDKNGEPLDLKETLDGVRKDAELVSHYALREMTEQNLALVTYFDRLKPSGAGYMMGLKLPVEAKKQFRSGSSRLERMFREQVVTNLRSWAARSGAVNQTYSGYVSAGWRRTVKGSKPKDLQPRLSLSAADKQYRCMSVTPERIELMMIVQGEWMTLHFPTPPQLLEDGCEPSVPDIWVDKNNRVMFGFHGKTDPGRPEFSSRYVVGVDVGVTNPAAYVVWDTEKKEVVERSLLGQRARSLSNKIKRTQTQVSSLKRQGKDEEAVHHRTHLSNRCKELSILIAQEIADAAWRHGNALVTFEDLSHIKNTMRFGRWFRGEVHRRTRDMVEADGGRVLRVNAAYTSRKCHVCQSDLDMQDYSQPHCTTCGTTHHRDLNAAANVAQRVNHAKACQTRKRHATKTKRIRRSKCRIKPLKHPGTKNRPTPKAPQNQPKTHTTSSGKREVSKGMRPADSRVSAGDHDVWFQTTSGTTNPKGSQATSMVDVVYPKE

SEQ ID NO: 14938 - protein, 433 aa, unknown
  TnpB Polypeptide
LTQQVKLYNKALFELRKAYGLTEFDLSAYLCKQRRKDGSPYKQLGTSEIQVIAKQVMKTLEKVLFYQIKSHKVKFRSKYDLDVSYRNNVNKQSTRLVPSNKIGIAYRLYIHKMSTFVDIPVKAFNNYQQMSLLRSEKIKYVQIVRKTIREKKVYILQIVCQGTPPSKVTKGNGVVGLDPGISTIAFASQKDVALVDLVPKNITQKEKLLKQLDRKIERSRRVNNPECYKEDGTIKKGARFKRPSNRQVRLRNRRRKVYRSLSEERTKLQGQLINRLVSQASIIKIEELNVKSLQKRSRDIRINPKTNRPFSKKRFGKAVFRAAPSAFRTALEKRALQLGIDLEVISPKDVKPSQYNHITQTFEKKSLSTRIYDLSDDYPKVQRDLYSAFLIGHIENGHYQQEQLNQDFPDFYQQMKDFLQQPIETERLAWYLK

SEQ ID NO: 14939 - protein, 442 aa, unknown
  TnpB Polypeptide
LQAIKTIIFRTQRANKRKDRVLQELISDWRGLVEFFLKKCFEHDIISKAKLHKLAYSESKTIVKEGKRHSKYRYTAMEVALSIYKSWRKLKKRGKAEKIPEVKKLFLKLYKESNGAGVYQLVEKKGMWFIKIATSPRDNVILPLIFSDYHKHFLEAWKKGKLRLGEAYLRRNPDGSYEVHIVFKKEVREKKFERRMGVDINEQNITISVLEGSKVIYATHIDISELSRLDYAYKMVRIRKLQKKLYKGYRPKLVPKERIEVIRRYSQRWRKRKEQVLHVLSKYIVSLATTFQAKIVMEDLRYIKERILSKGRKLNRRLALADFRKFQMMVEYKAKWIGVPVVYVNPKNTSRICPICGLPMTGISQRELLCKECGIVWNRDFSASINIALRDVARSVRAEAPTIPVRRRKVSSNDVRVEGIICAMKGRYSYPKMRKVRSTYPE

SEQ ID NO: 14940 - protein, 333 aa, Euryarchaeota sp.
MLKAENQSYRFDRTTGHLCVPIRAGEHVDFNLPASRWSSDFLQDSGWLLGSLTIVPGRVIIAVHRESPKAYTPTSALALDTNEDSLDGVSATADTTDLVSVPLGDVRQVQATHFKRRRKLARAKANDRRVMRRLVNREATRERSRVRQRLHVASKTIVQFAQRNRAVVVLENLTLCGAGGPSREMNRRLSSWPRREIHRQIEYKAALAGVPIIKVNPQWTSKTCPVCGARRRDRVGQDFVCLVCDWEMDRQINAGLNILKTALASSKNEALARAVRFQPGALRHDVVSPLYDLLREGGGAREEPSGVEFAASVRPDSACPVAEPVLPLDRPTG

SEQ ID NO: 14941 - protein, 381 aa, unknown
  TnpB Polypeptide
MRTSVTAKIRINPTKQVVDTIKAYTKSLQFCVDYAWKHEIKQNFKLHYEVYHTIRNKFKLPSQIAIGCIKQASGMVKKAESKPTIKRASVRYNFPRSANTKGDVLVLRLLKCRQEFKFKVPECYKRYFCWDVDESLFLRMDKRGRCFFMFTFSKEFNATEQNIRSQNIVLGIDLGVNNLAVTSDNRFYKSAKVKQIKRKFKYLRSKLQAKGTRSAIRLLKKLSGRETRYMAWINHNISKDIVSEFNGSKIVMENLKGIRKQNRGRIMNYWISNWSFYQLQNFIQYKAEMRGIEVVRVKPNYTSQICHRCGQLGSRSKGCFVCNHCGLSNFNSDLNASRNLAHPMLVERQAVVTPPYSLCDEHKSNTQVAIACEHKAKSPTL

SEQ ID NO: 14942 - protein, 244 aa, unknown
  TnpB Polypeptide
LQRKLEFIQLKSKNKKLWQSVGTARFIYNYTLAKQEELTDISLGIDLGLKDLAICSDGKVFKNINKTKKLKKLEKRLKQKQRQISRKYDMNKIKNEGGERCQFIKTKNIEKLEETTKLIHRKLRNIRDNYIHQVTTSIVKTKPYRIVIEDLNVSGMMKNKHLSDSVRKQCFNKFRQYITYKAELNGIGLVIADRFYPSSKTCSRCGAIKKDLKLKNRVYRCPHCGAVIDRDYNASLNLSMYKLA

SEQ ID NO: 14943 - protein, 514 aa, unknown
  TnpB Polypeptide
MAYKTLMLQIYRPSGHKRALMDGALLRYSQALQMLVGRCEYPVRTLAESGTRVSQRQLLALVDKKTAKDLNEFHVQPFKDSLKMEFASMAASYIEQKRASPGTRYPLAYLDAEHYRAAIAHSIGRFETGEISREKFESECRKLVERAGKVRSLYFGRYSMNRDYCLLYDEFKNRFYAKLYLLNAADAERSESATSGLSLRYVAKDMPPMVNRAGRRRYIIVPLAFGKTQLDDLKRTLENPALLRTARLMKRDARYYLMVNMTCEPAAILPAESTMGVSRSPLGGLSYTVFDLGGTFRKQGRIAAPEGAEQIVYSLCKRIVEIASENRSQVILEANGGRNDRMPVPAEFTGRCLSSRQYVKIADVLKYKLLEKRLPPPVEVSANGLFVTCPRCSGRTLRNKISDELFACVACGYASETEWIGSENLAGRLMKYQRDKVPITVLKEKDSLVFYNKNLGFECVLPQNVTDYRPMYDELGRYLQTLDGAFRNDSRRYAIWKKLRRAPDIRDAVRLVLK

SEQ ID NO: 14944 - protein, 479 aa, Actinomyces sp.
MSQKVVITRVSLRGAAPFIGLTNTGTPTYTRQPERVMEWLCDGWRYRFNAFRSRRKKYGPGKALIPLGTPDTRTLAQTRQDEPFIAAIPTLVAESAEKIENTQWWTAIARRETLRKKGVKPGKTPGWKRRKDGLGFVCWYNGGRNARLHRTGRKTGIVTITGQNPPRHRDTGVRFTIRIHITLTQDIHPYTSVNVNWTRRTLTFTSRPTESTRTPTGQKTGIDRGAIHNLATAQGEFYDLPTRRLATIDRKIRTHQKAMARAVKTAGYPTQREYRKAGVSKRFAAHDKAVHNLHAKAARIVTDTQHKATTQLVRTYDEIAVEDLNVTAMMRRPQSIPDPLHKGRYLPNGRALKRGLSRSIASARISQVATLLEYKAHAAGVTIHHVPAYYTSQRCSECGVIDRRARENQACYTCRNPQCANYRVTVNADTNAARNIAWVAFHNHGRGLSPGVEGMSDGTGELSHCPQSPRSANLGKLLH

SEQ ID NO: 14945 - protein, 893 aa, unknown
  TnpB Polypeptide
MEDGATDVVMPEVSYTSIKCKLKTLGVSEDFLKHMRENVVPRVSHIRHEATVFLDFAFKALYIHGHAGRIPLWADPKSSDLHTLFNVSISLVRGIKFTYESMSFEGAGEVLTLEECARRVLPPYRVTFATVKDCLKYIFMHHYKSDPDLGELVLPKEPGRFSSEKKESKSSEEEESKSSEEEESKVRKGNFCHIFHDIGKQLATCTTTMWATTLESRLAKWVRRSRRIKIDPDDNRHVREIINMIFNPLHTRKGVRFVEVKTKKKNKKGKSTKKKKVWDADVPAETQRQEQALVLEARDLLGITARINMIPTQHLAAVARYKANEEKKKLKKQGNLPEGEEVQRIKNPGTIESWYGNLRNTVWRNTDTAVAINAQLTILAAAEAERTDEEIKNKTKEEKRFSVFPLGKVGLVHITLSDTTIKSVFPKTARDLERTHDPGDNTAPFVAAAALFDKLFPKLRKTVGKRRLFARCIKTDGYSASVAYTPKGKLTKAEKDHLKEQSQQKKKEEKRQRANRKRKRGSNSAKQTLVLKNKGAYEAENVVLGRGDYANVDIVGIDPGRDPLAVCCNVTEVMKADAEDYKRHKDSMETTTDPDATFTPSLSALKDNHRELSKHHLYEEASYIGRSRKMHTYMKRKGLDVVARETPSLKTVSWDSLRAAIRQKRKHDAMRWFAHDKITGDNGDVSFERRGDAVYGNFAAGVRCNMDFLCYLRKQKLLDSFFANMAKESRKKGKKLIIAFGAASFTHNGGGQKTGLKPKGLIDVAKRHAIVILCNEYFTSQACADCVRTGILEGKPCDHDNVCDVDHHARHVTKTKKIKEYNQDTKEWKTKKETKTRRTKVFKASTCTTRHSGRTVDRDLYAAFNIGYIARSTLWDEPRPTRFKPIPNTPSPA

SEQ ID NO: 14946 - protein, 271 aa, Mastigocladus sp.
RSIAFPDPIKAEHIQGRFIQLPKIGKLKLILHRPLPVGEASPKGLGFKIKTAAIIKKVDGYYITLSLQDSSVPVFTPDAPEMENTIGIDMGLKSFLLDDSGEEVGIPQHYRKAEKRLKRLQRSLSRKKKGSNRRKKAIKRFGKAHLKVSNTRKDFHYKTAKKLLSQGKHVAHEKLNIKGIARTRLAKSTHDTGWGQFLQILSIKAERAGLLTIAVNPNGTSQNCSGCGTKVPKELNNRIHACPECGLTLDRDHNAAILTFHGMWKGREGSR

SEQ ID NO: 14947 - protein, 381 aa, unknown
  TnpB Polypeptide
MSVIIKRIRVRLYPTEEQEILIDKTIGCCRFVHNQTLADCKQLYEQTKHFPSMRERSANLVPLKDEFEFLKEVDAKALQQSVRDFNSSLHNFYGNRSHFGFPRFKSKRNSRQSYRTPYDNGKSDVLNSTHIKLPKLGRIKTKRFVMPEVYKIFNFTVERTNTNKYYVSICIETEVNPLPKTDKQVGFDLGLKDLLIGSDGSRYERPKFDYLNKDKLAREQKKLSKMRTKLERVNLSLDECKNYQKQKHKVAKLYEHVANCAKDFNHKLSRELVEEYDLLAFENLNVEGMRKNHKLAYSVSDVRWSQLLTFIEYKCLWYGKEFKQVDRFYASSKICSECGTYHKDIVNSLKVREWICPDCGTHHDRDVNAAKNILNQALNVA

SEQ ID NO: 14948 - protein, 247 aa, unknown
  TnpB Polypeptide
MPPDLQTISIFVRCLKSTRPNRRRSSSRKSRRDRDIEDTKKTSPVLIPKRPFSGEVFGRIRRFQREHSSRQVQSRWDYAKRLNMELSRKTAAEITKYAAEYQADVIVFEYLEMQGKISGKKKQKLHLWRKRDIQKLCEHQAHRNGIRVSRVSARNTSRLACDGSGAVVRNPENHSLCTFRTGKQYNCDLSAAYNIGARYLIRELLKPLPETERSSLEAKVPAVKRRTSCVYADLRKLYVEVNDLKTA

SEQ ID NO: 14949 - protein, 351 aa, unknown
  TnpB Polypeptide
MQTNYDLRMILTYRYRIKEFRAAMRELARQARQVNFCWNFCGETQEATRRWDRRWPSAYDLINLTSGASRELGLHSDTIQAVCKQFVVSRDTHRRRPRWRGRKSLGWIPFQCARPIEVDGDAVIFLGRRYRLWMSRKIDGEIKSGNFAQDASGHWYLNLQVEVAEKNDCGDGEIGIDLGLKTLATLSDGSKIENPRHLARYAEKLAIAQRAGCKDKALAINAKIKNCRKHHHHIESARLAKEYRLIVAGNVNASALVRTSMAKSVLDAGWSQFREFLRYKAVRHGGKYIEVSERFSTQSCSVCGALGGPQGREGLVVRGWVCAHCGVAHDRDVNSAVNILVSGRNAALRLT

SEQ ID NO: 14950 - protein, 403 aa, Cyanobacterium sp.
MHRAIKVRIYPNKTQAKKLSQVMGCCRWWYNYALNLCIDTYKATGKALKQVALNKYLPKLKKEEDTAWLGDCYSQCLQSTTLNLTKAFKNFFEGRAKYPRYKSYQGRQSCQYPQNVSIVDGCLKIPQLGLVKAVIHRIFEGEIKTVTVSKTPTGKYYASILFDTKQTFPEVTITGKVCGIDLGIKDFAIVHDGRKTSKYANPRHIKKHEKNLARKQQKLARKKKGSKNREKARKLVAKVHERISNARQDFLHKLSRKIVNNNQVVVIEQLNIKGMVRNHNLAKAISDVGWGTLINFLDYKLKQKGGLLVEIDRWFPSSKTCSHCHYQMSEMPLEIREWTCPSCGSHHDRDENASKNIRAEGIRKIQTDGTAVSASGGSVRPKGGRKSVLRHEPVKDEAHTINL

SEQ ID NO: 14951 - protein, 383 aa, unknown
  TnpB Polypeptide
MTNRKQHQITDYEKTLRDYHKTSSRHVVVFETEIPEDNKRHLFCQADLLRQCGNELLGIMKRRLEQLLRTKRYRGLKKYYGSLSEKLKALEKVKVLSVIQKKHRQELLAELKSVGDSMKEMQEAYQVTWDFCRKTMEHLRLAYGQPSIFALSRAEDVWSAVSKVLYSDGDSLHFRKRGQLPEMRAKQSNRGILIFLKNDHLCFRCNGMDLPIRCNENDLWLIDELDAVETYMKNPDTWDAYAVDQMQKGQKIVSTYRPCYASIVCKVIRGKLRVYIHLTVEGSPLPKRTREGCVKHPCSDGVVGCDIGTQTIAYTSDCEVGLENLAERGQSIRHTERQQRLILRAMDRSRRAMNPENYNPERKEDLDQIEPLPETAKETSGTL

SEQ ID NO: 14952 - protein, 248 aa, unknown
  TnpB Polypeptide
MVQLRQTGDVPLHHRRQQMGARSGHQGSRHRVPEHVSAYGQAPAIPQEGVRDSFRIDGSVIAVRGKKLKLPKGLCLRLMERFRYENQVNKINNVTISRKAGYWFASISCDVGEPARENQGAGVLGVDVGVKSLAVCSDGTVIDNPKTLYRREKRKKHLQRMVARKQKGSNNQRKAKALLARYEYRTAVKREDWLHKRPASSSGPTGYASWRISTSRACSPTIISRRPSPTARSTNCTVSSHTRPRCAK

SEQ ID NO: 14953 - protein, 379 aa, unknown
  TnpB Polypeptide
MRRAFKFRLYPNVNQTRELNIMVETHRRLYNVALEQRKLAYETRGLSINYNTQSGQLKELRASDPYQARTNFSSEQATLRRLDKSYQNFFRRCKQGAKEKGFPRFKGHDHFNSVEFPTYGDGIRLKGNRLRVQHIGTIRTKVHRQVKGEVKTATLKREVNKWFVVLSCDLGIEVVPPSTLPSVGIDVGLEAFLTTSDGHHRIENPRYQKVELPKLRRLQRAVSRKKKGSRNRRKASHQVRVLHARIRNLRHEHHHQIALFLIRLYGLIGVEDLNVSNMLKNHTLARAISDVGWAGFVNVLRCKAERAGAEVVVVNPRGTSQECSGCGNVVAKTLAERWHTCPHCGLSLHRDENAARNILARALLARTWPTDLKSDPVLV

SEQ ID NO: 14954 - protein, 379 aa, unknown; identical to SEQ ID NO: 14953
  TnpB Polypeptide

SEQ ID NO: 14955 - protein, 398 aa, Escherichia sp.
VKRLQAFKFQLRPGGQQECEMRRFAGACRFVFNRALALQNENHEAGNKYIPYGKMASWLVEWKNATETQWLKDSPSQPLQQSLKDLERAYKNFFQKRAAFPRFKKRGQNDAFRYPQGVKLDQENSRIFLPKLGWMRYRNSRQVTGVVKNVTVSQSCGKWYISIQTENEVSTPVHPSASMVGLDAGVAKLATLSDGTVFEPVNSFQKNQKKLARLQRQLSRKVKFSNNWQKQKRKIQRLHSCIANIRRDYLHKVTTTVSKNHAMIVIEDLKVSNMSKSAAGTVSQPGRNVRAKSGLNRSILDQGWYEMRRQLEYKQLWRGGQVLAVPPAYTSQRCACCGHTAKENRLSQSKFRCQACGYTANADVNGARNILAAGHAVLACGEMVQSGRSLKQEPPEMI

SEQ ID NO: 14956 - protein, 647 aa, Klosneuvirus sp.
MSSSVKLKTITFNITDKHTRKIFNGMTKISKNIYNTTIFNITIFNKYKQTIFKKIYDELSSLQIDEKNKYDIHKRIYELYDINYKEYVNNIPIIKNNSKIIYKFITECCDTSYIINDFYKVIKYLVEYNIFKNNEIIYNDQNKYEVVDSIIEKILQSIYNKNYYRTYYQLINKEPITLQNEIFINQVKNNEKLFDTKLKIDWKKKIENVYKLKICSDNNIIGRVVYSHLNDDNGQLPSDLIINIVQKAYKGYTSFYVLKDKGIKCNMPKYIPKDGSYILPYYPRSFKIIGKDIRLTVGENISKNYLNIIKDDKLVCLNSNDKSDYKYYVSKNKMKLITKKKVSKQKNYIVNNKYIDKNNKHIINAYYVNIKIPEYIKDKDIKLIEIKPIYENYSYKICMTYEEKNETKEVKSLHMVKDSISIDLGMANLMSIYDPTGIQYLLKGGYLIWLNKKYNNLIDMLKSKAKKCNNLNTTKQIRKLLIERENNINNYFNNIVKWISTTYKDKTLVIIGYNKRWKDRIDLGRNVNRKFYQIPYCRLLDKLNDKLNGMGIKVSYNEESYTSKCDALSLEEIGKKIAYNGKRIKRGLFSSSSKKLINADINGAINIMRKYYKKNGEEITEISGTRICNPKSVKIPCEVDKPAGKGN

SEQ ID NO: 14957 - protein, 423 aa, unknown
  TnpB Polypeptide
MLKTERILIKPNHSHYKMCRAVSYLSARLTNQALFYFRQSFFNGELLRWPSVDKLLKLRHPELYSLLPNAMSQALIKKLGADFKSFWQALKSYNKTPERFKARPRLPNYQKLKTGIQPGQGISVVDGMLKFPKKMNASPLLIWCADFQPTNSKGNQAKISELRYVPHGSCFWLEVVYDEEKVLPQTALDKRNVKLNKENVFSIDLGINNLVTLVSNLPDFQPVLFNGKPVKSLNQRFNKHKAELASLGHTRMIAHAAVKRFCQLNDYLHKVSYKIIQLCLEHDVGRIVIGKNKDWKQDINIGKVNNQKFVSIPFQSLIDKLVYKAQAYGIKVDENEESYTSKADALACNVLPKKTKASQKKQKHTFSGKRVKRGLYQSSIGKLINADVNGAINILRKVIGDDFIQGLVDKGAVFTPVRWTPSH

SEQ ID NO: 14958 - protein, 418 aa, unknown
  TnpB Polypeptide
MLLRYRFRVYPTPAQRIELAKAFGCARVVFNDGLRSRQAARKAGLPYVSDGDLSKQVITLAKDTPERAWLGEVSAVVLQQALADLNAAYRNFFNSLSGKRKGRRAAPPRFRSRKDNRQAIRFTKNSRFKVLGNGRLRLPKIGDVAVRWSRSLPSEAGSVTVIRDAAGRYFASFVVQTTDAPLPEVESQVGIDLGLTHFAVFSDGTKVAAPKFLRRAARKLKRLQQALSRKQKGSANRGKAVVKVARAHARVADTRRDWQHKLSTQIIRENQAVYVEDLCVIGLGRTRLAKSVHDAGWASFTGMLEYKAARHGRTFGRVDRFFPSTRRCSACGRINEKMALDVRVWDCLCGAAHDRDVNAALNVLAAGQVDNSNDRGAQVRPGLVRAPRGEAVTHPDAACSPPSVEGISVLRAKWMSRG

SEQ ID NO: 14959 - protein, 406 aa, unknown
  TnpB Polypeptide
LVVKRAYKLRAYPTRPQEGRAVRLLADHCDLYNAALQERREAWRIRNLSITYGDQSAQLKEIRAADPDGQGRHSFTAQQQTLRRLNVVFGAYFKRVRSAERAGRQAGMKGEGLQQRTVGYPRFKPRQRFNQVLFIAGDGAKWEPADGGRWAHATFQAVGRVRVNQHRPVVGRVKTLQLKREGRRWYVLVVTEAETAPLASTGRSVGVDVGVARFLTTSDGEVVANPRFLDAAQKRIVDLQRRIMHARPGSGNRRRLRRALAKEWRTLRNQRRDFHHKTARALVDTCDTLALEDLRVAAMTASAAGTVEHPGRNVAAKAGLNRSILDAGWTQFTRILVAKAESAGRRVVLVHPAYTSIDCHTCGASCARPQQDLVVCPVHGDLDADLNGARNIATRAGLGSGQASAA

SEQ ID NO: 14960 - protein, 262 aa, Okeania sp.
MKSIHTKLKLNNKQKTLMAQHAGYSRWVYNWGLSLWNQAYVDGYKPNGHKLREVFTNHTKPLYPWMKNLSSRVYQYAFINLGEAFKRFFQGLAKHPRFKKKGKHNSFTIDNCGKPIELNGWNHKLPFIGIVKSYEPIEATAQKITISRQASDWYLSCSYEFTSGTTPKITDVIGVDLSVKTLATLSDGKVFESVKPLQSMIAKLSRLQYLHRHKKVGSANWRAAQLKIAKLHRKVANIRKDALHKLTTYLAKNHSVVAQAKI

SEQ ID NO: 14961 - protein, 429 aa, Gloeocapsopsis sp.
MFGCQQVLIDDTEILPYLEFICSEANKLINCGTYYGRQVYFKTGKIISKFDLNYEYKKNCHYQFLCAQAAQQVLLSVAEAFNSFRKLKVSYNKREIVDKPKPPKYRKKGGLALIAYPKQAISLVKNRVRFPLGKKVKASFGIDSFIVPMPSNLKFEDIREVRILPRNGCFYAEFVYRQQIFKPPLDKEQVLGIDPGVNNWLTCVSNIGKSFIIDGRKLKSQNQWYNKQIASLTKDKPQGFWNEELATITEKRNRQMRDAINKAARYVVNWCIYNRVGRIIFGWNQRNKNEINLGKKNNQQIVQIPTARLKQRIEQLCEQYGIEFVETEESYTSIASYLDGDELPKFGEKPEGWKPSGKRIFRGMYRSAKGLLTNCDCLGAANIIRKVAIQLSIDLTKVGRAVLILPRRINVFRHVFRLPKSILCESLSL

SEQ ID NO: 14962 - protein, 233 aa, unknown
  TnpB Polypeptide
MYRQAVDFLIGVCLNEWGDIAKIESLMQRKSFVEKLVHKTKDRPFVKYDFDSPFYKFPSYLRRAAIAEAIGDVSSYKSNYASWTVEKNGNPPSKPKTGYTFPCLYKGDCFIRIDNYTAKIKIFIRNTWDWITIKLKKSDVNYILHHCAMRKALSPTLRRRGKEWFLDFGFQEKVDLSDTEALERRIVAVDLGVNTPATISVMRADGTILDRKFCKLSKEQDSLLHALNRIKKA

SEQ ID NO: 14963 - protein, 570 aa, unknown
  TnpB Polypeptide
MPKARKKKNSSFQTTITKSVFLYGRPNKEKLVILQQMQNSYTALINRDIDLLEKNPDIVLQLVKNDKKDPQMRKLEKAIRPEGINSAFCQNAFDAAVVQVSGHLNNIRLDLLPEGMGIFAQSKVLFAMSVMGCSKQKMEETMRQIEGTFYEDCAKKLHEMSEKDFSNLQLEFQERYASKSLEYRVPKLRFVSVPLDSRLMKIEQSTDTKMPYVIIITNPLKTRQRITIPIDTSGHFLHKIQNNKMAGTVLMQVRKGNLRIGWSYDSARQQPATTNCIGVDTGISDCFHTSDGRAIGSMSPVIDFYHEEVEPAFAELASLRNKKRKIKHFLRKHDLPEDVRRSLIKKMDHLERMIQTAKAPYRKKRCYYALLDHEIKKSVTTYVDSISKDTLTTIEKLDIKEFNNSRKVNGMFSTFARGKLQRKLMEVLNQKGCDFFEVEPDFTSQVCPVCSNLKAENRHSKGFCCTSCGYQDDADHVGAVNIRHYLNEYLLKYGGHIGDGIRPSERRKGYATKMISLALEECKKLGMDKVLLVCDKDNIGSVKSIINNGGVLENEVLKEGKLIQRYWIML

SEQ ID NO: 14964 - protein, 463 aa, unknown
  TnpB Polypeptide
VKVTRILRANVPTELSAICETMGFVRSDIWRRYGALGNVGKSNQDIRAEIAAAKLFSGLPADGTIRNETTRNIIDDVLLYKAVAMVNVRRAIYVRTKNKTEQKRLYTLLRNDEWQTDNFLHRQMRKHFRHGKSSVANQFIVRSDRQSSKVVDGQLVITIHIAKKYGDDITLTTTSSGKSVDLTGRNLRIIAKDGHAEVHYTTEKGDGRECGAQVIGIDKGYTEAFTDSDGQTHGQTFGTVLTKYSDKASATGKSRNKLHALEKNHRVAGRNTKADRIKANNLGRKKIDARRENAQDRLRNIAYQAAHSIVDKAYIVVSEDLTSPIGKKQQWKKFNRRMSSWAKGVLADSLDSVCTQRGAEHISVNSAYTTQMDSTTGLLKGKRVGDKFYRENGDVLQADHNAALNVLARLGDREISRFTPYLEVRRILLSRFPAQLSVNRLELGEQSRQPSADKSWIGLNTFS

SEQ ID NO: 14965 - protein, 529 aa, Verrucomicrobia sp.
MRISTGKPKRTLFARMRAGIPMNDLKCEFLRRFGITAQQFNAIHVGLEGKIASIRERLPEWIAEAESRIQRAERVIRILSAREPGSEKLHQKKRRLGSLRARLAARIVDRDSGRVRLCFGSRRLFRKQFHLKENGYASHADWKKEWRAARSGQFFVIGSKDETAGNQSCRASVEDDGSVTLRLRLPDALASDGKLLVIPGVRFAYGQEEILQALAASRVVFSQTKTGKPVRRREGVAVSYRFLRDWKGWRVFASVPARPVPIATSHLAGAVGIDINHDHLAVAETDRFGNLRRALRVDLNLYGKTEDQAKAIIGDAARMIVEMARERGLPLVLERLDLKKRKAELEVASPSAARKISSFGYSKTISLLKVGCFRAGVEGIEVDPAYTSVIGAVNHARRHGISSHQGAAYAVARRGLGFSQASDRAGGRPRQPAMAATSPLPYPRGIGRSLYGRSGRRFGGGSKRRMQRMPGREACESRPRLCSRKRGHWAQPGHCRRNPGTRTVGRTVRPTSSTTFPGSGMVVYGLRNG

SEQ ID NO: 14966 - protein, 423 aa, Verrucomicrobia sp.
MIERMRRLQAFRFQLRPDGQQERQMRRFTGSCRVVFNEALNLQMARYDAGEKRLGYAGLCKELTKWRNGDPMPSGRVAPWLADAPVHPLQQALKDLERAYSNFFAKRADFPRFKRKGQSDGFRYPDPKQIKLDQANGRLFLPKLGWLRYRLSRDVLGEVRSVTVSQSCGKWHASILAEREVEQPIPKGGAVGIDMGVARFATLSDGTFYAPLNSFKRHETALRKAQQAMSRKVKFSNNWKKAKARNQKIHSRIGNARRDSLHKVTTTISKNHAMACIEDLQVRNMSKSASGTADAPGRNVRAKSGLNKSILDQGWFEFRRQLEYKMEWRGGRLLVVPPRNTSRACPCCGHVSADNRWTQARFECVECGFEENADLVGAINVLGAGHARIACEVSGIEPPAAGTHRSGSFRFKPGLSAVGISEL

SEQ ID NO: 14967 - protein, 362 aa, Verrucomicrobia sp.
VIGSKDETAGNQSCQASVEEDGSVTLRLRLPDALASDGKLLVIPGVRFAYGQEEILQALAASRVVFSQTKGGKPVRKREGVAVSYRFLRDRKGWRVFASVPAKPVPIATSRLAGALGIDINHDHLAVAETDRFGNLRRALRVDLNLYGKTEDQAKAIIGDAARMIVEMARERGLPLVLERLDLKKRRAELEVASPSAARKISSFCYSKTIAMLKAACFRAGVEGIEVDPAYTSVIGAVNHARRHGIGSHQGAAYAVARRGLGLSERPTVREAVAPARNGGHLTFALPARNRAKHVWSFWSEVRRRLKAAHAAHARSGGLREPPAPLLPETRALGATWALPAQSRHANRRQNCSADVIDDLPW

SEQ ID NO: 14968 - protein, 281 aa, unknown
  TnpB Polypeptide
VALAGCLPVHHRPDQGPGRPQARPASTDRGAQDPRVHPQGRRRLEQGSARILAATISRTADRWFVSFTVEVQRHLPLDTRRTVVGVDVGVRQLAVLSDGTMIANPRALEDALRKLRRLNRQLARREPGSERRKKTHRRLARVHARTANIRRDALHKLTSSLATEYGTVVVERLNVGGMIRNRRLARAITDTGLAEIRRQLTYKTTWYGSRLVVADRFYPSSRTCSACGWVKAKLTLAEHTFICETCGVVLDRDLNAARNLAKLAVRRPEWLGDAKRPWSRP

SEQ ID NO: 14969 - protein, 402 aa, unknown
  TnpB Polypeptide
MASGDEGVLTLSISMRVSPEPGAVELLKRYRLVLNYAINRILSLNLKTIKDVHRELYRELREWFELPSRIALDCYRDAIANAKAWRNNPHRGRRPRVKKLRMLLHHGSGYRIEDGYVEIIGGIRLRIIGWDRRYDQYESGEARLVYKEGKMILWISKRIPRPKQYKPRDVIAIDINEKKIVYGNHEINKDIGTAVDRAYKWKILTESLQRRYSSSRYPAWKRRREVLNRIRSYHRKARNVLEDWARKVSLKIVRLAVKLQYAVAREDLTGLVEALRKLPKNHRVKLIIMGYSRLEKWIDWQAMKLGAPLAIVDPRGTSSECPQCGSKLEENGYRRLRCPRCGFEADRDIVGKLNIRRRALKILGISGGVLASLTAPQMTDVNPNRWGEPMIRPKAMTIKMTT

SEQ ID NO: 14970 - protein, 232 aa, unknown
  TnpB Polypeptide
MIVFEAKLQGTDGQYQALDEALRTARFVRNSCLKYWMDNQGINKYDLNKYCAVLAREFEWADKLNSMARQASAERAWSGIARFSDNCKKQVPGKKGFPQFKKHQQNLSVEYKTCGWKLSEDRREITFTDGFKAGTFRMWGTRDLHYYQVDQIKRVRVVRRADGYYTQLCIDVERTENHELTGRNIGIDVGLNHFLTDSAGQQIENPRFLRKDEKALKKSQRRVSRKKKGVSL

SEQ ID NO: 14971 - protein, 331 aa, unknown
  TnpB Polypeptide
MTINAIRLATSTFKSAWKNKRFKLPNFSRKSILLNYPRDFKIIDRQYLSLNTIYGRQKVEFVSGDRQRQYLDGCWQIGSGHLIKKRTGYYFNISVSKEIEDISLQKTVDVIGVDIGQRYLAVVSAPDSRCKFFKGKELKHKKERFCKTRSELQSKGTRSSKRVLQRLSGRERRWQTDRNHTVSKQIVEFAKGYRRPIIVMEDLKGIRKTAKQRKEQRYFFHSWAFNELQRFVEYKAQGVGIPVFKIKPTYTSQVCPKCGHLTKSNGLQFICSFCGFSLHRDLLGSRNIATKFVVNRQALIGNGLQSTSPEVASVDVQGLKEQFRRSSVTSS

SEQ ID NO: 14972 - protein, 334 aa, unknown
  TnpB Polypeptide
MWRDWRNEDPADNPLRLLNMSAGQQVLRRLDSAYREFVKGKRGRPRFRRIDHFNSVAFKPGDEAALKGGWLYLQNVGNVRVNWHRALPEGELKHILVVCKPSGWYVLLQYDMPEPGVAPSDKADVGIAHALALSDGTFFDSPRPLQGSLAALRRLQRSVARKKRGGTNRKRAVRKVARLQEHIANQRRHFWHKVTRGLVGTYGKIVLEDLSLGFMLQNGSLSRAAHDTGLGMFRELLDYKAIEAGVEVVAMNPRNTSQVCSACGSIVPKAVCVRVHSCPDCGLVLDRDTNSARNVLRLGRSRWGVTWPVAEGPAPAGGERAPRCSLALAGRARH

SEQ ID NO: 14973 - protein, 317 aa, unknown
  TnpB Polypeptide
MIIYVAYLTQESLLDSTITRQIRFITTDKQIATSSFKFCFGTKHLLQRDYIAFAERRDSQMSFVGSKTEFACNQLFQLHYSLKNNQFDLKLRKDFIGFKDLKGSNRYVFGKVYFRHHKEKIVRILKEKNSPLSFKIIKRNNRYYLYCTFEVQLESEDFLTRSTHGTIGLDFNKGFITLSETNQYGHLVQTQLLPYRFKSGNRTRTDLQQVIAKVVSLALSEGKDLSIENLNFNSKKTQTETKQGKKYNEMIHSLAYSQFIDLVESIAYRNKVFIRKVNPAWTSWLAKQKYCPQMKLNVHVGASFVIARRGQGYKDTV

SEQ ID NO: 14974 - protein, 409 aa, unknown
  TnpB Polypeptide
LFKRSLELKLYPTKIQKNILHSHLNSCRKLYNSLLDERRWGYRTDRVSITAKYQSSELPKIREEFEEYGNIYSQVLQNVVTRLDRSFKNFFSKQSGFPKYKGKYKFRSITYKQPGAPFGSGGFQFSNDKLKLSFVGNIRTFHKIKPSWFNDKCIPKTCTIKLRSDNNWYAHIIFDVPEENINKRYFGPKPAVGNDLGLTTLSTLSDGTEIANKRFYKNSGKKLARLQRKVSRKQKGSNNRRKSNKKVSKLHNNIANQRKDYLHKVSRNLAKNYGLVAFEDNLDGLSRGFLSKYVLDAGWGTLKRYTKYKCAEEHSEYIEVNKNGTTTDCYKCGFKVPKSLSERIHKCPRCKIEIKRDINSGKIVKQRAIESYLKAPTDCGELTPLEIEPLAASETKSLSFIVELGNSAL

SEQ ID NO: 14975 - protein, 269 aa, Tolypothrix sp.
LLLRSWISSRKTLKLILHRSIPDGFKVKTATIIKKADGYYITLSLQDSSIPVLTPDAPEMGNTIGIDMGLKSFLVDDLGRQEEIPQYYRKSEKRLKRLQRSVSRKKKGSNRRKKAIKRVSKAHLKVSNQRKDFHYKIAKKLLQHGKHIAYEKLNIKGITRTKLAKSTHDAGWGQFLQILSIKAEKAGLLAIAVNPCGTSQDCSSCGQKVKKDLSTRWHSCSCGCELDRDHNAAINLKHRAVGHSVLNSLGNVLELSGSHQEASALSVLR

SEQ ID NO: 14976 - protein, 496 aa, Tolypothrix sp.
MPLIVDSKQEAELLSRFQAGRQLYNACLNEAMKRLELVRNSELYKSARKIPRTKKKERSEAFKKAREQYRYSEYDLHSFATITSKNSKWIAEKIDFLTQQKLATRAFKASERVMLGVASSVRYKVPSRFRSVEGKTNKQGLRWKDDCLVWGKLILKPIIDSTNPVIRHGLESPVKYVRLLWRLLNGKRRWYVQLVNEGLPYQKPQNYVCDGLIGLDLNISNIAFVGDNCADLLPFAENVPTFQKEIAALQRKMQRRMRANNPNNFEPNFKAKKGRKTVVKKGKVKKGKSQWKKSSNYLKAANKKRELERRKAAYAKTQNRCVVNEILRHGKHIKTENVSVKGWQKRYGKAIGAKSPGFVQSELIRKAENAGGSVIKFSTQTTALSQIHLDGKRIKKSLSQRVHQDVTCIPEHHRDLFSSFLSRYVNQNKLVLQEAQTEYLRLEPVLLEAYQRYLTREQVGKSESTQSDSPSERVSNELLISDQIAELGKKSDVDVA

SEQ ID NO: 14977 - protein, 412 aa, unknown
  TnpB Polypeptide
MKFVKKVLKIRIYPTKMDKNDDGEKIVSINKIESNIGIRRFIYNHVLEFINNFKRLLIQNGYEDKAIVNISSCNVILKMLMHEYSFLEKAESSSRQQAIIDLVNAFKRYENPKIKSDYPVFKHRKKTIKFTFRIINNNYNIRITKDKNGHDKIKLAKLGLAKFKTSKKYRELLRRGSDKNDPSVKIKHVTVKRIHGKYFAIFNIEYIHIPETIISPRMQVGIDIGCSKLAVLSNGQEIPNLNLEKETDNIIRYQKTMSHHKQGSIRYLEAQKLYNKSWEKFLNKRDDYYNKAVSYIVKNSIFVAVQNENIISWKHNPYLSHSIQINAPRNFLDKLEKKCQQEGVTFIKLPKFFPSTKKCSKCQKINKNISGLENLGIRDWDCPHCHTHHDRDVNAAKNILNKGLEVVGTTAQ

SEQ ID NO: 14978 - protein, 299 aa, unknown
  TnpB Polypeptide
VKYGKVTIPCKYKAKDLWLWDEEKAILAYLAEPELQDAHAVDQMSKGIITDTYRPCFASLVCKKIRGRLRVYVHITVEGKAISKRRKDSTPRHYYGKGNIGCDIGTQTIAYTSNTEVGLENLAERGNSIQHVERQEALILRAMERSRRAMNPNHYNENGTVKKGHKQWNFSKRYQKLKQRHQELCRIAAENRALAIREQVNHLRSLGDCFITESPNAKKLQKRANPENPVDKNGRMKRKKRFGRSIKNRCPGYLQAKAKQLLNQQVGCMLRYRFYIVPVSTITHQIVTFQRNCHSECII

SEQ ID NO: 14979 - protein, 404 aa, unknown
  TnpB Polypeptide
MLIAYKCRLYPNRTQAEFFARSFGCVRWVYNEALAYCKQQRQTGEKHPSAIDLQKRLPELKKQQPWLAAVDSQALKQACRDLDTGFQHFFRRVKAGEKPGYPRFKSKRDNRSSFTAMQNLHVSHEDRQVKIPKLGWVRCRGLREFEGKIKRVTVSQTPTGKYFASILVDDGLPEPERLTPDQVKQIPQAEVLGIDLGCKTDGDEQQFAALSNGEIVSMPAFLKKGAKQLARLQRQLAKKTKGSANWHKQKQRINRLYEKIANRRTDFIHQFTSRITRENQAVAVEDLNVKGMMAKAKPKQDETGKYMKNGRSAKKGLSRSLSNVALGETLRQIAYKTLWRHKAYLQCSRWEPSSKTCSHCLQVDMFITLDVREWRCSNCGTIHNRDINAGKNIARAGYQAAIAV

SEQ ID NO: 14980 - protein, 416 aa, unknown
  TnpB Polypeptide
  misc_feature (342)..(382): Xaa can be any naturally occurring amino acid
MQTGRSFAAHFEDDASREAYLMWSAAQMLVYNAKVEESNYFWKFRCKFWSPEPLPKPDQKYAHLVNPDTVPWVKEVPSAVRGIGAYRFFQAMTRFMRGLSKRPHRKPIRNADRQLTLTRDCFSVKQVSQKWWELTFGSKKKTAGRIRFRAHRRFEMPAMVMITCTNQCLQLGFSYEDELTEFPETEEEILDRLRKLTPEELAERTIGGDVGVKIRLQLSNGESFNLSEIEKTRIARKDFGRRRHQRRLARMKPGSSNYRKQTRKIAKTYVYEKNVNNNFCHQTSHKIAVMEGIEVVALEDLNVAGMVRRPKPKYDDKGRAQPNGAAAKSGLNKAVTKSHFAXXXXXXXXXXXXXXXXXXXXXXXXXXXXXXXXXXXXXXXXXSGGLLLQTRGMRARGERRSERQPRDKEARRENDS

SEQ ID NO: 14981 - protein, 364 aa, Clostridium sp.
MLKAYKYRIYPNIEQQIYIAKACGCSRFIYNQMLANRIEVYEANKDILTPKEMSKLYLTPAKFKKEYEWLKEVDSLALANAQLNLDTAYKNFFRDKSIGFPKFKKKTNRISYKTNNQKGTIYIENGYIKLPKLKSMVKIKQHRLFKGEIKSVTVSKNPMGQYFVSVLVDSENIKLPKVDKKIGIDVGLKEFAVCSDGYRVPNPKHLRKSEKRLRKLQKDLSRKQKGSSNRNKIRLKVAKLHQKIVDQRKDFLHKLSIKLIRENQSIVIEDLKVSNMMKNHKLARVISEASWYEFRVMLEYKAKWYGRNIIIAPSNYASSQICSCCRYKNSDVKNLSLRKWTCPNCGTEHDRDLNASINLEHLIA

SEQ ID NO: 14982 - protein, 371 aa, Chloroflexia sp.
MKLTAQIQLRPTPAQADALRRTLETANAACNAMSATAWETGTFGQFALHKLCYADTRAAFGLSAQVTVRCIAKVADAYKLDKKAQRTFALLGAVAYDARILSFNLAGSSVSIWTMDGRQAIPFVCGERQRAMLEHQKGESDLVFKRGKWYLLVTCEAVPAGTECASGVLGVALGVTNIATDSDGTIYSGKAIKNVRYRHRRLRGKLQKKGTKSARRRLQALSGKEYRFARHVNHVLSKQLVATAKRTKRAIALEDLTHIRTRVRARRSQHATLHSWAFAQLRAFVTYKAQLAGVTVHFVDPRNTSRECPNGGHTAKENRKTQASFVCTSCGFAGLADVIAAGNISRRAAVNPPHGSRDGTPTGLAGPKPAA

SEQ ID NO: 14983 - protein, 398 aa, unknown
  TnpB Polypeptide
MEKMPYYAITVRRYNILFRHTEWFHQTQDLYNEILLFYYQLYLETFPDEQPGTQEALRILEKLTIVGRDKQPVPNPIPWKKVPLYFRRAAINTATAATKSYLAREEQEQPTEAFTESVTFYKGMYRDFQQNTISLKLWDGEGWQWCRLRLRGNTVPEEGQMMSPALVLKKDRAELHIPWKIPVADGRGARERITAESKICSAVFTGQDACTVCCILDSSGKRESSFYIKGGREYANASRQIYDRIKRSEDVQGGGGNAKANYRYWKKLKNLHEHYAHQISRQIINYCKIQNASILVLPEYNKDYGNIILASVGKNSPLRLVPSIREKLKYKAWQEGIVVLEVQQHNINSVCSQCGAKIRRKGADFQCENGHRGSRYLNMAQNLGQKCLDSFKENQKNK

SEQ ID NO: 14984 - protein, 390 aa, unknown
  TnpB Polypeptide
VDITRTVKLKIGLDKNLAQRTIQEWNDVCNYSSRVAFENGNVSNSTKLHKLTYQDLKAEFNLSSQVLISANRQVSAKYLTLRKTKQKPTEPVRFRNSAVCLQGGIRGRDFGFRKDGLSISTIDGRIKGITYQASPKLQDYLTDPDWTMGDGRLFIQRGKVYLAVSFKKTIKLIDKPNDAVIGVDRGINNIATVTDGKRVKFFDGRRLKHIRRRYQATRASLQRKKAHTNTRSIRRVLKRQSGKQARFTRDTMHVVSRRIVEFARETGNPTIAIEGLKGIANGRNLRKEQRKDVHEWPAYQLKEFTTYKAQTYGFEVIEVEARNTSKGCSSCGHTEKANRNGHKFLCKACGHQDNSDRNAALNIRLRGILSRQVLTENGLHQPALEARSLR

SEQ ID NO: 14985 - protein, 225 aa, Halobacteriales sp.
VVPSSPNKGGGGVRHAGTGDDRAQHSPRRSQERSSCAAHQKSSISEDVDLGVNQLAVTSTGVFWSGHEFDHWRREYEKRRASLQQCGSRHAHENIQSVGRKETGRFTMMLHRIANGIIAEAVENGCTVIAFEKLTGIRDRLSGASWGHEWAFERLYEYVEYKAEMYGITVEQVAPENTSRRCSTCGFTHPNNRDGENFACLKCGYENHADYNAVAGLRPAGSKVA

SEQ ID NO: 14986 - protein, 355 aa, Okeania sp.
MQSIKTKLKVNNYQKTLLAKHAGVARHAYNWGLTTCICEYESTKKRPSAITLHKRLIAEVKSENPWYYEVSKCAPQEALRDLDRAFKNFLTTPKCGFPAFKKKGKKDSFYLEGSIKIIQGNYIQLPRIGIVKTYEILPSVPVKNVRISKKADNWYISFKYECEPKTTPKKRAVIGVDVGINTLATCSDGTTYVNVKAYKQAKKRLTRYQRCLKKKESGSKNRAKAVKRLAKAHKKVADIRADALHKLTTWLAKNHSTIVIEDLNVSGMLKNHKLASAIADCGFYEFKRQLTYKCEWYASELLIADRFYPSSQICSHCGHQQKMPLHERTYNCANCGFKADRDFNAAVNLEKYVNK

SEQ ID NO: 14987 - protein, 397 aa, Blastochloris sp.
MFIQRTITIRIADDPDLRAILTEFQSIQQRISVACYNDGKPLSALALHRAVYEDVKGTISSQMTCSAIRLVAGAYASAKANKKPAQRPFQFKRPAALFLVGKRGRDARFCNDSTISIWTMAGRKRVAYTVPETFQQTLAEAVEIDSMIVIERDGRLLGRVVVMLCVPDPKGIHPVGIDLNETNALVAVDPDGNTLFVSGRDFKVRNIRTRKTRRRLQESLATHKAQHKDTRSVRRLLKRLGRTQRNRTRTFCQQTAAKLLAWALPDAVLVFERLTLPQTSKKLRVRKGTRRRLSQWQRHLMRVSVTNAAERRGVLVDDVNPAYTSQDCSRCGLRGIRKRHAFTCPHCGYEAHADVNAAINIRHRYTLLRQRGPSSTGPEALSSLAGDEGKPPLSCVR

SEQ ID NO: 14988 - protein, 366 aa, unknown
  TnpB Polypeptide
VKRNLFFGAGNGRGHDDDSSHLLVQVVRAAPLQEGVRPYRQGRHMMAVMRRAFKTRLNVNNKTGNMLARWCGISRLAYNTCLMKWNMDYRDGVAKHNYYSIKKWFNSVKYERFPFIKECSKWVPEAAIKDLQNGFTNLFQHRGNHPKLHRKGHNDSFRIDGSVVKIDGRTVRLPKKLTIRMMERIPHERRITKINNITVSHKAGLWFISVNYETDMSVCENQATGVVGIDLGVKTLAVCSDGLTVKNPHVLRKRERRKKHLQRIVARRRKGSKNRRKAVARLARYEYHTACKRRDWLHKATRTIADENAVCFMEDLNVNGMLKNHRLAKSISDGSFTNSNANSHTRRRCGTSTAGIPAAKSAPAAA

SEQ ID NO: 14989 - protein, 388 aa, unknown
  TnpB Polypeptide
MIKKNKAFKFLLKPTKKQTIFFNKTFGCCRFVYNTMLSERINSYKETGKTNSRTPAEIKKEFPFLKKVDSLALATEWVNLNKAYDNFFRNKKINFPKFKNKKNDRKSYTTFNQKNNIRFIEKYIKLPKIGLVNCRQHRQIPKDWKIKSVTISKRPNDKYYVSILCEYYIEEPKKIIPNVKNSIGIDYMSNGLGMTSNGEVLSQNRYFRENQSKLAKEQRKLSRKKKGSKNFHKQKQKINKIHEHTKNQRLDRAHKISRMLVNKYDLIAFEGIKLQSIAQNLRLGKSTNDNGFGMFKFFTKYKAEDCGKIYVEIDQYTPTSIVCSDCGAYHKDIVNSLAIRKWTCPNCGTKHDRDINAAKNILKEGFKLYNKNVRGDDSELTLATERLN

SEQ ID NO: 14990 - protein, 443 aa, unknown
  TnpB Polypeptide
MNIVSSYKVKINNKYDDSKIDKKAIHDTCLLYRDAVRFFISLIEKEWAVISAYNKNPVSLIEKLSHKTKYNPNPKYDFDSKLYKFPTYLRRAAIGEALGHIRSYFTKLEMFNETDKKHKPPKLQYKHNSMPVFYISSGGLFKWTDEYSCEIKVFKNNDWVWINLNLRPSDVRYIRKRGNVLSPTIRKKRNEYYFVFPVKSKTVIPTKINTVVGVDLGLNSLATLCVMDDKGTIYKRKFIKNNKEKDLLNHLINKKKKLQRNRKSTNSIYREINNCQNRLEIYTCREIIKFALENNVNGIVFEHLDPYIRAKGSHKEKLHLWRKRGIIKRLSHLCHVNGLKYASVCARNTSKFAFDSSGKVYRDKTNYCLATFSNGKKYNCDLSASYNIAARYFIREIIKPYKEKETCRLMLEAKVPLALNGTKNTYSDLISLNVVMQTPCFCN

SEQ ID NO: 14991 - protein, 410 aa, unknown
  TnpB Polypeptide
MIQRAYKTELDPNNVQRTSLFQHAGAARRAYNWGLGRKIEAHKAGEKSPSAISLHRELNALKKVPKDDGGMPWMYEVSKCAPQEALRNLDKAFDGFFRRCKTKAKRKGFPRFKSRRKGIGSFTLTGAIHVSETHVQLPRLGHLRLKEHGYVPIGAKITRATVSERAGRWFVSLALEEENERTVGTEILGVDVGIKSLAVLSDGTVFENPRALKAATQRLRRLQKGVSRKRKGSRNRRKAKHRLARQHYRVSCVRRDATHKATTAIAKRCAVVGIESLNVSGMMKNHCLAGALSDAGMSEFLRCLKYKVAWHGGEVVEADRWFPSSKMCSVCGEVRHNLTLRDRVFHCVSCGHIQDRDENAACNLRNMAVSSAVSACGEESSGLVHLDPVKLSSVKQEPNASQGLSLIGLV

SEQ ID NO: 14992 - protein, 415 aa, Tepidimonas sp.
LLYNFLHVLQRFPANTAGPKSAIMLIAHKIALDPNNVQATYFAKAAGVARFAYNWALAEWKRQYEAWKADNTLPKPSQAALRRQLNAIKRERFPWMLEVTKCAPQMAIIQLGEAFKNFFAGRARYPQFRKKGTHDRFTLANDQFDIDGCRIRIPNLGWVRMREALRFEGHIVSATISREAGRWFASIAIDTDCQPKRPAENQGAVGVDLGVSALATLSTGEKIEGPKPLQSLLRRLRQLGKRLSRKRKGSRNWVKAKAKLARLHARIANIRRDALHKLTAELTRRFHTIGIEDLSVRGMVRNRHLARSIADMGFGEFRRQLQYKAAMRGGEVVVADRFYASSKTCSACEHKLDVLPLSVRRWTCPACGATHDRDINAAINLKTMAQSCGVMGSVAQARGSYACGEAGSGARRKAA

SEQ ID NO: 14993 - protein, 409 aa, Acidimicrobiaceae sp.
RRLQHLRTRLAGVERRLEGGRVSICRGGSRLAKARHNLDAAGLSEAAWRERWEAERLFICADGEAGQLLGNLTVRWHPDEHWLELRLPKALEHLANRPGGRYRLSCPVVFAYRGEEVAAQAESGAVRYDVFFDPGKHRWYLDASWSFSDGELRPSMEHLRSGPVIAVDLNHGHLAVCVLDPSGNPIGAPVSVPLELTGLKASTRDGRIRQAISCVLALARTHGAGAVVIEDLDFVAWREEGRERSGRRPSRGKRAKGFRRLVAGLPTGKFRDRLVQMAANNGVAVIAVDPAYTSRWGAEHWLDPLGQISPEASGHHAAALVIGRRGLGHRARRRERCDSTRAVHRDERAADSVVSGDRRPHTEPEDREAGGQPRSRQRTLPGERAPSGDEATEDRSWSPAGQESVLLSV

SEQ ID NO: 14994 - protein, 397 aa, Nonomuraea sp.
VRRSYRFLLRPTSKQAAALAACLESHRQLYNAALEHRRTAYAKAGVTIRYGDQSGELKHIRAGDPDGQGRWSFSSQQATLRRLDKAFGAFFRRVKKGEKPGYPRFKGRGWFDTVEWPKDGDGCRWDSQAHPTATYVRLQGVGHVRVHQHRPVKGTVKTISVKREASRWLLLLSCDHVPAQPLPATGAAAGIDMGVTSLVTTSDGEHLANPRHLATSAGRLAAAQRDLAGKKRGSKRRRKAVARLAALHAKVRRQRLDGAHKAALALVRAYDLIAHEDLHIANMTKRAAPRPDSAGGHLPNGASAKSGLGRSILDAGWGVFLTILAHKAESAGRELIAVEPRNTSRTCSRCGHCTKENRLTQAEFACAACGHTAHADVNAAINILRAGLALRDAAEAA

SEQ ID NO: 14995 - protein, 279 aa, Okeania sp.
MEGNKINLQKIGNIKLIQYRPLPLGFQIKTVTISRKADGYYVTLSQEDKSVPALSCDVEPTLKNTLGIDMGLKEFLVTSEGESVPIPHKYRKSQKRLKTLQKRLSRKKKGSKRWLKAVKTVAKQHKKVADKRKYFHFKTANELLLKAEVIQYENLNIKGLAKTRLSKSINDAGWGKFLTILTVKAVSAAPPQEANTGQKTIAVNLKNTSQDCSNCGEKVDKELNIRTHSCPHCRIVIDRDLNAAINIKNRAAGHSVLKARGAKRNTGAAKREAHTIAPA

SEQ ID NO: 14996 - protein, 377 aa, Escherichia sp.
  misc_feature (112)..(174): Xaa can be any naturally occurring amino acid
VKRLQAFKFQLRPGGQQEREMRRFAGACRFVFNRALARQNENHEAGNKYIPYGKMASWLVEWKNATETQWLKDAPSQPLQQSLKDLEWAYKNFFRKRAAFPRFKKRGQNDAXXXXXXXXXXXXXXXXXXXXXXXXXXXXXXXXXXXXXXXXXXXXXXXXXXXXXXXXXXXXXXXPVNSFQKNQKKLARLQRQFSRKVKFSNNWQKQKRKIQRLHSRIANIRRDYLHKVTTTVSKNHAMIVIEDLKVSNMSKSAAGTVSQPGRNVRAKSGLNRSILDQGWYEMRRQLEYKQLWCGGQVLAVPPAYTSQRCACCGHTAKENRLSQSKFRCQVCGYTANADVNGARNILAAGHAVLACGGMVQSGRPLKQEPTEMIQATA

SEQ ID NO: 14997 - protein, 367 aa, unknown
  TnpB Polypeptide
MKIIEYKLYPNKTYLTKLEETLEQARLLYNKALENRITLWENEKKSVNYYDQAKIFKNVYPISAMLTQCVLKRLDITYQRFFKKNSSFPRFKAKGRFRSIDIRQWGLNASLKEGKLRYDKMLIRTSNHRELEGNPKIGRIVKRADGWYLQVTCDVENLPLKKKITSTIGLDVGLKYLVADSEGNKIEAPKMFRKTEMKLAKQQRTLSKRKKGSYGRGKARELVAKTHLKIERQRKDFLHKISRTYANFDMIAVEKLNIRGMLKNHHLAKSISDASWNTLLQMIRYKAENAGSYFVEVNPRYTSQKCSGCGAFVQKSLSVRTHICPECSLVIDRDTNASINILRAGIALGGEMGLPFSLKPEATRSLA

SEQ ID NO: 14998 - protein, 186 aa, Sulfolobus sp.
MARRIKAIRATVSMKIALSHSLLALVNNYVEAIRFTLFWLKENVPNPNEKEVLGRVHEELYTRLREEYNLPSKVTEDCYRDALSVYKGWYNNPKKGRFPRVYKPTVWLTPKASYNVDFEAMTVRIASVGELQILGYPRNLKEYVNWRMKEARLVVKGDKAFLKVVFEKPLEKVEAKESITVDVNMS

SEQ ID NO: 14999 - protein, 417 aa, Sulfolobus sp.
MARRGNKAIRATVSMKIALSEPLLVLVNNYVKALRFTLFWLKENVKNPEEKGVLGKVHEELYTKLREEYNLPSKVAEDCYRDALSIYKGWCNNPRRGRFPRVYKPTVWLTPKASYNVDFEKMTVRIAGVGELSILGYPRNLKEYSSWRMREARLVVKDGKAFLKVVFERPLGKVEAKSSVAIDINMSEIVVGRDETHYVRIPTRLHEVHHWKSLAENLQKKYPKRWRENKMILNRVRSFHQKARRVMEDFARKVGKWVVEIAEDFGANVIKLENLKNLVKNVDKLPKEFRDKLYLMQYRRLQYWIEWQARKHGMVVKYVNASYSSVSCPKCGKRMEEKGYSWFKCACGYENDRDVIAIVNLNRRGVSDPLDCPPNERCKPESMVGTMNHSGWEPSPFQGGEEVRLLFRIVTIKRPRC

SEQ ID NO: 15000 - protein, 390 aa, Lactobacillus sp.
MVYYWKEVVKCMTLRAIKTRIYPNADQQLQIMRNFGAGRFVWNQLLNMQIERHKNGGSYVNSFGMNYLLKPLKQEYPFLKQAEATSLQLVSRDLHHAYQKLFKEHVGFPRFKSRKYPKQSYQSNAVNGNIQAVGSHHLRLPKIGIMRFKSGRQLDGKIKNVTVRLSSTGKFYAIILVDNEVTLLPKTSRGVGIDMGVANLMIISDGVKYATKRFDKCLSRKKHYWEKRLARRRAEAKREIAWDKHNNVIEPRELSDFANYRKAKYMVAKYCEKVANQRNNYLHQLTTALVKQYDVIKIEDLKIKNLLSNHKLARAIANQAWRELRAMLEYKCDWYGKQLITVNPYKTSQRCSTCGYDDGKHALDIREWNCPVCGTQHDRDINASINILNA

SEQ ID NO: 15001 - protein, 438 aa, unknown
  TnpB Polypeptide
MSGPASATGLQLRYNYRVYPTPAQSAALARAFGCARVVFNDCIQLRQEAHATGIKITDTDVQKRAVTCAKETPERAWLSEVSSVVLVQACQDARMAYRNFFDSLSGKRKGRKLEAPKFRSRRDNRQAIRLTRNGFRLRSNGRLYAAKIGELKVAWSRELPSEPSSVSIIRDAAGRHFASFVVQVEDEPFPTTDAEVGIDLGLTTFAVMSSGQAINSPKFFRRAERKLRKAQQDLSRKQRGSNNRAKARIKVAKAHAKVRDSRLDWAHKHSTQIIRDNQAVYVEDLCVRGLARTRMAKSVHDAGWAIFTRMLEQKAHRYGRTFGRVDRFFPSSQLCSECGALDGKKALNIREWTCQCGTVHDRDLNAARNILAAGRAERLNACGEPVSLSLRGEHGSVKQEPAGASHMLAGGTPALSGLGGRQLRDRVTPSDLGGSGLL

SEQ ID NO: 15002 - protein, 378 aa, Anaerolineae sp.
MKDSTVVIRTYKYRLYPSKSQETNLFRVRDACHGLYNMVLAERKYVWQEYGETVPSETLQAFGKRYRKTFPYAQQVYSQTVQSVIERVDEAYQGFFRRVKKGEKPGYPRFKSKQQFNSFEFKQYGSGCKIDGRRLKIYGVGRVKVRWHRELIGKIKLVRIKHQAGEWYASFVCEVPRKQTITSDWEIGIDVGVSALITTSDGEKVENPKYYRAGQAKLRRLSRKLARAQRGSRHRKQALQAVQRQHRHVANQREDFLHKLTHTITNIYGRVAIEDLQINNMVKNRHLSKSILDSGWGLFKEQLQYKAAEAGVQLALVNPYKTSRKCSNCQREFVNLTLQDRWVECLCGLSLDRDHNAAINILKQAGWDTSAVANVECV

SEQ ID NO: 15003 - protein, 441 aa, Filamentous sp.
MLNLSYQYKLKVTPLQAAVIDEWLSVCRSVYNYALRERKDWVNSRKCLVDRCSIHSEYIIAADAKRPTYASQCKSLTAAKRTNPSLKLPQSQVLQQTLKQLEAAFVNMWDRGFGFPRFKKQMRSFVFPQVKPNAVNGNTIDLPKIGKVEFHNSRNIPDGFFVKQIRVIKKASGYYVSVSIQCDVDVPDVMPHGYAIGVDLGLNSFIATSENQFVKGHKFFKESEGQLKSLQRRLKNKTKGSRRWLRVKRQIGLLHEKIHNCRKDFFFKLAHQLCDGVGMIFAEDLNLKALGRSALRKACLDAAWGSFLDILRHVCPKRGVYFAKVDANGTSQICPHCGTNCGKKSLSQRVHSCSNCGYTTDRDVAAAQVVKERGLSAVGQVVPTLVEGKDEGLCPPPAGGLYTPRIGAGVYTPALSLPVTRESPLMTGRGVVNSIQQPTSR

SEQ ID NO: 15004 - protein, 328 aa, unknown
  TnpB Polypeptide
VAKRAYRYRFYPTEGQAVELSRTFGCVRLVYNRALDARTAAWRQEQRRVGYADTSALLTAWKQTDELAFLNEVSSVPLQQCLRHLQKAFTNFHDKRADYPRVKSRKRSRASAEYTRSAFRWRDGELTLAKMDVPLAIVWSRPLPDGAEPSTVTVSREHRERVALARAQRNLARKAKGSNNQAKARARVARVYARVADRRRDLLHKLTTRLVRENQTIVIEDLAVRNMVRNHTLARAISDASWSEFRSMLTYKAEWHGRTVMAVDRWYPSSKTCSRCGHLLDTLPLHLREWTCPGCGDIHDRDVNAARNILAAGRAVAACGDGVRPNRR

SEQ ID NO: 15005 - protein, 406 aa, unknown
  TnpB Polypeptide
MTITRTLVFRARLSKATHASLEAFLDEMRHLWNAALEERIDAWRKASVSITWVDQFKSLTEIRRDMPEYAGVSVAAQRSVLKRLDRAFAAFFRRHAAGQSPGFPRFRSRHRGIRSFEAPAPKIHKKGRWNTVSVKGIGKFRFAGEIDGTPKVLRIVKTPLRVTVQVVVEREAAKVVDLRPPLGIDAGIRYRAALSTGHAVPGRRLDRSELKRRQRRLSKAGRGSRGRCRKRLALAREWQRVTERERGAMHELTARLVREHGARIYVEDLKIPNMLRNRRLARSIAEQNWGTFVSLLTYKAEEAGGWVRKVSPHHTSQWCSECGALPAGKLTLDQRTYECRSCGHAEDRDVNAARNILQVGLALHPPGGVLPGAPGGSAGASGDQRGAGRKAGHRVTARNRIGGVAA

SEQ ID NO: 15006 - protein, 422 aa, unknown
  TnpB Polypeptide
MKGENCMYLTVKQQVKHLSKDDYHSIRELSHAAKNLTNEAIYNVRQYYFTEGKFLKYEKNYALLKNSSNYRTLNSNMAQQILKEVDGSFKSFFGLRKLAKKGKYAFKDCKLPHYLPKDGYTTLVIGFVRLNRNKLILPFSNSFKKTHKPVEITIPPILLDKKVKEIRIIPKAHARFFEIQYSYEAECIQRNLNQNNALALDFGINNLVTAVSSNGRSFIIDGRRLKSINQWFNKENARLQSIKDKQHFGKKTTNRQKAIARDRNNKVNDYMSKAARKVVDYCIANDIGTLVAGYNVTFQRGSHMGKQNNQSFVNIPYGLLRNKLSYLCELNGITYVEQEESYTSKASFWDKDNIPVYNDDNPKEYQFSGNRIHRGMYRTASGIRFNADVNGALNIMRKSSVVDLSILYGRGEVDTPVRIRIA

SEQ ID NO: 15007 - protein, 370 aa, unknown
  TnpB Polypeptide
MRKTYKYKIQSQKNTIKLGNTLDDMHAIHVHIMRLQRRYYRRYEKNISAYCMNAHVAKLKKRTKPHWRALPSQVIQDVVLRMGKAYDAFFRNMEARKVGKMTEKVGKPHIKPQYKYDSMIFTQAGYELQDNRIRINCIDTWFSFHKHCEIIGDIKTITIKRDLCGDYWICFSCDDVDDTEVKTKTGKRAGFDFGLKTFLTSSDGEKIHSPQYLEQSLNKLKSLHKSVSRKVYKSGNWYRCKRALSRQYRRVARQRLDWQWKLADMLCSTYDTIVMETLNIDGMKRLWGRKISDLACYQFIQLLEQKCAKHGKQLIQIGQWTPTTKPCSSCGYQNKNLTLEDRQWTCPACGTTHDRDINAAINIKQAGLAA

SEQ ID NO: 15008 - protein, 369 aa, Campylobacter sp.
MSANNNELISISHKVELKPNNKAKTHFKKAFGCARLAYNWGLAKWQEYYKQGIKKSHLELKKEFNVIKKEQFPFVYEVSKYATQQPFLNLNLAFQKFFRDLKQGKVSYPKFKKKKDNFGSYYIGGDQAIIKDEKYLKVPNLGLVKMKEKLRFNGKISSFTISQSADKFFVSFSMQISKDEYLKTHNKAKNNNLALGIDVGLKSFLSLSNGLEIKAPKPLAKFNRLMIKRARQLSKKQHAKTKQEALQGIKKSSNYLKASIKLNKLHRKIANIRSDFLHKLTSSLVANVKYFCLEDLNVKGMMSNHRLAKSISDVSFYEFKRQLEYKSSYNDKEIYQVDRFYPSSKLCSNCGTIKENLALKDRVYICDEC

SEQ ID NO: 15009 - protein, 439 aa, unknown
  TnpB Polypeptide
MLEVHHTHQAKILNHGQVEESLDRHGWDASKLWNVANYHSREVWEETGEIPDHEELKDELKTHNKYKGLHSQSSQRVLEELAEAFNSWYSSDDDRDNPPGYRKENYYDNQGRLVHEEHPRSTVTWKQNGIRHDTKNNRVRLSKGANHKEHPKAWEYILVEYETRPGAEVENLQRVRAVYDQSKERWELHLVCKDEIEIPNAPGNETAGIDLGISNFAAVSYSTEEADLYPGNRMKQDGYYFPKEIANCDDSGGDEATRLHAKWSERRTHFFHSLSKHIVQRCVEKGVGRINVGDLEGVREDDNGESKNWGRHGNLDLHGWAFDRFTKILEYKAKVEGIEVVEVSERDTSKTCCVCGKEDDSQRVERGLYVCEECDAAFNADVNGAENIRLDINNTKSNSESAPGLGGDRSTGWLAQPGVYLYDLSSGFQPQEQVVDCKP

SEQ ID NO: 15010 - protein, 330 aa, Klebsiella sp.
VAKRHAITAVAAVAQRSGARLQEFLPEACSIPSFQETRPKRCPQGVKLDQTNNRISLPKLGWIRYRNSREVIGEVKNVTVIQSCGKWYVSIQTEYEVPEQVHKAASMVGLDAGVTKLATLSDGTVYQPVNSFKASQRKLAMLQRQLSRKVKFSASWQKQKKKIQRLHSHIANIRRDYLHKVTSEISKNHAMIVIEDLKVSNMSKSAKGTAERPGRNIRAKSGLNRSILDQGWYEMRRQLEYKQLWRGGQVLAIPPAYTSQRCACCGHTAKENRQTQSKFVCQVCGYTENADINGARNILAAGHAVLACGGMIQSGRPLKQEPTEASQAPV

SEQ ID NO: 15011 - protein, 447 aa, Halophilic sp.
MVMKRTNQFNVRPRSEKERKVFIRWLDASASLWNETNYARRQAFLSDESVWDADTGNLEGKYKGVLSSSVAQQIIRKNSEAWRSFFGLNEKYHAGKLDERPSPPGYWGNEEDGRVLRTYVRNDQYTIEYGNRSRLEVPIGSELKNELELNRNQRLRVEIAGDPKWSGEQNRVEIVYDETAETCRAFQPVTVDDSRLDSPLASEEAALDVGANNLVACTTTTGSQYLYEGRTLFGQFRETTEQIAHYQSRLEDQRKSSKRIDRLYRKRTNRRNHAQDSLVRDLVECLHEEGVSTLYVGDIKGVLDTHWSPRVNEKTHNFWAYRRFINRLEDVCEECGITVNEESEAWTSQECPNCGERENTIRHEDSLTCPYGFEGHADLVASESFLRQQNSAVGAMARPVYLKWNKHEWREHHNPPSVVVETTANEEYTDQSTTSGGNVALGEAQND

SEQ ID NO: 15012 - protein, 448 aa, Halophilic sp.
MEYSHRYHAYPTQEVAGRLEYHLDVHRQLYNHVRWDYENSPKGEKPSEYDQNNKLPKWKQRWPIFGELHSKAAQATVARFHHNLTVLRELKEKGYKVGRLTWQAPVDYRSVTYNQSGFDLDEKRGCDRFVYVRFSKIGWVKIRYHRPIPDHATINEVTIKKETTGEWFVSFSLETDEEHVPEKPALDTLDASNSIGIDLGIRNYIHTSDGKTVDWLDLEDEYERLRREQRKLSRKEHGSSNYEKQRVEVAKAKRRIRRKVLDYQHKITTWLVREYDAVFVEDLNVKGMLEQSHNARNKQDAAWRQFITLLEYKADLYGCHVVQVEARGTTKECASCGVETVKPLWVREHSCPSCRFETDRDANAVVRPCLTGSKRCAFATAMNVLKRGFSELGLGWPKSTPVETVTVPRNATRFWCANESFALVNATDTATFQRVSASHVVETGSLGA

SEQ ID NO: 15013 - protein, 443 aa, Halophilic sp.
LFDWLAAHAPLWNQITYRRRQAYFSDDGDVWDAEYTDLYDEYAPIIGKATCQQVARKNSEAWRSHFRLLEQYHDESNPVVTEKPSPPGYWGNRSDGYKLHGLVRNDLYTFDWDEDKSTLEFGVGDVLEDRYDFDHNERITLEVRGNPQWNGDDSRLELIYEEHADQLRVQHPVRIQPDKLREQRADAFTHTLDTENTTQVAAIDVGANNTLAIVTEAGDTAVYHARPEFDRFQSYSERIATLQSKLPDDKYTSHRIKRLYDARSRSRDHSRDAAVKHAAEWLLNRNVDTVYVGDLTDVLDTHWSAGVNEKTHNFWSHRQLVDRINLTLGDVGIAVAEVTEADSSSKCPECGSSDVTRASDSFRCHDCDLKAHSDVAGAWNILQSEVGPMARPAALSAERGRDVPREGAYWQWNEHDWTPADFGEQSWSVDQPSLSKPASSQPG

SEQ ID NO: 15014 - protein, 554 aa, Halophilic sp.
MARVANTLIKRYWTPEHLEGIDDYPYQAWKYFDEAEAFASVDLYLPSRYKRCLMQKVGETLRSHADKREAFQSIKPILPNHKIRRIDTRRIKERLWDADEYIKSGYVDLLIGQLNSYYNCHGRFPKSYFEMQDCPTYSKGVLPYSADDGPTSGQAVKYRYDEDTQTLTVKLKTPDSVEPDSRGDWTWTEHELEEYEAFHELLEHGDLSAPSFHPTQTKTGNEYHELSFPVEVEHAEKADDVETVLAIDGGLRKDATAVVVNEDGEQLSVPYFIQNTERERMRNLARERNELNSKLAYLRREGRDHTDSFKRIQAEYGRVNNKIRHKREQLVHDVANQVLALALVYDVDAIVHEDLRSLSPPRGEGQLSWELSSWARREIISKITYRADIAGLHVKRVRPGNTSRECPRCGATGHTTKSPDHFHEVWHGGHFRCDNTRCGFEADRDYVGAVNVARVFFSESATLDHDFTSSYTGDFKIVPASRSAGSRLAFGDAPIAFTEQSEQDVTAGGGSCFIAPAVTPTETINDSSKPNTVSSPATHSTSRFTRATAVYCRK

SEQ ID NO: 15015 - protein, 419 aa, Halophilic sp.
MEVRRTAPVKLDVPDKRCEDFHESAQQFLYCANRAAEFCWDDSDYKQCITANSTARDALYDGLRAETDLTANLVQEAIRRAVQAIKGCVERWKQGKRVSQPEFTSWSMVYDKRSATFYRNKVSLSTVNGRVECDFELPSDSPTPYEQYVLSEDFEFRASTLQYDKATDEFYFHSTTRKYDTENDGDTGIEVSADTGHQTVLGIDLGVNSLAVASTGRFWNGDDYDHWCREFEKRRGEIQQRGTQAAHNALLRLGKREQAWRKQYLHTVANEIVTEAVDHECNLIVFEDLSEIRERLPQAKWHHIWAFRRLVEYVEYKAPEQGVSVEQIDPSHTSQRCSRTDCGFTHEDNRNGEQFCCLKCGYAVNADYNAAKNVGIRYARKQKHRLRSSPKSAGGDAPVDVRLNGGMLNGESYQRTAGD

SEQ ID NO: 15016 - protein, 557 aa, Halophilic sp.
LGILTKGVANTLIERYWTPEHLTGIDEYSYQAWKYFDETEAFADVDLYLPSRYKRCVMQKVGETLRSHADKREAFQSIQSVLPDHKIRRIHSRRIKEQLWDSEEYITSGYVDLLIGQLNSYYDKHGRFPESYFEMQDCPSYSKGVLPYSADDGPTSGQAVKYEYDEDTQTLTVKLKTPDTLEPEARGDWTWMKHELEGYEAFHELLEHGSLSSPSFNPTQTKTGDEYYELSFPVEVEHQEKSDDVETVLAIDGGIRKDATAVVVNEDGEQISVPYFIQNTERERMQNLARERNHLNAKLADLRREGRAHTDSFRHVQAEYERVNNRIRHKREQLVHDVANQILALALVYDVDAIVHEDLRSLSPPRGEGQLSWELSSWARREIVSKIEYRAEIAGLHVERVRPGNTSRSCPRCGSTGHTTKSPDHSFEVWWGGHFRCDNARCGFQADRDYVGAVNVARVFFSSSASLEHGFTSSYTGDFEIVPASRSAGPRLVFGEAPLAFAGQSNEVTAGGGSCFIAPAVTPIETKNNSSNNDLVSSPATHSSSQFVKRTAVSCRK

SEQ ID NO: 15017 - protein, 390 aa, unknown
  TnpB Polypeptide
VLKAFKYRLTPTDSQAELINKHIGSARFVYNLALETKAAAWAGNRVSLNCFDLIKQLPDLKEECTWLKEINSQSLQQPIRNLDNAFTRFFKGQGNFPKFKKKSNGGSFNIPQNVSLENGKLIIPKFKKGIDIVLHRPIKGEIRQATISKTPTGKYFVSILCETGDPIKPKATIKENTTVGIDLGIKTYLVSSDGKEFDNPKYLRKAQSKLKYVQRKYSKNKGKRTKHRLAILHEKVANQRKDFLHKVSSELIKNHDSIAIETLQVSNMLKNHCLAQSISDAGWGTFVTMLEYKAEWYGKNILKIGTFEPSSKTCSCCGNINKELTLKDREWTCECCGTLLNRDVNAAINVKSFALKNYVLGTKTKTRNELPTLVGVMTYEAHPIAYGVGG

SEQ ID NO: 15018 - protein, 410 aa, Ammonifex sp.
VPLVTVKAQVHADPETLAVLKDAMFCATKVYNGLLWHLRKEYEETGKTNVSRSNLNRILKKLPRAKCYYSMSVQLTRDEVIEAYRSFFALKKKGFTRHSAPGFRPKSYLSPLKYVQSGFRVEGDKVTVSLGTGREDGVRQVSFRISHRPGVEYERVRELSIIYDKVSGQIEARLVVEVKANPCPGTKRAALDLGETVLMAAAFEDGTVLLYSGRFIKSVRRYWQKVRASLKPNSRRWREVAHREKLQVEHLLHIATSHFIEECMRRGVGEIAIGDLRGFRESIDYGDKLNQRQHAWPYRKLINMLKYKGALAGIAVRDDVDEKNTSARCHACGRVLPSNRKSRGLYTCSCGWRAQADVNGSLNIFERAYEVSPVKGSNGRVARPVVLSLHLGWHGVHEPGRRGKSLRASL

SEQ ID NO: 15019 - protein, 409 aa, Natrialbaceae sp.
MSSTATKTLQATLAPPTTHKEEKLQDTLETYRSALDDAFESGEDTMTGVSDVVTPYDLPYQAKAALCNYVPKLRNTYNAREIDDEHPLRLTNQAAKFDHSGEREHEFTWWAPRPGRGTNFWIPLRINPEQEGLWHDLLNEDAKAGQIRLQRHRENWVLHVTVEYPIEEPTTDGDTTPVGLDIGETALITACGLKHGTPTRPVLWSGKRAKHLRKEMSTTLQRLQERDAEWRIDERFDYYQNALTDILEKASCEVVEYAGTFENPVIVMEDLTYIRENLDYGKYMNRRLHAWAFARLQGRVEDKARDAGIPVEYVNPAYTSQTCHECGHIGKRSTQAELRCTNDDCHISTFQADISAAASIAKRVDPWGESVPWKPGRNDSPRDGSGCDTATRPPKPSAPTQMTLGAYES

SEQ ID NO: 15020 - protein, 405 aa, Sulfuriferula sp.
MQRLQAYKYELIPDGAQERDMRRFAGSCRFVYNKALAMQKENHEAGNKFIGYVAMAKHLTGWRNGAQTPWLKDAPCHPLQHALKDLEKAYKNFFAKRADIPRFKRKGGGEAFRYPDPKQIKLDQANNRLFLPKLGWLRYRNSRDVLGEVRNVTVSQSSGKWFASIQTQREVEQPLPTVTTAIGIDVGIARFATMSDDSFIAPLNSFKKHQQRLVRYQRRMSRKVKFSNNWKKAKARVQKNHTGIANARKDFLHKTTTTISQNHALVCIEDLQVRNMSRSSKGSKEQHGKMVKQKSGLNRAILDQGWGEFRRQLDYKVSWSGGMLLAVPPHNTSRTCPCCGHVSKDNRQTQAKFLCVDCGYENHADVVGAINVLERGYRLLACGEMAQSGRSAKQEPAEATQAVLV

SEQ ID NO: 15021 - protein, 404 aa, unknown
  TnpB Polypeptide
MRNTKHKLFKDKTLRHLHDDLNIIGVVRNHFLAVSMRYYRRYGKGLSYRKMSSHLTNLKKLEKYQHWNIPYSWALQNMLKRLAQSFREMKTLGRGHPQFKPCKKHKGNLTFRGEHVKFEYLLPKQKNERNHPTFRIRLNERWYRFALHRPMEGRIVQVQVTRDALGDVYITLTEACTEVKPEPKTGKAEGFDFGIKDFLTGSDGHRYISPMFYEQNAKKLAKAQQAYSRKVKGSQNQERERKNVARIHKKTANQRTDHHWKLAIEVCEKFDVLFFEDLNLEGMKRLWGKQVSDLAFGEFMEKLKYQARKRLRSVLQIDRWSPTTKCCSVCGHKNENLTLADRNWTCPKCETHLDRDPNAAMNILKEGVASFGLGVVRPMVLFNRIVGCSVEPSSSVLNSTNASA

SEQ ID NO: 15022 - protein, 329 aa, unknown
  TnpB Polypeptide
MKKAVPMILSEDNFKQIFAFADRNSRLAKLLYNAALFRIRQVFTGWDKEERTDLEKSVFAEIQCAKETYKGFTCRRVLSYKALDKILRANKNPDFFAGLPMQTAQGIVRQATVDFKAWLSALKTYKKDPSSFTGRPRMPKYCRLDKRTFKVTNQDAVLYPSEDGKGCLLKLPNMTENRIPLSYLKDTADLREVVFKPYYGRYIMTFIIEDAVPPCYPDMPNMAGVDLGTDNIAAIACTDGSSVVYKGGAILSANQLFAKQKAAAVSILTRGKTYSHAASAFLNNLSLKHDCFIKDQMHKLSAAIMQYCIDHRIGVLVVGTNRLWKQRLP

SEQ ID NO: 15023 - protein, 381 aa, unknown
  TnpB Polypeptide
MLKAFQYRLYPTKSQARLFESTLETCRRFYNDCLAERKEAYEQEKRTVSKFAQLRQVKTLKRTNPYAATVHSHILQVVVSDLDKAFQAFFRRVKAGEKPGYPRFKGRNRFDSFGFKEYGNGFRLDGRRLKLSGIGRVAVRWHRDLEGQIKTARVIRKAGHWYVSFACEVEQPEPLPSTGQSVGVDVGVASLITLSDGAKVDNPKWYRASQAKLRIAQRRVARRKKGGKNRRKAVLQLQRLHVHTQNQRRDFLNKLAHGLVQANDVIAVEDLQIQNMVRNKHLSKSILDSGWGYFRQRLAAKAVEAGRVVVAVNPAYTSKTCSGCGTVFEHLTLSDRWVECACGLSLDRDHNAALNIQRAGHVRLGITWPVAACVPKEAAGF

SEQ ID NO: 15024 - protein, 405 aa, unknown
  TnpB Polypeptide
MQRLQAFQYELMPNGQQHRDMRRFAGSCRFVFNKALAMQKARYEAGEKKLGYAGLCKLLTEWRNGTETPWLKDAPVHPLQQMIKDLERAYANFFAKRANFPRFKKKGQSDRFRYPDPKQIKLDQANDRIFLPKLGWLRYRNSREALGTVRNVAVSQRGGKWYFSVQTEREVEQPLHPSDSMVGIDMGIVRFATLSDGTVIEPLNSFRKHQERLARYQRAMSRKRKFSNKWNRTKAKIQRIHTRIANSRRDYLHKVTTTMSKNHAIVCIEDLQVRNMSKSAAGSHGKPGKNVRAKSGLNRSILDQGWSEFRRQLEYKQAWRGGLVIAVPPGNTSRTCPACGQVSGKNRRTQARFSCVVCRFEENADLVGAINVLAAGHAVIACGEPVQSGRSVKQEPTEATQAVSA

SEQ ID NO: 15025 - protein, 370 aa, unknown
  TnpB Polypeptide
MILQYACRIHDNLNMATLTRTLKLPFLRLNKAKAKEFARLECLNTEVANQILAMPKAERRELTTKSFTHLEIASGWINQTIRNANARTKVKHFRRLPLETNNQNWALHRVGDTFSVSFGLLRGTRKRIPIKVHLASHRELLEAILNGSAKPGNIKLFCSRRGIWYVLISVSMEVPDAEPRDRWIGVDRGQNVPVVAATPDGPVVFWKARHIRHVRRVFARRRQMLQAKGKHRAVRKLENKERRIVTHINHVMSKQLVALAKRCQAGIRFEDLPGIRASARQRRDTRSDAGRNRDDWPFHQLETFVRYKSLAAGVAVDAVPLGDQPTSKACLRRQAVRIQGARRCQCCDECPGWVWAVLPAGSSCSSGRAA

SEQ ID NO: 15026 - protein, 409 aa, unknown
  TnpB Polypeptide
MILAERHIIKIGTPEFKEYDFMCFLAKNMYNSALYAFRQHFFETNTLKHKFVLSKEFQEQNQPDYRAMFVRSAQQVVSLAHQAMKSFLALVKAKKAGELDKPVKLPKYLPKNGRQVMVYDNKAFYEKDFKEGYIRVAQTQSRIPTHIKDLKSIQQIRLVPKGNHIVVEILYKIPDTPLKEDNKRYAAIDLGINNLATIVSNVDKPNIVNGRPLKSINQYYNKHKAKLQAKIDKTYGTSKRKQTHREQSLTFKRNNKINDYLHKASRMIVNYLVSKDINALFIGKNKEWKQNTNIGKRNNQNFVSIPFYKFIQMLQYKCTMEGITVKEIEESYTSKCSFLDDEAIGKHEEYKGRRIKRGLFKTAERKIINADVNGGLNILRKAVGKFDYNPIEVCSAPVVWTVGFQKLAA

SEQ ID NO: 15027 - protein, 377 aa, unknown
  TnpB Polypeptide
MKLVVNLKLLPSPYQHKSLLQTLEQANAACNYASEIAWETQTFGQFKLHKLVYRDIREKFSLTAQVAVRVISKAADGYKLDRKTQRAFRSHGSVAYDDRILRYLPDDRVSIWTLAEKARQTIPYACGPQQRELLAYRMGETGLVYRDNTFYLNTVVDVEEPPLLETEDVLGIDLGIVNILADSDGETYSGGQVNRLRKRHAKLRARLQQKGTKSCKRLLKSRSRKEQRFARDINHRIAKRVVLKAERTNRAIALEDLQGIRSRVRVRQSQRRQHHSWAFYQLRSFIQYKARLAGVPVVLVDPRNTSRTCPACGCVDKANRVSQSLFFCIQCAFAGPADTIAAGNIRVLGRAGVNRPDVAHQDSPVCSHKPPALAGGS

SEQ ID NO: 15028 - protein, 301 aa, Nostoc sp.
MAERDDNPQIKDGCLQRKVCGEGFLPQNFSRQGNRINLPMFGRVKVILHRPIPDGFKIKTASVTKKADGYYLTLSLEDATVPTVKPEFNPDSITGIDVGLKEFLTTSEGETVAIPQHYRKSQKRLRVIQKRVSRREKGSNRRLKTVKQLGKQHKKVADKRKDFHFKTANNLLKKYDVIAVEDLNVKGLARTQLAKSVLDAGWSSFLSILTNKAENAGLLVIPVKAFATSQDCSNCGLKVPKKLHERGHDCLHCGCSLDRDHNAAINIKNRAVGHSVLKAHRVSEAIAGFGEKPTLYCIQSV

SEQ ID NO: 15029 - protein, 384 aa, Halomonadaceae sp.
MYGMIKRAYKYRFYPTPEQAQLLAQTFGCVRFVYNAVLRFRTDAFYQWQEKIGYVAANAYLTKMKKELDTAFLNDVSSVPLQQCLRHQQSAFRNFFEGRAKYPTFKKKRARQSAEFTRSAFKYRDGQLFLAKSKTPLDIRWSRELPSEPSTITVSRDSAGRYFVCCLCEFDAETLPVTPKMVGIDLGLKDLFVTDQGERIGNPRHTAKYAARLVLAQRRMSKKKLGSANRARARQKVAHIHAKISDCRMDSLHKLSRRLINENQVICVESLKVKNMIRNPRLSKAIADASWGEFVRQLEYKAQWAGRQMVAIDQWYPSSKRCSECGHIKGALPLNIRAWDCPECGVTHDRDINAARNIKAAGLAVLAPGENVSGMGQVSVSGSR

SEQ ID NO: 15030 - protein, 302 aa, unknown
  TnpB Polypeptide
MQNGIMHNSDVVRLSISKGLKDFMSKEYGINDDYLYLKNPIFKNIDTIKQIKIYPPEGNCCNVIVIYEVPDIIKLADNGKYLSIDLGLKNLMTCLNSETGETFIIGKKYLSLCRYYYKEIARIQSQWYHQQIKMDIKYPKSSKHIKKMYIKKNNVIKDYLHKITRHIVNYCKANGINTVVVGDITGIRKDNVKDDKYNQKMHFLSYDKIYQMLEYKLALEGINFIKQNEAYSSQTSPLADKVCKKNAEKFNRVYRGLYVDGENVWNADCVGAYNILRLYLKNDAIKLSPYDIKVPKIIKVAA

SEQ ID NO: 15031 - protein, 493 aa, unknown
  TnpB Polypeptide
MLKEYRFSEDAFHKLVVPYARHYAINSHIAQAVASDVWKAWNTFFFSKGKEVHYKRLDDLAAISGKNNFTGIMLRPANLTTSNIESAKRKAQKAVEKRYDDMYGRPDPKDDKKVVLPDEVKPQMEAEIAAAIAKIKPTIGKGNLRIVYGKHEFPVVLRNPKTQTGKYQQEALKCGVKYCRITRKWVKTKWKYYAQFILEGYPPTKCDGNGVMKHPVNQGRIGLDIGTQTLAISGKDICDLRVLAPSARAQARGLTNQIARTQRAMDRSRRVTNPKYYNPDGTIKRLKRQHSHKQRRDWKYSKRYFRLKAKLRDLNRRLADIRKMEHNILANELLQHGNEFVVEDMNYKALQKRSKETKTNAKTGRAHTKKRFGKSLSRCAPAMFISILNKKANRYGGSVIKVSTFETKASQFDHTDESYTKKRLSERMAHLSSGEVVQRDLYSAFLLEYINTESLEYNTKALNSAFPAFLVMHENTIKHLQKDKSYLPASVGF

SEQ ID NO: 15032 - protein, 377 aa, unknown
  TnpB Polypeptide
MRRAFKYRLSGNLQAFQKADGWLKLCHDLYNSALAERIYAYKGQRVNVSLYSQIKELPELKVAFPEYGNVGSQVLSDVIERVDRAYKAFFRRVKNKRGKAGFPRFKGADRYDSFTLKQSGWRLDGKYLSIKKVGRFKLRLSRPIDGVIKTVTIRKNATGKWYVCFSCDNVPQKRLPESDKAVGIDVGIKSFSVDSDGNSVDNPVYFRQSERLLRVRQRTLSRRAKGSQGRRDARILVAKAHEKVRNQRNDFLHKVANHYINNYGTICVEDLNIKGMVRNHNLAKSISDGSWGTLIGLLDYKAEGAGRTLIRIPRFEPSSKTCSECGAVNKDLTLSDRQWVCQSCGVLHDRDYNAAKNIRRAGQTLQEVTYAIAQSVS

SEQ ID NO: 15033 - protein, 454 aa, unknown
  TnpB Polypeptide
MIVTRTLRGSSPPELGPICKAIGFIRADIWRRIGALGTLGKNANEIRRGLTMYVDLPIDGTIRAESTKDIVNDVLTYKAAAKALVRRAIAKRAKDEAERKSLFNRLSYDEWLADPFLHRQMRKHFRHGKSRVANQFVVRSDRFTRRIEKGRLVITISIAKKFGHDIDIVTTTNGKGVDLAGKNLRVTVKDGFTEIHYAAEKAPGRQHGERVVGVDKGYTEALTDSDGQAHGQAFGAVLNAYSDQVAATGKQRGKLRAIEKAHRAAGRIEKADRIRKNNLGRVKLNARRERTRKRLRTIAFQAAHSVVDKAAVVGSEDLSSQFASKYQWKRFNRTMSGWAKGVLAEALDSVCSQREAKHVLVNAAYTSQTDSATGLLQGKRVGDRFYRVNGDVLQADHNAAMNVLARIGDPDISQFMRCDEVRRILLARSYGATEHQGLESAARPPSAEKSHEHV

SEQ ID NO: 15034 - protein, 352 aa, unknown
  TnpB Polypeptide
MIRTSQHTLKFSNDCKIEYLGRLFQDYQLDLQEYVNLIWNEQLPLEKYLSSKDLPTLRCKHSVYKNIIYKQASEIIRSQRKKKRKTKPEVKNVSIMLDENCFKHLSNTKSFDEFIQISLPYKSDTSKRNTLKLRLPIKQHKQSLKFKDWTRKKSVQLKKINGNYYLKFFYEKEEPIKKEVGESLGIDIGYKKLIATSREEYLGTEIINIYDKISKKKQGSKNFKQALIQRDQTINQICNQLDLSNVSTLYIEALKNVKHKSKFSKKFNNKLQRWSYPKVIHKLEMICEEQGINLVKVSPEYTSQTCSKCGFVDSNSRKGEIFECTNCRIILDADYNASKNILHRGVYQLSTN

SEQ ID NO: 15035 - protein, 344 aa, Streptomyces sp.
  misc_feature (242)..(299): Xaa can be any naturally occurring amino acid
VQLRYSFRLCPTAGQRLALARAFGCARVVFNDGLRLREDARAAGLPFPKAAELSKRLTESKKTPERAWLGEVSAVVLQQSLRDLETAYGNFLASLKGTRRGPKIGPPRFKSRKDNRQAVRFTANARWSITTGGKLNLPKIGPVPVKWSRMLPSAPSTVTVVKDAAGRYFASFVVETDPAADVLPETADTVGIDLGLTHFAVLSDGRKIDNPKFLRRAEKKLKRAQQTLSRKAKGSSNRDKAXXXXXXXXXXXXXXXXXXXXXXXXXXXXXXXXXXXXXXXXXXXXXXXXXXXXXXXXXXASSTTSCPPLSCAKTKRSPWRRCRSGDSPGPAWPSPSTTPDGPRS

SEQ ID NO: 15036 - protein, 402 aa, unknown
  TnpB Polypeptide
MVELGMQRTVRVRLLPSSEQAAALTETARLFTVAFNAVAAYGWEHAEKNGVTLHHATYRALKTAHPTLVSDLHIQARVKATEAVKSALALLKKGRKVTMPRSRGCPPRFNLHTFRVDWQAGRVNLATVAGRQHIPFSLTAYAQRYAGLPTDTADLIQRHGCWYLHIVVTLPAPEVEPTAIVVGVDLGVTRAAVTSLNTFHGQPRWRELEAHDFRLRRALQKKGSKSARRHLRKHSGRTARRRRDHDHVVSKQIVAATPSGATIAVENLVNIRSRVRAKRANGTQRRLHSWSFASLRAFLTYKAEARGIAVVGVDPRHTSQSCSRCGFQHRLNRRTQAEFRCRSCGYWTNADRNAALNIAAKLLASRGMSVAGGLLVKQPIVGGAGVPHQLSTRKPPAFAGGS

SEQ ID NO: 15037 - protein, 369 aa, unknown
  TnpB Polypeptide
MKLNKAYKFRLYPNKKQSILLNKTIGCARFIYNQMLADKIKHYEKTKEKLKNTPAQYKKEFEWLKEVDSLALANSQQNLKTAYNNFFRNPKKVGFPKFKSKRETKKSYTTNNQKGSIRLSKDKRKLKLPKVGFIKVVAHRKINKKETIKSCTITQKPSGKYYVSILVEFELEIKQKEITEESQVLGLDFSMSNFYHSSEDKKANYPKYYRESLEKLAKLQRSLSRKVKGSQNYKKQKIKVAKLHEKIANQRKDFLHKESRKLVNQYTAIVIEDLDMKAMSQCLNFGKSVHDNGWGVFINLLKYKLEWEGKQLIKIDKWYPSSKTCSHCGTKKKLKLSDRVYECDNCDLVIDRDYNASLNIKRVGIAQLA

SEQ ID NO: 15038 - protein, 329 aa, Escherichia sp.
  misc_feature (4)..(59): Xaa can be any naturally occurring amino acid
VEKXXXXXXXXXXXXXXXXXXXXXXXXXXXXXXXXXXXXXXXXXXXXXXXXXXXXXXXXGWMRYRNSRQVTGVVKNVTVSQSCGKWYISIQTENEVSTPVHPSASMVGLDAGVAKLATLSDGTVFGPVNSFQKNQKTLARLQRQLSRKVKFSNNWQKQKCKIQRLHSRIANIRRDYLHKVTTTVSKNHAMIVIEDLKVSNMSKSAAGTVSQPGRNVRAKSGLNRTILDQGWYEMRRQLEYKQLWSGGQVLAVPPAYTSQRCACCGHTAKENRLSQSKFRCQVCGYTANADVNGARNILAAGHAVLACGEMVQSGRSLKQEPTEIIQATA

SEQ ID NO: 15039 - protein, 579 aa, unknown
  TnpB Polypeptide
MGSLSRVVVVACRVQGLGEDRFGLRIVFEAEGLEVRPVNGALRLVRIHEGVERCLCLLEEGVGGDDERFELVALFLVFALGEDDAANGGLDDGPVGVCDLFDVAAHSASLPAGAITGAFALVSLLAIVYYRSVTHREKGKEGRVALEAVKVALDPSPTQERLLLSHAGGARFAFNAGLAHVKEAIEAGEKPEWSFYSLRKWWNANKDTLAVNMDGASWWAENSKEAYSSGLEALAKGLSSWAKSRKGVRKGHRVGFPKFKSKDKAVPKFTYRTGSFGLVQGGRDPKALKLPRIGRVHCMEDVAERVGGARVLRMTVSKRAGRWYAALTVERDDKPMTKPPKGGAVGIDLGVKTLATLSDGTVINNPRCLAASERRLKQAQQALSRKTRGSKRRTKARAKVARLHAHVANQRLDAIHKATTWLTQTYSYISVEDLNAAGMVKNHRLAKAVSDAAFGEFRRQLEYKTARTGATLHVVDRWYPSSKTCSACGAVKAKLSLSERVYRCDGCGLSIDRDLNAAVNILVAGSAPETQNAHGGTVRRGGQPGRATQVPVKCEPSRGTNRVRLGAGARKDTLQATVM

SEQ ID NO: 15040 - protein, 282 aa, unknown
  TnpB Polypeptide
VQWEDTSGWGLDTENKRLRVMGIGHVKLRMHRPLRGTPKAITVSRQGHRWWVSIRCTDVPAQPLPSTGRAVGIDLGVCALVATSEGELVCEGRFAKKAKDRLAGAQRAVSTKRRGSMHRRRAGEAVGRAHRKVANQRKDLAHQLSRRLVNDHDLIVVEALRVPQMSRRPKPRPNGKGGFDPNGARAKAGLNRSIADAGWGMLRSMLVYKAEDAGRELIAVDPRHTSTRCASCGHTESENRVSQAVFRCRGCGNEDHADVNAARNILRAGRAQRASARAGLGN

SEQ ID NO: 15041 - protein, 282 aa, unknown; identical to SEQ ID NO: 15040
  TnpB Polypeptide

SEQ ID NO: 15042 - protein, 398 aa, Streptomyces sp.
VTTTCVKRAFKYRFHPTGAQAAELSRTFGCVRKVYNLALAARTEAWARQERVNYNATSAMLTEWKKTGELAYLNDVSSVPLQQTLRHLQNAFTNFFGKRSKYPRFKSRKKSRKSAEYTTSGFRFREGKLTLAKMAEPLDLVWSRPLPEGATPSTVTVSQDAAGRWFVSLLCEDPTVQPLPAADTAVGIDVGLKHLLTLSTGEKIANPRHKRRDRTRLAKTQRALAKKAKGDGANRRKARIRVAKIYARIADRRRDLLHKLTTRLVRENQTLVIEDLTVRNMVKNHTLARAISDAGWSEFRSMLEYKAAWYGREVIAVDRFFPSSRLCSACGTLQKKMPLHVRTWTCECGTTHDRDVNAAKNLLAAGLAVSVCGAGVRPQRSSPGGRSATKQKPPRREP

SEQ ID NO: 15043 - protein, 395 aa, Ruminococcaceae sp.
VVTKLLKSFKTEIHPTAEQKNKINRTIGICRFVYNFYLAHNREIYEQENRFVSGYDFSIWLNNNYIPNNPEFAWIKEVSSKSVKQSIMNAQKAFKNFFDKKTNFPKWKKKNHSDVKMYFVRTDSKAMVFCERHRIKIPTLGWMRLKEKGYIPTSKDGYIIKSGTVSCKAGRYYVSVLIEMPENAKPVLNDFGIGIDLGVKDFAVCSDGKIYKNINKSSRIGKLEKKLKREQRRLSRKYESFKTLRNNLKGEAARQNIRRQRLKVQKLHHRLDCIRTDYINKVISELVKTKPKWITLEDLNVKGMMKNRHLSKAAAQQKFFEFRTKLTAKCKEYGIALRLVDRFYPSSKLCHNCGCVKSDLKLSDRTYICSECGYIADRDFNASLNLRDCLTYRIA

SEQ ID NO: 15044 - protein, 367 aa, Paenibacillaceae sp.
MTTNRAYRYELDPNVQQRILLAKHAGAARFAYNWGLARRMELYRQTGKGTNAMEQHRELNRLKKTQFPWMYEVSKCAPQEALRDLDRAFRNFFRGLKEGRKVGFPRFKKKGRDDRFRLTGAIHVLDRAVQLPRLGVIRLKEAPAVQGRILSATVSREAGRWFVSLTVEQDIPDPAPVEGPVCGMDVGLSHFATIASSDGEVEKVEAPRPLARYLRILRRRQRRHSRKQKGSHNRKKSALRLARLHRRIRNIRRDFLHKLSTHLAKTKRVIVVEDLNVAGLLGNQRLARHIADMGWGEFRRMLAYKTVWYGGRLQVANRYYPSSKTCSGCGHVLDKMPLWIREWRCPACGTHHDRDANAAKNLLALAG

SEQ ID NO: 15045 - protein, 366 aa, unknown
  TnpB Polypeptide
MKILRAYKTELDLNNEQRTFFRRCAGASRFVFNWALADRQDRRIKEIKTSQYDQRARFNALKAELYPWIYEVPYAIMEKAFADLDAAYKNFFRRVKAGQKPGFPKFKSRKRNAARFSLRNTKIETDRVRLTGIGWVKLHERDYIPTEGEYGVYATISERAGHWFIAILVEEEMAESVQGEGILGVDLGIKSLAVCSDGAVFENPKALYRAERKLKRIQREVSRRQKGGKNRAKTVRKLQRCHAKIANIRKHALHQVSYYVTARAKPHVVVIEDLNVLGMEQNHHLARAIGDASMGELRRQIEYKAKWYSVKVMIADRWYPSSKLCSHCGATNQVLTLSDRIYICPVCGVIIDRDLNAARNLVSLAA

SEQ ID NO: 15046 - protein, 407 aa, unknown
  TnpB Polypeptide
MKIMKVTRVEQQVIKHNHPMWKTIDENCFYSKNLYNLANYTIRQEFFNTHKWIHYRKLDKMLQEEEAYHQLKSQPSQCTLQVLDRNWKSYFKAIKDWNKDHSKYLGMPKLPHYKKKDGRFIWFIKNNCCYFEGEYLRFRVKRLQGYDFKTKAHGRLICVRFVPRGDNYVMEVVTEINIPDFEDVQTNRIESIDLGVNNFVTLTNNIGLSPIIINGRGIKSINQYYNKQRAEFQSELIKRNKQHWSHKLDKLTFKRNNRVKNYIHHASKYVVQYCIDNQIDTLVCGYNSTWKQESKLNNKTNQHFIGIPYDIFIKQLEYKCEAVGIKFITTDESYTSGTSFLDGEIPCKENYDRSRRIHRGVFQASDRLINSDVNGSLQIMRKAFQDAFNYGIEGNLTPTIINVTKVA

SEQ ID NO: 15047 - protein, 640 aa, unknown
  TnpB Polypeptide
VLRLALDISNESQRRRLEDMFSGAFAIRRALQGDARARAQAYRAAHHERARDPAAVRERLGLSRKALEYAGYAHLNGAPQLRRHVTKALAMHLADSVWTGLSRHLFRDASGKTQGLPRIGRWHDFLRLPGRARSHTDETKWETFRLHGTLAGHRAAYTQADGRFVQPRRMRSIEPDGSWWRYDGPLAIVFSGLADGTLVLPVRLPSAPSNQAILDHHLSDPSRWHKIDIVRRRDPNAAGGWQYEAHLLVLTERYASPATIVRRTAAAIATADRSAGIDLNVSNVTVASHEGGGDLTITRIDRGPAERQRDRSRTKRARRRQRALDRSRRAMNRDQYHLSKRQEKRARRLEAAGRPAPDVIPSGPRKARADGRPLQAYRRDKLSLRYRRERAAQVAAAASSAQARRDAARRTAGTLVAAHGFQLVVEDCLVSPWSRRWGASLAAFAPKALLSAIELEASEVARIAGQPGGVLRASTRTTVLSQHCLCGQRVEKRLGDRVHRCPSCALVGDRDAVAAALAAHVVFATRGEPASATVDFDAARATLSNPRTATRLHDTLRSNDFLGRQDVPSESNPSSARDGSFITWTVRTPDFVAVARRTAGEASRSTPNETSTRCSTTPERSRRQTSLRRSCGPPQLRDSS

SEQ ID NO: 15048 - protein, 670 aa, Mycobacterium sp.
MAAALTDTAAADSGDAVAAAPRRRGKSQTANFKYEGPVAVIRLELDASDDRVRRRVERQWEAVFRLRRALQRDAAARCRAYWAARHERAEDPMALRARLGLSRKGIEAAAKSHIEASGWMRDHLTKAVGLHVADEVWETIDRHLFADSSGRRHGPPRVGSWWDFTRIPGRARSHTKNQPTWETYRLVGTLDRHLATYRHPDLPSAVRTAHQATAQPAGTSVLAQPARLPAPARPASKSWWHHDRALAVVFTGLPAGDLVLSVRLPSGAGQWPHLAHFLADPNIWHKIDLVRVQDRKAPGGWRYYAHLLIHGSGYQSASTIAGRREIPVGRRARVDANVSNLAVASFPDGQPSRLAVEQIRCTDAQQKAAARAAQRARSRQKALDRSRRNTNAGQYGPSVRQDKRAQRRAAAGLAAREVSNPGGPRHARADGVPLRAYRRDELSQRYQRTRSDHAAESRSASQAKQARAAQVAAAIVAAHGNTVTVEDCRIATWARLWGKRIALFSPGMLVTALAAECHAGGGTLTRAGTRSTAMSQHCLCGQRVPKTLKQRTHDCPHCGLRGDRDIVSATLAACVELTDPDDPRTAVVDYRLAHALRDGLASQQEWEGSVNRHQPPTPPDGVGSARTGSHPPVASAEQAAPGPPPNSPRPKRGRRGTSRKQPATKLIGAA

SEQ ID NO: 15049 - protein, 413 aa, Thermofilum sp.
MKGDHLFGKGAGAGFRVFRVRTPKQTREALTKLYRDVTSGRARNKMLHYYLEEWETAFKEILEARAQAGRRTPPRPPPLFLPVRFIVPGGEVRGNKNAPCVVDLKRAELRIPSYNIEIPLGPSLVRALIEENELEERPDFVLQLTSRGKLRLIAQRVPPPPQPSMPLRVIAIDENSAHGFTIAAFDFDDCCRLVHFEKLRPPNHGWRRSIAALLQSFADAPTEERRQQLRQFLPEELVKGLTPERARELAASSRRKERRLNDAFVQRITAVVRRLVREAAEEGCTAVVLVDPIDHESLKGTRLQGTLLRARRALENLARYEGALFTELRASGKQCPLCGSWGVEVERTRRTRLYECRRCGIVWDRDKGALLNLVTAFFEGLRREECDDETALAERALASLQQWLLEHPRALER

SEQ ID NO: 15050 - protein, 290 aa, unknown
  TnpB Polypeptide
MKLGVLKAYKFRIYPNGQQKQFFIETFGCVRFTYNQLLEAKMEELANNEAKQGLTPAKLKKEYPFLKETDSLALANAQRNLDRAFRNYFQKRAGFPKMKTKKSIWQSYTTNNQQHTIYFEDDQIKLPKLKTLVPVKKHRAIKGKIKSATISAKNNEEFYISILCLEEIPPLPKQQASVAVVYDPQQLVKANQPIPITCEHAIQTKQKLTRAERKLQVKATAVKRKKILLTQARNYTEAKRKGRSPLSFSLLSKAGIHRSSQLPSRKTVRYDLFGTNRRRYGFKSWSLQHQ

SEQ ID NO: 15051 - protein, 416 aa, Lachnospiraceae sp.
MDAVFDLNQTMKLHLHVQKDDEPLFKELTEQYAAACSEISEYVFDHDFILNFQDLQKALYSHIRTDYKLKAQFTISSFKTVTARYKTVKTQLFKKPFKYKNEHGKWETIPRTLEWLQKPIHFKRPQADFVRGRDYSFVNGKSGEKLLSLNTLGRRIRVSFDIPEYFGRYLDGSWKFGGGKLVNLLGEWYFHISMVKVAAETFDSSHPAHVVGIDRGLRFLATTYDETGKTVFYDGKKIMAKKDAFQNIRSELQTKGTKSAKRALKRISGRENRWMSDINHQISKTLVSKYGKGTLFVVEDLSNVSFDEENLSSRTKQQRQQLRTWAFYQLEYFLTYKAHASGSDVQEVAADYTSQRCPKCGRILKFNRRHETHEYMCDCCGFRSNDDRVGAMNIQLLGTMYVSGDAHPRFGARKET

SEQ ID NO: 15052 - protein, 369 aa, unknown
  TnpB Polypeptide
MLYQYRNSYFNKEQPLLSNIELYQIGKRSEHWVNLPAKCSNQVWMQLVTNISSYWAAIKEYKKNPSKFQKSPKIPNYNKGMNIVTFEKQALLTKKLPANQIKLVRTDIILDLSNYKGDIREVKIIPKKNHFIIKAIFKQVISKEVLNNELVGSIDIGVNNLAAITTNQVHIGHILINGRPLKSINQYYNKTKANLQSKLPKKQKSSNKISLLTDKRNNKILDYIHKASRYIVNWLIANKIGTLVIGKNKEWKQSVNIGSRNNQSFTMIPHARFIDLIKYKFEAVGGVVKLVNEAYTSKCSALDLEPICKQTEYKGKRIKRGLFISNKGIIINADINGSLNILRKVVKNDLSDLIESRQWAKQSPIRICM

SEQ ID NO: 15053 - protein, 393 aa, unknown
  TnpB Polypeptide
MITSIKVRLHPNKKQLTKLFQYAGTSRFAYNWTILREEENYKEGNKFLSNNELRKEFTQLKKKPEYKWLNNISNNVTKQAIKDACNAYNRFFKKQSKYPKLKSKKRSKLSFYQDNVAIQFTDSHVKIEGFTKSMKRNKQKLNWIKLCEKGRIPTNCKYFNPRFTYDGLYWYISVKIEIDNKNTTSLNEGIGIDLGIKNLAICSDGNTYKNINKTKKLKKIEKRKRRLQRSISRKYEKNKKGKNYCKTSNIIKREKELLKITKRLTNIRQNHLYQIISEIIKRKPSFICIEDLNVKGMMKNKHLSKAIYEQSFNKFINILKYKCEWNNIEFIKADRFYPSSKKCSHCGNIKKDLKLKDRIYKCNICNLVIDRDYNASLNLKKYGKNALKDKSVI

SEQ ID NO: 15054 - protein, 499 aa, unknown
  TnpB Polypeptide
MKKKAKLKAAKKDKIYRAVRCASSANKGKTSQAQAIITPFRTALACFITNLDKDLQQGIAPSKFCKWKPDDFESSLSGRQFQNAYGQALESYKSWLALLEGKARSIIANSSLDEFTKTVLYRVNLYHNWYRPELELNWIRGKDGNLIPCRSDDPNKEVLAVSKEHLKLARLIVKRARQLIHRPNLLRVKTFKLNATVALLEQGHNSFNYWLKLSTMEKGKPIFLPLKNNPYLDRHLQTGRLLNNIQLKFEGNSIFISPIIEQEAAEERRTGAVIGLDWGTCALFAASDGRLLGQKMLFTLKEWDEILTKYAAELQRLEKPLKQDPYYVHMQKRISDYVKNEVGRLLNQLSREDILEIVVEKLDFRHTRLSKATNRIITRAGRGAVKNKLSRLQEEQGIKVTYINAAYTSQQCNVCGYIDRANRKDQKHFKCLCCGHTSNADVNAARNIKDRRSILISLDSSNAVVRKNLRERLFDRHILCCPSGRHHAAASKIGLAGAE

SEQ ID NO: 15055 - protein, 417 aa, Halobacteriales sp.
MDVRRTAVVKLDVSDEQRDALHRTAEQYLYCANRTANYCWSNTSYAECKTNKRQVRDALYSELREETDLQAQLVQAAIRRAVEAIKGVVERWKKGQRVSRPTFTAETMDYDTRSATFYRTKASLATVDGRVELPFVLPADSPTPYERYVLSEDYEFRESTLRYDAVTDEFYLHISTRRTNGGNDAEVPADTGPPDQTVLGIDLGVNSLAVASTGTFWQGDDYDHWCRELEKRRGEMQQRGTQAAHDALLRLGKREEAWRKQYIHTVANEVVTEAAEHDCDVIVFEDLTGIRERLPHAQWHHVWAFRRLYKYVSYKAPEQDISVEQVEPNHTSTRCSRTDCGFTHDDNRHREQFECQKCGYEVNADYNAAKNIGLRYARKRQHRLRSSPTSGSGDAEVDLRINGGTLNGESHQPIAGD

SEQ ID NO: 15056 - protein, 401 aa, Streptomyces sp.
LRRAYKFLLRPTLRQEQALRDMLRGHCTLYNAALQERRDAYRHPSKTSISYGQQSAQLSEIRASDPDQARWSFSSQQATLRRLNKAFAAFFSRIKKGEKAGYPRFKGVGHFDTVEFPKNGDGCRWDSAPHDVQTRVRLQGVGHVRVHQHRPVLGRVKTVSVKREGRRWYVILACDDVPAEPLPATGSIVGIDMGTVHFFTDSSGIHVANPRFLEKSAQELAEAQRLLDTFPKHTKRRTKKHRAAARKVAKLHARVRRQRLDHHHKTANALVRKHDVIGHEKLNMAGMTKTPAPKPDPNRNGVFLPNRAAAKAGLNRSILDAGWGMFLGILANKAESAGRRVIPVDAHNTSRTCPECGHVAKENRTSQAKFECRACGFAANADHVGALNVLNRAGLALCAAA

SEQ ID NO: 15057 - protein, 293 aa, Lentzea sp.
MCAVSKTFVKRAFKYRFYPTEVQAAELSRTFGCVRLVYNMALEARTTAWSCERRRVTYSETSAMLTVWKKTEALGFLRDVSSVPLQQALRHLHGAFGNFFANRACHPRFKSRKKSRASAEYTRSAFRWRDGRLSLAKMAEPLAIVWSRPLPEGSEPSTVTVSRDSVGRWFVSMLVETSVDHHAPIASVVGLDVGLSALVTLSTGEKITNSQQEKKCRERLERAQRALARKQKGSANRQKARRRIARLSARIADRRRDTLHKLSTRLVRENQAIVIEDLNVRGMLRNRSLARDL

SEQ ID NO: 15058 - protein, 122 aa, Acidimicrobiaceae sp.
VQKIHTSTANARKNLLHETTSYLTKNYDLVVIEDLNVKGTLKNHALAKHISDAAWGEFTRQLEYKSTWYGSRVVKADRFFASSKTCSSCGVPKATLPLGVRTFHCEACGFEMDRPQCSYQPG

SEQ ID NO: 15059 - protein, 393 aa, unknown
  TnpB Polypeptide
MMLKAFKYKLNPNEEQKVLLNKHIGASRFVYNLALECKQMAYVGNKHNLSCFELHSQLKGLKVELPWLKELNSQSLQQAITNLDKAYTAFFKGQNSFPKFKKKSNGGSFNIPQRVVVENDKLIIPKFTKKNGIDIILHRELKGEIRQATISKTPTGKYFVSILCETGEQNKVKPKIKEETTIGIDLGIKDFAITSNGEIFDNPKYLRKSQSKLKYIQSKYSKNKGKRTKQKLCKLHEKVTNKRKDFLHKVSTKLVRENQTISLENLAVCNMIKNHNLAQSISDVSWSTFVNMLEYKAEWYGTNILKIGRFEPSSKTCSNCGYINKELTLKDREWKCVKCNIEHDRDINAAINIKNFSLRNSLSGTDRKNHDELPTLVGVMTHEAQPIAFGVGG

SEQ ID NO: 15060 - protein, 417 aa, unknown
  TnpB Polypeptide
VNLVTTRTITATLTNDREGVVRDLDSLGRSGSKIWNVARWTISRIWDHTGEIPDEGPLKSYMKTQDCWKDLNAQSSQAIVEELSGAFQSWFQQDDPDANPPGYRKHGDQRPRSTITFKEDGFKLDTKHQQVRLSKGKNLKDGWADFILCEYDTGPDASLAGVEDVQQVRAVWTGDHWELHFVCKVAIDGPDHSGAKTAGVDLGICNTAAVSVGDETVLYPGNALKEDAHYFREIEYHTEGENGPSQTAEWARTKKSRRQTHVLHAVSKDIVEQCAERGVGTIAVGHPKNIRADEDWGRHGNKRLHDWAFETLIQQIEYKAEERGLDVERVDEYELATSISCCACGAQADSHRVERGLYVCSDCGLVANSDLNAAENMRATVTPNPSQDRSNGCLAQPTVRLFDKQTGRVAPQEQVRP

SEQ ID NO: 15061 - protein, 230 aa, Planktothrix sp.
  misc_feature (54)..(112): Xaa can be any naturally occurring amino acid
LGLEFFYTDSEGNHVENPRFLRKSEKSLKRLQRRVSKRQKGSTNRKKAINKMAXXXXXXXXXXXXXXXXXXXXXXXXXXXXXXXXXXXXXXXXXXXXXXXXXXXXXXXXXXXVKNHKIAKSISDAAWSMFTNWVDYLAKIHGVHVVAVSPHFTSQDCSGCGTRVKKSLSTRTHKCPACGLVEHRDFNAAKNILAKGLGLKSTVGHIGTQTLEEIEPLVFSEQSGRVKFGH

SEQ ID NO: 15062 - protein, 373 aa, Roseiflexaceae sp.
MAQRFSTRTVCVKVALDTAAAAALCATQVAFNQAASYCATVAWEQGIVNKNKLHHVVYGPTRVQFGLGAQLACCARDKAAEAVSAAKSNKSSTCPCFAADSSVRYDAHTYRLMSLDRVSLNTIRGRVIGQLVPGDFQRRTLSDPSWNIGGAELVRRQGVWYLHITQSQAASKPDEPRGVLGVDLGIVNIATDSDGTQYSGVQVRLVRDKCYQHRRRLQLANTRRSRWRLRQIANREHRFQKHVNHEVSKQLVGKASTARKALALEDLKHIRKRTDKTVRHGQRRTRSSWAFAQLRQFVAYKAVQAGVCMVYIDPRNTSRTCSACGHCEQANRQNQASFLCRRCGYRAHADANAAINISCVGAVNLPNVLRLSN

SEQ ID NO: 15063 - protein, 414 aa, unknown
  TnpB Polypeptide
VPEEYVRRTAITRISVDDEQRELLEKTITEWKRGCQISTDLAWGKCSKKSDVQPLAYDTVRGETDLGSQHAILATHQSAQAITSCLERQSKGKRASKPTFTAPTIKYDTRTLTLFDDDTVSLTTVESRVRCPLALPDDDDGYQRQYLDSDEWAVTESTLTVRDGEFFLHLGFRRHKSNDEQNTAENGTVLGVDLGIENLAVTSTAFFFDGRELTHRLQEFEKVRTGLQQTGTRSAHRTLAQASGRQLRYVRDVLHRASNALIAEALRYDCDIIVFEDLTGIRDRTRGSWGHRWAFRTLYEQTEYKAEVAGLAVRQVGPAYTSQRCSECEFVGDENRQSRCRFHCQKCGAEANGDYNAAKNIGMRYVRRGQQSSRRTGNSQLALKSGTVTPNGGFSAYPDGFEVELTDKPDSLLA

SEQ ID NO: 15064 - protein, 419 aa, Azotobacter sp.
VVLRRQAFKFRIEPTGEQQCKLHQFAGACRFVFNKALALQQANREAGGKFIAYVTMARQLTAWRNGEETPWLKEAPVHPLQHALKDLDRAYQNFFAKRADFPRFKKRGQHDSFRYPDPKQIKLDQGNRRIFLPKLGWLRYRHSQPVLGTLKNATVSLSAGHWYVSIQTEREVASPLHASPLAVGIDLGVVRFATLWDGHKETVLEPLGSFARHQQRLARAQRQMARKDKFGRNWLKARARVRRIHRQIVNARHDYLHKASHAISKSHALVCVEDLQVSHMSRSAKGSAEQPGRNIRQKAALNRSILDQGWGEFRRQLDYKVQWAGGWLVAVPPRHTSQQCPECGHIHSGNRQTQSSFLCVACGHSENADRVAARNIRERGLKTLEGQDHARFACEVSGAVMPPAAGTHRGESALVGRTR

SEQ ID NO: 15065 - protein, 381 aa, Azotobacter sp.
MTKRAYKYRFYPTPEQAGLLARTFGCMRFVYNSVLRWRTDAFYQEQKKVGYTQASARLTAIKKLPETAFLNEVSSVPLQQCLRHQQAAFKNFFEGRAKYPAFKSKKHRQSAEFTSSAFRYCDGKLFLAKCDEPLAIRWSRPLPCDPSTVTVSRDSAGRYFVSCLCEFEPEALPVTPKMIGIDMGLKVLFVTSEGERIGNLRHTAKYTARLAKAQRRLSRKKLGSRNRAKARLNVARIHAKISDCRADRLHKLSRRLINENQVVCVETLAVKNMIRNPKLSKAIADAGWGEFVRQLEYKGGWAGRQVVQIDRWYPSSKRCSCCGHTVASLPLQVRSWTCPECGAELDRDVNAAVNIKAAGLAVLALGEDVSGIGQVPVSCSR

SEQ ID NO: 15066 - protein, 381 aa, Azotobacter sp.
MTKRAYQYRFYPTSEQAELLARTFGCVRFIYNSVLRWRTDAFCQEQKKIGYTQASARLTAIKKQPELAFLNEVSSVPLQQCLRHQQTAFKNFFEGRAGYPAFKSKKHRQSAEFTTSAFSYRDGKLYIAKSRTPLDIRWSRPLPCEPSTVTILKDSAGRYFVSCLCEFEPEGLPITPKTIGIDLGLKDLFVTSEGERIGKSHHTARYAARLALAQRRLSRKKLGSKNRAKARLKVARIHAKIADCRTDRLHKLSRRLINENQVVCVESLAVKSLIRNPRLSKAIADAGWGELVRQLEYKGGWAGRQVVGIDRWYPSSRRCSCCGHTVASMPLPIRSWTCPECGTAHDRDVNAAVNIKAAGLAVLALGENVSGIGQVPLSCSR

SEQ ID NO: 15067 - protein, 381 aa, Azotobacter sp.
MTKRAYKYRFYPTPEQAELLARTFGCVRSVYNRILRWRTDAFYQEQKKIGYTAASSRLTALKKQPELAFLNEVSSVPLQQCLRHQQAAFKNFFEGRAKYPAFKKKRHRQSAEFTRSSFRYRDGKLFLARCDEPLAIRWSRPLPGEPSTVTISRDSAGRYFVSCLCEFEPETLPVVPKTLGIDLGLKDLFVTSEGERFGNPRHSAKYASRLALAQRRLSKKQLGSKNRARARRKVARIHAKISDCRADGLHKLSRRLINENQVVCAETLAVKNMIRHPQLSKAIADAGWGEFVRQLEYKGGWAGRQIVQIDRWYPSSKRCSCCGHTLEHLPLDVRRWSCPECGTEHDRDVNAAINIKAAGLAVLALGENVSGMGQVSVSGSR

SEQ ID NO: 15068 - protein, 295 aa, Azotobacter sp.
MLRRQAFKFRIEPTGEQQRQMRRFAGSCRFVFNKALALQQERYEQGGKKLGYAGLCKRLTEWRHDPETAWLADAPVHPLQQALKDLERAYANFFTQRAGFPRFKKKGQSDSFRYPDPKQIRLDQGNSRIFLPKLGWLRYRNSRKVLGEVKQVTVSSSAGKWFVSIQTEREVEQPLPKGGAVGIDMGIARFATLSDGTFHAPRNSFKRHETALRKVQQAMSRKTKFGSNWKKAKARVQKTHSRIGNARRDYLHKTSTTISQNHAMVCIEDLQCGICPGRPRAAPSNRESRSGPSQA

SEQ ID NO: 15069 - protein, 387 aa, Methanoregulaceae sp.
MATLTKPVQIKVITDDPALDRTIRAFTDGMNFVSGIIFGFGKPKGSNAVQHQVYGDLRNRYGLKSQMACNAVRQVVGPYLALREQITIGQTVWQQLTFRPTAMTSSYHRDFTITETTLGITTLDGRKSYPLKMYDRARKFFDGSWTFGASKLVRHRNGQYYFHLCCEKEVSLKPIEKATTFMGVDVGQNYLAVTSTTDQKCRFICGGAAKNLHRVYSQMRKRLQQKGTRSAMRVLKNLSGREQRLMTAINHDVSRNLVAFAVQNRVDVIGLEDLTGIRTHTKQPRDDRYTHHSWAFFQLQQFITYKALEHGIGVLSVDPRYTSQTCPRCSHISKNNRHGRSFRCECCRYDLHADLIGARNIESRARDSRYTCELQGRLSTAHTEPTS

SEQ ID NO: 15070 - protein, 359 aa, Vulcanisaeta sp.
MMRSELTGSKEALGKFQFVTISGRVEFEDVGRVVKIAHYYSRAVKAGINLALKGVPLNDAVKELYRIIPYAFYAETAYKQALALIKNGGNKIEIRRRWIACKGSKADRGNRGIKFHVLEDHVEVKVKDPWGRWIVGRAYFGRKYLPLLRELEELAGKGEEGYGAVISFKEKPMIHLQIPLWLYLKHFSVKKPIGYGLIAGFDLNSDRLNVVVIDRDGRIVTTRTYWYPEVTRPGFPREKGKALRLNALSNALKFLSRIGVDYVVFEDLFLVKGRRRFTKSKSGNRRISRFAKRQLLTHGVIKSLRLGFNVILANPKGTTNSKEHEKVMKERGFDRHTASAYLIALRGLETNSIKGVRSN

SEQ ID NO: 15071 - protein, 419 aa, Streptomyces sp.
VIVKLVVQVRLLPTPVQAAALEATLRACNEAATWASGVAFEKGVKSNFAMREHTYRQIKARWGLGAQAAQHVIKKTCDAYATLKANLKAGNLGRPGSKRYRRAVEKPVAFRPEGAQPYDDRMLSWQIDRRRISIWTTAGRVKDVAFTASPEQMATLALYRKGESDLLRRDGMWFLNATCDVPEAPLNTAPVDFLGVDLGIVNIATTSDGQIMAGRELNRVRTRERTLRTKLQKKNTPSAKRRLKRRRRKEARRARDINHKIAKHVVAEAERTGRGIALEDLTGIRERVRLAKPQRATHSSWAFAQLEQFIAYKARKAGVPVVHVDPAYTSRTCAECGHIDRVNRVSQAWFACRNCGFVDHADRNSSRNIRARAQELWRRGAQSTAPDPPPEPKRGTGRKHSTTASGARCASPGTLAPGR

SEQ ID NO: 15072 - protein, 548 aa, Mycobacterium sp.
MAPTPAAAPVRKPRARKRPKGAPTHVRSWPLRPLPTQCREIGIRFFTGVRVYNAVLGEFIARSRAVKSDLAWAAARELPHRSPGERQIRRTAVRTVEQAHGFTLDAAQSFASSLRKSWVREHLPAQETQSLGARAFDAVRQWHVGTKGKPRFKSVKRGLHSLAAKDGNGALRPKTDEAGALVGLQWGAGLVVPIAPAAVSGRRGREQQAELAEIEALIAAGKVRSTRIVRTVINGRDTYRMQLVCDGRPSRRYPVGEGRVSFDLGPSQIAVAVERSDGSWSGWVEPLADAIRLDTLRLRRTQRHLDRQHRAGSPDCFRSDGTHTWVRCGWRRSAAAMRTTRQVAELHRRLAEHRKTLHGALGNRLMGHGADIACERLDYVSWQKNFPRSVRDRAPGSLVEMVRRKAESAGGQQLYEYNPRTTALSQTCLCGNRKKKPLSQRVHRCECGIKEDRDLFSAYLGLHVRTGVDGVDRLDLPSARQGWGHRQDVDESPKSSRSASARKRRGRRHPPSRRSVARIKARRKAKTKMRQSRSAQTSTTDQPTAIAA

SEQ ID NO: 15073 - protein, 387 aa, unknown
  TnpB Polypeptide
MILINKQFTTIIIKLGKFQELEHTITTFNEVCQYIIDYGWENKTYNKNKLHHGTYYQIRQKYPKFSSAMVQTARDQASDILKRTIKKNQKLIMNKSKKQLSKPRKQTYSGIRYDKRCLSIMFDKNIISINTTFGRIKLPFKLAQYYDKYKNWIYTNAQLIRRKNKDYYLNLQMYQDLPEKNKECNVLGIDLGIKKIAVTSQNIFYKSKHLKNIKGKYQKLKRDCQRKGTKSTKRRLKKFSGKENRFVRDVNHCISKKIVNTEHTVFALENLKNIKQNTKTYNKKLNWMIGNWSFNQFQSFIQYKAERLGKNVIYIKPNYTSQQCSKCGCIEKKNRNGNVFKCVGCNFQLDADLNASRNIARIGRTDFLQGSVNNPNVGIDENKAVEI

SEQ ID NO: 15074 - protein, 402 aa, Escherichia sp.
VKRLQAFKFQLRPGGQQECEMRRFAGACRFVFNRALALQNENHEAGNKYIPYGKMASWLVEWKNATETQWLKDSPSQPLQQSLKDLERAYKNFFQNRAAFPRFKKRGQNDAFRYPQGVKLDQENSRIFLPKLGWMRYRNSRQVTGVVKNVTVSQSCGKWYISIQTENEVSTPVHPSASMVGLDAGVAKLATLSDGTVFEPVNSFQKNQKKLARLQRQLSRKVKFSNNWQKQKRKIQRLHSCIANIRRDYLHKVTTTVSKNHAMIVIEDLKVSNMSKSAAGTVSQPGRNVRAKSGLNRSILDQGWYEMRRQLEYKQLWRGGQVLAVPPAYTSQRCACCGHTAKENRLSQSQFRCQVCGYTANADVNGARNILAAGHAVLACGEMVQSGRSLKQEPTEMIQATA

SEQ ID NO: 15075 - protein, 380 aa, Streptomyces sp.
  misc_feature (143)..(153): Xaa can be any naturally occurring amino acid
VYNKALQERTRAWYGEQRRLSYVESSAALTQWKKTEELAFLAEVSSVPLQQALRHLQTAFANFFARRAKYPRFKSRKRSRASAEYTRSAFKWCDGQLTLAKMAEPLDIRWSRPLPEGAEPSTVTVSRDAAGRWFVSLLCEDTXXXXXXXXXXXAPAAATTNAVGLDAGITSLVTLSTGEKIANPKHERRDRARLARAQRELSRKAKGSNNREKARRRVAKVHARITDRRRDFLHKLSTRLVRENQAVVIEDLTVRNLLKNGRLARAISDASWTELRLMLEYKCAWYGRELVVIDRFFPSSKLCGACGTVAAKLSLNVRQWTCDCGAVHDRDVNAARNILAAGLAASACGDGVRPQRESSRTGRSSVKQEPQRATAGIPRL

SEQ ID NO: 15076 - protein, 377 aa, Paenibacillus sp.
VLKAFKYRLYPSDSQADFFMRSFGCVRKVYNLMLNDRIESYKKHRETGEKIKLPTPAQYKNEFPFLKEVDSLALCNAQLQLKAAYNHFFSHPSSGFPRWKSRKNPVQSYTTNNQNGTIAIVEGRYLKLPKMEPVRIKLHRQLQGLIKSATISRTATGKYFVSILCETEVEAKKLTGSAIGMDLGVTSFAAFSDGTKVQNPKHLTKSSARLSKAQRKLSRRALQAKKEGRFLADSRNYQKQRILVAKLHEKIVNQRNDFHNKLSTYLVNNHDVICVETLNVKGLVRNHRLAGALHDVSWSAFLSKLTYKAEWYGKQVIQVGRWFPSSQICSSCGHWDGKKGLHIREWSCLSCGATHDRDVNASVNIRAEGLRQFHGTA

SEQ ID NO: 15077 - protein, 539 aa, unknown
  TnpB Polypeptide
MQEFQAPNKKVLLTNKKNCSKANTQRLDFSLTLPQDLTQIDEDIEPFWNSLSTALHYTLWQPHQIESPELVSLSSNEVTERSEVNGLLQPKVSEANYREAVSFFWKSPIIPNHLTPKRLLLSLPASSIPTTEKEVEEDESIPTTKKIRIYPENEYLWFASLNLYRRAYNLTIEFMRKGRKPSSEFRTQICDWCKLECEEHDITYNSNLIQSAYRKACDTRTAVIKKRVKGENASMSFMSRNAPGQYFVVPRFSANKQIFPRILKGCKWTEDVPSEAIGKTVIVTYTNGQWFASVNLNQSIEPTKSEALSIVALDPGVRTFQTAFSGTDAVSYGESFVNDRLVPLMLELDGLLSARDKLHCEEKSKQWVKDRLKNINRRIHKVRARQQNLVADLHRRVAYDLVSNHDVILLPTFETKQMVSRRDETRKRFLRRQTVRGMLGLAHYKFKQTLKWMAVKYGKTIVDVNESYTSKTLWDGSILKNLGGKASILFQGKRVNRDIHGARNILIRFLTKVIDGLSPMGAYPLDITKADFCGFGVFK

SEQ ID NO: 15078 - protein, 413 aa, Halostella sp.
MFMEVRRTIPVKLDVNDSGADLLRETIQQFLKAANYVVDAAYDGEWVETRKSVLHETTYSEVRDRTDLHSNHVQSARERAVDALKATLAKWKRGKTASLPTFTSPFVEYNQRNATFHDDHATLATVDGRITAGYVLPDEDRDTPHLQYLFSADYEITGATLHYREHSDEFYLHIRTKADVDAPDPRENGTVLGVDLGVENIAVTSTGIFWSGDELDHWQREYEKRRASLQQCGSHDAHENIRAVGRTETGRFKQMLHRIANELVAEADERGCSHIAFEDLTDIRERMPGAKRIHRWAFRRLYEYVTYKAEPRGIAVEQVEPSNTSRRCSSCGHTAKNNRPSQDTFECQRCEYTNHADYNAAKNVGYRLFRNQTGVGGGAPVGVRLNTGMLNANGVKPLPDLARAGIHGESSRF

SEQ ID NO: 15079 - protein, 406 aa, unknown
  TnpB Polypeptide
MNLTEKEIIYSTYERFDLIKELCHLSKNLYNAALYDVRQYYFETKSYRTWQSQRPIFTKNHNPDYYALQSHLAGEVLIQVGKQFISFFNNKSSKKKRIPRYKDKNGFNVVTFPERTISNQIDFDEDKQLYTYTLCKRSYNLKIQSTKPNIKMIKFVYDEANDLIKCFKIYEVEEPKLRRDNSRYFSIDPGLNNIVSIYNNIGIRPLLYNGRPIKSINQYYNKTRAKLQSELPNNVKSSKRLKQLSFKRKNKIDYEMNRISAHIINEAVKNNISKIFIGNNNDWKNEINIGRRNNQNFVNIPHTKLFNQLLYKGLLNGIEVIFTEESYTSKASFFDKDELPKYGESDNHKFSGRRIKRGLYRDSKGNLWNADLNGGGNIMRKISDKAAYKNIRKTKELMKRPILITL

SEQ ID NO: 15080 - protein, 303 aa, unknown
  TnpB Polypeptide
MYLTVKQQVKHLSKEDYRSIKELCHIAKNLTNQAIYNIRQHYFAEGKYLNYEKNYALLKSSDNYRTLNSNMAQQILKEVDGSFKSFFGLLKKAKQGKHALKDCRLPRYLPKDGYTTLVIGFVRLKGNKLILPYSNSFKKTHKAVEITIPPILLDKKVKEIRIIPKADARFFEIQYIYEAECIQRNLNTTNALALDLGINNLVTGVSSKGETFIIDGRRLKSINQWFNKKNARLQSIKDKQHFGKKTTNRQKALARKRNNKINDYMNKTARRVIDYCIDHDIGTLIVGYNETFQKAYYEAECDE

SEQ ID NO: 15081 - protein, 217 aa, unknown
  TnpB Polypeptide
GRSFFDMLKTFDKKITKRMANLQKRNIKPRSDKKYRKLVDDLREFLKNEINRLINIIIKIYKPKRIVIEKLDFRSPELSKRMNRMIQNFGKRYIKEKLERLQQLYGIEIIEINPAYTSQECSCCGYIDKKNRKDTQEFECKACGNKTNAQINGAKNILKRSSLVNLTKKQVLKILIERYLERLKGCKSAPLDVIKGNPYFKDYLDSILNPRQSLTSS

SEQ ID NO: 15082 - protein, 392 aa, unknown
  TnpB Polypeptide
MKRTTQLRHENVYYSRVDSDVLQRNIARLDTAFQGFWQNGRGFPKYVRSATFKSFEYKPQRCQFEVNRTPGKKHRYSRVYLPLIGWMSYFDSRPMPEDADTRTVTVTRKSDGWYISVLLNLSESLPDEMSMGEVSGIVGIDVGINQLVALSDGSFIKNLKAGTNKRIRRRLRIRQRRINRKQKGSKNRAKAGRAVARLHQSVTAKRDAHQWKAAQIVVDTADAVAHENLNIKGMKKRCRPQRVNGRFMPNGQSAKRGLNRSISDAAWGGLFQKIAWLALKNGKPVVKYNPQNTSRECSKCGHVSPDNRDGEKFICSNCGHIDHADTQAARTGLKRVGLKFVSTRRKNLPGDSRKVTPIRHDSASNGKRDQARNLESMASSLVRRSENRILGA

SEQ ID NO: 15083 - protein, 354 aa, Bacillus sp.
  misc_feature (268)..(271): Xaa can be any naturally occurring amino acid
MILAKKVRLIPTPEQEQVLRNHAGAARFAYNYCKRMSDRYYKLFGKSVSQLALQKRFTKIKKRKRYEWLHDINAQVPKQASKDFDTARKHSFKKYKNGSHTSYKSKKDVIQGFYANYERLVIGKKVVHIQSIGEVKTSQQLPRNKKPSNPRVTFDGRHWWISVGFQEDFESQELTNESIGVDVGLKELFVASNGMKERNINKDAKVKKLLKRKKSAQRDMSRRFKKGVKIQSAGYEKAKAEHLRLSRKITNIRNNHIHQATAKLVKTXXXXFQKLNFFFQCLSYKCEKYGIEYVKADKWFASSKICSCCGVKYDHSVQPEGQSSLKIREWCCASCNSHHDRDLNASINLSRWVK

SEQ ID NO: 15084 - protein, 393 aa, unknown
  TnpB Polypeptide
MTLKAYKYRLYPNEEQKTLLNKHFGCSRFVYNWGLETKTKAYKEKKKSISSIDLCNSLIKLKQKHEWLKEVNSQALQAALRNLDNAYTRFFRERKGFPKFKNKHGKQSFQCPQRNKVDFENRIISIAKVKNIKAVLHRKFDGVIKTVTISKTKTEKYFASVLVDTLTKSKKPLNPNREKAIGIDLGLKHFITLSNGEKVENPKHLQKLSSKLKLFARHKDKTKKGSKRREKARLRLAKLYEKVTNQRNDFLHKLSIKLIRENQSICIEDLNIKGMLKNHCLARSISSASWSKFVEMLKYKAKWYGKNVIQIGRFEPSSKMCSCGKINHDLQLKDRIWTCKECGETHDRDVLAANNILDFSFHKQNLVQHRAGRARINAHGDDKVAEQKCSVVI

SEQ ID NO: 15085 - protein, 406 aa, Lactobacillus sp.
LVELGRTIKLRLYPNTNQADQFLAMSQEYQRVANVVSQWIFDHEFQLSWLKINHYLYKIFRQESPLNSQMVQSVFRTVVARYKTVREQMKQHPYRYQNEEKEWVQVPRDLNWLVNPIQFRRPQADLVRQSNYSFVDKMQQISITTLGKRTKLGFTDKGFEKYFTDDWKLGTAKLVHTQGKWFLHIGITKEVSDFNPKDSPQIVGIDRGLRFLATIFDSEGKVLFFDGQKILLKRKKFLEIRRQLQSKGTKSAKKKLKRLAQRENRWMTDVNHQLAKTLVARYGSHTLFVLEDLTNVTFNTDDLPRSLRNSHRSWSFFQLESFLTYKAQAIQSTVVKVNPAFTSQRCPKCGLVEKTNRHHETHEYWCSQCQYRCNDDRLGAMNIEMLGQEWLSGVKHPKIKKLRTVG

SEQ ID NO: 15086 - protein, 417 aa, Cyanobacteria sp.
MLTINYTYRIYPDAAQEAELLRWLETCRGVYNYALRELKDWIASRKCPIDRCPLDKEYIIPADAPFPSYALQQNHLPKAKKEFPHLGEVHSQVLQTTIRRLHDTWEAFQKRGFGFPRFKKFGQFKSFVFPQFKTNPISGFNITLPKIGTMPISLSRPIPDGFTLKQVRVLSKARGTQWDVVVTIQSDVSVPDVPFHGRAIGIDLGLERFATVSDGSFFERPKFLKSQHRKLKLLQRRAARKQKRSTNWEKAQIKVARLHHHIANTRKDFHLKTAHKLCDQATSIFAEDLNTVGLNRGMLRKDCVDASFGAFLSLLEWVCWKRGAFFMRVNPNGTSQTCPSCGATVRKSLEVREHHCPECGYVTHRDHAAAEMVLLRGLDLVPVDIRGTETACADVLAGSEMASQVSKSRKRTTRKAK

SEQ ID NO: 15087 - protein, 165 aa, Coleofasciculus sp.
RLRSSNHRSAQVKVSRLHERIANVRKNYHWELAHNLCDWAGMIFVEDLNLKGLARGFLGKHCLDAGWGQFFQVLEQCCRKRGVFFLKVDSKKTSQICPNCLTQTGKKELSERVHSCSNCGYTTDRDVAAAQVVLLRGLAAVGHTVKMLSEGKAVALPMTKESPRL

SEQ ID NO: 15088 - protein, 402 aa, Escherichia sp.
VKRLQAFKFQLRPGGQQECEMRRFAGACRFVFNRALARQNENHEAGNKYIPYGKMASWLVEWKNATETQWLKDSSSQPLQQSLKDLERAYKNFFRKRAAFPRFKKRGQNDAFRYPQGVKLDQENSRIFLPKLGWMRYRNSRQVTGVVKNVTVSQSCGKWYISIQTESEVSTPVHPSASMIGLDAGVAKLATLSDGTVFEPVNSFQKNQKTLARLQRQLSRKVKFSNNWQKQKRKIQRLHSRIAYIRRDYLHKVTTTVSKNHAMIVIEDLKVSNMSKSAAGTVSQPGRNVRAKSGLNRSILDQGWYEMRRQLEYKQLWSGGQVLAVPPAYTSQRCACCGHTAKENRLSQSQFRCQVCGYTANADVNGARNILAAGHAVLACGEMVQSGRSLKQEPTEMIQATA

SEQ ID NO: 15089 - protein, 429 aa, unknown
  TnpB Polypeptide
MLEEVLKLIVFQQSSLGKDVEDLIISIKENIEKSDQLNNSDLTPLDKFQTELELKLSIDSNLKKLQIKLSSLKLKQFHRICNVILSKAKPELVEEELILESKVTTIKSEKVSEPIKVTEPVPGIAKVRFLVYEDERFLVDELVVKEPKPGVFVVPNDFTGTIEEDFLDQKKKVVNPYSGVFASVFEKPENFFESKFFRKLTGSIGGKRLKLSDLNPSFSKESDIKLSDTDLIAGIDIGGTPTNLLTIAFSNKSSGIQMGSAKIFEVSKKYSNLFSRKIGNIEPLDMKLISDGIKDITDNLFKRFSKRKVKAIALGIVGGVDLSKPSTVDESVFQYFFRVMVEELLNSQFYLILCGERHTSQVDPTNGELACDADVKTTKLKRHGHKATLSSGNVVDADLNAAYNIIRIVRPFTKVSYSDNTYNLIRLTA

SEQ ID NO: 15090 - protein, 381 aa, unknown
  TnpB Polypeptide
VNLGAVDRQYAAIENNPFVDGEIVLKMVIQGQWYRLIFAFDNERFREGKATLPLIKVQDGTPVFVFTVVTDNPVVQFSGDYVIGVDVGINNYATVVVRDTKTGQIVHTSTLSQRVHSLWNSVRASERQVRALKKKADTLLSQRQGRMAALDEARLHREAASRKKRELAILAAQEIAYLSHAWGNAVVAVEDLSWVRNTMQNGRWNRGALVQWLTHYVSQNGGWVVAVSPSNTSQRCHKCGARVSHPTHKDSVCPEHGTMDRDINAASNIAARAVPRVTKARVTRAKNKKLQLQAPLKTPAVRNSLKYPGRDRTKGKPTPKRKKNRQVSKGVILPVCPARAQAQRLVARVLADQGARGALGTSTAALKQGNMTYECRLCSFI

SEQ ID NO: 15091 - protein, 398 aa, unknown
  TnpB Polypeptide
MTVTLSHKIELKANNKFKTYCRKAFGVSRFTWNWVLERVNDKRERKEKIDVLELKKEFNHIKRRQYPFVMEVTKYASQQPFIFLKRALSQFFDDLKSDKSSSKRKGFPVFKKKRYSSGSFYIGGDLVVVKNGSEIKDKRFGASDNKPYLHIPKFGWVMLREEIRFPGKINSVTISQDGDKFFASFSIETSEIVYEGTHKENAQEALCGCDWGVKDLLTLSNGIKVKGSKHLKRRQRQLARQQRKLAKKQHPRTKGDKTPKSKNYIKQSRKVGVSYLTLGEATPALSGGEAQRLKLAYEMETPLQGSVFVFDEPTIGLHPQDVKKLILIFDHLIQLGATVIVIEHDLELVTNCDYIIDMGPWGGKEGGRVVVEGTPEAVAANSENITGRYLKQVLAEDK

SEQ ID NO: 15092 - protein, 213 aa, unknown
  TnpB Polypeptide
MESDGTVLARKFINFPSEKDHLYQVLNRIKKFQRQHGSKNSSSFWAYAKRLNEELSKKIAASIVLFATEYHTDVIVFEYLDIKGKKSGSKKQKLHMWRKNDIQNLVEHKAHRIGTRISRVCAKYTSRLAFDGSGEVVRDLDNYSLCTFSNGKQYNCDLSASYNIGARYFIRELLKPVSVKRQSLLWTKVPEAERRTTCTLDTLRKVSDFLKVS

SEQ ID NO: 15093 - protein, 395 aa, Actinomadura sp.
MRFRLQPTSAQEAALLEHCAHARFVWNMAVEQHRHWKPGRASAPGYLEQCRQLTEARREFGWLAAGSQTVQQQALRDFAQAMSNFFAGTHRRPTWRKAGRHEGFRIVGQRGRHWDVRRVSRKSGQVRIPKVGWVAFRWSRAVPGEVRSFRVTRDRAGRWHVAFAAVPEPVPGPGTGAVVGVDRGVAVSAALSTGELLSVPGLRDSEARRLLRLQRKLARAKPGSNRRRRVKTAIARIKARENDRRKDWVEKTTTDLARRFDVIRIEDLRIRDMVRSGRGTIQMPGKNVRAKAGLNRSIHAAGWGQLVTRLQHKAPGRVEKINPAYTSQTCNACGHRAANNRESQAVFRCSACGHTDHADVNAAKNIAVGRTVTARGGQASARPVNREPHLVPSST

SEQ ID NO: 15094 - protein, 436 aa, Streptomyces sp.
VQFKWNVIFRCERWYSINTVIGVQLRYNYRAYPDASQRRALASAFGCARVVWNDCLRDRKEAHAAGLPYVKSAELSRLRITKAKRTKERAWLADVSAVVLQQSLRDLDAAYRNFFESVKGKRQGSKVGPPRYKSKRDTRQSIRLNTNAFSLQENGTVYVAKVGDLKVKWSRRLPAAPTSLTVTKDSSGRYFLSFVVDTEPSILPEVETECGIDLGLSAFAVLSDGTKIDSRRFLRRAEKKLRRLQRELSRKIKGSKNRAKARIKVARQHAKVTDRRRDFHHKASTQIIRDNQAVYVEDLLVSGLGRTRLAKSVHDAGWSSFVGMLEYKAVRHGRTFVKVDRAFPSSQVCSACGFRDGPKPLNVREWTCSECHTVHDRDHNASNNVLVEGRRIVAAGRVETSNACGAPVRRAHVPAQRGEAGSTRKGRTTQAGFPGP

SEQ ID NO: 15095 - protein, 228 aa, unknown
  TnpB Polypeptide
VSRDSYGLSKYSVRTGSFVKDSRGRWYVCLVVDSPKLDKPTATKATGIDLGLKDIATCSDGTVISNPKLYRKYEQKLGIAQRAKNKKRIRALHAKIANCRKDHLHKASTMLVKENALIIVGDLSAKKLVKTKMAKSVLDTGFSAFKTMLKYKCENASVLFEEVNESFTTQMCSCCGEITASSPKGRADLRIRVWECENCLNTNDRDLNSSKNILALGLKRLAVGITSV

SEQ ID NO: 15096 - protein, 418 aa, unknown
  TnpB Polypeptide
MEVDRTVRVKLDVPDERHDDLHQTIQQFQTAVNYTVDHGENDDGYLITNKSTIHDKVYHDLRDETDLPANLVVRSYSKAVEMLKSTVEDWKNGNSRPLPTFDQPTVVYDKRTLTIKDEYATLSTVNGRVEADFVLGEYQRSYLDADDYEKRMGELHYDPDTDTFYLHVVIQKEVEQRDGDRVLGVDLNLKNVAVTSTGRFFDGGELLWGQNHYFRVRRSLQDKGTRPARQALERLSGRENRFVLDRLHNISCGIVEEALRQDCSYIAVEDLTHIRERMDAHDDRLKRQMHNWAFRELQEQITYKASEYGIRVESVNPAFSSQTCSQCGHQSSTNRDPETGWFACNECGYEVDGDYNASKNVGLRLLALPSGKRPDGLGTGQLALKSGTLTVSDTSSVHSGLEFERESTDKPTPSGVGS

SEQ ID NO: 15097 - protein, 392 aa, unknown
  TnpB Polypeptide
MRAYKTEISPTKSQIELIHKTFGCTRYVYNQYVYENLENLASGNKFISAFNYSKRINNDPNTPLWLKEVSSKAVKQALIYADHAFKGYFSKRSGKPKFKKKGNNDSFYLIGTIKVERHRIFVPKLKWLRLKEFGYIPKNITSVTISMKNGRYYISCLCKEEKDERVATSGEGIGIDFGLKDQFITKDGIIPSINRSKKVRKLEKKLRQKQRSLSRKYEDNMVNKVYYKSGVKKGQLKSFQWKRPLHECKNLQKQQLIINKLRERLTRIRTDYNQKALQSILKRKPSFIVIEDLNVKGLMKNKHLSKAISQAQWYASRIFLQNQCEKLGIELRLVSRFYPSSKLCSHCGYKNKELKLKDRHWTCPDCHTVHDRDRNAAINLEKCPDYTVLTAV

SEQ ID NO: 15098 - protein, 382 aa, Aulosira sp.
MQTISVKCKLQVPVELRSKIDQTLQGFADACNQIYETAKRENCWNTTKLHHKVYKPVREATGLKANHVCQAIRRVIGNAKAVKQVHKFRPTSLSLDARTFQYIEESQTVGITLMCGRVKFKLSIGNYQMALLKGQSPTAATLNKTKRGDYYINICVDLPTDPTGRTPKVIGVDLGRRDIATTSTGKSWSGKQIQSVRDRYSKVRANVQSKRTRNSRRLLRRLSGRERRFQEWLNHNISKQLVSSAKRSNSALAFEDLTNIRESLNQKPRSKTERRRTNNWAFYQLRLFVGYKANIAGVPVVFVPPAYTSQTCSRCGGIHPIKGKSYRNGKAFKCGRCGFEHDADINAAINIAVLGKSVSLPGSPGMSCQLQGQMSLFPTIQI

SEQ ID NO: 15099 - protein, 402 aa, Lactobacillus sp.
LLVNILLKKGANHLVLKGLKLRIYPDTYQQEMIDFNFGANRFIWNQMLDMLIKRYENNKDSKFLNAFDLNNLLRQLKIEYPWLRRAESTSLQSTDHDLVEAYKRFFKKSHNFPKFKSKKYPKQSYQSKCVNKNIKMIDKTYIQLPKLGAMKFKSGKHVPKIIKSVTIRKSFTGKYYAVLLVECENQTFEKTKCTVGIDLGVADLAITSDGKKYPTIRFDKLLAGKKHYWEKRLTRRWLGAIQHIQYEKKFGLIDPKPLEQYSNYMKAKIMVAKYNEKIANQRIDYLHKLTTQLVKDYDVIVIEDLKTSNLIKNHKLARAIANQSWRELRSMLEYKCSWYGKELVVVNPYKTSQRCSNCAYDDGKHTLDVREWTCPNCHTNLDRDINASKNIKKLGLEQTLVN

SEQ ID NO: 15100 - protein, 373 aa, unknown
  TnpB Polypeptide
MKQKVLKQRFYPTLEQKVLLAQTFGCVRVVYNRILDMRTKAFYDDGVKVGYTDASKMLTALKKEDAFSWLNDVSSVALQQSIRNQQSAFKSFFEKRAKYPKFHKKNSKQSAEFTQAGFKYRDGNVFLAKSKQPLDIRWSYDKPESISTITVVKDCADRYFVCMRVEFEPEQYAPIEKMVGIDLGLKDRLICSDGEKLAAVSFTKKYARDLKLAQRAMQRKQKGSANRNKARLKVARLQAKIKDCRTDYVHKITSKLVKENQLISMEDLNVKGMVRNHCLAKSISDAAWGEIVRQMKYKAEWYGREFVQIDTFFPSSKRCGSCGYIHDLKLSDREWTCPECNTTHDRDLNAAQNILRQGMSLKACGLSESGVAA

SEQ ID NO: 15101 - protein, 282 aa, unknown
  TnpB Polypeptide
LQKLGVLKLAEALPSVDRPDLVTLTLDAAGQYFVSFCAEVEKASPSFSYRAPAVGVDLGLKHLATLSTGEKVDNPKHFQARLRYLRQQQRCLSRRQTGSRRRERQKLRVARAHAKVRQARQYALHDFTTRLTRKYDLIFIEDLNVKALSRGRNARSINDAAFGEIRRQLTYKSEWRDKILIAVDRWYPSSKTCSNCRHVLDELRLDVRYWTCPKCRVSHDRDVNAARNLLMEGLRQLAARDERDLRVDAGDACPEEILVQVLADEARSGQCNRARQEQARLH

SEQ ID NO: 15102 - protein, 279 aa, Okeania sp.
MSKKTKKKVKNLGCQQVLLHPDQELRAILEYLCGEANKVFNCSVYYARQVWFKENRFVSKSELCEQMKWNRHFNAMYASSAQQICNGVVESFSSFRQLLKLFGKGELANKPKPPNYRKPGLFTVSYPKRWLKFTNEGIRVPLGRKVKAWFGLEAFYIPMVSNLDWDSIKEIRILPRHGCFYTEFVYEMKTPVAVKLDAGQALSIDHGLDNWLTCVDTQGDSFIIDGKHLKSKNQWYNKQIATIKENQPQGFWSQRLARMTEKRNRQMRDAVNTRSAISY

SEQ ID NO: 15103 - protein, 349 aa, Streptomyces sp.
VKRAFKYRFDPTDAQAAELSRTFGCVRKVYNMALAARTEAWARQERVNYNQSSAMLTAWKKTEELAFLNEVSSVPLQQALRHLQGAFANFFSKRARYPRFKSKRKSRASAEYTSSAFTFRDGRLKLAEMAGSLDIVWSRPLPEGSVPTTVTVSRDAAGRWFVSMLCDDPTVKPLAATDAAVGIDVGLDHLLALSTGETIANPRHERRDRARLAEAQRNCARKEKGSANREKARRKVARIHARITDRRRDGLHKLTTRLVRENQTLVIEDLTVRNMVRNRKLAAPSVMPRGQSSGAFWSTRPPGTGGTWWSWTVSSPPPSCAPTAVPCRTGCRCMSAPGRATAERSTTGT

SEQ ID NO: 15104 - protein, 415 aa, unknown
  TnpB Polypeptide
MKGNVMTYRALTYIVKPSHQWYNEIDLLSYLSKNLYNSTLYYERQAYFNTKHFRFYNDLNREFTHSNQVDYRALPAKVSQQTQRAVEQAIKSYLKSKKNPERYKQAKLPHYLHKTKGRFPVFYQKDALSFVKQGFIKLSKTSIEVPCKLDKSVVQQVRLVPCTGYYKIEIVYKKKINPRKRLIKPQRFASIDLGINNLATVTSNVFSPIIINGRPLKSINQYSNKQIAKAQALLPKDVYTSKRIAFLYGKRYLKILDYLHKAGKQLVNYLVSQTIDLLIIGKNQGWKQNTKLSKVNNQKFVQIPYNRFTQILEYLCKEHGIDVVYQEESYTSKASFLDNDEIPVYGELEETPLFSGTRIYRGLYQAADGRMINADVNGSYNIMKKYLETNAAWDDQKWSDCVEVCSTPCVIEVSY

SEQ ID NO: 15105 - protein, 211 aa, unknown
  TnpB Polypeptide
MQVYYMKNLTVKTKQKNLIMKTQRYWELIMQCMEWLCFLKIYRRKMKDTSESEERLAREQRKLSHCVKGSNNYYRQKKRVALCHEKIRNQRKDFLHKLSYEMAEAYDVVAVEDIDMKAMSQCMHFGKSVMDNGYGKFRELLEYKLTWRGKKLVRVDRFFPSSKKCCKCGSVKKELKLSDRVYFCTCGNRIDRDLNAAINIREEARRMLLAG

SEQ ID NO: 15106 - protein, 263 aa, Streptomyces sp.
MSVDIPQGRDLRITRVHRRWGMVNIPEVGRVRFRWTKGLPVGKRANTDNRITGARLVKDALGWHVAFRTQTLESTPKPHTGPEVGIDVGVTVPLALSNGEAYCHRAWLTAEEQAKLLRLEQRAAHRKSFRKPGERTSRRLRATYDQIAGIRARAKRRHLDWQHKATTAIAAKYSVVVVVDLNITNMLRSAKGTVETQGKNVAQKSGLNRAISGEAWGRTVEPLTYKTAQLCGDGRPRPGGGRGGRCARRSKPRPVTTPVTGRG

SEQ ID NO: 15107 - protein, 433 aa, Bifidobacterium sp.
MMLEAVRTALDPTPAQERLLLSHAGAARFAFNAGLAHVRAMMEAHGKPEWSLYALRRWWNRTKDVLAVDADGVPWWRQNSKESYNSGLEALSDALSNWSESRRGRRKGRRVGFPRFKAKGRVTPRFAYTTGSFGIIPNDPKALRLPRIGRVHCMENVTKRVGGARVLRMTVSRHAGRWYAALTVERADDVPLIPPEGGAVGVDLGVRTLATLSDGTMIANPHTLKTNERRLKRAQKALSRKTKGSNRRRRARERVARLHARVANQRRDLLDKLTTRLASTYSDISIEDLNVHGMVRNHRLAKTIMDASFFEIRRQLEYKTMRTGARLHVIDRWYPSSRTCSNCGRVKAKLSLDERVYHCDGCGLVLDRDLNAAINIKVAGSAPETINARGADVRPATLRGDGQSTVKREPSGRTRGVSLGADTRKSVLQAKTN

SEQ ID NO: 15108 - protein, 398 aa, Lachnospiraceae sp.
MAVKKKNKPKSSNTDVYYICYKDEIVPTADQCSFIRFNFGAKRWLKNRMLEDDLFMYNEMGIHLHNTPADYKDQEECPWLKQADSLALANAQLEYEQSWTNFYEGRAKMPRFHSKHEAQSYTTNVVSNGEHSNLTYDESTGLLKLPKLKTLIKLKLHRKIKKGGVLKSATISMDRNGRFFVSLKYEYKEPKAAPSANTHTDNQGIRAIGLDMSLEHLYVDSDGDTAEFPRFYRQQEEKLAKLQHVLSGMKRGSKRYERQKRKIAKLHEKTAAQRRDFLDKLSYNLAYHYDVICIEDLNMHAMAQSLHLGKSVMDVGWGMFTRMLEYKCKRFGHTLVKIDQWYASSKTCCHCGSKKDDLTLSDRLYVCPVCGNIIDRDLQAAINIKKEGLRLYHQEQAA

SEQ ID NO: 15109 - protein, 274 aa, unknown
  TnpB Polypeptide
MLKTKTYKYRLYPTRKQSQRLQWTLDMCRILHNSCLLDRRNHYQRTGHGLSRIAQQEMLKVDKERLPFLREIHSQVLQDVLFRVEKAFDNFFGRIKEKNGKAGYPRFKGEGRYDSITYPQQPGFQITPQGLKLSKIGTIKIKMHRPIQGTIKTCTIKREVDRWYACFSVEYEPGQKSIPTKAVGIDVGIRSFAVFSTGEAIENPKYLGKSEKKLAKRQRELSLKKKGSASRKKARLIVAKLHRKVRNQRSDFHHKLSRKLELMCLFILERSSST

SEQ ID NO: 15110 - protein, 399 aa, unknown
  TnpB Polypeptide
MKLTTKFRLEPNFEQEHHLHNLCSIATKLYNTANFERRWVWENTCKIPNVYMQKKELKNNHWFKLLPSQTAQEVLFNLQQNYNSWFKLMKVDSTANPPKFRKKEMLSTISFYQQFEVIGGRIKLIMSLKYRKENNIKFIELPFTEWKQTKGIPKFCQIIFDKGKWLAHVTYEVDEQQPVLNDKVMAVDVGVINIAATTDTEGESRIYSGKQILAIQHYRHKEKSKLQSSLMLQYPKRHSSRAIRIVEAKAKRQTEQSFHTHSKNIISDCIRKGIKTLVVGDITNITKGKSFGQNNQKLHSWSFSKFIQQLEYKAVQAGMRFVRMSEAYTSQECSVCGTIRKSNRKKRGLYNCKICGSLINADVNGSKVMLKRYLRDFLSRSIGIVAMPSVARITNVCPS

SEQ ID NO: 15111 - protein, 408 aa, unknown
  TnpB Polypeptide
MQEYQQNTTPVVRVHVFPDLPRTTLACISAGRAEAAKVWVCCRDLHQTARTSRTRWPDMRALQAATRGRFALHSQSIQQVFRAFLGAVDTTRQRRAAGDTWMKYPWRDKRYYPLLWPAQAVAITARHIILPMGRGRASIVLPKPEGFVPGACKLVWNGSANELHVTVEVSAQAERDSAVVATVDLGQIHQCAVTTNTGAALIVSGRGQRSLKRRQNKMHGEIARRQSRCQKGSRRWKKLARARHKHAGRIERQVRDLAHKGTRAVADFCAAQDVGTVFIGDPHGVRKKRNGRKHNQRMAAAQYLQLHASQSEPVGRRAASYWPPLSAQAPRLRDIERRQSAPQPSGSTGATRTIWPRSWAAQALRASPGVRGEPQAGVRNVATSTSRKAACGSAERVASQATATSWAV

SEQ ID NO: 15112 - protein, 543 aa, unknown
  TnpB Polypeptide
MALVNYEKEGAIKPLTEKKSNSNFVTVGCLLAFDKDEDKGRVLTLMRKFSSIVRFAYKRLMEGAERKELKKLLSQKYGINTRYSDDAILLANQNLESCLERNQNPKKLVFGSRELFEQLKKKHLGGKRRETLRQKWEERRYGILQSRGDKSKEGNLNIRLVNLNNQWNLRINLGNGEYVWAKVIRSAKRKTDKWVGFISDIEQAEKTGEWFPYTVRLKLRNGKIYAQFSKEENSLEVTITKDNGVIGIDINAYPFHLALVYTAKDGNLEKYERFSLGQLLEGSSEKRAYLSWQTAHQVVEIAKRERKAIVVENLEKLPKGKRGDGLPKLRRKLQKWVYKALLQKIEIVARRNGIQVIKVNPAYTSIIGKLKYAPLYNIDKDTAGAYVIARRGLGFKERMPKNYKQLLKDAEFLSYAIAKIEDKIAKIKQEIRKEKNEHKRNRLKSILWKTRKELDKILRYLRESGESESAAQQTVNRKMERVRGRAQALQKSWQVLSVALAFSCLESLRDFSPLKRVIFARDWVGAAKQNGLVPPYLVRGRLY

SEQ ID NO: 15113 - protein, 367 aa, unknown
  TnpB Polypeptide
LNIAYRFRIYPTEEQKILLGKTFGCCRFLYNQMLNDKIREYEKTKKMLKNTPAMYKREYPFLKEVDSLALANVQLHLEKAYKNFFRDPKIGFPRFKSKHHSKNSYTTNVVNGNILVESKKIRLPKLKWIAMKKHREPAEGLRLKSVTVSMEPSGKYFASLLYEGYSCENQAAEPDYSTAKILGIDYAMQGMAVFSEKIETEEAGFFRKNEKRLAREQRKLSRCVRGSHNYELQKKKVARCHEKIRNQRRDHLHKLSRKIADSYDAVAVEDIDMKAMGQCLHFGKSVQDNGYGMFREMLDYKLAWKGKKMVKVDRFFPSSKKCCKCGRIKKELRLSERVYHCECGNEMDRDRNAAINIREEARRMLTA

SEQ ID NO: 15114 - protein, 388 aa, unknown
  TnpB Polypeptide
MKITLQVKLAPSPEQYQILLTTLETFNAACNSISRVAWEKKVFGKFALQEIVYKDVRSTFHLSAQRTIRAMAKVSDAYKTNRKTLCPFKPHGVMIYDPRILSFKGLSKVSLLTLSGRQVPPRGMGNYQKTRFSRGKAQADLVPVDRVFYLLVTLDIEEEPPLNPKDFIGIDLGMVRIATDSTGENFSGEQVEKFRSRYHHLRCSLQKKGTKSAKRKLKKIARKESRFRKEVNHVISKKLVQKAKDTPSGIGLEDLSHIRGRTTVRKSDRARHRGFCFHQLQQFIHYKAKIAGVPVVIVNARNSSRACSCCPHIAKCNRKSQSLFFCSNCCHTENADDNASKVISFRADKSYGLSQSTQVDSAQSLGTASRRALALAVYDYQGGIFTFK

SEQ ID NO: 15115 - protein, 458 aa, Pseudoarcobacter sp.
MKILNHQMYIYNQAYNIFLNLWQKENSKNKKLDKEDRVFRNAVSYDTVVKRALRLRKLSFSTVVTQQARINFLKAVKKSFSKENVSKRLKAIEIATTPKEKVKAFKLGMPTFKSSRDIFQSFNWNNQGYQILDDINNNTRFKTLRLLKTNFRFRCHRTFPNNYKLSSITISKDAIGYYVSFGIEFNKQVGLVVSKDNLDITKSIGIDLNAYNFAISNNVDFIQDSNIAKVTLNHLIDNGATNRKGLKYKNTIKVHIRKQSRRVLNELKNCKQSKTKFKLGSNHKKTQKKLNKLTKRISNQKIDLYHKITAELTNKFDLIVVEDLKTKNMSKSSKGNEITHGKRVKQKSGLNRTILNASFYQFVSMIQYKTTMLNDKLFVKVNPQYTSQECSCCGNIDKNNRPKQDKFKCTACGFEINPDIQASQTILKRGLESFGLGTSLVDLNKHKAFRSTSLEVAS

SEQ ID NO: 15116 - protein, 411 aa, Chlorobiaceae sp.
MKLLQAYKFRIEPNGEQQRVMRRIAGSSRYVWNKALAIQIANHEAGIQHTNHFGMNGWLPVWKKEKDLLWLKEPPAQLLQSALKDLDRSYKNFFEKRAAYPRFKKKRANNSFRFPQGFHLDAVNSRIKFPKLGWIRYRKSREVDGVIKNITVSCVAGTWYASIQTEREVDRPVHPSTSTIGLDVGITVFATLSDGTVFEPVNAYRKNMVKLAKLQRKLKRKKKFSRNWKKQQRKIANLHQHIACIRKDFLHKASTIISKNHAVIVLEDLKVSNLSKSASGTIEEPGRNVKAKSGLNKSILDQGWAEFRRQLEYKQLWRGGEVVTINPGYTSQACSACGHVSSENRKTQSRFECVVCGFAENADLNAALNIQRAGHALSACQVNGAPRPSAAGTRRSYQHHGVSDAVGILVL

SEQ ID NO: 15117 - protein, 274 aa, Mycobacterium sp.
LAISVRRNGTRLDASVRVLVQRPQQPKVVHPGSRVGVDVGVRRLATVATADGTAIEQVENPRPLGAALRELRHVCRARSRCTKGSRRYRERTTQISRLHRRVNDVRTHHLHVLTTRLAQTHGRIVVEGLDATEMLRQKGLPGARARRRGLSDAALGTPRRHLSYKTGWYGSALVVADRWFPSSKTCHACRHVQDIGWDEQWQCDRCSVVHQRDDCAAINLARYEETSSIVGPVGAAVKRGADRKTGPRPAGGCEARKGSSPKAAEQPRDGVQVA

SEQ ID NO: 15118 - protein, 354 aa, unknown
  TnpB Polypeptide
MILTYKVKHNTDLSTELSKARQVADFAINNRDKLSSKWVKHFGLKSAISNQILRKYGKNKKCKSVQSVKLIIPNQCIKIIDKRIRVIPLNINLKLDKEFEKVNLIEMDEKYAYISVTIKEQETFKPINHIGVDLNATSHCAVVAIKETGKVFKLGKSAQHQHNKYKFIRRDLQKKGKYKKVKQIKNRENRIITDINHKISRFIVNQAVSNKASINLENLNNVRKNKNHKKSFNHTLHTWSFYQLKQFIKYKATLAGVTLSLIDPAYTSKCCSICGTIGDRKGKYFKCSHCGHVEHADVNAAFNIAFPSQSIVQLQAERDACKGNSDIPQGAPLISQTTLKIQQLKNSGYVSLRR

SEQ ID NO: 15119 - protein, 403 aa, Lactobacillus sp.
VDRMPVKTHKIRCYPNAEMRTVIAELMDYNRFCWNQGLTTWNDMYEASLIMDDKKLRPSERKVRNELVLDKADWQYQRSPRVLQTAIHRLHQAWRNFFNPNMPDAHKPKFHSKRDPKQSFTTDRATVRGKFLRLDRPRESKHHFTDIKLAEGLRFSGAIKTVTIIKHGNKFYASINVSVADTPRPAFYESWDIGGIDLNVGHISWNGGEVSTFTPQMAFLHQRVKVYQKRLARKRRENPKHFRSKNYQQTQTKLSQTYQKINALQNDLIHKFSHRITKVFAVLCLEGLDVRGMQMAKNKVKNLQRSLFRRLRTAIEYKAAWQHQHVVIADRFFPSTQRCSNCGFIKTADSYGGKMTLRGDSIYHQHDVYRCYECGLVMNRDENAVQNLIAYAAGLPPEWEIVH

SEQ ID NO: 15120 - protein, 417 aa, Symploca sp.
MLVLEYKIKAKPAQYRAIDEAIRTVQFIRNKCIRYWMDSPKGTKIDKSALSRHSTELRNEFTFVKDLNSMACQASTERSWLAISRFYSNCKSKRPGKKGFPRFQKNNRSVEYKTSGWKLHPTKRRINFTDKKGIGELKLLGKWDIHTYPVKAIKRVRLLCKADDYYCQFCVDVECIDTQPKTGQEIGLDVGLESFYTDSNGYTEPNPRFLRIAESNIKQAQRRIYKKQKSSIRRRKARARYSRKHLRVSRQRKEHAKRLARNVCKSNDLVAYVRVACRRQDLRVSNMLKNHCLAKSIAVCAAWCDSSIASWYQFRQWIEYFANKFGKLAVAVPPQYTSIECSQCGRVVNKSLSTRTHICQCGCQLHRDTNAAINILLRAKSRGGHPRSNAKGVATSTLVGATLLEQVATTNLESPSL

SEQ ID NO: 15121 - protein, 192 aa, Cupriavidus sp.
KRHEAQLRRAQRAMSRKQKFSNNWQKAKARVRRIHARIGNARRDYLHKATTTISQNHALVCIEDLQVRNMSRSAAGSAEKPGRHVRAKSGLNKAILDQGWFEFCRQLEYKLAWNDGWLIRVPPENTNRTCPACTSVSADNRLTQAWFACIECGFEGNADVVGAINVLARGRRVAACGEPVQSGRSAKQGPTE

SEQ ID NO: 15122 - protein, 372 aa, unknown
  TnpB Polypeptide
MNDVYRFRIYPNKGQQELFTKTFGCVRFIYNRMLAEKMEYYENTGKDLKVTPAKYKAEFPWLKEVDSLALCNAQLHLQAAYKNFFRNPLVGFPKFKSKKKPVRSYTTNCVNGNIQLKEGKLRLPKTGWVKIKQHRRIREDDVLKGAAICQEADGKYYVSLLYEREEPQRLPIVPDNAVGLDFSMAGLYVASDGEQGDYPRYYRKSQEKLARGQRKLSHCEKGSRRYEKQKRKVARLHSHVVHQRKDFLHKASRKITNSYDIVCIEDLDMKEMGRGLHFGKSVADNGWGMFTGFLGYKLEREGKQLVRIGRWYPSSKTCSRCGKVKPSMGLEERIYDCTCGNHMDRDWNASINIRREGLRMIGIDLDRERTAF

SEQ ID NO: 15123 - protein, 392 aa, unknown
  TnpB Polypeptide
MLIRKAFKFRIYPNREQREALAVQFGHARFVYNYYRAAREGYYLDTRTGLNYRDCADHLAGILKAEYPWLREADSQALQAALKDLDRAYVNFFEGRADYPKFKSKHGKQSIRYPQRFKVNGNKIYLPKVGWVKTVFHRPIEGAMKNCTVSKTKSGRYFVSIQVEVEIDEPTPLPTSVGVDLGLITFATLSTGEKIDKPKHLHRSERRLKIRQRRLSRKRKGSNGRNKARLPVAVLHERIANQRKDFQHKLSRQLVDRFGSISFESLNISGMLKNHSLAKSISDAAWSQFVTFCEYKAGWSGGQVLRVDRFFASSKLCSGCGEKHKTLTLNMRQWVCLNCGVVHDRDINAAINILKQATVGATESYATGSPSGGHERRLLAVQPLKPNAFRLG

SEQ ID NO: 15124 - protein, 367 aa, unknown
  TnpB Polypeptide
MKCRATIKLKIQNRKEISRMFSAYLKACQYSADSALKNKCKTKFDLHHVIYNKIRKKFGLKSQFTINAIAKGFETYKSCKKKVVFKSVPLRFDRRTFSFFENYIRITTDKERINIPIFIPEYHRKYLSWNYQTADLVMNRSEKIFLNITFSRNVESIRGNSIVGVDLGINNLAVCSNGKVFKGEKTKIKQFHYLRRKLQAKGTKSARRILKRISGRQKRYMAWINHNVSRQIVDSADIIVLENLKGIRKCRNKYRGKRLNRWLNGWSFYQLQNFIQYKASFVGKKTAFINPHMTSKTCSNCGNIGSRCLSRFVCSDCGFSCDADFNASCTLRRLYVNQPNVSDCDAKAPLGELKRNSGTMTYNVNNG

SEQ ID NO: 15125 - protein, 445 aa, Bacillus sp.
MFVAVQRGYVYRAYPTDEVKKYFLQCFGAGRKMYNLHVDRLYQYLESIDYQIGERIDTKELKNKIPSVAEFKKMFVDSDGNLYLYNVDAFACNEAKQHFYKALNEFNKIAFQKQFKKSALKRKDTMGKELSFRDLKVLPKFHSKKNNNFSYTTFNQNGNIQINENILTLPTAQKSELREVKVKLKLHRGLPKDSLIKNVTVSMNANGEFYVSLCVEFALEITDIEKTTIILGLDYSQSSFFVYSEGKKANYPLFMRQAEERLKQEQKKLSRMDKGSNRWNKQRKKVAKIHIKVANQRKDWLHKKAFTLAKRYDMVILEDLDLRSLSQNPDYAKKQQDNGFGNFRLYLKYKLEQQGKIFLKAPRTFPSTQLCSNCGFKNTKLKGIKNINIREWDCPKCKCHHDRDVNSGINLKQYGEKHIHEKNLLVSYLLKYKGFARLPTVSSTD

SEQ ID NO: 15126 - protein, 430 aa, unknown
  TnpB Polypeptide
MKLTKTLKFKLEDLSNHERYVLSQTQSQFRRSVNFYLHQVGRKGSTNVTDYKNEYKRARNIFRLNSALIQQSKRFAINQYKSYKNNKNNDKFPHFESFVDVRYDNRTITFKEENEESSELEISLATTQSRIEAKLQGGEYCFEEFQAGNFQDARLFRQGGEYYLNIHIQREAEIQDAEESEYYIGVDLGVNNLATIAVQNRKGEVVETKFFDSSYVSEKKRRFNAKRREYMRKGLWSKLKQTRGKEKRFIKDVNHKISKYIKDLCEKYKDSTVVMENLDGIRQGLNFSSKQNRRLHNWSFSQLQEFIIYKTHEAGSSYRRVPPYDTSQVCGSCFGEISRHKRNYATGTCETCKKEALNVDLNAAVNIIQRLWYYITRDAYEDTASQTEPREFGSEDLKSKFHQGSIDGEVDTAAVDFENQLVSSLSLSLP

SEQ ID NO: 15127 - protein, 400 aa, unknown
  TnpB Polypeptide
  misc_feature (361)..(397): Xaa can be any naturally occurring amino acid
MRTVSSYGVEIRKQNIPVRQTMEIYRQAVSYLTEIYAQVWEELREIPETKKRFNTAEHMVHMTKKNTARFDFDLRFPKMPSYLRRSAIQHALGSVSSYETRLGQWKETGVLSGRPKLTCRNHAMPVFYRDVMYREGAEGKDEAYLKLYDGHDWKWFRVYLKRTDMEYLRRNWKGKKTSAPALEKRHRRYFLRFSCTEEVTLTKTPVKEQIICSVDLGINTDAVCTIMRSDGTVLGRRFIDHPSEKDRMYRTLGRIRRFQREHGSAQTQGRWAYTKRLNTELGKKTAGAIVRYAEENHADVIVFEYLEMQGKISGKKKQKLHLWRKRDIQRRCEHQAHRKEMRISRICAWNTSRLAYDGSGXXXXXXXXXXXXXXXXXXXXXXXXXXXXXXXXXXXXXGNF

SEQ ID NO: 15128 - protein, 372 aa, Clostridioides sp.
VIAVKKAYKFRMYPNKKQQELINKTFGCCRFVYNKYLAKRIEVYKNDKETFTYKQCSSDLTNLKKELKWLKEPDKFSLQNALKDLDNAYKKFFKEKAGFPKFKSKKINRFSYKTNFTNGNIMYCGQYIKLPKLGMVKIRDKQVPQGRILNATISKEPSGRYYVSLCCTDVDIEAFENTNNHMGLDLGIKEFCISSCGDFIENPKYLKKSLNKLAKLQRELSRKTIGSLNRNKARLKVARLQEHIANQRNDFLQKLSTKLIKENDIICIEDLQVKNMIRNRKLSRLISDVSWSEFIRQLEYKANWHGRQIVKVGKFFASSQICNKCGYKNEEVKDLNIREWICPSCNETHDRDINASINILKEGLRLITIQNK

SEQ ID NO: 15129 - protein, 465 aa, Acidimicrobiaceae sp.
  misc_feature (12)..(12): Xaa can be any naturally occurring amino acid
LRSPLWSSCGRXPRRYSPPEGQIIQAFAFALDPTDEQSAQIARFFGARRKAFNWTLGQIKAELERYRETGESGAPPTFYSLRRRWNAAKDTVCVNQNTGEVWWPEVSKEAFADGVRGATDAYWRWQKSRAGTLKGRRVGFPRFKKRGKDRDRFSFSTGPMRLEADRRHLTLPVLGTLRTHENTRRIERLIALDRAKILGVTVSRQGELIIAAVRVSVVRPQQAGVAQSDSTVGIDVGVRRLATVATTTGVIGELDNPRALEHRLSELRRLQRQRARRTRGSRQYAQTTIKITRLHAEVANLRRHTIHVFTTALAKTHGVIVVEGLDAASLLQQKGLPGARARRRGLSDAAMGEIRRQLRYKCPWYGSTLIEADRFFPSSKTCHACGHVQDTGWSEHWTCDECSSSHQRDHNAAINLARWASLGSVGAPVKRGAEHQTESHSAAGDDTRKGSPALVGPNNSVRSAA

SEQ ID NO: 15130 - protein, 341 aa, Aphanothece sp.
LQQSLRDLDVAFKNFFNSCTGKRKGKKVKPPKFKSRKSKQSAKFTNNGFKVNQHNVYLAKIGKLKIIWSRKLPSEPLSVTVVKDSADRYFLSFVCEVNPIPLTLNNNSIGVDLGIIDFATLSNSEKIKAPKPLKSNLKRLRKLQRNLSRSQKGSKRREVARKKVAKLHAKITDIRTDFLHKLSTKLIQENQLIALEDLNVSGMIKNRKLFRTISDLGWRSFRTMLIAKGEMYGRDVRVIDRWEPTSQVCSCCGFKGGKKELNIREWTCLNCGTVHDRDVNASKNILKVAGGQSDTKNGRGGRRKTTSLVAVSCEASTTPQYKQRKLVLRESPPFYGAGGCQ

SEQ ID NO: 15131 - protein, 375 aa, unknown
  TnpB Polypeptide
MSQANLVRKAHKVRLYPTDEQKVLMAKTFGCCRHVYNVTLAVRNDAYRTFGVSLTGYDCMALLPEMKAEKPWLKEVDSTALQAAVGDMDSAFKKYFDGRKAGRKVGYPKFKAKKHCKASFQCKMGIDVGSDFVKLPKLGKVKAVISMPIVGKVKHITVSQTKTGKYFASISVETVVSELPKTGKEVGIDLGIKDLAILSDGRKFENPKAYRTLEKKLAREQRRLSRKSKGSKRREKQRLKVAKVHERIANCRADAIHKMTTAIVREFDIICIEDLNAKGMVKNHNLAKSVSDASFGEIARQLQYKADWYGKEVVKIGRFYPSSQLCSNCGYQNKEVKNLDIREWACPCCGTHHDRDINAAKNIKKEGLRRRFAAA

SEQ ID NO: 15132 - protein, 382 aa, Synechococcus sp.
MTQVLTVSCKLKVTQTQAAKLSATLSVFTEALNWVNANTPAKVVNALKLQSLCYYEIRARFGLSSNLAQQVCRRVAGSRKVAQQKNRPVKEFKKPFVTYDARTFSFREKDWTVSLNTVEGRERFELAIGNYQRGQLAGTKPKAATLVQRRDGAFYLQICLETETPTATSQERVIGVDLGRTDIAHTSEGDNWHGQQLNTVRDHYSKLRAALQHKASKGTRSSRRRCRELLQRLSGKERRFQSRQRCVATTWVNHRISKATVARAKATNSAIALEDLTGIRERVNQAPRSTTERRRANRWAFYQLRSFISYKALQAGVRVVLVDPRYSSQTCHRCLHIHPDPEQSYRSGKQFKCGHCGWEGDADFNGANVIALLGAAVNQPRG

SEQ ID NO: 15133 - protein, 372 aa, Oscillochloris sp.
MIRAHTIRLNPTPEQANLFRQAAGTARFCYNWGLRAIKDALDRGEKLPHARALRDEFKRIRAAAYPWTFQVGKSAIEGAFVNLGQAVTNFFASRRGRRKGKRVGFPTFKSRRRGYGSFYVANDRLTVDGHTLTVSKVGHLNMTEALRFTGKILGATIRYQAGWWWISIQVELDHTPPTHTGPAIGVDLGIKSLAVTSEGEVVENQTHLKAALRTVKRLQRSVNRKVKGSANRRKAVLKLATAHFRVACQRKDVLHKLTTDLVQRASLVGIEDLNVAGMRKNHCLAQAISDGGFAEFRRQLDDKAPAAGSQVVAIGRFYPSSKTCNHCGQVNADLTLAMREWDCPNPDCRAHLDRDLNAARNIRDEAVRLAGV

SEQ ID NO: 15134 - protein, 286 aa, Escherichia sp.
  misc_feature (286)..(286): Xaa can be any naturally occurring amino acid
VKRLQAFKFQLRPGGQQEHEMRRFAGACRFVFNRALALQNENHEAGNKYIPYGKMASWLVEWKNATGTQWLKDSPSQPLQQSLKDLERAYKNFFQKRAAFPRFKKRGQNDAFRYPQGVKLYQENSRIFLPKLGWMRYRNSRQVTGVVKNVTVSQSCGKWYISIQTESEVSTPVHPSASMVGLDAGVAKLATLSDGTVFEPVNSFQKKQKTLARLQRQLSRKVKFSNNWQKQKRKIQRLHSRIANIRRDYLHKVTTTVSKKHAMIVIEDLKVSNMSKSAAGTVSQPX

SEQ ID NO: 15135 - protein, 413 aa, Streptomyces sp.
MGTPVEEGGRLVIRAYKFLLRPTARQTAALGEMLRDHCSLYNGALQERRDAYRHASKTAVRYGDQSAQLKEIRAFDPERQGRWSFSSQQATLRRLDKAFAAFFRRVKAGQTPGYPRFKGVGHFGTVTFPKDGDGCRWDSTPHDAQTRVRIQGVGHIRVHRHRPVQGRVKTVSVKREGARWYVVLACDNVPAEELPPTGAIAGIDMGVAHFLTTSDGEHVANPRFLQAGADELAEAQRHLATFPKRTRRRTKRHRAAARKVAKLHAKIRRQRADFHHKTARALITDHEVIAHERLNTAGMTKSPRPKADPEQPGGFLPNGAAAKAGLNRSILDAGWAQFLGILANKAESAGRLVVPVDARNTSRTCPDCGHVAKENRVTQAKFQCTACGFTANADHVGATNVLSRAGLVLCAAA

SEQ ID NO: 15136 - protein, 276 aa, Methylococcus sp.
VPTDGKKIKRPIVGGYLSVLIETQDALEAKTHSGAVGVDLGLKTFATLSTGEFIKGPKPHRALGKRLRRLNQSRARKTQGSANFSKAKSKLSKPHKRLADIRQDAVHKLSHRLATTFIVMGIEDLNVKGMGRNGHLARSVGDAGMRMFRTQMEYTSAMTGAFLYTHPRFAPRTKVCSGCGQIHEMPLGKDTLSCDCGLVIDRDLNAALILKTAASSAVAALWREWLWRCLGCVKPSSMKQEEKVRCERFNQTFQSGIQYLPGFGRSGTHLRSAPTD

SEQ ID NO: 15137 - protein, 429 aa, unknown
  TnpB Polypeptide
MILRAVKIRLYPNKTQEQTLNKVLGCYRFVYNQMLAHKQEAYNADKINLGLCELSRFFHGELLRDEQYAWLKEQNTKVMKQAIRQMLSAYDGFFKLGKGFPKFKTKHDNNSALFPCEAISKSNTFETKHISLIKSLKNLKFRCSNLYFNRLQRYKDNIKSATLSKTKSGKFYLSVLLSMNEEEFKQFRHTDNRVGIDLGVKDFVITSDGEVFENKHFFKQSENKIKKLQRQLSKKVKGSNNRYKTRLKLAKAFEYLSDQRINYIHNVVNSLLKTYDYVFMEDLNVQGMLKNHKLAKAIQELGFYTFKNILRNKAMINDKFVIEVDRWFASSKTCHKCGYVYKGLSLNEREWTCPVCGTKHDRDLNAAMNILIEGNKILVGSRTAEFTLVENPTAERRTTRMCGAVDDRCESNLKSSVSLKQEVGTKSNS

SEQ ID NO: 15138 - protein, 327 aa, unknown
  TnpB Polypeptide
MKKKFVVSRQGNAQELTEQIKKQGWTEFGFPKKGKQKLTAKVYFPPKLLFYLQNGACIKVFQVKSGKAPNFKPRVDVVLEGLPSCFHSNTLLRNYLSNIPKKKEATIGIDINRLGLYMVSFNTPINLPFDLLQLIKRYNHLSKKVLPELNKGLLRKRKEYDSHGYCKLKGEISRVYNRRTKILREIVQRLPHFIAAVLVKKHCRALKIERLTINPTGARGALAKAIYNMPDNKLIYKKAVWLASLELNYDVLLEEVLPYHTSSHHFGCGGMLTRQLNQHDFVPCKKCGQQVNTHENAARNIASLPGKLLTLDPFPSSHVQGNHLNDG

SEQ ID NO: 15139 - protein, 398 aa, Streptomyces sp.
MVTTHVKRAFKYRFYPTDAQAAELSRTFGCVRKVYNMALAARTEARTRGERVNYNQTSALLTLWKKTEELAYLSEVSSVPLQQALRHLQVAFTNFFGKRAKYPRFKSRKKSRRSAEYTTSAFRYRDGKLTLAKMSEPLDIAWSRHLPEGAAPSTVTVSQDAAGRWFVSMLCEDPTVVALPATDTAVGIDVGLTHLLTLSSGEKITNPRHERKDRARLALAQRRLARKAKGDGANRAKARRKAAKVHARITDRRRDHLHKLTTRLVRENQTLVIEDLTVRNMVKNRSLARAISDAAWSEFRSMLEYKAAWYGREVIAVDRWFPSSKLCSNCGTIASTMPLHVREWTCDCGTTHDRDVNAAKNLLAAGLAVTVCGAGVRPQRSSPGGQSATKQKTPRREP

SEQ ID NO: 15140 - protein, 409 aa, unknown
  TnpB Polypeptide
MLYNSRMPAVQRSFKIRAYPNGAQTRMLNQWFGAARWVWNYALDSRSKAYKRRKESVTGTDISRRLTKLKTLPRFAWLAKVPATCLTQTLRDQDAAFSHFFRRVKAGETPGYPKFRSRHDQAVSLRFQDVSLPKWAKGTVSLPKLGPVKIAEALPEVACPDMVTLRRDPDGRYYVTFSAAVEIEALPAVNRAVGIDLGLTHLATLSTGEKIANPRHLANRLRYLRQQQRRLSRRAKGSKRREKQRLRVAKAHRKVADCRSYELHRLTTRLVREFDVIAIEDLAVKNMIQHPRLARAIADAGWGEVRRQLEYKCAWYGRQLVVVDRWLPSSKTCSSCGHKIEKLALSVRGWTCPDCGAVHDRDQNAAQVIVAAGMRQLGPGEPGDLRVEGPRGPNETRTGRMANECTTHE

SEQ ID NO: 15141 - protein, 399 aa, unknown
  TnpB Polypeptide
MVWCCAGPLPLSHLPVTRTAAGLGKSVRMCPGGLQRRVAFAGHLPHGRREDLRHRGSAPGCYRRETHPGSGLAIRGRIGGAGPGLSGCPPGLPELVRLIVRQTQGARGWASEIPVQARRQSVRLTRNGFTLRGTWLYIAKVGEVKVRWSRPLPSQPSSVTVIQDTDGRYYASFVLEREPSPLPQCRRAVGVDLGLASLAVTSDGEVIANPRFLQARQRHLARAQRALSRKARGSANRAKARRRVAVLHRKVREARLDHAHKTALRLVRDNQAVYTEDLSVAGLARTRLAKSVTDAGWSQLVRLIEEKAAWYGRTFRRIGRWEPTSQVCSACGAKDGPKPLNVRQWACAACGTVHGRDVNAARNILAAGQADRLNACGGGVRPGSVLAAAGETGTLRGAA

SEQ ID NO: 15142 - protein, 406 aa, Aphanothece sp.
MQLVERHLIKPRHKYFGECDKLCLLSKNLYNLANYIYRQNFFSGVMTNAIEVYHQLKTTPEYQALPSKVAQSTLRLLLRNWTSYISASKAYLQNPNKFKGEPKIPHYKGKRSKNRSDGRYVVTYNNQAISKKCLKKEQIVHPSGTNIFLPSKASFVDEVRIVPKTSCYMIEVVYSTEEKPSLDEQRIASIDLGLNNLCTLTYNLPREKPVIYDGRAIKSANQYANYRNAELRSQLPDTQQTSQRIERLWRKRNQKVDYFLHTTSRAIINDLVQKNIGILVIGWNEEFKNGINLGAVNNQKFASIPHKRLIQQLEYKGKLAGIKIVLVNEAYTSKCSALDHEPIQKHHSYLGKRLKRGLFQTATNLRINADVNGSINIGRLYLLKVVGNGNIPHPIEEPVRWAGSPT

SEQ ID NO: 15143 - protein, 413 aa, Haladaptatus sp.
VSGPEYFKRTAVTRLAVDSTDHEHLLAMVREWKRGCQIAVNTAWGNCHTRSEVQKLAYDVLRERTDLGSQHAVLATHRAAEAIKGVLDRNDGTTENADKPTFTSPTVVYDTRTMTLFDDRAVSLTTTEERVHCDLVFPDGSYLTQYLNDDRWEAAKSNLCYRDGQFDLHLGFRAERPEIGASDEVESSENDATVLGVALGVENVAVTSTARFFSGEKLDHRHREFSELRTALHETDTRSALRTLRQAGDKNDNFARDTLHTVAGGIVEEAEKHGCSVIAFGELEAVRELLPEADEFHAWAFERLFDFVAYRAEEHGITVAQVNPEYTSQRCTSCGFTHPQNRDAERTHFECLKCGNEANDHYNAAKNVGFRCIRRGPLSSRGVGAKYCALGSGRVTPDGDFVPNEELAEVQKP

SEQ ID NO: 15144 - protein, 315 aa, unknown
  TnpB Polypeptide
MAGNIAPEAAAAVRYTVLKLRLHPTPEQAALMEQTFGCCRYLWNRMLADAGEFYAATDLQYIPAPARYKKDAPFLRAVDSQALCAVHQDLRQAFLDFFRRPDHFRRPRFKRKKSGRDSFTTPCRRLPSGPTVYLTEEGVRLPKLGVVRAVFHRRPLQGWSLRSVTVTRTRSGKYFASLACSYEARIPRRPAPSAENTLGLPALPDPPGLDRSRAKLARARKKLSRMERGSRHYEAQLQKLRLLHERAANQRRDFIHKESRRIANAWEAVCLGAGTGLLEECLRYKLEEQGKRLIVVDGPAGTPEELRDQGLAQIA

SEQ ID NO: 15145 - protein, 379 aa, unknown
  TnpB Polypeptide
MRRTFKYRLYPNTTQTLSLEYQLAEARRLYNGALQERRDAWKMQRATCNYYGQANQLKEIRAAGHLGLTNYSACQDVLRRVNKTFQAFFRRVKAGQKAGFPRFKSHRHYHSYTFPSYGDGCKLRDNGRLYVQGVGEVKVKLHRPLEGQVKTLTLKRQCGKWYVCFSVEAAAQPLPSTGQAVGIDLGLTHFAVLSDGTEIANPRHYRKAQAGLRRAQRKVARRKRGSNRRRKAVRELQGVHTHMRNQRSAFHHRASRQIVNAYDLIAVEDLNIKGLAGGMLAKSVHDAGWGEFLAKIDYKAESAGRRLVRVNPNGTSQRCTCGAAVPKTLSQRWHQCPECGLSVSRDHASALEILRLGLSLREITWPVGASVSREAVCFS

SEQ ID NO: 15146 - protein, 391 aa, unknown
  TnpB Polypeptide
VLHTVVKVRLYPTPEQEVLLAQHFGCARWWWNFALNKSIETYRETGKGLGRSALNALLPKLKKDEETAWLGECYSQVLQAVTLNLTTAYKNFFDGRARFPRFKSKHRKQSIQFPQNVRVENGSLKLPGKIGTVKAKIHRPTEGTIKTVAVSSYPSGKYFASILTELEGENPTSSTDGKVIGIDLGLKHFAVTSDGNKVSQYDNPKHLAKHEKNLKRKQKKLARKQKGSNSRYKYKKVVARVYERVSNSRADFLHKLSRKLVNENQVVVVENLHVKGMVRNPNLAKAISDVGWGMFTNFLAYKLENKGGKLIEIDRWFPSSKLCSNCYHQVEAMPLDVREWTCPHCNTHHDRDGNAATNIREEGKLFSIQIGTPKFLKASGQQGTGNGEYPI

SEQ ID NO: 15147 - protein, 419 aa, unknown
  TnpB Polypeptide
MRTAYKCRAYPDPEQMIMLNRTFGCVRVVWNRTLAWRQARYRDEHASTSYGQASAYLTALKGTEELGWLSEVSSVPLQQALRHQQAAFTGFFAGRACYPRYKSRTGRQSAEYTRSGFRYRDGQLLLAKMSTPLAFAWSWPNTDPASLDPSTVTVSRDPCGRWYVSFTVEVPAPARLPTAGAMVGVDLGITDFAVTSDGHKIANPRRLARRERSLARYQRRLARCRQGSANRAKARAKVARAHRKVRASRADFLHRTSARLVRDHDVIVIEDLAVQNMVRNRRLAKAISDCGWGEFRRMLEYKAARAGRQLIVADRFYPSSKTCSACGHQLAELPLSTRAWHCPSCGTRHDRDVNAAKNILAAGLAVTACGADVRHPGTSRVRSAVKQEPRPVRAGILSLRAGCSQPAILIAVAARYFLL

SEQ ID NO: 15148 - protein, 286 aa, Acidithiobacillus sp.
MIPMRGKPRQAGKPVTCEVLHKAGKWYASVTLEIQTIQRERGTEMGAFDWGVTDFLTIATGQGIETVKNPRHLRNQLSELRRLSREVSRKIVAAQKTSGRKKGFPVSRNLRKAIHALSRLHAKIARQRKDFLHQTSNWLVCRFGALATEALNVQSMTKSGKGSRKRGLNREVLSTSPSAFLQMTKTKAGEAGSWYEEASTREIKPTQRCHACWQLPEKRKTLADRQHQCPHCGNTCGRDENAALVLLRWLEKRLAGESGLCAPQGAGQELPEVWSGVRPRETVAPA

SEQ ID NO: 15149 - protein, 240 aa, Chlamydiae sp.
MQEGSDWFVSFSCEWEKKSPKVAAIDENKAIGIDMGLKHFGVTASGKENHQEVIENPRFLKKHLAHLRYLSKQLSKKAKKGQNRLKARTKLSKYHARIKNLRNDFVQKLSTEMIKTHDIFCIESLDISSLLQKSPKALSRAISDVGWRTFLHCLKYKAEEKGKHIVEAGKYFASSQICASCGQRQKMPLQMREYDCQNCGIKSDRDYNSAIVLKAAGMSVLKACGAALSGGSGEAGILRL

SEQ ID NO: 15150 - protein, 388 aa, Erysipelotrichaceae sp.
MPTIKKGFVIRLYPNQEQLQQIRKTVGCSRWLYNQTLAMNNSRKELNQNVILLFGRKLNYTLPYLKEEYPWLKEIDSTALTGTIDNISNAYKRWLSGEGRKPKFKKKSAYQQSYISKCVNNNIVLIDANHIKLPKLGVVRFKAGKLPHGRICSVTVNMKSSGKVCASVLCEYDEIELPKTGKKIGVDLGLKDLAILSDGTKYEMPRWDKGSASRLHYWQRIASRRLVRAKEAMKEDDSLHLTDFKNYQRARQMVAKIYEYVANQRRDYLEKLSTVLVTRYDVIVVENLKVSKMMHNHKLAGAISNASWGTFVQMLAYKCAFYGKELITVNPAYTSQVCSECGCTNNRLGYNAYGWLKVREWTCPTCGAHHDRDVNAAINILNAGMIAA

SEQ ID NO: 15151 - protein, 402 aa, Lactobacillus sp.
MTTITLKLRLYPNSNQANLLEATMEQYRLASNLVSSYYFEHGFKPKQSDLQKSLYHLIRDTFGLKAQMAQSSFKTVLARYRTVNTQIKQKPYHFEDKNTGEWYRQNRDLTWLRNPVSFHRPQCDLVSVRDWSFVKNQLSINTIDTREKMNFTAKGFEKYLKAGKLGTAKLVKSCGHYSLHVACTLDNPNFNKDNLKHVVGIDRGLRFLSTAYDEQGKTRFVSGKKIIAKRRKFKKLRQQLQSKGTKSAKRRLKAINQRENRWMSDINHQVTKTLVDTYGSGTVFTIEDLTNVRFATEKVAKHKRYEQVSWAFYQFEQFLTYKAELQGSTVVKIDAHYTSQRCPKCGFIDKQARDHVMHEYHCEHCGYTSNDDRIGAMNIQLLGTNWVTGKSTTFQQLTSNRE

SEQ ID NO: 15152 - protein, 420 aa, unknown
  TnpB Polypeptide
MMWSSKQLLIISYKYPIFPNKATQQKLAEALDACRWLHNSLLEKMNDAREKGIKLKTYDTQNMIPSLKLENPKLNLVYSKALQIVNYPLWSSIKGLSASKKNGRKIGHVRFKGYGWYKTMNYNQSGFNLDQDHGLLHLSKIGDMKIKMHRKIQGCIKAILIKREGRQWFAIVQADHEPVSLPETGKSIGLDIGLKSFVVDTEGNSIKNPRFAEKSADKLAKAQRKLARAEKGSNNRQTIKEQIETIHAKVNHQRDDFLHKLSRLYVNDYDNICIEDLDVKRLKEKGHRKGMHRSIHDASWSKFLFMLSYKAESAGRKLIKVDPRNTTQRCSACGSIVKKGLSDRIHECPYCGFSCDRDYNASRNILIAGMEQPAAPIESKPLHHISVMQVLAMKWEAVPSIGMVVHIAKNQVTGRNVEVA

SEQ ID NO: 15153 - protein, 504 aa, Allochromatium sp.
LAQQAAGHALEAVHQGRHRHLGRILDQQMHMIVLAVHLDQTGLEVGADLGEDRAQAGDGLAVEDLAAILRHKDQMDVHCKNAVPTSPNIVVIAHRPKYTPGMQRLQAFKFELKPNGDQARDLRRFAGSCRFVYNRALALQQERYTTGEKKLGYADLCKALTAWKADPSTAWLGEAPAQALQQSLKDLDRAYANFFAKRADAPRFKKKGQSRDSLRYPQGYQLDQANSRLFLPKLGWLCYRNSREVLGTLKNVTVSQSGGKWFASIQTEREAEIPVHQGTAVGIDLGIVRFATLSDGTVYAPLNSFKRHEQALAKAQRAMSRKVKFSRNWKKAKARVQRIHTRIANTRRDYLHKTTTTISQNHAMVCIEDLQVRNLSVSASGTIEAPGTHVRAKSGLNKAILDQGWGEFRRQLDYKLAWSGGHLIAVPPHNTSRTCPCCGQFAKANRQTQARFACVACGFEENADLVGAINVLRAGHARLACEVSPAGGQQQEPTEATQSGSMSD

SEQ ID NO: 15154 - protein, 591 aa, Rhizobium sp.
MAGAERLLLARLKAGRVWTGDLKVSFYQPLGLSATHLDMAYRQLMAKLSSVAELAGERAKDLAQKIGSKTTDIARKRKQLRRAALSLAKARQATASLESRIGKQRLALAAAGDKTRDDQLFVLKHLLGQYHASVAATVSLRKQITSRRFGLHQHQRRLAILECKRAKAEEQAKDPSLCFGSSKLFRAQFQLEANGQEDLATWREDWRASRSSQFTLDGNSSKEGGNQFARLRRRADGLFDLELRLPKAITHLATRTFKSAGHDIACIDLRGLSFNHGDAVIRQALESGRPVTVKFRRDKKSWKLSVSVDHAMEAKAADFAGGALGVDLNAGHVSAALLDASGNPVEVFDFPCVSYGRTADRAKDAIRNVAADIAALAARHGVPVVAERLDFARKKKDLKASDPRYARMLSSFAYSAFGQALASACLRRGVALVRVNPAYTSIIGRVKFARRYGLSVHEAASFTIARRAMGYSERLPRSSDGTVTVPTNGCVHVTLDLPVRNGSRHVWSQWNGLNKEYHKKALAALRSSGRRSRPARTTSVTSGGRPPGGAGGTLAGGVDPLHGHTAEAGRSRRKSLQSSGQGVGRMPGIHS

SEQ ID NO: 15155 - protein, 406 aa, unknown
  TnpB Polypeptide
MLRAYKYRLHPTKEQKIFFAKSFGCVRYVYNWALNKRIEAYQTENKRINSIDLCKMLTDLKKEEGMEWLKEVSNECLQQSIRNLDSAFTRFFREKKGFPKFKSKHNSRQSYKAINSVSVDLDNNKVKLPKIGWVKFASNRTFEGRVTSVVVSKTPTGKYYISVLVDNGKELPAKEDITYDGTIGIDVGLKDFAVCSNGDVYKNPKYLEKSTAKLKQLQRRFSKAKKGGNRREKLRKRLAKQYEKVTNQRTDYLHKISTKLVRENQAIIIEDLNVNGMMKNHHLARSIGSVGWSTFFSMLEYKCEWYGKTLIRIGRFQPSSKMCGCGYVNRQLKLSDRTWTCPKCGAVNDRDLLAAQNIKRFGLQEQNLLTQPVAHRGLDGENPTMDERGESYLRSSGSMKRQNRQV

SEQ ID NO: 15156 - protein, 372 aa, Escherichia sp.
  misc_feature (156)..(159): Xaa can be any naturally occurring amino acid
  misc_feature (279)..(299): Xaa can be any naturally occurring amino acid
VKRLQAFKFQLRPGGQQECEMRRFAGACRFVFNRALARQNENHEAGNKYIPYGKMASWLVEWKNATETQWLKDSPSQPLQQSLKDLERAYKNFFQKRAAFPRFKKRGQNDAFRYPQGVKLDQENSRIFLPKLGWMRYRNSRQVTGVVKNVTVSQSXXXXLGWMRYRNSRQVTGVVKNVTVSQSCGKWYISIQTESEVSTPVHPSASMVGLDAGVAKLATLSDGTVFEPVNSFQKNQKKLARLQRQLSRKVKFSNNWQKQERKIQRLHSRIANIRRDYLXXXXXXXXXXXXXXXXXXXXXTSQRCACCGHTAKENRLSQSKFRCQVCGYTANADVNGARNILAAGHAVLACGEMVQSGRSLKQEPTEMIQATA

SEQ ID NO: 15157 - protein, 652 aa, unknown
  TnpB Polypeptide
MKDNKIYKIKKAPDPKLSYYKCIKTSLKSVVKDERIVKIINDTVIMSNKIIIHSLQFMKLYLLHLHDNNKSFPKMNRQFINSIMKIVCIPPTRGKKPSASTLATKNELNIVYDKYYKDIQLDTLNYRHMNTILEYLVVDILTMYENNIKQRFVEYIERFVNVIWKKKQLVKLMKTKYKTKKTRQSAISKLCNQLRKIKNDILSINKEKTSSPIYHQWIDYVRTEILPQKTYQKDLLYYDLQCSPQDYFPSMMKMMKIIEQNGEHMNNLFPLRTDIIPKYIRIDTTSLMHLFFTKEQGRRDFYLRNGNMTKYQDKLWKLFFRLDKKCFHSEDDYNYHFHHMIETDGIGCSILLLREDLEGKKLRQPKVLLNREKYIDELTTNEKQELQKKKVVAIDPNMSDLIYCIDGLDKTSKTFRYTQNQRRKETKAKKYRNFLQANKNSTKIEGQTITEWEAKLSQYNRKTLDFSKFMEYIKEKNIMNKAISSFYQGEIYRKLKLHSFINKKKTEQKMMNRFMRMFGTPEEVVIGFGDFEQAQHRKYKEPVKGKGFRTLFRKAGYQVYLVDEFRTSCRCSHCAGETSTFRECINPRPWKDNIIMRHGLVKCKTCSRLWNRDTNASINIYKIIVNEIQGQERPTYLTRTKGSISGAPSVST

SEQ ID NO: 15158 - protein, 196 aa, unknown
  TnpB Polypeptide
LPPSSEEVGIDVGLKTFAFLSNGDVVENPRFFRKDEKALAKAGRKQAKTKKRSAARRKANKVLSRIHERIRNRRHDFVHQTARRLVNRYGVIAVEKLNVKGMVKNHSLAKSISDASWSMFRSILVQKAESAVNRTVVEVNPRYTSQMCSKCGNIQKKSLSVRWHECQKCGLSLDRDMNAAINIAALGQQSLPALTG

SEQ ID NO: 15159 - protein, 501 aa, unknown
  TnpB Polypeptide
MGGGDMEKVRRAIAVEVESPPPELSAIEEPYRRIVEEVAAYVAERGRLEKEKYNELYRRFRKQYPLPAQLIQQAINQGVEIGKSFLEAKRNGRVHKPHPEVRRVSIRFAKDSWSYKKAISSVAPVRLGLSLPGGRREAWIKPHRRFWLYWWKVLSKEAELASTLVLKRRRGRWYAVFVFDVMPKREPPAEAIAFDVNENWVAVAKVSLLSTVDAVAQWNRQYLDPAVYSIRTDFGKLAKRYEAVRNAKLEELKRKYPYAGRDEEERRQNVADTREFRKFASRLRERRRKEGRVRQIACEVTRSSAVIITEELGKNPQEEMIGVEEKKVKKRELRHRIKQTPFKKLLKTIEDKARETGSVVFYVSPYRNSRVCPIHFASLEDGGGWHALHCPRGHVVDRDVAAVLNILWKTTPTGWLKGVWWDVKEVRKRLGKGVVPREAVGKVNPIIPRPIIHAVLASLMALKAGDKWPAVLARAAPMTPAQGADEGGTRAPPRPKGIPAL

SEQ ID NO: 15160 - protein, 299 aa, Hydrocoleum sp.
  misc_feature (118)..(118): Xaa can be any naturally occurring amino acid
VLNTLILRKSVWGGNAEFTKAAFRWKDGQVYLAKCAEPLPIRWSRQLPPNCVPSKITVKLEPSGRWSVSLRVNATRDLRLKPTQKQVGVDLGITSLLTTTDGDKVANPKNLQKLHKKXNCVPSKITVKLEPSGRWSVSLRVNATRDLRLKPTQKQVGVDLGITSLLTTTDGDKVANPKNLQKLHKKLRLAQKSLDRKPDKNSNNYHKARLKVAKIHAKIKDPGGDYTHKLTYVANPTAPLQLIRENQTIVVEDLAVKTWSKSGATPRRRQLASGQTPRRRQLACGMLTKRGNAHQETTN

SEQ ID NO: 15161 - protein, 456 aa, Acinetobacter sp.
MISGVKFRAYPTQEQKLILSQWMGCARLIWNAKCDEDKYFRKFASKFFPFKAYYSTQDQKYAQFRSKELTPWLAQCPGTILKNSTVNWYNTLKKSINGVCGRPKRKAKTDKGSIYLTRDLFSFEKDQFGKVRLQIGGKKFNIGYLKFKAHTDFKEPTSLYIRKERGQYFVSFCYKDSVIIDEIKLDEHLDHLQRFTQEQLNNVVVGIDRGVTIPVCTPDQEFDFSKEQKNHLSKAERYIKRLQRKLSKQQKGSNRRAKTKHRIAVHHAKKANIRNDFNHKTSYSLVNNEKNKVFIFEKLNTQKMTKKPKPKKDESGRFIPNKAKAKAGLNKAILNVGWYMLETYVKYKAKHLGKAVFKIRAAYTSQECASCGHTHPDNRKTQDKFKCVSCGHTDNADKNASKVIKSRAIKLIIYTGTVLEEDLLSSSSGRGGSRKTIKAKNPNRIVDETSKEMMTT

SEQ ID NO: 15162 - protein, 442 aa, unknown
  TnpB Polypeptide
MKRSNLFALAPTQEQHHILQELGVNCAKLWNEVNYLHHQQYGNYLRLDWNPRVYKKYVPLVGSATAQQVVRKNNEAWRSFLALKQLERRGSLPAGMKKVRTLGYWKRDGRYFLKILFRCDSYHLREGRVDLPRHLSIPFKGKPKWTGKQGRLEVSWDALSKKWRVFQSVQVKPLITPLGSKTCYIDLGVRNLATVWLPEWRQPVAYQSGRLLADWWYWTNRIARHQQRLLTVNGRKKSKQLARLYRIRKNRFRHAVAAFARQLVKDLYRQGVSTIVIGELTGIRSNSDHGRQGNAMVHNYWSHKYVADRLKWTAEEYGMKVRTISEAYTSQTCPRCGSRHSLRVLRGFQCLYCGLEAHRDAVGVLNMAARCGGYAVRPMVWPMLLRWDGCGWNRNNGMTHPREEDHCGSMNLPTSVEERVNSALSIRKLAVTVPPILGLERR

SEQ ID NO: 15163 - protein, 379 aa, unknown
  TnpB Polypeptide
MLAMKQTLFVRLETDKVQFDALLETIRRFNEACNFIAFTSYKLRTANKMRLQREVYREARERFGLSAQMAIRAIAKVCEAYKRDRSKRPTFKPHGAMVYDQRILSWKHLERASILTLKGRILVPIRIGEYQKARMNHVRGQADLILRNRRFYLAVVVDAPEANEYDPVSALGVDLGIVNLAVDSDGTAYKGQDIDKAMHRNERIKAKLQACGSKSAKRHLKRISGCEARHRRNVNHIISKRLVAKAKDTGRAIALENLKGIRGQTTVRKAQRRRHNSWSFNQLRQFIEYKAKLAGVPVVYVNPRGTSHTCPRCGVQDKKSRPTRDRFRCVGCGFAGPADYIAALNIAARGQVSSPIVPRNLLEPQALLRDKPTISIVGS

SEQ ID NO: 15164 - protein, 622 aa, Mycobacterium sp.
LRIHAGVVVEQSPTQRRGNQIQLGQLGAPGFLDHIRAGVQQLLHPDTHVVGRRLQCGLPEIPQFEIGVDRRTLAKRMGLDAAEKHQRGPNRRARGSTPTQHWHSRPAKVAQMTPTAVPGDDLGGVEQGGHPLGPRQKLVAIAALPQDHQIRVQRARVLPRQPVRMQAARAQRGHQPGVIAVRGAGQHDPGMANVGAGQLHADSFRKPGTYAPSPTTTIGVGGSNYFSDMSRFRLSPTPAQLVVLSEHCRHARFVWNLAVEQQQFWQPGRRAPGYNTQSAQLTEVRAEYDWLAAGSQNVQQQALRDFAQAMRNFFGGTHGRPSWRKAGVHEGFRQVGVKARHVERLNRRYGRVWVPKVGWVRFRWTRAVPAGVKSYRITKDRARRWHVAFAHIPKPIHGPGDGSTVGVDRGVIVSAALSTGELLHVPGLTPGEQIRLRRLQQRLARAERGSHRRQRTKLAIARIKAREADRRRDWVEKTTTELARRFDIIRVEQLDVRAMTRSARGTLEHPGVRVAQKRGLNRAIIRQAWGRMVTRLDQKAAGRLERVPAAYTSQRCSACGHVARENRKSQAVFECTSCGAAPCHADVNAARNIAAGRAVPARGDLAVRRSANCEPQPSLPTT

SEQ ID NO: 15165 - protein, 386 aa, unknown
  TnpB Polypeptide
MLKGIKLRIYPNKRQREQLDIMFGNSRFIWNNMLATMNERYKNNKDLPMLTEYKLHVLLKPLKVEYPFLKESDSTALQVDCQNLYRAWKNFFKSGFGKPRFKSRKFYKQSYTGKSAPNVHVVAKRYMKLPKLGYIKTSKTFQLTDCKIKRYTLSHGTTGRYYLSLQVECENQALLPKTNKSVGLDLGVADLAISSDGIKYDTFHVGDLEHKANLWQRKFSKRRHQAKVCIESDKYSKVLVPRDFDDFKNLQKARKRKARLQAKIANKRKDYLHKLTTTLVKQYDTIVIEDLKAKNMMKNHKLAKAIANGSWYLFRSMLEYKCNWYGKQLIVVSPKYTSQVCSNCGVNTGKKSLDVREWTCDNCGTHHDRDINAARNILAKGLKEVA

SEQ ID NO: 15166 - protein, 397 aa, unknown
  TnpB Polypeptide
MASGDEGLLTISIGMRVSPEPEAIELLRRYNVALNYAINKILSLGLKSIGRVHNTLYRELKEWFGLPSRIAVDCYRDALANAKAWRNNPRRERRPRVKKLSMLLHPGSGYRVKEGYVEIIGRIKLRIIGWDRRYDGYENGEARLVYRGDRMMLWISKKIPRPEPCKPRDAIAVDINERKIVYGDDKINKERDTEIDEAHRWKLLAESLQKRYSSPRYPAWRRRKAILNRIRSYHRKARNILEDWARKTSLRIVGLALRLQYAVAREDLTGLINSLRKIKNKDHRTKLIIMGYSRLERWIDWQAEKQGVPLAIVNPNGTSSECPQCGSKLEENGYRRLRCPRCGFEGDRDVIGKLNIRKRALKKLKIKANPGGVLAPLTAPQMTDVNPNRWGEPMNRR

SEQ ID NO: 15167 - protein, 395 aa, unknown
  TnpB Polypeptide
MYNRAYKYRMYPNKEQETLLQKHFGHCRFVYNHFLEVKIKHYKETKKTITWVDLANQLPKLKEELEWLTEIGSHSLQQSILNLDRAYTAFFRSNAGFPKFKSKKYARKSFIVPITNGNIKVNYETQRLTIPKFKGGIKCVFHREIPKDNVVKQAIVSQDRDGKYYVSVLVEVNKELPTKPEPKKNKAIGMDFGVRTFVTLNDGTKIENPKMLKQSSDKLSKHQQDLEKLEVDTTKRKSKQEQITKLHSKIARQRKDFLDKLSHKLTHDNQVNTICIEDLSIKNMQQDNYKATNNIISDLSWNKFVNMLQYKSDWYGKNFRKIGRFDPSSKMCNECGYINHDLKREDKEWKCPECNTNHDRDVNAATNILDFSFPKTEFVKGRNYPIEAPMALASV

SEQ ID NO: 15168 - protein, 229 aa, Microcystis sp.
MLVVEAKLKNGTPEQYHQLDEAIKTSQFVRNSCVRYWLDNQGTTRNDLQKLCAVLANNKETPWVNKLNSQARQSAADRAWQSINRFYQNCGFKAGEFDLWCSQKTLVYYSEQQIKRVRVVRRADGYYCQFLIDVERQEYHKPTGQITGIDLGLKEFYTDAQGNTVENPRYLSKSEKRLQKAQRRLSKQFRKGKKQSKNYHKQRIKVAKLHLKVSRRRKDKAIKDARNFR

SEQ ID NO: 15169 - protein, 402 aa, unknown
  TnpB Polypeptide
MKQQVSFKFRLKPDGQQERQMRRFAGACRFVFNRALALQNENHEAGKKYIPYTKMASWLVEWKKDTETEWLKDSPSQPLQQSLKDLERAYKNFFQKRAAFPRFKKRGQNDAFRYPQGVKLDQENSRIFLPKLGWMRYRNSRQVTGVVKNVTVSQSCGKWYISIQTENEVSTPVHPSASMVGLDAGVAKLATLSDGTVFEPVNSFQKNQKKLARLQRQLSRKVKFSNNWQKQKRKIQRLHSRIANIRRDYLHKVTTTVSKNHAMIVIEDLKVSNMSKSAAGTVSQPGRNVRAKSGLNRSILDQGWYEMRRQLEYKQLWRGGQVLAVPPAYTSQRCACCGHTAKENRLSQSKFRCQVCGYTANADVNGARNILAAGHAVLACGGMVQSGRPLKQEPTEMIQATA

SEQ ID NO: 15170 - protein, 222 aa, unknown
  TnpB Polypeptide
VTVSRDPSGKFFVSVLVKELKPKPFLDTGLSVGIDVGIKTFAVLSDGMEIINPKFFSESQTELRKAQKSLSRKKKGSTRRKKARLKVALLHEKVRNQRKHFHHEISRMIVNAYSIIGLEDLTVSGMVKNRKLSKAISDVGWSQFVSFLSYKAEWSGRIVQKIGKFFPSSKLCSNCGVVKKDLTLKDRSWICDCGVGISRDLNAAVNIKNEAVRLLAQGVACA

SEQ ID NO: 15171 - protein, 401 aa, unknown
  TnpB Polypeptide
MLLTHKYRIYPTKAQTTRLENQFSMCRYLYNWALEDRIWLYENHSISISLFEQSNELTFLKKERPWFGSVHSQVLQNTLKRLDTAYKSFFRRIKSGEAKAGFPKFKKFKDWSSITYPQFKERPVDGILKISKIGNIKIKYHREIPENGTIKTLTISKEAGKWFVCFSFENHLKVEIKQNPTTFLGIDLGLNDFYYDSDGNSVKSPKSFRANEKSLANLQRKLSKTTKRTKKYYRLLKAIRKCHYRIKCQRNDFLHKTANKLLSISNVIVYEKLDVKNMVKRATPIKDPNSDGYLPNGASVKSGLNKSIADASWNKFILFLQYKASILGKQLIPVNPAYTSQMCSNPACGRVVKKTLSTRIHRCPHCNLVLNRDHNAAINILRLGLQSQGLIPQEASSIASA

SEQ ID NO: 15172 - protein, 402 aa, unknown
  TnpB Polypeptide
MIKVTRFKLYPDKETEDKLFSNLRICSFVYNWCLEHNIWNDSVLPQLKEVYPDVKEVHSIVLQNVVHQVRDNIKVLSVLKKKGKKVGRLRHKSRHSMIFEQTGFKIDGNLLKLSKIGAISMVISRPIKGEIKQIVIKHNKTHSWFAAIVSETREIDDWFAFRRTYQKPKQVRAVGIDLNISNFLTDSEGLIVEHPKNVKKAEKRLKRQQMSLSRKARGSHNRKKQKRIVAKVHEKVENRRNDFLHKMSRYYVNNYDLIALEDLSISELVQKSNTGMAKAMLDASWGKFANCVLYKAENAGKYAVCVIAKGTTQDCSVCGKTVPKDLKDRTHRCPYCGSVMPRDYNSALNIKIRGLEKVGWGTPEPSFLDVGKLNTLAEIRTSILDVNNPEQVFVSDSRIFRL

SEQ ID NO: 15173 - protein, 529 aa, unknown
  TnpB Polypeptide
VVRQGASAPREAPLSRKSVRRTLSRPSCSVVDSEAPAPRPSRSCAACRATHGGRRPHGSLFLSYCSSSGGSSYASPKTSGGSPGLQTGKECDAPRSGPGRDDRPYGAASADFDHTCDNSRMRTAYRCRAYPDPAQQQVLARTFGCVRVVWNRTLAARQARWHLERTGTSYAQTDRALTIMKRDPELAFLTEVSSVPLQQALRHQHQAFAAFFACRARYPRFKSRRGRQSAHYTRSAFTLRGGQLCLAKTSAPLRFTWSWSEVDVTTLDAAMVIVSRESDGRWYVTFTLDADAPQPLEETGRAVGVDLGVTDFAVTSDGDKIANPRRLDRKARSLARYQRRMARCQKGSANRAKAAAKVARAHRKVRHARADFLHRASTRLVRQHDMIVIEDLNVSGMVRNRHLARAISDCGWGEFRRQLAYQCERYGRELVVIDRWYPSSRTCSACGHRLAELSLSTRHWTCPACGTRHDRDVNAAKNILAAGRAAARGSPGDACRAEVRHAGFPRMHSAAKQEPGPVTAGIPVPPGEE

SEQ ID NO: 15174 - protein, 410 aa, unknown
  TnpB Polypeptide
MNVIRAFKYRLVPNQEQKVLLEKHFGCTRFIWNWALNKKMKTYQTLKKNVSRYELQAELPKMKKGEQPWLAEVGSLSIQSKLEDLDKAYTSFFRHKNDYPKFKSKKNRQCFRVPQNTKTDFDNGKVVIPKFLDGIKCIFDRTFKGDISSSYISKTPTGKYFISILVEDGKEFPTKSLVEEKTTIGIDLGLKHFAILNDGSKIENPKLLKWHLRKLKIQQRRLTTKTKGSNTRKKQRIKVAKVHERITNIRKDFHHKLSYKLTHDNQVKSICMETLSAKDMLKNISFDERDETRKQERARHKAISDSGWISFQNILKYKCNWYGKNFIQIGRYEPSSKLCSCGYINYELTMADREWKCPNCETTHDRDILAANNIKFIGLEQPESKASGLEKSGMKEETPAFRGGSSKQYE

SEQ ID NO: 15175 - protein, 400 aa, Firmicutes sp.
VIRTHKTTFRTYKKDLERLFDCNRISAIVWNDCLKHARTHHQQTGRWIHLNELQQLTRKQYHLHSQSIQSIQERYVQARTNAWKARKKGCTSIRYPYKEKKHYPTRWKKDGFTIHPNGVIELKMCLINGKRTPPIRVKLAHLPEGQIKEIELIWDRKLMLAVSYEDGRQPKENNRQGTAAVDMGEIHGIASLADNGHSLIITSRKLRSQKRLRNKKYAELQKKLSRCQKGSRRWKKLRRALGKTQQKTKRQQRDILHKTSFQFVQWAEANQIKKVVIGDVEGVQRNTKAHKKNPKKKHRSRNVNQKLSQWPFGILLLYLTYKLKAAGIDLTMIDESYTTQTCPVCDRKKKVSGRTYRCHCGYSEHRDIHGAKNILAKHKYGEIKELGIPISKITYLRPAS

SEQ ID NO: 15176 - protein, 417 aa, Oscillatoriales sp.
VLSMTWEFKLEPTAEQVSGIEDILDVCRNVWNFALRERKDWLDSRKSSVNACSIKQEFILPVDAPFPNYHVQAKRLTLAKSEFPRLRTVNAQVLQQVLRKLEISWESWRLKRSGFPRFKKPSRMQSLIFPQMLKDCITSDGIKLPQLGWVQVRWSREIPDLFEVKQARIVRKASGYFVILSLQANVDIPATMPHGHPVGIDIGLEYFLSTSDGEQVKRPCFFNELHRKLKLLQRRLKNQQKGSANWLKLQKKIARVHQRLADTRKDWHFKLAHYLCDSAGMIFVEDLDFRIMVKGMLGKHTLDAGLGQFTNQILPWVCFKRDVFYSKVNARGTSQECPNCGAEVRKDLSTRIHHCHNCGSIKPRDVAAGQVICTRGQRGIENACGVEVTGVEVTQPSQLALKQEIFGATQGISIHIA

SEQ ID NO: 15177 - protein, 296 aa, unknown
  TnpB Polypeptide
LETVRIYRLSGLRPSFRTRLREAQMEAARVWTLCRDLHLAARTERTRWPNRDDLQQATKGQFALHSQSVQMICHAFLANVETTRQLRKTNPKMRYPDKDKRYYPLLWPAQAVSRGRGRVVLPMGRGRASLIFPVDLPEHSGACTLVWNDGYELHVTVPSCRAEAASGQAQATVDLGEIHQAAITTNTGTALVISGRGIRSLKRRHNMALGQLLKLRKRCQKGSRRYRKLQAARRKVSARKRRQIRDLRHKGTRQVIAYCQQLGVGNLFIGNPMGSGAVIVDATIISGWPSGNMGRI

SEQ ID NO: 15178 - protein, 380 aa, Staphylococcus sp.
MYKGVECKLYPNEKQANTIQMTLGHTRFVWNQMLSMLNERYRNNKDLKMLSYSTLSSLIPQLKREYAWLNDVDSVAIQCAVKTLSETFDRFFKGYCRYPKFKSRKNNKQSYLSTIRGNNIRFNHNQRYIKLPKLGWVKCKPSLKHIENERIKSVTIKQNATGQYYMSVLVTSENQALPKTGKYLGIDLGVSDLAITSDGQKYRSQKLHLKYQKQLHFWEKRLARRRLKAKAEGIALVDAKNYQKARQHVARIHEKIANTRKDYLHKITTELVENYDVIVIEDLKTNNMIKNHKLARSIANQSWREFRVFLEYKCAVYDKQCIVVNPYKTSQKCSHCGFDSGKKALDIRKWSCPKCNIEHDRDINAAKNIMRIGLEQALVK

SEQ ID NO: 15179 - protein, 188 aa, unknown
  TnpB Polypeptide
MEVGKINHVTIEHTPTDKYFVVLNVEFEPQPRQNNGGCIGIDVGIKEFYTDNNGKSVANPKYLEKTMCKLIREQRRLSRKQKGSGNRRKQRVKVALVHEKITNQRNDFLQKQSTMLIRENQTICIEDLKVKNMMRNHKLAQHIGSAAWGKFFDMLTYKSAWYGNDVVKVPTIVPSSQTCSSCGYKIHW

SEQ ID NO: 15180 - protein, 516 aa, unknown
  TnpB Polypeptide
LRLSGVATPIGATRSCSGAGYSFGHGEQHPHAALSAADAKGLDPTIRQLEHVFDMAATVVHRTARIRLRVTRRQADRCYRMLHSAGDVWAWLLDTNRSRLQQGDRPLTNYQALCRELARRDSFGELSTVGARSVLRRYSDAWFQAAKRRKQQESARFPRRKRRLVPVRFYSGTFLIQGRRIRLPVAKGHPELWVRLGRSLPYPAEQVRAVALLAEGGRLWLAVTAAVPVQLHNLNPSRVAGVDLGIIHPYAVVSEPAGLLVSGRAVRAEGYLHLRDQQARFARAARRAPRPGQHGSRRWRRHRLRVRRVEARHRRRVHQAQHEAARQVVAFAVRHQISTLLIGDPKGITSQTAGRRQNLRRRQWRRTHLVNALRDKAERAGIVVRLVDERGTSSTCPACQQRIPKPGGRRFSCPHCHFQGHRDLVGAHNIATKHSGGPTSTALPVLVEHRRAGIVPARRDRRRHLEDQRRRSCLASGHSAEHASLTECRSQDAEFHRVRRGSSNIAHQGNGCLKGH

SEQ ID NO: 15181 - protein, 426 aa, Micromonospora sp.
VQLRYNFRVYPTPGQQTELAKAFGCARVVFNDGLRARQDAHEQGLPYVSDAELSRRVITEAKKTQARAWLGEVSAVVLQQALADLNTAYRNFFACLSGKRTGRRVAPPRFRSRKDNRQAIRFTKNSRFKVLGNGRLRLPKIGDLRVVWSRRLPSAPTSVTIIQDAAGRYFASFVVQTTNTPLPELDTAVGIDLGLTHFAVLSDGTKIAAPKFLRRAARKLRRLQQDLSRKQRGSRNRKKAVVKVARAHARVADTRRDWQHKLSTQVIRENQAVYVEDLCVAGLGRTRLAKSVHDAGWASFVGMLEYKAARYGRTFGRADRFFPSTKRCSDCGRLNDKLALNVRAWDCPCGSTHDRDVNAAMNVLAAGRAESLNDRGAHIRPARVPAARNEAVIHPGAACSARSAEGIAVLQDGEIVNTSSTASGPR

SEQ ID NO: 15182 - protein, 376 aa, Bacillus sp.
MILAKKVRLIPTPEQEKVLRNHAGAARFAYNYCKRMSDRYYKLFGKSVSQLALQKRFTKIKKRKRYEWLKDINAQVPKQASRDFDAARKNSFKKYKNGSHTSYKSKKDVIQGFYANYERLIIGKKVVHIQSIGEVKTSQQLPRNKKPSNPRVTFGGLHWWISVGFQEDFELQELTNESIGVDVGLKELFVTSNGMKERNINKDAKVKKLLKRKKSAQRDMSRRFKKGAKIQSAGYEKAKAEHLRLSRKITNIRTNHIHQATAKLVKTKPMRIVVEDLSISNLLKNKKLSKAFSFQKLHFFFQCLSYKCEKYGIAYVKADKWFASSKICSCCGVKYDHSVQPEGQWSLKIREWCCVSCNSHHDRDVNAAINLSRWVK

SEQ ID NO: 15183 - protein, 443 aa, Acidimicrobiaceae sp.
MSAGTITKVHQGFSYLLDPTPEQRSLLSSHTGAARFCHNFLLGVVMENWKQNREKKETGEAVNQEDYLGTRHLDLQKLWYERRADTAPWFSENASSTYNYAQVHLAQAFSNFHAGRAKVPQFKSKGRCETFTVAGGSTRLVDSHHVRLSRIGELKTYESMRKLYRHLERDSARIMSATVSERRGKFYLSFTVEMSRMIPALRPPLRVIGVDLGISTLYTGATPSGKQVLNVANPRNYQRHQVKLARAQRVASRRQGPRKEVAPSNRWKRANARTQKVHADIANARKNLIHETTTYLAKNYDRVVVEDLNVKGMLKNHSLAKHISDAAWGEFVRQLEYKAPWYGSTVVKADRFFPSSKTCSSCGAVKAKLPLEIRTYHCEACGLTLDREINAAINLAGWTGNSTPAGTRSVAGRRGEIRPKRQRLVVRAHPDEASTETPTIVDA

SEQ ID NO: 15184 - protein, 254 aa, Methanotorris sp.
MNVKEVEIVPHDLYGQSFYVLHLIYRKVVNPGKFSKDKVMAIDLGVKNLATVVIQNERQSFIFDGRILLSKLRWFAKKKASIVSEIANQGLKNCKRLARLTVKEKNYVKDYMHKISRWIVELAKEKSVSRIVVGDLSKGITKIDIGDRVNQQLHRIPFGKLVKMITYKVEELGIDVELINESYTSQKCSVCGVIKKSNRKYRGLYVCSNCGIVINADINGARNILFKVVPNPERSRDSGLGNPRRVRLINPLLS

SEQ ID NO: 15185 - protein, 270 aa, unknown
  TnpB Polypeptide
MHTATPSYIVELPLRVNDQQNRFLERTVDVLERTLYNATLGTALGRLQRMRETQEWRVAQDMPKGKARTKAFSAVHKAFGLTEFGLTIIANNHRKASGRKDIGAHEAQSIGKAVWRALQRHMFRKAGRPRFKSFRRGLNSIEGTNNQEIMYKPERGAIVWRKHVMTYMKPDTGYMKEALAFDRRVKYCRIVRRTLKGVRRWFVQLVVEGLPPVRKVYASKCEVVGIDPGSSRIAYFHERHGERQKFCVHGIIGARQSGASNEHEYQTQFS

SEQ ID NO: 15186 - protein, 412 aa, unknown
  TnpB Polypeptide
MNVLRSFKTELDLNNRQKTACLRHAGAARYAYNWGLARKMAARLAGEKTPTAIDLHRELNALKKTELDWMYEVSKCAPQEALRDLDRAFANYFRRIKERNQGRKIKPGFPRFKSKKNGSGSFRLTGAIHVFEKAIQLPRLGRLRLKERGYLPMQGVHILSATVSEKNGRWFVSLQVELEMPEPQISERPLAGLDLGISRMAQLSDGTYFDNPRPLKIALTKLKRQHREVSRRKKGSANYKKAVHQLARTHAQVANIRKDALHKATTWLARTKSVIMLEDLNVNGMIKNHYLAQAIADVGLYEFRRQLTYKGAWYGCQVWMADQFYPSTKRCSQCGQIKDRIDLNERVYQCEYCGVLIDRDLNAAINLEQLITHTTASSAGSYACGERIRPGFPAMLDETGTKHYPPCGEQSA

SEQ ID NO: 15187 - protein, 285 aa, unknown
  TnpB Polypeptide
MLTTCYGFKIKDGFLGLPIKPREFTNILLNSHTREVLSCPGLTTRSVCLTARTVSITFSKETAEIRPVGLIGLDRNLDNVTMASSDGDVRRHYLSEATRIRAVYREVKAHFTRDDVRIRRRIFAKYGQKERDRTNQILHHTSKSIASEAKAKRFAIVMEKLSGIRRLYSRGSGQGRWFRARMNSWSFSELQRQLEYKAKWEGIKVVYVDPRRTSSTCAICGRATTECAGRRVWCAQCRTLVDRDVNGAKNILARGVRFAPIALPGEGMKQSKDADSMAAELTRKL

SEQ ID NO: 15188 - protein, 364 aa, unknown
  TnpB Polypeptide
MEVRKVVKAKVIGLTNTKRRILDHEYEGLQRFLQGDHSVELYSANKQQAKRFYARVSPRHEYPLSIRKDLIRVECQNTKLARYWARIPVKLRRRGVWVAIKPHCEVAADFEICESKLLRKDGEYFLHLVVKREVELKDSYTSILAIDMGIRHTACSVDIRSGQTHFYGREVARTRGHYFHLRRELGRRKLLKVIRRIGAKEGRITNDQLHKISKTIVDEAERLNAIIAIGNLKGIRRNGRGREFNRKVNTWPFRRLRLYLEYKANWRGIRVVEVNEAHTSQRCWRCGTKGVRSGKRHGLFQCPQCGSRENADRNGAFNIGRRALGQVSKVGAVVNQPVTGRIPPPDLDFSPRSHPFSGVAVHCR

SEQ ID NO: 15189 - protein, 536 aa, Lachnospiraceae sp.
MTDEEYGKALKKFHKLSDKHILVAETDMPYSDVMQVVALSDRIRKAGNELVSLMRKNYVQLMRTKKYRKLLKLYGNSEDKVKRRDFARQLNDMQAEYNVTWDYCRTSMIPIGKKYGIDAVFALTKAEDVWHGIEKCLFGNGKTIHFSKYGDLPCIRAKQINRGIPMSIKDNNIQFKLSRMVFGLQINDRFQTDEINAVLSYLAEPEIIDAKAVNILLEEACCIDTYRPCYATLVPKIIRGKYRVYLHLTIEGKAKQKYDKFCNPRHKYGKGMIGADIGTQTIAYTSDTEVGLKNLSERGNSIQKSERLERLYYRAMDRSRRATNPQNYNPDNTVKKGRKTWKYSNHYKKLKARHSELCRINAINRQLAINEEANHLRSLGNVFVTEPKNASKLMKRAKETTKNSNGKFNKKKRFGKSIKNRCPSGFQTTIEKKFKLSGGTYIEVPQNYRASQYDHTADNYIKKKLSDRMYKLTDGTLVQRDWYSSYLLYCYDYRTQGIDKNKCITEFDKHYNKEKALITWIKANKIKILNSGIKVA

SEQ ID NO: 15190 - protein, 454 aa, Arcobacter sp.
MRTVKIKIRGLTKQQFKRLKDLTANAKNLYNQALWTLREAFEVTGMYFSYLQMDKVMKQVKNLEGEVNYKLLKAKVAQQTLRRLDKNFKSFFRANQDFKKNPSKYKGQPKAPRFKQNKFDNLIFDYQAFKILESTVILKENFQIKSFKLPSGKLIKSAEVIVREAFVFLEKGLEIKLPKQLVGKTIKQVEIIPKYKSFHAVFCYDDKQTDIYQKVNNEKPNVMSIDLGLNNLATCVTNGVIKPFIIDGRRLKSVNAYYNKCKAKIQSTLEKTRGKKWSLRLQNLTNRRNARINDYIHKATAIIVHACVENNISKVVVGDVTKSLNSINLGKKNNQNFVNLALGQLVDKLSYKLGSHGITLEVTDESYTSKASFVDGDFMPKKYKPKSNNKQVFNGKRIKRGLYKTSDGTLLNADANGAYNILRKNESYFSFEKLVEKVGSKFKDWLHPTLRITC

SEQ ID NO: 15191 - protein, 372 aa, unknown
  TnpB Polypeptide
VKILRSSKCSLKFATGHKRQELKKVLTEYGRVCNVFIGHFWNSEVPSKSDLLKDIVDLPQDTWLSARLRKVAAREAIDMIMAVKERWKDKPEKITMPVHKGHRMYVSCTIAELQDKDTKDFDAWLHLASIGNNIILDLPIKYHRQFNKFSAQGKKLNSYIITEKYVQFVFEIETGTKRGKATAIGIDTGINALASANTGDQFGLNIKPIIERIKRCEHGSNGQKTARRALKQRMDEVVKEVIKHFKNVDCIVVETLKNMNYKTRLKRRLSKNIRRSIGTWAYRYWLTRLEQACEMNRVHFKSVAPQYTSQICPACGHTDRGNRSGQVFLCQRCDYAGNADVVGGKNILDRFLTGPYGAGYKPYMSEMNLAHS

SEQ ID NO: 15192 - protein, 387 aa, unknown
  TnpB Polypeptide
MNAVQVRYRYRMYPTGAQAEMLARTFGCSRVVYNDALRLRDESYEAGEKLSDSEIQSRVITMAKLTPERGWLNEVASVALVQACQDARRAYRNWFDSMSGKRRGRRAGHPRFRKKSSRKSFRLTRNGFSIRDNGRVYLAKIGDVRVRWSRELGSEPSSVTVIKEPDGRYYLSFVVEREAWPLPAIEHEAGIDLGLDRLVVTSDGEIVPNPRSLRKRLRKLASLQRAVSRKQKGSANRRKASMRVAAQHRKVRDARFDHAHKTALRLIRENQAVYAETLAVNGLARTRLAKSVYDAGWSQLLRLLAEKADYHGRTFHQIGRFVPSSQVCSACGRLDGPKPLSVRRWECPCGAVHDRDVNAAINILMVGQTGSLNASGAQVSPAAQAVA

SEQ ID NO: 15193 - protein, 436 aa, Pseudoscardovia sp.
MRKRDTAGGCAAVRVALDPTPRQAGLLRSHAGGARTVYNAGLAHVRELLDAGGRPGWSMYALRRWWNGAKDSIAPWWAENSKECYSYGLECLAGALKNWSDSRHGRRKGRRVGFPRFKSRRASRPAFAYTTGSFGLVPGDPRALRLPRIGRVHCMEDVASRVGGRRVLRMTVSEWSGRWFASLTVEEPPAKPAPAPPKRGTVGVDLGIKTLATLSDGTVVGNPKPLGHAMRRLKKAQRRLGRMTKGSGRRERQRRRVARLHGRVADVRRDAMHKLTARLAASYSEIHIEDLNVRGMMANHRLAMAVADAGFHELRRQLGYKCRRTGARLVIADRWYPSSKRCSNCGSVKAKLTLSERVYHCESCGLTIDRDLNAAVNLRDWNPPVAGSAPETLNARGGDVRRADAKRRATRTPVKREPSGGESRVRLGAAPGNRDM

SEQ ID NO: 15194 - protein, 396 aa, Dolosigranulum sp.
MLVLYNKLTYQEVKRMEYTFYKGQKFRIYPTDEQIQFIRQNEGNARFVWNELREYLMNSYEKNKDFKFPSKNELTKMVTDLKKEHDFLKLSESSSLQFVAQTLHDTYVKFFEKKKGYPKPKQKGYSGSFTMKRNGNNIRKESNHFFKIPKVKGLVKSQRIKLDGKIKKATISFTPSGKYYLTVLVECESQTWTKTGDKIGIDIGLLDFVVLSNGIKEKMPRFHNQHKQKRVMWERKCARRRALAKKRLGDDWREAKNYQKARKMVAKYRNKEANQRKDFLQKLSTYLVKSYDVIIMEGIRSSNLMKNHKLAESIMRSAWRMFRDFLAYKCERYGKELILVNPKNTTRVCSSCGVNGGKKELSIREWQCQSCEELHDRDINAAKNILNKGLALNSQC

SEQ ID NO: 15195 - protein, 351 aa, unknown
  TnpB Polypeptide
MDYITTYKFKLKNGFRSLNILASKVNYVFNYCNQVSYYSIKKDRKYLSGFDLNNLTSGTSKLLKLNSNTIQSISEHVYKAKKQHKKSKLNWRNGKSLGWIPFKSNSIRVNNDTATYMGKSYKFFKSRELVGELRTGEFVQDSCGDWYICLVYKLSEEIKVNNLSVGIDLGQKSIATTSDGQTFTNPKLTNLYADRLAMSQRSNNKKKTARIHRKIKRVRLDNLHKISTKLSNTYSTIVVGDLKLKNNKQTNDASFRGLVSLLKYKVSRLGGTIIEVNEAYSTKTCNNCLAETGPTGLQGLAIREWTCGSCGQTHQRDINAAKNILHFGYEVLKTSDKLKVNQNEELLGGAR

SEQ ID NO: 15196 - protein, 436 aa, unknown
  TnpB Polypeptide
MKQVITAKLKLHTTAEQFSALRQTQLAYRDALNAVSRYAFEHGKISNQRTLQREMYDEIRLCYHLPAQMACNVPRQVGATYKTLWTKAKQNAAHRKAGITSKRYKGLDQPPKYVSPTLTYNYQRDYSFKPEQQVSILTLSGRVIVSYTGYEKHVPLIQQAAHLGAAKLWYDKPHKQFYLLVSLEVEGADSTPATYTQVVGVDVGQRYLAVTTTTTDETAFYSGKAVRAKADHYARLRKRLQRKGTRSATRRLVVISGRERRLKLHTNHTIAKRIVQRHPHSLIGIENLANIRERETRRKRGKKASKKQRQANGHASKWAFAELQSIIAYKATIAGSIVVKVDAHYTSQACPMCGYTSKANRPHQGLLFVCQSCQYTLHADLIGARNIALRTLLVRQDWMSTGVLSVRPDVASDEAKVANRQRYAELRWSLATSPQL

SEQ ID NO: 15197 - protein, 369 aa, unknown
  TnpB Polypeptide
MKTFCFKLYRAKRNKKLNQQINAAGLIWNHCLTLHKRYFRLFGKYLQKPVLQKHLTKLKRLKNFSYLKEIGAQAVQDVTDRIDRAYRLFFNNFKRKIKCSPPKFKRVKKYKSFTLKQTGWKIEAWHNTIIINKQAYRYFKSREVVGKVKTVTVKRDSVGDIFIFVVTDYEENEVLARTGQSVGYDFGFKEKILVASDGKDILAPSFLLSNIKALKRASKTLSKKKDKSKNRERARLELARIYRRAENRRKDFHWKLAKHLCSEYALICVEDLSLKGLQRGHGKKMQDYGFGMFLKILQYVSGRMGTTIIQVDKFYPSSQLCSECGEKNPETKDLSVREWTCPKCGTHHDRDKNAAKNILNEGTRIFLSA

SEQ ID NO: 15198 - protein, 406 aa, unknown
  TnpB Polypeptide
MIWPMKRLQAFKFRLRPGGQQERGMRRFAGACRFVFNRALALQNENHEAGNKYIPYGKMASWLVEWKNATETQWLKDSPSQPLQQSLKDPERAYKNFFQKRAAFPRFKKRGQNDAFRYPQGVKLDQENSRIFLPKLGWMRYRNSRQVTGVVKNVTVSQSCGKWYISIQTESEVSTPVHPSASMVGLDAGVAKLATLSDGTVFEPVNSFQKNQKTLARLQRQLSRKVKFSNNWQKQKRKIQRLHSCIANIRRDYLHKVTTTVSKNHAMIVIEDLKVSNMSKSAAGTVSQPGRNVRAKSGLNRSILDQGWYEMRRQLEHKQLWSGGQVLAVPPAYTSQRCACCGHTAKENRLSQSKFRCQVCGYTANADVNGARNILAAGHAVLACGEMVQSGRPLKQEPTEMIQATA

SEQ ID NO: 15199 - protein, 489 aa, unknown
  TnpB Polypeptide
VCSPVRASRGGGPGPSGCRSCHRSGWAGVKTIQAYRFALDLTPGQERAVLAHAGAARVAYNWALARVKAVMDQRAAERSYGVGDDRLTPAVSWSLPALRKAWNAAKPAVAPWWPEVSKEAFNTGLDALARGLANWAGSRSGTRAGRLVGFPRFRSRRRSTPSVRFTTGAIRVEPDRRHVVLPRLGQLKVHESTRKLARRVEAGTARIMSATVRRDGGRWHVAFTVEVERAERSPARPDSVVGVDVGIRHLAVLSTGELVPNPRHLVGARSRLRALGRTLSRRQGPDRRTGRRPSNRWQRASARLGRAHARVARLRRDGLHKLTSRLTREHGTVVAEDLHVAGMLANRRLARHITDAGFAELRRQLAYKTGWNGGRLLVADRWYPSSKTCSGCGAVKTKLALSEREYRCAACGLVIDRDHNAARNLAALAVEYDTAGSGPVAARGADQKTRVRGQVAAKREPGTATPVRPGPSHRKAGLPTVCSLERTER

SEQ ID NO: 15200 - protein, 526 aa, unknown
  TnpB Polypeptide
MPKAEPSKVFQGVHARLVFKEEDKQAVLDLMRRFSSATRFAYRRLLEGKSREELKRENGPLCTLFGLNTRYADGAIEKAQAILDSAKELGQDPQKVVFGGRKLFEGLKRKHLSGKALLALKREWKERRQGLLYSRGDAAKKGNANLRLEPQGDALWLRVNLGNGGHVQALVQTAHPQLNALRERVYASLPYNVTLRLEDGKVYAHFTWSEALPPPVHTRANGVLGIDVNADPYHLALAVVSPDHLALAVVSPDGNLTRYLVLSLAEVDSAPNKGAKELALWKVAHQLVALAEEHGVAIATEKLKYLRKSRRGDGHGRHFRRNQHRFAYRSLLEKIHSLARKRGVEVLEVNPQDTSTIGMLKYAPQLRLSKDVAAAYVIGRRALGFEEKLPKRYEALLKNESFFAYTEGFYQTRLQELQKLREAEKNPHLRRKLSRDIGKTKAALTLVSSLQGSPGSRKGSTSGRNPSGAHPWRVLRVGLFLPLLGLEVPRDLSPLKPILHGSWKGWKIGSGPHPGGGPGCTNVHFK

SEQ ID NO: 15201 - protein, 408 aa, Planctomycetes sp.
MPLLAHVIALRPTPAQVTLFLKAAGCARLAYHWGLAQWNREYQAGGKPNWMALQKAFVARIDADVPFMREVPSSAYAQPFRHLHQAFQRFFAGNARTPRFKAKHRDQPSFKAGKVRCGDQHIILPVIGAVRSTEAPRWAGRVVSSTVRADADRWIITILCEVAEEEAQPPPSPPTTAGIGIDLGLRTFASCSDGRQFQAPRPLRCHAKRQRRPSRRLSRRQAGSRRRQKARRRVARLHRRIRTIRSAFLHPLATSLARDSHVLVIEDLHISGMLANHHLARAISDAGWYEFRRQLTYKCARYGRTLLAAHTFYPTSKLCCQCGNHNPALTLADTVYECTVCGNRMDRDINAARNLSPLARRGIDARGERTALASAGCLPVLPARRSVNPGARTRVTNDLAELSVGSRD

SEQ ID NO: 15202 - protein, 416 aa, unknown
  TnpB Polypeptide
MGVRRTAVVKLAVSDEQRDALHRTAEQYLYCANRTADYCWSGTSFTQCRTNKREVRDALYSELREETELQAQLVQAAIRRAVEAVKGVVERWKKGQRVSRPTFTAKTMDYDTRSATFYRNEVSLATVEGRVEPSFVLPADSPTPYEQYVLSEDYEFRESTLRYDAATDEFYLNISTQRIDGDGPEVPADTGHPDQTVLGIDLGVTNLAVSSTGRFWQGDNYDHWCREFEKRRGEMHQRGTQAAHNALLRLGKREEAWRKQYIHTVANELVAEAVGHDCDVIVFEDLTDIRERLPQAKWHHVWAFRRLFEYVSYKAPDRGVSVEQVEPNHTSQRCSRTDCGFTHDDNRHGERFCCQKCGYEVNADYNAAKNIGLRYARKRIHRLRSSPTSGSGDAEVNLRINGGTVNGKGHQPIAGD

SEQ ID NO: 15203 - protein, 573 aa, unknown
  TnpB Polypeptide
MSDHLSLPIRLPDEDGKRFERLATLTQSIANHVLEDHWTPEHLDGIATASHQAWKYFDEHDPFEDLSLYLPSRFRRCILQKVGETLRSHADRRDAFQSIRDVLPDHKIRRIHRRRIKDQLWDDGDYLSSGYVDILIDQLNSYYDQHGTYPATYLEMQDCPEYDSGVLPFSADDGPTSGQAVKYQYESDNETLAIRLKTPDTLSPETRGDWSWTEYERGGYEAFHDLLDHGELSAPEFQPSRRKTGDAYYELSFPVEVEHTEETDGTDCVLALDAGMRKDMTAVVFTDDGEQLSTPHFIQFTDREKMRRLHRERTRLNDRLTALRRAGRAHTDEFAHIQSEYERVNNKIRHKREQLTHDVANHVLALALAYDVDAIIHEDLRSLSPPSDEGELSWELSSWARRDIIENIEYRAENAGIAVERVYPEGTSRACPRCGSTGHTCKSPDHQQERWWGGHFRCDNTRCGFEGDRDYIGALNVARVFFSETDELDHGFTSSYRGDSEIVLARRSAGTRLTFGSGIVAYEPEQAEATTGGGSAVIAPAVALPKSNADGSDGCGPAVQQCTRFLRCTTESY

SEQ ID NO: 15204 - protein, 395 aa, unknown
  TnpB Polypeptide
VLVRQAFRYRLSPNREQQAALAVQFGHARYVWNYALALRRDAYRERKESIPFYDLKRRITALKVDADHTWLRAADSQVLQAKVEDLERAYRNFFEHRARFPRFKRKDGPQSIRYPQRFRFKDNRLYLPKVGWVKAIFHRAMEGTPKNVTVSRTKSGDYYVSVQCEREIDPLPHPGPIVGVDVGLTHLAILSTGEKIAHPRHVRRAEKRLARLQRSLSRKRTGSRNRARARLRVARQHEHVANARRDTLHKLSHRLTRDFGAIRLESLGVRGMLTNHRLAKSIADSGWSTLVEMCRYKAMWRGGTVEQIDRFYPSSKTCHVCGAKNDALALADRQWTCMHCGTSHDRDINAARVIAAAPTAGAAERISAGRSHKTPALFGAARRSRNREAQPLTVG

SEQ ID NO: 15205 - protein, 381 aa, unknown
  TnpB Polypeptide
MIHAYKYRLFTNANQERELAATLETHRRLYNAALDGKQLCWETAGMNWSYYEQSVWFTIQRRDNAYYARLNVTSAQRTLRKLDKAFQAFYARIKRGERPGYPRFKSADRFNSFAFDMVGHGGGCKIVDGKLRLQRIGAIRIHWHRNIPDEAKIRTATIVRENGKWFVCFAVEMPKPEPSCGIGSVGVDVGLKAFVTTSDGEQLGDSRILENSLQELRRRQRALSRCHRGSGTRKTVKKRVTTLHTKIRNTRKDMHHKVARTLVNRYGVIAVESLNVKGLIRNHRLARRISDAGWGQFLGILSDKAEWAGGQVIGVDPKGTTQECSNCHGIVPKSLSVRVHRCSCGLVLGRDVNAARNILARAEPRNHNVEVVSHGFRSRQL

SEQ ID NO: 15206 - protein, 449 aa, Erysipelotrichaceae sp.
MYYTRNIDIRHSDALYPYFDRIAHLSANLYNAALFRERQLMSSSKKEGNQWFDNEREIRDEVKSVEGVSVPPSGVLCYTALDKLMKKTNNPDYKAEGLPRQKAQNTLKHVVRNISSFFEALKQYQADPSLFTGEPKLPKYKHKGGTASFDISNQDCVIYRNKKGEYYAKLPLTKERLKLGKNVPGKLMEVHVIRNNGVYTVSFVFDDERSQPAVQKKVHRITAVDLGVNNLMAVTNNCGLECLIFNGKPLKSINREYNKRNAGLVSAQTKGKKVKFKPTKQSERVCRKRNNRVHDYMLKSGKLFVIWCVENRIDTVVMGSNPFWKQEVNTGHRNNQNFVQIPFDQLKCIIIWLCERNGIRYVEQEESYTSKASFIDRDKIPVYGEDAVSSFSGKRIRRGMYQTKDGTEINADLNGSANILRKKYSDAFSCNLDFTNVRYIRHPDIELSK

SEQ ID NO: 15207 - protein, 326 aa, unknown
  TnpB Polypeptide
MHLTHKIALRPTAEQEDYFQRAAGTARFVWNWALAEWKRQYAEGKKPAAMALKKQFNAIKYEQHPWLAEMHRDSHAQPFAHLAKAWTTFFADLKAGKQGHEPRFKKKNRCRDSFYVANDKFSLDSQTIRLPKIGTVTMTEALRFEGKILGATVSRTADRWFVAVQVDVPEAQALRRRTGHGTVGVDLGLKAAATLSSGESIQAPKPLRAALRRLKIRSRRLSRKLEAAKIAAGFTPGARLPKGTQFPLSNNRRKSAAKLARLHARIANLRVDFTHKLTTRLCRENQAVVIEDLNVKGMLANEKLARAISDVGFGMFRQQITYKVLR

SEQ ID NO: 15208 - protein, 453 aa, unknown
  TnpB Polypeptide
MLNPTLSVFGAFPMCMITTAQKIMLIVDRKTASTLNRACGCARYAYNWARDTWFAKKKAGQESVTCAELRKEFNEQKTDWMYESPKGSMDQAIKNFVLAKKRHYENPEQFGFPKRKKYKSKRSFYIENDKARLIDEYHIKLPKIPTPVRLAEPVKQECLHGKINNFVASKGSNDCWYISISYTYDDINVEYGTTENGLVGIDMGIKTLMQLSTGEKVDNDKLLRQHAKRLNRYQRMMSRRKYNSVHYKDVKKTFNKKNTYITNYRKDLIHKATTEIVKHNMVVAIEDLNVKGMMSNHKLASAISDCGFGMIRRFLEYKSAKYGTFLIKVGRFFPSSKKCSGCGHVKEKLSLSEREYICEECGLVIDRDTNAAINILAESLFIELHNRFNTDIARRKFTPADLVALAYSLSRTGETTEVDAHCLLTRDGRTAMVDELFIRLWNQVANATVNCYI

SEQ ID NO: 15209 - protein, 212 aa, Bacillus sp.
VSLLVETEVQELPKTHSYIGIDVGLKDFAILSDEKPYENPKFFRSLEEKLAKAQRVLSRRIKGSSRWNKQRVKVARIHEYIANARKDYLDKISTEIIKNHDVIGIEDLQVSNMLKNRKLAKAISEVSWSQFRTMLEYKAKWYGKQVIVVSKTFASSQLCSCCGHQNKDVKNLNLREWDCPSCRTHHDRDINASINIKNEAIRLLTARTAGLA

SEQ ID NO: 15210 - protein, 378 aa, Bacillus sp.
MEVNEMMINKAYKFRIYPNQAQAILINKTIGCSRFVFNHFLSLWDHAYKETEKGLTYGTCSAKLPAMKKEFVWLKEVDSIAIQSSVRNLAEAYTRFFKKQNSAPRFKSKKNNVQSYTTKQTNENIAVVGNKIKLPKLGLVRFAKSREVEGRIVNATVRRNPSGRYFVSLLVETEVQELPKTHSYIGIDVGLKDFAILSDGKPYKNPKFFRSLEDKLAKAQRVLSRRMKGSSRWNKQRVKVARIHEYISNARKDYLDKISTEIIKNHDVIGIEDLQVSNMLKNHKLAKAISEVSWSQFRTMLEYKAKWYGKQVIVVSKTFPSSQLCSCCGYQNKDVKNLNLREWSCPSCRTHHDRDINASINIKNEAIRLLTARTAGLA

SEQ ID NO: 15211 - protein, 414 aa, unknown
  TnpB Polypeptide
VLERPEKGVCFHPAHGIPGNPKTPALYVDTQCVPHARKRLRGLRQDKRYLAAMDTYRKGERKKEELFALRMEYGLSEYQFHSWISIQQKKRKRYMDSLTAQKIASTVWKSVEDVLFRKGKTIHLKKLMDFTSMEGKNNAAGLRFRDKKLHWLGLCIQVRLHKKDWYVQEALQHKVKYCRIVRKPVGIRWHFYLQVVLDGIPPQKHRFLENGDVGIDPGVSTEAAVSGNGCILTELAPERPGTRKEIRRLQRRMDRSLRAANPGNYHGDGTPKKHKKWKKTRHYKQDQMRLKTLRRRNADTVKQSEEALADRILCVHGTDIHTEKMDYRALAARAKEDRVTEEGKHRSKKRFGSSIAGHAPARFLCILNRKLSYIGKELHLVDTRKYRASQFDHVTGGVFCQALFPKKSVRIPCF

SEQ ID NO: 15212 - protein, 367 aa, unknown
  TnpB Polypeptide
LNIAYRFRIYPTEEQKILLGKTFGCCRFLYNQMLNDKIREYKKTKKLLKNTPAMYKKEYSFLKEVDSLALANVQLHLEKAYKNFFRDPKVGFPRFKSKHHSKNSYTTNVVNGNILVEDKRIRLPKLKWISMKKHREPAENCCLKSMTVSMEPSGKYFASLLYEGYSCENQAADEDYSNAKILGIDYAMQGMAVFSEEIELEKAGFFRRNEKRLAREQRKLSRCVKESRNYVRQKKKVARCHEKIRNQRKDYLHKLSRRITDQYDIVAVEDIDMKAMGQCLHFGKSVQDNGYGMFRNMLDYKLAWKGKKLVKIDRFFPSSKKCSKGGKIKKELGLSERVYRCTCGNEMDRDRNAAINIREEARRMLAV

SEQ ID NO: 15213 - protein, 392 aa, Chroococcidiopsis sp.
VFVLEAKLRGSDNQFQIIDEMVRTAGFIRNKCVRYWMDNQGIGQYDLSRLCKDLATEYEWAGKLNSMARQASAERAWQSIKRFYDNCKNPSVKKKGFPKFKKARSVEYKTSGYKLSEDRQSINFIDGFKAGTFRMIGAADLSYYQLGQIKRVRVVRRADGYYAQFCIQHERSEEIEPTEQVIALDVGLLHFYTDNRGNKVENPRHLRKSEKALKRLQRRVNHKVKGSNKRKKAVNKLGRKHLKVSRQRKDFAVKLARSVVKSSDLVVFEALRVRNLVKNHHLAKSISDAAWRMFFDWLEYYGQIFGKIVVPAPPQWSSQECSSCGQIVKKSLSTRTHICSCGANLCRDENAAKVLLARGLKIASTQGHWGINAQGQTNLCQLSENLVDKLTG

SEQ ID NO: 15214 - protein, 380 aa, unknown
  TnpB Polypeptide
MIVMQIQRAYKTEIDPNNVQRTLLLKHSGCARFAYNWGLARIKDNISKPNAMMLHKELNALKPTDFPWMYDVSKCTAQEALRDLQKAFQNFFDKRAKFPTFKSKHNGIGSFRLTGTIKVEDKRIQLPRLGWIKLKESSYIPQDAHILSVTVSESAGRWYVSVLVKEEIEQSELNPNILGIDLGIKTLATCSDGTTYVNPKALIKYEEKLKRLQRKLSRQQKTSNRRKATKNKIATVWAKIRHIRTDVIQKATTDIVKTKQYQIIALEDLHIKGMMKCHNLAKSVSDAAMRQFRTTLEYKQAWAGGEINLVDRWYPSSKTCSACGYVKSKLNLSERTFVCEDCGIVMDRDLNASINLKTYTASSAGINGRGDAKVHKLATV

SEQ ID NO: 15215 - protein, 352 aa, Acinetobacter sp.
MKTLKLRIKDKHCKVLDQLASEVNFVWNYVNDLGFKHLKRKGEFLSAYDISKYTKGTSKECNLHSQTVQAITEELVTRRKQFKKAKLNWRVTNKKSARRSLGWIPFKKVAVKYADGYIQYGKHQFKLWDSYGLSKYNIKTGSFVEDSRGRWYACLVVDSPKQEKQTATKAIGIDLGLKDIATCSDGTIISNPKFYRKYEQKLGVAQRAKNKKRVRALHAKIANCRKDYLHKVSSKLVKENALIIVGDLSAKKLVKTKMAKSVLDTGFSALKTMLKYKCENAGVLFEEVNEAYTTQTCSCCGSRFSSPKGRTGLGIREWQCMECGTLHDRDINSALNILALGHERLAGGIPVL

SEQ ID NO: 15216 - protein, 222 aa, unknown
  TnpB Polypeptide
VEVFLCLEKSGGIQAPKPPRFKKENIPVAYMQMGIVHEQGSGSVRLSLPKALKIYMEKTFGIHEKFLYLENKIFRSMDQIKQIRIYPPEKGTSRIIVVYEIPDPEILPDKGHYLAIDLGLHNLMTCYDSGNGKTFILGRKYLALERYFHKEVARIQSVWYGQQSAKGIKYPRSSKHIQRLYKKKQDAVTDYLHKITMYLTEYCKKQGDHLRDCGRYRKYQEK

SEQ ID NO: 15217 - protein, 587 aa, unknown
  TnpB Polypeptide
MRYNRTHQPLTYDVRLPDEAQADALRLLDTSRAVVNQTLERLWPSLDTFGEKTAGPAWKQVGQHTGSPQYHGDRQWRCESETVGRLLRAQAQRKKAFALIAPILSDGFMRPKTEKRPPGKNRSTIKEAINALQQALSDDETSFVTLQNVIEQCCNFFLEQDRFPATYEELQPVPLLKVGVLTYAGDDGGAKGQAYRLALALDAGVARWRFRYPDAQGVWQWRKTDTILTLPACLKERLGHGELLAPTLREEYRADGQRFAVLDFIVEVEKTALREWESCERVLGADWGIHSLLTATAVDVQNQQVGRPFFLDTGGFDGRQARTRRQIDELKRKVAHFEQAHDLLPEEHTKRIWYNKQLAVYRREIDRCWRKYEQRNRSLAHLASNVLLLLVRVHGCSLLSMESLKTLKSTGRGKGVRGRWRNYCNNATIRGEIWRLLRYKCHLVGMRFQTCPPRGTSHTCPHCGKPAQTYREPSARSQAIKWGRWLWCDECSFNGDRDYAASLNIARLGVAYLLQMKHMGRAQSCSITDPRVKPVSYTGTGSALLLPPTGLDPARHVRGKICFYPGWFGSAFLQSSQPKAVFLRLCG

SEQ ID NO: 15218 - protein, 188 aa, Okeania sp.
LKVARIHAKIKDSREDYTHKLTTQLIRENQTIVVEDLAVKNMVKNHNPPPSPPGRGARGVGSDANWGEIVRQLEYKAEWYGRELIKIDRYFPSASFRGASLTKRCSNCGHVVEKLPLKIREWDCHSCGSHHDRDINASINILRMGTRVGERRKGTPTKKAAGLAVSVCGATVRSEGNKSQRTGAMRQK

SEQ ID NO: 15219 - protein, 178 aa, Okeania sp.
MVKNHNPPPSPPGRGARGVGSDANWGEIVRQLEYKAEWYGRELIKIDRYFPSASFRGASLTKRCSNCGHVVEKLPLKIREWDCHSCGSHHDRDINASINILRMGTRVGERRKGTPTKKAAGLAVSVCGATVRSEGNKSQRTGAMRQKAPNSNARESRAVSRIAASGGCQHSTLCKSHY

SEQ ID NO: 15220 - protein, 311 aa, Lactobacillus sp.
MVQLPYHYGVKLRVFPSAEQKRLIKRNSDASRFIYNEMNGMNRELYLLKQVQIPISMVQKRIATLEERLKKPATGISNIHGWLNNSGLDSDMKANAIKNYRAAWNLFRKVHRAGVPVFHKKRTEQKYQTSCQYAQQVQVPNMLTGSVRLLDKKHLRLPKIGRLRFRGLPPKLLHKAAVIRIGTVTISMDATGRYYVSLQLASEQPFVELIPIVKSPLGIDLNTDNFLTTSNGAVVANPRYYRRLQGKLAQAQRKLSRRALRAQKEQRPLRTAANYQKQRVVVANLQRKVASQHLRDENAAQNILAKGLVSI

SEQ ID NO: 15221 - protein, 228 aa, Lactobacillus sp.
MKANAIKNYRTDWQLFRQVHRTGVPVFHKKQMAQKYQTSCQYAQQVQVPDMLTGSVRLLDKKHLRLPKIGRLRFRGLPPKLLHKAAVIRIGTVTISMDATGRYYVSLQLASEQPFVELIPIVKSPLGIDLNTDNFLTDSKGHVVANPRYYRRLQGKLAQAQRKLSRRALRAQKEQRPLRTAANYQKQRVVVANLHRKVANQRQNFLHLVSTTLIKNHDLVVADRYVSL

SEQ ID NO: 15222 - protein, 283 aa, Lactobacillus sp.
MSKTMAQLPYHYGVKLRVFPSAEQKGLIKCNSDASRFIYNEMNGMNRELYQLRQVKLPIAIVQQRIQTLEERLKKPATGISNIHGWLNNRDLDSLMKANAIKNYCTAWQLFRQVHRTGVPVFHKKQMAQKYQTSCQYAQQVQVPDMLTGSVRLLDKKHLRLPKIGRLRFRGLPPKLLHKAAVIRIGTVTISMDATGRYYVSLQLASEQPFVELTPVVKSPLGIDLNTANFLTDSNGHVVANPRYYRRLQGKLAQAQRKLSRRALRAKKEQRPYVRRPTIRNNE

SEQ ID NO: 15223 - protein, 419 aa, Lactobacillus sp.
MSKTMAQLPYHYGVKLRVFPSKEQKRLIKRNSDASRFIYNEMNGMNRELYLLRQVKIPISMVQTRIATLEERLKKPATGISNIHGWLNNRDLDSLMKANAIKNYRTAWQLFRQVHRIGVPVFHKKQMAQKYQTSCQYAQQVQVPDMLTGSVRLLDKKHLRLPKIGRLRFRGLPPKLLHKAAVIRIGTVTISMDATGRYYVSLQLASEQPFVELTPVVKSPLGIDLNTANFLTDSNGHVVANPRYYRRLQGKLAQAQRKLSRRALRAQKEQRPLRQAANYQKQRVVVANLQRQVANQRQNFLHLVSTTLIKNHDLVVAEELRSKNLLRNHALALSIADVGWRTFLGMLAYKAKLYGRQFITINPRNTTQTCSHCGFIMGTGKTEKLTLRDREWTCPQCGKHHLRDENAAQNILAKGLASI

SEQ ID NO: 15224 - protein, 419 aa, Lactobacillus sp.
MSKTMAQLPYHYGVKLRVFPSAEQKRLIKRNSDASRFIYNEMNGMNRELYLLKQVQIPISMVRKRIATLEERLKKPATGISNIHGWLNNSGLDSDMKANAIKNYRAAWNLFRKVHRAGVPVFHKKRTEQKYQTSNHYAANKSTPTMVNGSVRLLDKKHLHLPKLGKIRFKGLPQKIFSHRSTIRIGTTTIAMDATGRYYVSLQLASEQPFVELIPVVKSPLGIDLNTANFLTTSNGAVVANPRYYRRLQGKLAQAQRKLSRRALRAQKEQRPLRQAANYQKQRVVVANLQRQVANQRQNFLHLVSTTLIKNHDLVVAEELRSKNLLRNHALALSIADVGWRTLLDMLAYKAKLYGRQFITINPRNTTQTCSHCGFLRDTGKTEKLTLRDREWTCPQCGKHHLRDENEAQNILAKGLASI

SEQ ID NO: 15225 - protein, 784 aa, unknown
  TnpB Polypeptide
MARKNKISTSVIVSIDTSKLSHQNKQRLRQILGRDSRIISRYIGVIEDNRKELVEYKEKKNGKISIKIDKGKLDQLTCTTSDRKIVVHDLKIQFPRISLNELKECRDTAVGMYLSYLELEAKGNASIPTAKSSFPRSIGYRRFKLRYHKRTLTIMDSMDTNPSMINNGKKKIQHDKLTFNLDLKKYDICKIMEGSLQAVRIIRSRRNYYAIFAIRHEVKQLTSKYPKKSNKELAIAGIDLGINRDAVISIITAHGVSQHKFIKLERIENTKQSILKLDKRIAEIQHKVAKRSTDKEQTDGLYSLLRELRSERSELKYEISHQLSAEINKYLLSLTDQYDLWIGIGKLKGIRASIPTAKSSFPRSIGYRRFKLRYHKRTLTIMDSMDTNPSMINNGKKKIQHDKLTFNLDLKKYDICKIMEGSLQAVRIIRSRRNYYAIFAIRHEVKQLTSKYPKKSNKELAIAGIDLGINRDAVISIITAHGVSQHKFIKLERIENTKQSILKLDKRIAEIQHKVAKRSTDKEQTDGLYSLLRELRSERSELKYEISHQLSAEINKYLLSLTDQYDLWIGIGKLKGIRRGQRRGNGNKRHRKRMHRWAYGQLTWMLEYKLSKSGYKRRFLTIPEGWTSIKCWKCNTKGKRPKQEYFKCKNRTCKWMGNADFNGATNIAKRAAKYFKLTTHLKSSLFEVSELGSAEPKTMKVFNKNNTRGSSNLSNNLSGRNAVNSDQAMVKNHGNPSLLISFFKASSEGEDDRNTDLILSNKNKSRTLLASQEVVVTPDSVCGT

SEQ ID NO: 15226 - protein, 349 aa, unknown
  TnpB Polypeptide
MLLVYRYRVKSLNGLLNKQSRAVNYVWNFCNDTQKHALQWRKKWPSGFDLNVLTTGSSKELGLHSGTINAVCEQYAKSREQLKRPYLRYRSNKSLGWVPIKGRELKREGTAFRFAGNTFRIFHSRALPDGKIKDSTNFSRDARGNWFLNIVVEIAEAPRRELIKGLGIDLGLKELAAFSTGEVISNLNHYKKLEPSLAIAQRANKKRLVTKIHAKIANRRSDQLHKISNRITREFDYIAVGNIKPSGLAKTKIAKSVLDASWSTFRNQLAYKAIKHGAWYEEVNESFTSQVCSNCSALPDSRPKGIADLGIRQWICCECGISHDRDVNAALNILARHGHVSPAEGISLI

SEQ ID NO: 15227 - protein, 429 aa, unknown
  TnpB Polypeptide
MFRATKVRLYPTKAQKQKLAQDFGNARKVWNLALDLKQAAHASGESLSCYDIKKMLPIWKNGEYKYLKQTHSQVLQESILHLDRAYRNAFARIQQGKRATAKHTKNANLFGFPVFKSKYDSRQAISYPQGVAVLGNKINFPKIGQIKAKVHRDIIGKIKTVTISRESTGKIYASILTEDPQPITEPLTSFDDHQIIGIDLGIKNWVTDTSGEKLPNPQHLKKSISKLTRIQRSLSRKVESAKNRCTADGKSSKELRKYFGSNIAKDQKRLALAHEKVRHVRENYQHQVSSKLANKNQVVIAETLNVKGMISNRNFSKAISDCSWSSFLGKLDYKLKAKGGQLVRISPWFPSTKMCNHCREINEKIELSDRIWTCNACNAIIDRDINAALNIREVGIVKLKAAGLSVYAHGGHVRLDDFDQAMACEVGSH

SEQ ID NO: 15228 - protein, 376 aa, unknown
  TnpB Polypeptide
MSRKANNLYNQCVYFAKHSENLLEDLKRLDKVMKSFPDEYDNYRSFGHVQCAQQILRLFHQNLRSYFASIKDYKKNSSKYTSRPRFPKFRKSGERFQVIFTNQSVKLDDQVVSVAPRTFENTLSIKLRTRSAKKICQAVFTPRNNYFLVYVIYEADPIMSKNTNKIAAIDVGLSNLATVTFSEEHDPILYRSDLMKINQDFNRITSRYVSILKKTQNKDTSKRRKRYSEKYSGLIEDRLHKISREIINDLSHRGVSTVIVGKNTGQKINSKLKNFVQVPLFRLINMIKYKAELAGITFIQAEESYTSGTSFLDNELPTKEFYDKSRRKYRGLFLSNNSKRINADVNASFQIMKKVYKEFMHTDSIKYANPIVKTIC

SEQ ID NO: 15229 - protein, 285 aa, Microcystis sp.
PLPFPVNLKWELIKEVRIVPRNTCLYAEFVYQQIHCELKEGRSLPTHLDSTKVLGIDHGLNNWLTCVSNIETSFIIDGKHLKSVNQWYNKQIATLKEGKPQGFWSRTLAHVTEKRNQQMRDAVNKAARIVINHCLIHGISTIVFGWNQGQKSESNMGAKNNQKFVQIPTAKLKERIVQLCEQYDIKFVETEESYTSKASFLDNAKLPKYGEKPDGWQSSGKRIKRGLYRTADNWLVNADCNGGANILRKVKTMLKLDLSRVTRGILTMPIRIRFWSNSVLESASL

SEQ ID NO: 15230 - protein, 555 aa, Lachnospiraceae sp.
MDGRTRMKTRIRTRMKTRACIIRRKTPASAYLGEICRRSKALRNTTNFYIRNTYTGIVKSPEERTHNETEVLHFVFTGIQKYNAHKRVLLSQDVRKAGQAGGLSGHAAVRRALKRAEPVPYPARDNRMLTYGVLDAVFKFTQNPVYYSLPAQVNQNAMRKTFEAWKGYFSALKDWRKHPGKYAAKPRIPGYIRSAETTAWFTNQTAKLKDTGKGHVLSFINTKVTVGCGHIPGTYVKTEVQPYHGDHRLLITYKDGKAQAPEVPEHPSRVYGIDTGIDNFLAVANNFGRTPFLIKGGAMKSWNQWYNKKRAALMSELTAGRDSTRSAKHSRRLYALSRKRDERMRDFFYKCAHFVCRRASEDRVDVIVCGHNDRIKDGTCLSKKENQNFVCIPEMKFLRILSGVGPQYGIPVVIREESYTSMASAADLDAVPTYGQGQEDGSIPVFSGKRIRRGLYRTKDGYLMNADINGAANILRKEYPEAFESMTDPSWLWKTTETISYRDIYKIRPVKEKTDAGRRSRPGRASRERHFARAARRRELKEAFPGNGTPGKKAS

SEQ ID NO: 15231 - protein, 387 aa, unknown
  TnpB Polypeptide
MAETATVRKTLKYKLRPTPKQAHGLDRALMLCRHVYNAAMGERREAWRMCGVAITYYQQKAELPDIKAAMPEYAEVHSQVLQDVVLRVDRAFQAFFQRIKEGKTPGYPRFHGRDRYTSLTYPQFGNGATLDNGCLILSKIGRLAVRWSRPLEGTPKTVTISREADGWYVCFSCTDVPTQPLSLTGQETGIDLGLESFATLADGSQIANPRIFRVAEMNLKRAQRRVSRRKKGSHRRRKAVKLLAKAHQTVRWTRTDFHHKTALALVKDYDTIYLEDLQVANMVRNHALAKSISDAGWGQFCAILAFKAACARKQVVAVLPAFTSQACSGCGVLVRKGLSVRWHTCPECGTSLHRDHNAALNILRRGQQSGAGQAPQALTQPVGAYVA

SEQ ID NO: 15232 - protein, 526 aa, unknown
  TnpB Polypeptide
VLARNQTYKAFVARPTHVLDLNGELLDSVPVMAQLTSEIRGISAYATYMVRNDTQLGNELVHITTTVPADAGRQAGITMPEFLANGRTGRSRKEKLIQYNVVTSYRSWQERIKAVNCESDKYISQGWKRTMNANPPSYGEDTINLGAVDRNYALIENNPFVDGEITLKLVIRGAWYHLIFPFDNTRFTEGKVTLPLVKIEGNRPVFIFSVVTDNPVVQFSGDYTIGVDVGINDYATVVVRNSTTGKVTYQTTLSQRVHSLWNSVRASEKQVKQLREKARSLSLYDRQAIMAALDEADLHRKAASRKKRELAIVAAQEIAYLSHFYNNAVVAVEDLSWIRNTMQNGRWNRGAFVQWLTHYVSQNGGWVASVSAANTSQVCHVCGEEVTHPKYEVSKCAKCGVFDRDVNVAANIAARAVPKVEKARKTKAKKQKLQKQAPLKTPIVRCSLKYPGRGRIKNAPTPKRKNHPRNVKEVTLPSSPARAQASCLGARVLADCNTCSVKVTETSKAAIKQNNMTYKCRLYNLN

SEQ ID NO: 15233 - protein, 383 aa, unknown
  TnpB Polypeptide
MIKGFRVQILPNEHQQKEIIKFCNAARFAYNWAIAKEEENYNNGGKFISGYDLTKLFTQFKKQEGNKWLKEISGRALKVAILNATVAYDNFFKKRADKPKFKSKKRSKMKCATHEGTIKITSDKIRLEKLGWIKLAQKNRIPIGENIKYFNPKIEYDGIDFWFSVSVEIIDNQNNDKTKTDAIGIDLGIKTLATCSNGIINHKPNITKINKKLKKLQRRASKHYQNMIEKSKQMKIKFVQLSKSKNLLKLEKEIKKLHIKITNILNTNIHTFTTSLIKLNPEAIVIEDLNVKGMMKNKHLSRSIAEAKFYEIRRQLEYKCKWNNIKLIIADRWFPSSKLCSECGYKKDKLSLSERVYICEECGIVIDRDLNASINLKNLAYAT

SEQ ID NO: 15234 - protein, 169 aa, Burkholderia sp.
MAGRKDHFGRRAAEKLANAQRARKHRRHIAKLHAKVANARADFQHKVALDLARRFDYIAVGNVSAVKLARTRMAKSVYDASWSSFRNRLRYKAMAHGATFEEVDERGSTQSCSACGSQDSTARPKGIAGLRVREWACSDCGVEHDRDTNAALNILRCGRASPGVGILSF

SEQ ID NO: 15235 - protein, 372 aa, unknown
  TnpB Polypeptide
MIFAHKIALDLTEAQETYCRKASGTARFTYNWGLAHWQMQSRGGEKPTAQKLKIQWNAVKYERYPWLEDIHRDAHAQPFSNLQAAFQRFFQNVKDRKAGKTTQKVGYPAFKKKGVHDSFYIANDKVQVQGKRVRIPKLGWVRMREALRFTGKLMSATVSRTADRWYVSLAVQIETAPPPCENQAGRVGVDLGVKHLATLSTGEKVDGPKPLKAALRVLRRTNRQLARRVKFSANWHKTKAKLARLHARVAAIRSDALHKLTTTMTTTYKQIVIEDLHVKGMVQNRKLARAISDMGLGRFRQMLTYKATASGCEVIVADRWFPSSKMCRVCGVINEALTLKDRVFVCGDCGHTEDRDVHAAKNLEQYPGLQGK

SEQ ID NO: 15236 - protein, 377 aa, unknown
  TnpB Polypeptide
MLKTMKYRLCPTKKQAGLLGDQLEECRCLYNHFLEQRKQSWEDTQHSLTYHAQAITLPTLKKRCPELAQIHSQVLQNVAVRVDLAMKAFFRRVKTGEEPGYPRFRGRGRYDSMTFPQYGNGCQLANGILKMSKVGAVRVVQHRPLEGIPKTCTIRRASTGKWYVTIVCEIEAQPLPSTGEAIGIDVGLLSFATLSTGEQTPCPKFLRTDEKDLKRTQRKLSAAMKGTPERRKRRKIVARVHERISNRRSNFAHQESRRLVNRCDVIAVEDLSVNRMVHNHCLAKSIQDAAWSQFAMLLAYKAAYAGRQFIAVNPAYTSQDCSQCGHRKKKTLDERIHRCECCGLTLNRDHNAALNILSLGLQTLGLVPRSSVVYGGE

SEQ ID NO: 15237 - protein, 407 aa, Roseofilum sp.
MRTAYQYRLRLTATQQATIDHWLELARRQYNYRLAERFNWYEQNRCDINACPLMCHLPELKERPGFYWQKRDLVNSKKLFPEYKDLPSHTLQDVIARVEKSFDRWLSGDSNGKRNGKPRFKGQGRYRSIAFPDPVKPEHLDGQFIHLPKIGKLKIILHRPIPEGFKIKTATITKKADGFYITLSLQDLSVPTLTPDIPTLDNTIGIDLGLKAFLVDDSGKEEPIPQYYRKAQKRLSRLQRSLSLKKKGSKRRRKAVKRVAKAHQKVANQRQDFHYKRAKKLLSKGKHIGHEALNIKGIARTRMAKSTHDAGWGQFLQILSVKAANAGLMTIAVNPNGTTQNCSGCGQTVPKEIRDRWHSCPHCGLELDRDHNAAINIKYLAVGHPVNKAQETPDGIPGVTEKPALSR

SEQ ID NO: 15238 - protein, 436 aa, Sulfobacillus sp.
MQETTVFAYRVSLSPTEWAKASDARRAAGDLWTRLVKIHRFCRRRHWRWPTESPLKAHFKRRFPLHSQTIQALIEKFSATIDGVRTKREHGDKQARYPFRRRRYFNPIFKGQALKMEGRHLLLPLGRGRDPIRVHLPEAMPTGTMVQAELGYGAIYLTITREIPEPIPAPSGKAGGLDIGVIHLGMVADGTEALAVSGRGLRSVKQGRAKALAKLQKKRSRTKPGSRRRKRLNRARHRASQKVERITRNALHHAANQIVAFCVVHLITVLYAGDLGTLNYKKRHHRSRRTNQDVGAWEFGRFEAYLAYKLKRHGIPLNLISEAYTSQTCPHCGHLNKVAGRTYRCRACGYQAHRDGVGAVNILNKGMHGEIRPGEFFVPQRITYRRPVPLKRALRRSPAELRHVAGGISGGESGGSLRGSLDPRRSDCGSPRISAL

SEQ ID NO: 15239 - protein, 201 aa, unknown
  TnpB Polypeptide
VETEHVELPHTNQTIGIDLGIKDLCITSDGKKYENPKTIRKYEKKLVKLQRQLAHKEKRSQNYCKTRKKIALCHEKITNTRKDYLHKISHEIISENQVIVSENLQIKNMVKNHHLAKSISDASWHELTRQLGYKSKWNGREYIKIDRFYASSQICSVCRYQNTETRDLSIREWVCPVCGTKHDRDINAAKNILSEGLRQIA

SEQ ID NO: 15240 - protein, 478 aa, unknown
  TnpB Polypeptide
LCRWREANPRDLLSIECPVKKMECPVKKMVRTVSLRPDLPEDRFLPMLEACAEIFNEHAACASENRTWNKYRIHDALYRGAREAHPEIPSAILQATRDCALEASKRCNKGRRGEWKTPVKRTLSVRYNLRTLSVRGGLLTLSCIGRRFRMLLDCGGNSRETPPDAMVLQPGKTFRPDGSERLSQVVRVPDHFRDIVMNWRCKAATLKHVRGRFRLNLVYEADAPPKAAGRALAVDVGGRNFAVTSDGDRHPSANPGVLRAVKRRYAHVRDTLQAKGTKSAKRRLRATAGREERFSRDVCHAVSKALAETPGVSTFVLEDLGGMRDRRRGRRANRVVHGLPFARLRFDLTYKAEARGKTVEVVEPAYTSQRCRRCGHTESGNRRKSRFRCIACGFCCHADDNASRNILFAYESGAVLRASTDQGKLSDPSGLKDCPRSPSSSRRKAPGGQAAVNRPTMHGSAPSGGTNVASHRPCAGGN

SEQ ID NO: 15241 - protein, 432 aa, unknown
  TnpB Polypeptide
MQLSHKIALRPNQRQLAYFRKAAGAARFAWNHALAAWEEAYRTDGTVDSFKLEREFNARKADLFPWIAEVSARIPNRVFANLRRAFVSFFGKRTKHPKFKSKRRDRDSFYVHNREFKVIGKTLFLCPAKGFSPIQMCESLRFTGKIMGATISREADQWSIAVQVDVGEYARSRTGDGVVGADLGVKHLVALSTGEFIEGLRPLEKALEQLRRLSRRLSRKKKGSNNRRKATQKLAKLYADVSHVRNDFIHNLTTRLCRENQAVAIEDLNVAGMMRNKRLARYIGDAGFGEIRRQFGYKGPIFGTRIVVADRWFPSTQTCSECGAVREVKLTLADRVFVCDMCGYEADRDFNASRNLRKLIPVNDGESTGNFFASDGREEPPCRTPAEREALARPKGRVKPHLAEAGTLVGGFNKCVRSTRQLDAEYSGAGLD

SEQ ID NO: 15242 - protein, 399 aa, unknown
  TnpB Polypeptide
VKLTATVKLLPTDEQSAALLETVERVNAACGWLAERASEAGTANRYRLHALHYRDLRGMFGLSAQMAVRAIAKVCTAYKRDLGVRPSFRPRGAVAYDQRILSFRGTDRVSILTLGGRAAMPFAAGPRQLALLDEGTRGESKLAYRRGKWLLHVSVEVPDAQPAEPTGWLGADFGIVNLAVDSDGEVHSGAGVAAVHKRQRRLRDELQSAGTKSAKRHLVRLSGKEARFRSDVNHVISKRVVAKAKGTGRGIALEDLEGIRDRTTVRKAQRATYSGWSFRQLRSYVTYVGEREGVRVVAVDPRYTSQACPRCGHAEKANRRSQSEFLCKSCGFGGHADHVGAVNVARRAEEKFPTTGITFRPVGYPSRAAVNRPIVAVGCETTHKSLRPVASHRPCAGGS

SEQ ID NO: 15243 - protein, 413 aa, Microcoleus sp.
MLNLSYEYKLKPTAEQAQEIERVLMVCRKVWNYALRERKDWINSRKCAVNACSISKEYIIPLDAAYPNYFQQSKSLTFAKEQIPELKTVNAQVLQQILRRLETAFVDMQRKGMGFPRFKNQYRMRSFVFPQMLKNCIQGNSIKLPQLGQVEFIKSREIPDGFVIKQARIVRKASGYFVVMSLRCDVNVPDPVASGNPIGIDLGLDQFLATSDGEVVKRPKFLKTKHRKLKLLQRRLKNKKKGSNNRHKLNRKIARHHQHIADTRKDWHFKQANHICDQARMVFVEDIDFRVWAKGMFCKHTLDAGFAQFVSILQWVCWKRGVYFGKVNKDYTSQVCPQCDTHTGKKELKERLHQCPECGYTTHRDVAAAQVIRNRGLSEEGRFLDIKENACGDGLTGTGNGLVKSRGSKKKKA

SEQ ID NO: 15244 - protein, 423 aa, unknown
  TnpB Polypeptide
LLFNENVQFKKKANNKRFNKRIVQLTEQHIIKSNEWKEWCVKAKELYNQTLYYWRQSMFKNIQYFTEYEILGLFREYSEPTFKALPSHCGQEIIKNLFKNVKSWQKARKEYEKNPNKFLGRPKMPKYKKELSILGFNNCQVKLKNGYIHFPKIIGISPMKTNIPNIDCCRVIPKSNHFVVEFVYTIEDVPQKEYNGKALGIDLGMNNIASCVSTTSNGFIINGKPLKSVNQHYNKQKSKLQSYLPKGKFTTKRIEKLTLNRNNKIKNHLHHASKYIIEQAKNQDITKIVIGKNDQWKTNINIGCKNNQNFVSLPHTQLVNLIEYKGKRAGIEVVKTEESYTSKCSALDLEPICKHEEYVGRRTKRGLFRTKSGLKINADQNGATNILRKVIGNDFLVGFNKRAVIAPVKMQCFEQKLAHKQRF

SEQ ID NO: 15245 - protein, 377 aa, unknown
  TnpB Polypeptide
MFDVMSTYDSPVLAKVKQQVIMQVAQNIKSFYAKENAKLPKYLDSITGRANIILTSQAISKHKFNQENKISFSFKNETFEYDITNLKRKLRLQFGDIKQVRVVYKFKKYQVILIVNKKPKQKTNGSKIMAVDLGLDRIMSVVYGPNKVLFDGKQLKRINHIFNKNLAKLQGERDLLKNQWVKLQCQLEKMDYDAIFYYEVSIAFDFNEDKYKKLIRKQSHIINRLRKLEKIIARTYENRNNRLKYCLHWLSRRLIELCVSNRIGIIVIGYNKEWKQAINIGKRNNQNFVQIPHKTLIDYIQYKATEYGIVVKLQEESYTSKCSFLDHEPVKKHDIYAGKRINRGTFRSKYGKFIHADINAAYNIAKKRDVTFTCVPL

SEQ ID NO: 15246 - protein, 293 aa, unknown
  TnpB Polypeptide
VIYKKAFRSYQVILIVNEKQKHAVKGEHAIAIDLGIDRIMSCVFKNHRVLFDGKQLKRINHRFNKNLAKLKSERDLLKNQWIKLQCQLEKMDYDAVLFYELNMEFDFNEEKYKKLIRKQSHIVNRLRKLEKIIARTYEKRNNRLKYCLHKLSRELIELCVSQGIIHIVVGYNKQWKQNINLGKRVNQNFVQIPFKQLLDYIQYKADEYDIKVTLREESYTSKCSFIDDEPIRKRKTYMGRRVKRGLFCSKNGIEIHADINAAYNIAKKAGYNFKSLYSLSPCSWAVVKRINFN

SEQ ID NO: 15247 - protein, 396 aa, unknown
  TnpB Polypeptide
MKRAYKYRLYPYDMQQAMLRQTFDCCRFVYNATLAAKIKAYEADKTTLSKFDCIKLITGLKKEHEWLRVVPHVCLPQAVYDMDSAYQRFFKTKQGYPKFKSKHRSKLSCRFSSPFCSIDQDTHHIKLPKVGLVRYKQDRRFKGQLRNITVSCDGCGRYWVSCLVETGIQEPKPESITSQSKCVGIDLGLKDFIVTSDGRKISNPRFADVIDRRIACLQKIEARRQKGSRRRAEIRLKINKLYAKKRNLIHNFIHHMVNDILGENQAVFIEDLNVKGMMGNHSLAKSIQSVCWSEFVRVLEYKARWLGKTVLKIDRFFPSSKTCGCCGFKNDGLTLSNRTWTCPQCGAVHDRDFNAATNILKEGLAKLLPSVGRFDGRGDGGYDVVEAPICAIQNCI

SEQ ID NO: 15248 - protein, 415 aa, unknown
  TnpB Polypeptide
MVQVERHIVGRYDSRYARIDHVCWLSKNLYNAGLYVIKQEFLRSGKWIRWIELNKQFLSENNVDYRALSAWSSNNILHRLDQNLKGYFSSIKAWKRDNKKFTGCPRFPRYKDKTKGRFSFVYASHTVRLLDGMLHFPKKEGFAPLRTRVTGGIHEVRFIPRHGYYVIEVVYEVPDVVELPDSGRYLSIDLGLDNLATCYDSNGFSFIVNGRSLKSINQYYNKRRGELQSSLQKQHGLKHSRRLDRLTLRRNNKVDDYLHKASRLIVNYCRNHGINRIVVGYNPGWKDCINLGSVTNQNFVCLPHGRFVEMLRYKSKVLGIGFIGVNESHTSVCSSLDREAVCHHDIYVGKRIRRGLFRSGSGLLINADVNGSVNILRKVFGDDVSLGRLVNRGRVVCPVRVCADRVVGSLVLNCI

SEQ ID NO: 15249 - protein, 406 aa, unknown
  TnpB Polypeptide
MEKRYRFRIYPTEAQEGQIQRTFSCARFIYNHYLSKRIEYYEKDGSVYSLFEAAKDLTTLKKTEGYEWLNEADVAALGYAMCDVDNAFKRFFKNVKKGNVAPGFPNFKRGKSSRNSYRCKNRPGRKPGHHHSIEFDGNRVKLPKLSWVKCKASKMIEGRIVSATVLQNPSGKYFVSIHCMDYEPAPLQKTGKTVGLHLGANNLAVTSDNRTFENNKYLKKSRRKLDRLQKRLSRKTGGSNNFEKARLKLAKAFERVTNQKDDALHKLTTQLVSEYDTICIRNEQVAKMMTRRPFGKHLSDANLGDLARKLAYKCEWYGKTLTKADEMFPSVQTCSSCGYKNTKISKKYAAKWDCPECGTRHKRAENAAINNLNEGLRQLSECGDTSNVGAVREPPNMQNRRFCGTK

SEQ ID NO: 15250 - protein, 404 aa, Caldanaerobacter sp.
MIVIQAKLIFLNQEDKQIVLDLMRRWSSCMRYAYKRLLEGYDRKTLKRDLQGVFDLNSRYVDDAIMKAKGVLESSKQLGNNPKKVIFGGRDLFKKLQKRHINGKEYQKLKTKWQEKRKGNLYSRGDKSKKGNLNTRIDVKENGTFLRINVGERKYVYARIEAGYKKNKRREELLQEIAESNIPYSVELKLKNGSIYAYFAIEEEYPEIIKITKEKGVIGIDVNAYPDNISWAEVDEKGNLISYGNMPMPELASGSKDKKEYFRWHYAHEIVKIAKEKGKAIVIEDLDIREKGKRGDYSGRKSRRIRHSFSYKSLLSKIKALAKREGIEVIEVDPSYTSIIGMLKYAPQYMITKDISAAYVIARRGLGKEEKIPDNYIKFLNTLTEKELEELRYHIKKTLKNIHI

SEQ ID NO: 15251 - protein, 378 aa, unknown
  TnpB Polypeptide
MKTGAKYRFYPDKEQEVLIAKTSGCTRFVWNHILAFRNEQYQQGVRLNSKAISKALTALKREPENTFLKEVSMVPLQQALINQNKAFIKFFNKKAAFPVFKKKHNRQSFTLMKNAFKIENNQVFIAKCKTPLNIVWSRKLPGEVSSLTISKEPSGKYFISFVCEKTIKPLPVTNKTCGIDIGLKDLLCFDNGKKEQDLKSYLKYEQEVTFLQRKLSRFDEKRKKLGFKFSDSSRKREKLRIRLARVKEKIAFIRKDFIHKLTTDIVKENQIICVEDLAVKNMIKNRRLSRRIHEAAWGEILRQLTYKSLWYGRTLVKISRWYPSSKTCSTENCGYVMSKLPLSVRSWVCPSCGTEHDRDVNAARNIKTSGLLGLASGV

SEQ ID NO: 15252 - protein, 451 aa, Gammaproteobacteria sp.
MKHIDSSFIEYFSTVFSHKDQMNMHVKYTVSTRSNLLDCIHRPKYIMAMKRLQAFKYELKLNGNQKGWLYRFAGSCRHVFNKALNLQKVRHEKGEKKLNYAGLCKLLTEWRNHPETMWLRDAPSQALQQSLKDLERAYTNFFAKRASFPRFKCRGARDAFRLPQGCKLDQANDRIFVPKLGWLRYHNSRDVLGTVCNITISRSCDKWYVSVQTEREVIQPAHPSTTSVGVDVGIAQFATLSDGTVFEAVNSFKRHQKKLAFQQRQLSKKKKFSANWKKQKFKISHLHRKIAHIRNDYLHKITHTISKNHALVCIEDLQIRNMSKSVAGTAATPGKQVRAKSGLNKAILDQGWHEFRRQLEYKEAWLGGEVIAVPAMYTSQTCPDCAHVDARNRQTQASFACVNCGYQANADRVGAINILRAGHARLACGETVRLGRSMNQEPAEVIQVKVA

SEQ ID NO: 15253 - protein, 418 aa, unknown
  TnpB Polypeptide
MRVRAYRFRAYCSKTTTRVLKTQLEVACKLYNTLLHAEQEEYEENKRTMSRNELRQLALDLRKQNKEFQVLYSQVAQQVADRFYEARQRFFDGLANKPREKKPHRYLSLVYSQKGWKLSNWREVGQGKNKKKKARLYLSKIGFFTLVIHREFPLERVSQVCVKLYPSGRIYVIFLVEEPEAEEQQSEKPKNAVGVDLGITRLATLSDGRYLENPRPLERSLERIRLLQRRLSRKKFLSNNWIKAKRRLAKQYEHVKNLRRDLFFKLGVLLSQKYDVLVLEDLNVQGLIQKGVTKTRRMRLYDSSFSELRAVLEWEFRKREKLVLPVPAYNSSRECFLCGGINKGLTLEDRVFLCPHCGFILDRDLNASLVLLKRAGWVPPDAPVELRPIPPLPSLGLRGQGVAMIQEAPAFRRGSSHG

SEQ ID NO: 15254 - protein, 210 aa, Natronomonas sp.
MHCDCPNRSGRSGSLRNSLKQDKHYFTRAEYDTEGKNGPSETSMWARRKPSERETHFYHTLTDAIITECVERGVGTLAVSWPEDVRESDWGKTGNKKRHTWAFDRISQYLEYNGETRGVEVLKENEWNTSETCSRCGDDTRSNRVERGLYVCLSCELVANADCNGAENMRQKITPSPHGADRSTGCVAQPSTHLFDCESGTFTTREQAVS

SEQ ID NO: 15255 - protein, 416 aa, unknown
  TnpB Polypeptide
MGYGCQQVLVKDKELVPILEYLCQQSNKVYNCALYYARQVYFKTKRLASYGELCAEMVKTKNKHFIAMYASSAQQTCQSVAEALSSFKANLKHFLQEELSLRPNLPRYRKTGMLSVAYPKKWLKVQEGKVRVPLGNQVKAWFGVDAFWIRFPTNLEWKDIKELRILPRHGVFYLEWVYTQPSQPQPLDPKKVLAIDHGVNNWLTCVSNLGHSFIIDGRKVKSFNQWYKKEVARLKTDKPQGFWSQRLEQITEKRNRRMRDAIHKAVRKVIDFCLHHSIGRIIFGWHKEQKQECGLGKVNNQNFVLIPTGRLKERIAELCRHYGIEFIEVEEAYGSQSSFLDGDELPNYGEKPDGWRPSGKRVKRGLYQTAKGWLVNADANAAANLLKKVSRTLGVGLKELCRGVLTAPLRVRLWAA

SEQ ID NO: 15256 - protein, 563 aa, unknown
  TnpB Polypeptide
  misc_feature (3)..(214): Xaa can be any naturally occurring amino acid
LPXXXXXXXXXXXXXXXXXXXXXXXXXXXXXXXXXXXXXXXXXXXXXXXXXXXXXXXXXXXXXXXXXXXXXXXXXXXXXXXXXXXXXXXXXXXXXXXXXXXXXXXXXXXXXXXXXXXXXXXXXXXXXXXXXXXXXXXXXXXXXXXXXXXXXXXXXXXXXXXXXXXXXXXXXXXXXXXXXXXXXXXXXXXXXXXXXXXXXXXXXXXXXXXXXXXXERKEQYDLNHKSDNYYTQAKKLTELKKDGEHYWLGEINSQTLQHALRHLETAYVNFFKKRTKFPNFKSKKAKNSFHIPQFVEMKDGKLYFPKFKDGIKVNLHREVVGTIKSATISLTPTGKYFVSILTEVEYEPIVGTHKVVGIDLGLKDFVITSDGKKYKNNRYTKKYQKKLSKAQKHLSRKVKGSSEYEKQRLKVAKVYEKITNSRNDNLHKVSIDLIRKYDLICVEDLNVKGMVRNHKLAKHIQDASWTTFLNYLQYKADWNNKQIIKIDRFYPSSQTCSECGYINTKVKDLSIREWVCPKCGESHNRDVNAAKNILKEGLRNISSGTGDYTAGDEVRPSTEGFCQ

SEQ ID NO: 15257 - protein, 445 aa, Halobacteriales sp.
MVEATRTVRIPLIVPADRRDDLHQTRPKYQYCQNRTVEYCWPDTPTQLNDLVTDKGDAEAALYDQLRKDTDGLHANLVQKAIKDATSAVGAAKSNWESGDRVSEPNFDDADDPSWSMTYDKRAATYHRYKVSLATVDGRLEARYVLPRELDGTPYAQYVLDRRWSFSTSKLVYDGERFWLHAVMKRHYTASEAVDESGSNTHSGDSTRVLGVDLNVDGYSAVTSAGGFYGNADHLNHRRERFESLRAELQQTGTRSAHRRMKQRKDNEWRWFDQYAHDVANGIIADAVQVGATHVAFEELTRIRQRISDLPKFQQWFFRRVQEYAEYKLKEYGIECRQVNPRNTSRGCSRTDCDCVSTVNRQEKTFRCTACGYEVNADYNAAKNIGFAVLDDLSDSADVPTGHTRSSGRARSQLALMSGTLTPAGGFASREWESTDKPTASAVGS

SEQ ID NO: 15258 - protein, 535 aa, Scytonema sp.
MPQVYQTYVTQIENNLTGETRTLEMLEEFSPVAAEMSQIALEGLQSDMKKEKLNSQIQNTFGVNKRHANSVINFVTGELESAIECKKRHLDTLDTKIKSVKSEIERLNKRLKNHREYAQAVEKYNLAIKYPQKTKTGTLKKVPVLKKIPEFDNACPINGKPHGKTYLQLAKQQLHQKKRQLKMYLDRRAAFVLRGVKPKLGNLGTVTFVGSTNETSGNQICQLTPDVIPSLKIRVPYFLEATYGEYLTLPLYKINKQGYDNIVTAWALNNALTYVFSRNKKGKWVVAITCLVNFSITSNDRAFGCIGLDINPGAIGWCATNRHGNPIAWGKVNLDLHSCSTEQTEARLAGAITELTNRALATKKPIVIEKLDFSEKKRQGKRGRKYNRMLSGFAYAKFKELLKARCLKLGIKIIEVSPKYSSQIGVVKYMRRYGMGSDSAAGLVLARRGMNIYYERMPARYALQSSIQPEPRQHVFAHWQGFNKHYLEVGSRNAWFGTPTLTGSAGDGLANTGNLGLTKLRHKHESSSLHPSVKA

SEQ ID NO: 15259 - protein, 383 aa, Flavonifractor sp.
MSTETRKSRYTVLKVPAYPTPEQAQLMEKTFGCCRYLWNQMLSDVQEFYAATDIHYIPTPARYKKQAPFLKEVDSQALCAVHQSLRKAYLDFFRNPKVFQYPKPKTKKARKDSFTVYCRPYHTGPSLRLTDAGLQMPKLGLLQVRLYRKPLHWWSLRSVTMTKTKTGKYFCSITFGYEAELPEPVIPTPARTVGLNYSMSRFYVDSNGHSPELPPQMAAAREKLARMQRKLSRMQQGSKNYEAQLHKIRLQYERIANQRRDFAHQQSRRIANAWDAVCVRGDDLNVMAQRLKGGNVPDSGFGMFRAFLRYKLEAQGKAYIDVDPYAPAAKTCHACGHVNENLPARARSWVCPLCGEELLREENTAQNIRDFGLMAVTRQPGVA

SEQ ID NO: 15260 - protein, 431 aa, unknown
  TnpB Polypeptide
MPKKKKEPQARILSSKCSLRFSNRGKKDDLRRFIDEYHRVCQIVIDILWNMEMVPIMIPGEISKEVAPQTWLSARMIQACGKQASGIVRGTRDLQRRRMKALSHLISEGKMKQAKRLQRLIDETAVGHPDLSNTHPDLDSRFFTIDWENQTFFDGWITVSSIGEGMKLVLPFRRTKHLNDLMEEGSLKNGIRLSKNMVTFSFEMPEVPLREAGGTIGVDVGINSLFTCSTGQFAPEDPHGWTILKITERISRRKKDSKGFERACAHRESFINWSIKQMNLEGCSVLRMEDLRGLKSRPVSRGVRHWTYPALLAGVERTCFRHGVRVEHVDSMFTSQRCSSCGWTRRSNRRGRLFRCGNCGFATDADLNASLNLQIELPPRGADRRKGKNVEGFFWHSIPSGQEPMVPDVKTSKVESYESCNYFPVLSKEET

SEQ ID NO: 15261 - protein, 280 aa, Dolichospermum sp.
MLKVVKIRLYPDAQQQQSLAQAFGSCRWLWNYFLNLMNETYKETGKGLSGYEVKKIIPQLKKEHEKNLKIKQQQLSRKQKGSNNRNKTRKKVARVHRKITNCREDFLHKLSRRIVNENQVIVVENLHVKGMMQNHCLAKSIQQVGWGMFCTMLKYKAENEGKIYQEVDRFFPSSKTCHVCLNQVGSLPLDIRFWTCEKCQTRHDRDINAAINLRDEGLRILTSGTGDKAMKCGLGGFPHEQLHQEACRPEISRSNRGRKKSTTVLSVGQEADTVPSGQCG

SEQ ID NO: 15262 - protein, 407 aa, Dolichospermum sp.
MQLVEKHVISKQHKFWKECDYLALQSKHLYNAATYIQRQYFFETNTYYNSIDIYHQTKNIEAYRYLPTKVSKQIVRRVSEAWKGWLAALKDWAKHQGKYLGQPKMPRYKHKERGRNIVIYPIDAISKPALTKGIVRLSQSNIQIPTIAGNVDQVRIVPKLNYYVIEVVYTVDEPVKSTGKYSAGIDLGLNNLMAITSNHSGIKPLLINGRPLKSINQFFNKRVAKAQSVEAWRQVKELNSKRDRRVDNYLHTVSRRVIDWCQLNDISQLIIGNNLGWKQDINIGKKNNQQFTKIPHAKLISLLSYKAKLAGIEVVITEESYTSIASALDGDNLPVYQDKSDSKPTFSGKRIKRGLYKTSSGKIINADTNGSMNIARKVIPNFMNGIEGLPFIPVVLGLWSKIANVVV

SEQ ID NO: 15263 - protein, 433 aa, unknown
  TnpB Polypeptide
MGDVIRTVKVKLDVPDERCDDLHQTKDQFLHCANTTAAWAWRLPDEYCVTSKQQAETALYERLRNETELTANLVQKGIRRAIEATKSGVARLKNGETTSQPQFDAWSVVYDKRSATFHRDHVSLSTVNGRVECKYVIPDNPAGTPIGDYLLNEDYEFRMSTLQYDRSTDSFYLHARMRRTTDELEQSTGVSSDAKHRTVLGVDLNVDGSLAVTSTGAFIGNADEMNHRRREFEKTRGSMQQTGTRSAHLSIQSMDDREHRWIQDELHRASSQILDEARDHGCTHIAFENLTDIRERMAGAKRFHAWAFRRLYEYVEYKADLLDIEVEQVSPAYTSQRCSKCGFTHGRNRESKHEFACQKCEYELNADYNASKNIARKLLKRLRSGQKSSGGGAPCQCALKSGTVNLNGEFIASVDSTAEGESTDKPTTSVVGY

SEQ ID NO: 15264 - protein, 411 aa, unknown
  TnpB Polypeptide
MMTLVKQIYFKPSHKYFKEFDKLCFLSKNLYNATLYVVRKYFFETGSYLNYNSVNKMFTVANNVDYRALPTKVSKHTQMLVDKSFKSFFTLLEKKKNNQYNSPVKIPKYLKKNTGRQVVHYEKGALSFKRNGFIKLSRTDIYIKNDNISKESIQFIRVVPKGQLFVVEIGYKVQNKDSIANQNIASIDLGINNLISMVDNVTKKGIIINGKPLKSINQYFNKQKSEIQSILVRSNKKYSSKKIQKLYIKRNNKIKDYIHKTTRYIVNHLVSNNISTLVVGYNKNWKQDISIGRVNNQNFVQIPFLMILNQLEYKCKLEGIILEIQEESYTSKCSFLDNEEICRHSKYKGLRIKRGLFKTSFDKFINADINASCNILRKYLKKESNKFDVKKTLNDLVEVFSTPLYKVKCFN

SEQ ID NO: 15265 - protein, 289 aa, Lactobacillus sp.
MKSMAQMKCHYGLKVRIYPSDRQKKIIKINSDASRFIYNEMVAINKELMQLRRVKLPIDIVQDRIKQLTMRQNAKQMSNHYQFLEDKRIDSLTKANAIQNYRKAWNAFRKVHATGVPKFHRKSYQRILSRRARRAKQEHRPLRTSKNYQKQRLLVAKLHAQVFERRRDFLHNVSTTLIKNHDFVAAEELRSKNMLKNHALAMSIADVGWRTFLGMLAYKAELYHRQFLTVNPKNTTQACHECGFVMGTAGTEKLTLADREWTCPKCHAHHVRDHNAAQNILTKGIIKLA

SEQ ID NO: 15266 - protein, 373 aa, unknown
  TnpB Polypeptide
MYKTIPIKLPYDKDLMDTIEVYNRCCNDTLKIAYKKKLRDKMRIHDATYKKMRRKYADLQSSLVEASRDQAFEMLKQCKSRTLPMKKSNSSIRFNSRTISFKLKDKKLSISTINGRKKFEFTIPQYFEKYMDWMVEAATLRHSNGILMMMLNCYKDSPKLRKTIKVIGIDRGIRNIAVLSNNIFYNSRHLLNVKNRFQHLRSQLQQKGTRSAKRKLKEISGREQRFVRDVNHIVSKSIVNSKATVFAIEDLRIGKSKRKGKNLNRSLNRWSFGQFRQFLAYKSEALGKHLIEVNPMYTSQRCSKCGTIEKENRKESRFKCLKCGFELDADLNASRNIARLGRSHMRRLKDQPAECSGDITIASYKPSNSLDGS

SEQ ID NO: 15267 - protein, 304 aa, unknown
  TnpB Polypeptide
MEMLKQCKYRILPIKSMYSGMRYDKRNISVKLDKGLLSISTIDGRKKYPFYLPSYFNQYVDWLVDAATLRYSNGNMILSLNCFKEDSTKRDPKRIIGIDRGLRNIAVLSNNIFINSNHLTAVKKGYEHMRSILRQKGTRSAKRHLKRLSGSEKRFVKDANHCISKRIVSMSASVFALEDLNAIRSNRKGKSFNKLLHGWSFYQLEQMIRYKAEALGKHVISVDPRNTSITCSKCGHIDKASRNLSRFRCIECGFEIDADLNAARNIASRGKSLVSRLQIRSTGKSCGDRPKGCQSTNRSVDQYD

SEQ ID NO: 15268 - protein, 393 aa, unknown
  TnpB Polypeptide
MYLVRKLKLGVSEQLQLLSRAAGELYSKVLVHFWRVVRKKGLWLKPSTFMRWFPNDPENTLHAHSADAVVQSFFASLKSWRERRKTDPNARPPRRRRYFYKVQWKSSAIQVVNGKLRLSNGKGKEPLIVNWAWDTPVWVEMGWDGQQYELRACYKVGDTPPEEEGEESNVAAVDLGEIHPAVAHEGGQTYIANGRLLRSKRRYQNKLQGKLARLLARKKRGSRRWKRLVRSQRLQLKKLHHQIQDILHKQTTRLVSTLHERGVQTVVIGDIRDIRMSANYNKKANQKIHQMLHGQVRHLITYKAERLGMRVVLQDERYSSQECPVCGQRNKPKGRVYRCGCGFEFHRDGVGAINIRRKYLGSGPVVGAMASPIGLRFQPHALCSSVGRSNSAG

SEQ ID NO: 15269 - protein, 392 aa, Lachnospiraceae sp.
MKSLMELKKTELKQVLIKISVKEDKITGIKARLDMLKPKAVANTLTEKELAKYHNLKSSLYWQKNRLNKLKQCKDKLEYQIANKVYDMCYGTKVMFDKQYRLAENGYKTHEKWHNDFVKTRDKNIFYLGSSDESFGNQMCRLRYDATTDAFALDVRKEYKYCKSNKVCDKYVRISGLDFKYMKDELVAILASYDTTGNGDYPLSYRFHRVGNRWYLQVMFEQTFKSFRSVSKYGTIGLDYNDGFIELSETDESGNLIHQMRYDLKYHGTGNRAEAEIRDVIADIIGYAESRCKDVVIEDLDFRQTKAKQRASNKRRGKQYNRMLHIFDYHRYKQTLQNAGFNHRVAVVMVNPKNTSRIGKQKYCELKKLNVHQAASYVIARRGQGYVDKLTA

SEQ ID NO: 15270 - protein, 435 aa, Ktedonobacteraceae sp.
MKTTITAKLKLYATKEQFASLRATQLAYRDSLNLVSRYAFAHDKMSNKVKLQEGTYDEIRARFHLPSQMACSVPRQVGATYKTVWSKVKKNAQQRKAGITKKCYKGLDQAPTFVNPTLTYQYSKDYTFKKEQQVSVLSLNGRVVLPYTGYSEHVKLIQSGAEIGTARLWYDKPKKRFFLLVTLSIEGADPTPESSRQIVGVDVGLRYLAVTSTTRGNCTFHSGKRVRARATHYTRLRKRLQKKGTRSATRRLVALSGRERRLKQDANHVVSKRIVDQHPNSLIGLENLTDIQERTKRATKRQRKARAASLRWSFAELQSMIAYKALLNKSMAIKVDANYTSQACPVCGHTCKENRPNKGLLFVCQNCHYTLHADLVGARNLTMRTLLIRQDWIGTGILSLYPDVSDVEAKALRLQRLSDLRWSPDTSRRDLSGGH

SEQ ID NO: 15271 - protein, 369 aa, unknown
  TnpB Polypeptide
MLKAYKYRLYPNKEQEEQIQKTFGCCRFVYNQTLSYRKDKYETEKESMNKTSCNNYVNQILKKKYEWLKEVDKFALTNAIYNMDFAYQKFYKEHAGYPKFKSKKNHKKSYTTNITGKNIEVSFDNNKIKLPKLKWIKAKIHRNFEGRIKSATISQVPSGKYFVSILVETGHTPLESTGCMIGIDLGIKDLLITSDGEKFDNIRTTKKYENRLAKEQRKLSHKIKGSKNWNKQRIKVARIHEKIHNTRIDNLHKVSHKLISENQVIVTEDLAVSNMVKNHHLSKAIQDCGWYELTRQLQYKSDWNNRQYIKIGRFTKSSQSCNVCGYININTKDLSVREWTCPECGTIHDRDINAAINILNEGLRLLSVA

SEQ ID NO: 15272 - protein, 378 aa, unknown
  TnpB Polypeptide
MKTYKYKLYTKAKDGVLDNQIDRFGIVYNHCIALHRKYYKFFGKQLNKYQLMSHLTKLKHKKRWESIFESLPSQAVQDVAERIDRAYKLFFRNLKHKVRTSPPSFKKCKKYSSYTLKQCGYKFNENKIKLNGRWYGFFKSQEIKGKVKTVTIKRDRCGDLWIVVVTDKSDVKMYSKSGNSVGYDFGMKTFLVGSDGIDYEAPLFLKKSKTTNDKLSRAISKKVKESNHRRRAVLNKARYMRHLSNQRADFQWKLANKLIEKYDVICFEDLNLRGMSLRFGKKIGEYGFGEFLNKIQYLATKHGKEIRFVDRFFPSSKLCHCCGYKIDELKLKYREWTCPNCGTRHDRDRNASINIFQEGTSSCGLDVVRPSEMVADVV

SEQ ID NO: 15273 - protein, 331 aa, Deinococcus sp.
LKQVSENVPGASGTVFKLTENPDVLSHFQFKIGQQTLQAQLYVLPPEEYAGLVTASPRFAQFDVAHLLPALTQPMDSLGKEAWLQQLVQALQAEAQVTPAPHLLADQHVTPAPWVPERTRIFQNDSGWFLSLFFERATVQTISGIERSAVGIDVGLNTLAVAVHRTGLVHRAAGISEVCITANQLEEWCPGDHHTQCEVQRHLLLLQHAAARLELQEMVRLLLSSASFVYFENLQYPNCSRAFARRSRELGLRDFLMCWLPKRLDAAGIRWQRVPPEHTSQFCNLTHLRGERDSSNHKRFLNGNGTIVDADVNAAHNIIAVGMAYRLERGL

SEQ ID NO: 15274 - protein, 467 aa, Clostridium sp.
MDTIIKTVKQYSYELDEVTLKELKFIANQYKNVKNYVYSRFSGINSIPLLGKERQIRDEWVKTNFAEQWKLPARYWKLALSEATGNIKSQWSNIKRRIREQIKVNDNLSNEDKHYINYILKFDNYYYKVLTNQIFNIPKIFQDKQLNYKYLNNLIKRYTRKYKGNIPYSKKGATFSMDTGLYSYKNGHINITCVKKGKRLPIRLTDSNIRNSTLKVKIIENKVEIHCPLKVKTKENNNQENVIGIDKGYKYLFAVSSGKFYGENLNSYLSKETERLNKVNKNRNRFWALYNQYLEEGTIKNANRVKESNLGRVKYNHNKVKHDQTVKSYINYSLNQLIKEEKPTEIVMEQLDFVNWNDKYPKSIKRKLSRWIKGYIRERLEYKSALNSIEYSYINPAYTSKVCTVCGEFGLRSGDVFTCSKCGKSHSDTNASKNILKRKYDKEITLYTNYKKVKEVLENRLNHHLRC

SEQ ID NO: 15275 - protein, 370 aa, Bacterium sp.
MTCLAHKIELKPNNKQKTYFKKACGVSRFTWNWALASWEKSYQENKNLPKEERSPINGMSLKKEFNKIKKKQFPWTFEVTKYASQQPFIHLNTAYGRFFKGISGKPKFKKRNKSVDSFYVGGDQIKIQNKKIRIPNLGSVRLKEFPRFEGKIRSATFSRKADRWFVSLQFDTTISPKSPPKEAVGVDLGINTLAHTSDGVSFLSPKPLTKHLRALKRASRKLSKKEKGSKARGKQKLKVQKIHLKIANIRKDTLHKISTYLTSQYKRIAIEGLNVSGMLKNHKISRALSDLGFFEFRRQLGYKSEMYGNILVVANMFFPSSKMCSSCGSIKKALSLNERVYTCDCGISLDRDLNAALNLRNLIEIGPARS

SEQ ID NO: 15276 - protein, 401 aa, unknown
  TnpB Polypeptide
VKVILSHKILLYPNNVQETYFKKASGCRRLAYNWAVEKVPQVYAVGEKTSKYDISKRFNAIKKEDYPYVLEVSKWAVQMGVQDAWTAYERFWKKISKGHPKFKKKGKSRDSFYLGGDSLKVNRRKVKIPLLSSTIRMAQEIRFPGKITSVTIGKDNNKWYASFSVEVDETYKYPHTCENQAVCGIDMGLTNLMIVSDGTVFSNPKYLKQHERKLKRLQKSLSRKKKGSNRREKAKRLLSRQQEKVKNLRRDYQHKCTSGLVRKYKYLGLETLNVKGLLKNHNLAKGIQDAGWGEIRRQFTYKTLLSGSCIILADQFYPSSKLCSVCGKKNQNLVLGITDWVCSSCKITHDRDLNAAYNLKNLARRYRESLNTRGEDVSLETLCSQQPLRNEKLASTVSAVV

SEQ ID NO: 15277 - protein, 475 aa, Fusobacterium sp.
MANYVLTLALKTELWQEHILEKRLNIARMIYNSCLSEILKRHRKMINSSEYKEISNLDKKEQSKGYKELDKKYLLSKFELNKYVKPMTQKFKKNIGSQMGQELAERAFATYEKFKYGKAKKVYFKSYENFYSVREKGNITGLRFFKEDCCISWLGLKIPVIIKNNDKYAQSCFLDKLLYCRLLKRVVNGKNKYYIQITFEGTPPKKHKVGGENEIGIDIGTSTIAIVSDNKVELKILAENIEINEKEKIRLQRKLDRQRRTNNPNKYNADGTINIENKEKWKKSKSYVKTKLKLSNLQRKITEKRKQSHNILANSILEIGTIVKVENMSFKGLQRRSKKTEISEKTGKFKKKKRFGKSLSNRAPASLIEIINRKLEYIGKNIIKIDTFKVKASQLNHSTNEYEKKSLSKRWVEILGNKVQRDLYSAFLIKNVKENLEEVNIEKAQKEFKNFVKLHNEEIERIKKGNVKTLKCMGF

SEQ ID NO: 15278 - protein, 545 aa, unknown
  TnpB Polypeptide
  misc_feature (313)..(516): Xaa can be any naturally occurring amino acid
VDKAEKIKRALQETKERRKGQRPVVFQLKLQNLSKKKEEDLRRAFLEAKWLYNWLVSDTQRLDLPANKVREVEVKVRDGFENRELLLLGSQVKQEIADRLKDNLRALSQIKRKGHKVGELKPKRFVNSIPLKQYGVTFTLDRDKNWVRIQRLGQFRVLGLHQIPPEAEIASAVLVQKPSGYYLHVTCYVPKKSFSRQLIGEAVAIDFGVHPKLTLSNGIKIDFELRETERLKTLSRKFERTKKGSKNRKKLRFLLRREYERLARRRRDVHNKVLAFLKGYKEVVFQEDFVKGMDLSFRGQSTPRGRRTEGEVXXXXXXXXXXXXXXXXXXXXXXXXXXXXXXXXXXXXXXXXXXXXXXXXXXXXXXXXXXXXXXXXXXXXXXXXXXXXXXXXXXXXXXXXXXXXXXXXXXXXXXXXXXXXXXXXXXXXXXXXXXXXXXXXXXXXXXXXXXXXXXXXXXXXXXXXXXXXXXXXXXXXXXXXXXXXXXXXXXXXXXXXXXXXXXXXXXXXXXXXXXXXQNLKVLISGKRSSGRKLSRILPLLRSSSM

SEQ ID NO: 15279 - protein, 552 aa, Nonomuraea sp.
MTENKKKQLRAIDAPFVALGPAGVTIRDRLGHLTPEDEKVLRLAGAHLGSLASRDLKARCADGLKHDTDMWAARKRDLTAESSSRWAGSITKATHDQWALSHRCQLAHIHNLEAGVRTLMHRLSRPIGDKGTKRVPGGYRSEHEWFVKSRRLAALERRLDAARAEREAGIVHVVRGGRRLFNIRHNLEKARLTETEWRQRWEAERWFLAADGESGKRYGNETIRVTPDGEVSIKLPAPLAHLANAKHSRYILASRIQFKHRGEEWGDRVHGNRAVAYRIHYDVARGRWYLTASWQRPVVKTIPLETARAGGMIGVDTNADHFAAYRLDRHGNPVGAPHRFFYDLTGSANHRDAQIRHAITRLLHWAKRAGVAAVGIEDLDFTAEKSREKHGRKKRFRQLVSGIPTGKLKARLVSMAAERDVSIVAVDPAYTSMWGAQHWQKPMTAPRRKTTRHDAASIAIGRRALGHPIRRRTTPPPQHQSDAVGHRTVQADRPARGREEARRPVTECAHDARPRTGNTQGKRATSASTTVRDALSAGQWVQDSLLITDEER

SEQ ID NO: 15280 - protein, 407 aa, Nonomuraea sp.
LSVTVDNLIGMSRYRLQPTPAQEQMLAEHCGHARFVWNLAVEQHRHWKPGRTSAPGFAEQCRQLTEARAESAWLRAGSVTVQQQALKDFAQAMANYFGQSHRKPTWRKRGQNEGFRIVAVRPGDVRRLSRKVGEVKIPKVGWVRFCWSRSVPHGAKSHRVTRDAAGRWHVAFAAIPEPIPAPGTGEVVGIDRGVAVSAALSTGELLTAPTLRQAEQERLARLLRKLSRAKRGSNRRVKVKLAVARLKARESDRRKDWIEKATTDLARRFDVIAVENLNISSMTRSARGTLQAPGRNIAAKAGLNRGILAAGWGRLVERLEHKAPGRVVKINPAYTSQRCSACGIVDAKARESQAAFRCRSCGYAANADVNAARNIRDTAAGHAVAARGRSGLPGRTNREPHPDPLSV

SEQ ID NO: 15281 - protein, 171 aa, unknown
  TnpB Polypeptide
MTNRQKAIARRRNNRINDYMNKTARRVIDYCIDHDIGTLVVGYNETFQKDSNIGRRNNQTFVNIPYGKLRDKLEYLCELNGITLVMQEESYTSKASFWDKDVIPVYKSDDTEEYHFSGKRIHRGQYRTASGQVLNADVNGALNILRKSSVVDANIVYTVEAKWTRNKNTEY

SEQ ID NO: 15282 - protein, 391 aa, unknown
  TnpB Polypeptide
VEQIQINKNHELWNYCNEICFAAKNLYNYANYIIRQEFIKNNKWIRYRKLNGILKEHETYKNPPAQTAQQTLRLLDRNWKSFFRAMKEWKKDKKKFNGRPKLPKYKKKNGRSVAIFTNQQCKIKDGHLSFPKTDLKLKTRIAGNLREVRIIPKGSVYVVEIVYEKEIPEIKRFPQKIAGIDLGLNNFATLVNNIGIKPIVINGKVIKSINQYYNKKKAELMSYVGGRGTSNRIEKLTLKRNNKIKDLMHKISRFIVNFCKQYNIDTLVVGYNSKWKQEIELGKINNQNFVSIPYYQFINMLKYKCEEEGINLILVEESYTSGCSFLDGEEINETNYNLQRRIKRGLFKSNKGILINADVNSAYNIIRKVFPEAFAEGIEGVGLHPVRLNIA

SEQ ID NO: 15283 - protein, 347 aa, Meiothermus sp.
VAKAVGEFRRFRLHRLVYRDLRAMGLSANLAVQAIARVGRKKGSRAKFYQPTSCVFDQRTLSLCWEDERVSLTTVQGRLRISLKLGNYQRGVLKRARSVQGGVLTKGPKGKWYIHLILRIDAPTPSPGGGKVVGVDLGQKVLATLSDGVQLTSGFLKGKRLHYLKKRAEVRSRLDRPSERTRGVKRLWARLRGREARFVNHTLHTLARHIVNGLKPGDTLAVEDLNGIRGRTHKRGRRERHLHHLWPYARLRFFLEYKAALKGVMVVAVDPHHTSQTCPRCGHVARANRRSQALFRCQACGFQHNADWVTAHNLAQRAGSMGRGRCKPARILRVSSLHCPPSESPRL

SEQ ID NO: 15284 - protein, 125 aa, unknown
  TnpB Polypeptide
VTVSREPSGKYFASLAESFDAVCVEDLNLKGMAGGLHLGKGVHDNGYGLFLSMLEYKLEERGKYLIKVDRYFASSKICSVCGNKKEELSLSDRIYYCECGNRMDRDVNAAVNIMKEGKRILAECA

SEQ ID NO: 15285 - protein, 556 aa, unknown
  TnpB Polypeptide
MVVVVEHRDRLAGFGTGQLDALVAAAGRQLLAADPGATSDDLARDMTEVLASLCARRYGRRGARNRVLRAGNGAWHAGVGAGPERMLQAYRFALDPSPDQAGLLASHCGAARKAFNEALARVRRCLDQRDAERSYGVPDEQLTEVPWTLPALRRWWNASKSVLAPWWAENSKEAYNSGLAALADGLKQWSASRSGKRRGRGIGFPRFKSRRRSRVSCRFTTGAIRVDDATHVVLPRIGRIHTLEPASALLGRVAAGTARVLAATVSFDGRRWYCSFTVETSREQARPAHVGPDRAHPVVGVDAGVRDLLVVAAPDGTEVARVRAPRSLARAQARLRAVQRRAARQDGPDRRTGRRGSKRWKRTAARIARIHARAADLRRDALHQATTRLARRHQVIVIEDLNLAGLARRKPGAGQGGRGLNRALADAGLGELRRQLGYKTTWYGSRLVVAGRWYPSSKTCSACGGRKPSLTLADRTWTCHGCGAVHDRDLNAATNLARLSEHAPRVEPRPAGSGPAAGRGATQKTPPGRAGGQETSTPQDQPTRKTGTAPPQGEAA

SEQ ID NO: 15286 - protein, 421 aa, unknown
  TnpB Polypeptide
  misc_feature (65)..(68): Xaa can be any naturally occurring amino acid
  misc_feature (385)..(418): Xaa can be any naturally occurring amino acid
LEHTFRTCQTLFSVYGRTGARLRLCHVPRHRHARRQDSHTRPSGNRAVSRLARSLEFPLVHFVRXXXXHCLALQKKYYGMYGKYIGGNRMKTHFAKRYKMQNLHSQSVQEVIERLDSAYQRFFARKSKRPPKFKRFSDMSSVVFKQGGFKLNGNKLTINKLKTTFKFSLSRPLKGDVKRLSVKRSPLGDYYICVVTDAEAKRYGKTHDGASVGIDFGLKTYLTLSDGQAVENPQFLKRNLTSLRKASRKLSNAKRGSNNRIRKRMDLDRCHEKVVNSRTDWQWKLAHAICRSYDNIFVEDLVLTGMSRRWGREMGDLAHGRFVEILGMVASKYGCNLHKVDRFYPSSKTCECGFVNENLSLKDREWVCPHCGRTNDRDLNAARNXXXXXXXXXXXXXXXXXXXXXXXXXXXXXXXXXXAQD

SEQ ID NO: 15287 - protein, 381 aa, Meiothermus sp.
MQTLTLRCTLKPTPEQAAALEETVRLFAEGCNHALRVAREHGEFRRFKLHHLVYNDLRSMGLSANLAVQAIARVGRKKGSRARFYQPTSCAFDQRTLSLRREDESVSLTTTAGRLIVPMKLGNYQRGMLKRARSVQGGVLTRGPKGKWYINLILRLEVPTPPTGGGKVVGLDMGQRYMATLSSGIQVSGGGVKSRRIHLRNKRAEVRSRLDTERTRGVVRLWERLTGREARFLSHTLHTLAKHIVDGLEPGDTLAIEDLTHLRSRTAKRGSVERHLHHLWPYARFRSLLEYKAALRGVRVVAVDPRHTSQECPRCGHTERGNRRSQALFRCTACGFQHNADWVAATNIARRAGSTGMGRCKPARILRVSSLHRLPSESPRL

SEQ ID NO: 15288 - protein, 363 aa, Gammaproteobacteria sp.
MEMKITLSHKICLDPTYKQEQYFKQACGIARFTWNWALAEWNRQYETGLKPSAFALKKQFNAIKPIDFPWMYNVTKYASQQPFIYLQSAFNRFFQRLGAYPKFKKKGKHDSFYIGNDHIKLEEKLIKFPKLGWVRMREALRFSGKVISATVSRVANKWFVSLNIELDQTPKSCESQAGVGVDLGVKTLATLSNGETFEAPKPLKKFLSKLKRMQRSLSRREKGSQNRHKLRQKIANVHARITNLRQDSLHKLTCYLTDNFAGIVIEDLNVKGMLKNRKLSRAIADIGFYEFRRQLEYKYKCKGNYLLIADRWFPSSKTCSNCGQKKNELKLSERVYQCSACGHEIDRDLNAAINLKNLLFQSN

SEQ ID NO: 15289 - protein, 389 aa, unknown
  TnpB Polypeptide
MLIQKSYKTELNPNNKQKTLFVKACGVRRFAYNWGLNESNKFYETTGKGLRSGELLKRLNKIKDEQFPWMKEVSTYVVQSAMHDLDEAFDNFFRRVKNGEKPGFPNYKSKRNGLGGFRLYQSICVEPNRIRIPRIGWVRLKEKEYLSTSNVKINSVTIKEKAGKWFVSLQVEEEIKIPENNGSIVALDLGLNSFVHDSDNNKVVAPKPLKKHLKRLQKLQRKHSKKKLGGKNREKHRKKIAKLYLKITNIRNDFLHKLSTKLTKTKSTIIVEDLNVSGMMKNHCLARNISDISWYEFVRQLEYKSQWYGCEVFKVDRFYPSTKLCSNCGNKKAKIGLSERVYHCDKCSFERSRDYNAALNLLKFYSEKLPIDHGDVKPLEMCSVEPSVN

SEQ ID NO: 15290 - protein, 370 aa, unknown
  TnpB Polypeptide
MLKAYKYRIYLKNEQKIQITKTFGCCRFVYNQTLAYRKDKYEKDKKFVSKTDCNNYCNRVLKKEYEWLKEVDKFALTNAIYNMDSAYQNFFKQHAGYPKFKSKHDSHKSYTTNFTNGNITANFEKNRIKLPKLKWVRAKIHREFTGIIKSATISQVPSGKYFVSILVETEHIPMESTGCMIGIDLGIKDLLITSDGEKFDNIRTTKKYEMKLTKEQRKLSHKEKGSKNWNKQRIKIAKVHEKIHNIRINNLHKISHKLVNENQVIVSENLSVSNMIKNHNLSKAISDCGWYELTRQISYKSDWNNRQYIKIGRFIPSSQTCNCCGVINAETKDLSVREWTCPKCGVHHDRDVNAAKNILNEGLRLLDKTA

SEQ ID NO: 15291 - protein, 262 aa, Clostridia sp.
MKSITITAKVKLYPTSEQMIILNKTLSVIRDVLNFVSAFVFGQEGIRYLELNHALYYPVRQQFGLRSQMTQSVFKTVLAKYKSMKSNGHPFSKVSFRNFEYDLVWNRDYSISYQSVSLNTLSGRLHIPFESKGMEHWFCSGGRFGTAKLIRKNRKYYLHIPVTLEVENRNILNHIVGIDLGVNHLAVSFDDEGNTRFFSGRAIKEKRAKALALRKRLQTCGTKSAKRKLKKLREKETRYVTAVNHAVTKALISQYGAGTLLL

SEQ ID NO: 15292 - protein, 472 aa, unknown
  TnpB Polypeptide
MIISYKYRAYPDAAVEARLHEALDTCRWLYNKLLEECNAARENGLSPTMQETQARIVTLKDENPALLGVYSKVLQMVNYTLWSNIRALSETKKNGQKIGKPRFKSASRYRTLNYNQSGFKIDCESELITFSKIGTIPFRMHRPYSGEVKDVLITRSGDEWYVIIQAEQEVSEPRREGRSVGIDAGLNAFAVDSDGAVIENPRFSERSRARIKKLQQSVARKKQGSKNWEKAKKKLERAYAHVTNQKNDFLHKLSRRYVDSYATICVEDLNTKYLKENGKSRGLRRSIHDASWGRFLLYLSYKAESAGTNFIQIDPRDTTQLCSNCGSIVKKDLSVRIHECPYCGFVANRDYNAAVNIHRVGMEQPFEPVEMRPLHHISVMQVLSMKQEAPSNRCGVVHIPGSLKRDYQRRRSEYVQTYLISNRFFRSFHEGAGLYPCAPWGRDEGGSPRSCHRPERCRAGRLGGTGIPRDRT

SEQ ID NO: 15293 - protein, 489 aa, unknown
  TnpB Polypeptide
VTSTALPLSHRRPRLEAQTTEAAETTDAKKRKRDAKLQKAQATRDAKRVAAGVPPPKPRTLKQQERSHTVNSKEPADACRMIRLHPTPEQRATLNRWIGTARWTYNRALAVAKDDGFTLQVLREKVVNTSNYETDQTWVTDTPYPIREDAVRDLLKGVASNVAKKETNPDHRFKMTFRSKRDGDKSITIGSRYIRMGDPLPKGRGQIRLFPKAFGPAPLKTAEPVPDTVLLYDNRIVKTRAGQFYLSVPTVVVPKTLDPTQNGPERVLALDPGVRSFMTGYSPLGLTVEWGKQLATLPPVSALKQKRKTRKQRRKKANKATIETLLYKADQLMSAAATASRSSGGPSRRGLRLAAQRLRDKVRNKTTDLHRTFAKWTCEHFDVVLLPKFETQQMSVREGRVIRNKTVRSMLTWGHYRFRQHLLNKAREYPWVRVIVCSEEYTSKTCTLCGHRHDVGGRKTVTCPQCHVTMDRDDRGARNVYLKNEHLFI

SEQ ID NO: 15294 - protein, 409 aa, Streptomyces sp.
MQLRYAFRLYPEPGQRRALARAFGCARVVFNDAVRTREDARAAQKPYPSAATLSQQLITRAKNTPERSWLADVSSVVLQQALRDAEAAYRNFFSSLKGERRGRRVGAPRFRSRKDSRQAIRFTANARWKITSSGRLSLPKIGDVKVEWSRVLPVTPSSVTVILDAAGRYFASFVIDTGGETDRARWDDPDPEAAIGIDLGLTHFGVLSDGTKIASPRFLRRAEKKLKKAQRELSRKRKGSRNRAKARLKVARAHATVADARKEFHHQLSTRLIRENQAVAVEDLAVSGLARTRLAKSVHDAGWAQFVTMLEYKAQRYGRTFVKIGRFEPTSQVCSTCGHRDGPKPLHVREWTCPACNTLHDRDHNAALNVKQAAGLAASACGAPVRPGLVPAQREETGSHGISTRTRAA

SEQ ID NO: 15295 - protein, 383 aa, Okeania sp.
MSKLTLTLKLPFYRLNACKAAEFERLTLLNTEVANTLLSVDKSVRRKYTSKDFHHIEIGSMWINQTIRNTCAQTKVKKFKRLPIEVNNQGYSVSRQGDLFTVSLSLYRGKKKRIPLTVHSASHQETLEKIINGDAANGSLKISKSRKGIWYALISVSMDVPEPGLVNGWIGVDRGQNNIAVAALPLSFGKFWSGKQVKSLRRKFQKLRTELQESKKLRKVKEIERHEHKIMTHINHVISKQLVQFAKDYNMGLRFEDLSGIRQTSLQRRKNKSDASKNRDHWAFYQLELFTRYKARVAGVPVESVPAPYTSKSDHRNGVIGKRVKHTFTGVDGYTCNADWNASQNIGQWLGFSCPFNLQKAVSVMDMVDLKVGVNDSPSTNEK

SEQ ID NO: 15296 - protein, 327 aa, Streptomyces sp.
MAKQHRLRRHGEKLHAKTDHYTRLIAGQEQHPLAGKHAVLLGEMRGVADRRSNLNAALAWSAARWAVDQAIAAGATVIYLEDLRSMEAKGMGRTHNTRLSQQVRGQIADRMRHLAAQAGIAVVTVWARNTSKHCPHCLTPLRHRKAPDRSTVTGWKWAICPNPPCRWQGDRDQGAWRRIAARGLAHQAKTVVDRATSTMTIRAVVDKLEAKAVITPKATGRDRSKTGPTRNRTTRPAPRRRGAPSPTRPHGRAGQRPEGHAPPGRKRLPRAAHRHQGVKTISKTTRRHKPSGATLGAGFHLHAHATPPRWQTIQPIPQHADHAGSLN

SEQ ID NO: 15297 - protein, 352 aa, unknown
  TnpB Polypeptide
LERKIKHLEDVVIPKLVEQRKQNSVKLQGEVSVSQVQQRNLRLRVVAKRSRLNRLKQKLKTLEYQLKSGRLKLCFGTQRLLRQDHRKFVEQRDSQMTFIGAKEETACNHNLQLTYNRRSNQFLIRLRKDFGGYKSAKGEERYVYGKVYFNHHKAQIVSILRSKNSPLSYRIVKRNGRYYFYCTFEFQVVNDEVVTRSGYGTIGLDFNKGFVTLSETNRYGHLVQTEFMSYRFKSGSKTKADLQKIANHVVKLALRIGKDVCIENLDFRATKSKTEAKIGKKYNDMLHSLAYREFSTAMESACYRNKVELHKVNPAGTSWLAERIYCEPMKLNIHTGASYVIARRGQGYKDAV

SEQ ID NO: 15298 - protein, 459 aa, unknown
  TnpB Polypeptide
VPAPGLRNYEVDTETKNLSKPTQKLLIYIARKLKMSRFLARCIYFRYNEGMKLVERHIIIQSHSLWSEIDHNAFLSKNLFNLANYHYRQYFFVDHKKLSFNQLYHLVSKSSDYLALPTKVSKQIIRRLDVAWSSYLAAFKTWQKQPDKFLGKPLIPKYKHKTKGRNILIYSHESIYKRPLKYEGICHLSMSELKIPTSQRSIIEVRIVPKSSCYVIEIVYEKPEEVTDHQQIAGIDLGVNNLMAVTTNQTGVAPFLINGRPLKAINTFYNKQRSRLQSQLKTRNNQNSSKQLKLLTHKRNCRVENYLHTASKRVIDWCEQHQIGVLIIGHNDLMKQSLNLGKRNNQQLVNIPHYRLIEMLTYKAQLKGIKVIITEESYTSQSSCLDRDELPKYGDKKPLFKGKRVARGLYRTGDNKLLNADVNGAFNIMRKVIPDVLDQGIKGLPFNPVVLDPLRMTGL

SEQ ID NO: 15299 - protein, 483 aa, Okeania sp.
MTHCYKINPTAEQSAKIDYWLEHLRRHWNYALGQRLDWLNRTRFQIDRCSIVSCPIGEIPQLPDYYFQQSALKQIKKLFPDYQEIYSEVQQINLQRLDKGWKRWLISEKKGKSGGRPRFKKSGKLRSFCFSRVNHPRAVVKFDSKQIIISKFGTIPVIVHRPIPDGFVIKTATITKKADGYYVSFSWEDNPPLTLPGRGTEGVGLIPTDNIKTAIGIDVGLKKILTTNTDETVSVPNLYRKVESNLGRKQRKVPRKQNGSNNWKKAQNRIARLYQKIARQREDFHYKTAYKLVKQYDLIAVEDLNLKGLAKNTKLSKSIYDVAWGTFIEKLNAVAVKRGVHVVKVSPHNTSINCSNCGQKVPKTLSVRTHSCYKCGTVLDRDENAAINILDKALSEMGIILPACGGVRRLSACVRLALRQQSKKLLKLGFNYLCLRASRYNLRFNGRELHLQEVENIQYSSLHGKKARNSMCLITEPSVSAIL

SEQ ID NO: 15300 - protein, 409 aa, Okeania sp.
MTHCYKINPTAEQSAKIDYWLEHLRRHWNYALGQRLDWLNRTRFQIDRCSIVSCPIGEIPQLPDYYFQQSALKQIKKLFPDYQEIYSEVQQINLQRLDKGWKRWLISEKKGKSGGRPRFKKSGKLRSFCFSRVNHPRAVVKFDSKQIIISKFGTIPVIVHRPIPDGFVIKTATITKKADGYYVSFSWEDNPPLTLPGRGTEGVGLIPTDNIKTAIGIDVGLKKILTTNTDETVSVPNLYRKVESNLGRKQRKVPRKQNGSNNWKKAQNRIARLYQKIARQREDFHYKTAYKLVKQYDLIAVEDLNLKGLAKNTKLSKSIYDVAWGTFIEKLNAVAVKRGVHVVKVSPHNTSINCSNCGQKVPKTLSVRTHSCYKCGTVLDRDENAAINILDKALSEMGIILPACGGVRR

SEQ ID NO: 15301 - protein, 422 aa, Oscillatoriales sp.
MQLAERHIIKSTEHRFAQIDELAFKSKNLYNAANYAIRQSFVYGWSYINYNEMNRLMKSHQAYKALPAKVSQQILMILDKNWKSFFEAVKAYKTDPSKFTGRPKLPKYKDKVKGRNILVYTIQAISSTQLKKGIIKLSGTEILIKTKVNPDRICQVRLVPKCDSYVIEVIYNEQESTASDDNFVASIDLGLDNLVALTSNQPGFTPLLINGRPLKSINQFYNKRSSQLQSKLKRGRKTSPRIQRLTRCRNQKVDNYLHHASRLIINLLLTKQIGTLVIGKNAQWKTEIDLGSQTNQNFVSIPHSRLIEMLEYKARLAGINVIVQEESYTSRSSFLGLDPIPVYGKTEKEPVFTGGRIKRGLYKTSVGQLINSDVNAAYNILRKAIPNAFSNGIGSCVLGPRRVNPLKVKRKGEGLTPPMSLQ

SEQ ID NO: 15302 - protein, 344 aa, unknown
  TnpB Polypeptide
  misc_feature (30)..(30): Xaa can be any naturally occurring amino acid
VTVTGRVVPLDSNSYMELVLLAHRFRKALXKAVKMRARGVDKNAIVKEITRELNLGYADTIYKLAKLVVEGARRNNSNLLKVEIRKLFVASRGFSSNKGNRNIRLLSTSELEVNIPWRGWVKFRVLFGGQYIPLVSELIEKALRRELSYTAKIVFRNGRPYLQVSTPIELYLKHFKKEVARGDLIAGFDLNSDRINMVIVDKLGVIRDVKTEWFPEVTSPGFPREKANTLRLQALAKLLGYAYHHGVGVVVFEDLERIRGRRYTKSRSANRKIGRFPKRKLLQYAIVMALKYGFKVYLANPAYTSKIGEKLGKELGFDKHTASAYVLALKALQPENYKLLTELR

SEQ ID NO: 15303 - protein, 589 aa, Lactobacillus sp.
LAFKKFQNSNEIRRLINRQNLIQKRAVAMINRGTDKGNLYQKLNQRVGIKRQMSQATINVMMDIFRNEHITTIPENSFVVFARTTLNVHDGEPQELLLQLNKLDSYTLFLAPKQSSEKIFSTPKRGWLMTLRDDGWILMLPGQNPNQGIQLVLPEASEAEVTPTANTNQPARTSANAHVAKSAAPTESNASNHAAKTAESSTNQHSVKATSSSTAKRTPKAATSSTTKHVAKTTDSSHAKRSTKATTSSAAKHSTKVTDNSSSNSTKVTSNAIDSATKAAESSTAKYSIRNTTSSHATSNPISQTPSSHAPAKASQATATNSFTSNTTSQAHLTTSNAAVTSQVNHVATSAAATKPLPGPREADELIKNLVESGRRYRVVGLDYGKINMITATDGDDNTLQVPGSIISKHILDYQHEIRQMQRQTQTLDDDVELTRLSYMLKRYVLKSCRKIVNQLIAHYGDDVIYVTELHPSLDVNKTPNIILSPDYFYKALFTILFELVGHNSAIIQVPNNETSIICPVCGFTSSGNRQKELHTFKCLNCGFESNDDQAAATNIRQRGLRYISNLTKNMNFTVATPEVTHAPVQEEI

SEQ ID NO: 15304 - protein, 293 aa, unknown
  TnpB Polypeptide
MEQITITAKVQIVATDTDKVLLNKTMSVYCDACNYVSDYVFRTHDLKQFSLNKILYSTLREKFSLKSQMAQSVFKTVIARYKTILENQNEWIKPSFKKPQYDLVWNRDYSLTQNCFSVNTLNGRVKLPYFAEGMSKYFNHSIYKFGTAKLVNKHGKYYLHIPVTYEVEESNISDICNVVGIDRGINFVVATYDSKHKSGFVSGKAIKQKRANYSRLRKELQMRHTPSSRRRLKAIGQRENRWMQDINHQVSKALATGNPKHTLFVLEDLTGIRNVTERVKTKKPLCFCIMVFL

SEQ ID NO: 15305 - protein, 319 aa, unknown
  TnpB Polypeptide
LQQTLKDLERAYANFFEKRADFPLFKKKGMSDSFRYPQGCKLDQANGRIFLPKLGWLRYRNSRDVLGELRNVTVSQSGGKWFVSIQTRREVVPEQPTGGIVGLDMGIARFVTLSDGSHLDPLNSFKKHQQRLKRYQRRMARKVKFSANWKKAKAKVTQVHIDIGYARKDYLHKASTTISQNHAIVCVEDLQIRNMSKSSKGNAETHGKQVRQKSGLNRAILDQGWGEFRRQLDYKLAWHGGHLIAVPPQNTSRTCPACGHVSADNRQTQARFECVACGYENNADVVGAINVLERGQRLLACGELAQSGRSMKQEPAEAS

SEQ ID NO: 15306 - protein, 414 aa, Acidiphilium sp.
MLNRAFRYKLKVDAAQDSVFRQYAGVVRLIYNVALEQRSVFWRQHLARTGKAISVTTQCRELTALRAEYDWIRALHVTPQQQALRDLDKALGNFFAGRADYPKPRSRRENNAFRFQGREVDVETLSRKWARVRLPKIGWVKFRLTRPLRGTIKNVTVALDPLGWHVSFACAIEHEAAESNLPDVGMDRGVAITAVLSSGDRLRIPGSLALIEKRRRQAQKIVARRKRGSNRRAKALRRVAKLSAKSARIRRHWQHRVSQNLASRFGTVVVEDLKVRNMTASAAGTVAEPGRSVRQKSGLNRSILEQGWHSLTTLLEYKLSEHGGHLVAVDPRYTSQTCSSCGVVDPRSRKSQARFQCVHCGFRAHADYNAAVNVLRRNTAPMLVEGCGCAPVEARTGRSRMAPENPPPSGGGRC

SEQ ID NO: 15307 - protein, 399 aa, unknown
  TnpB Polypeptide
MQHNICGVPTRTFKFRLYPNSDQQYKLQNNLAVCRWVYNKFVESAKNGFVSRNDCNYFLTELKQSESWLYEYHSKMLQMVSTQIDGAQKALIEKAKNGHKTGPLKFARYSEYRTFTYNQSGFEIKDGFLHLSKTGRIKIIQHRNIPENAKIKQVIVTKSKSGKWHACITLNIAEPFFDIPKISFTKAVGIDMGIRSFAYDSDGYSTPNPLNLKKMLKPLARIQRKISRRKKGSNNRLKAIRHMQKIHEKIASRRNDFQHKLSAQYAKNDVVIVEKLEMTNMVKNRRLSRSIMDSCWGAFLQKLEYKCKMLVKVPARDTSINCCRCGNKVPKSLTVRIHRCNKCYLVIDRDYNASVNILNKGLNIFDQSPQATISVPQELRELTPVEISMRSRKQEAHVL

SEQ ID NO: 15308 - protein, 363 aa, Escherichia sp.
VKRLQAFKFQLRPGGQQECEMRRFAGACRFVFNRALARQNENHEAGNKYIPYGKMASWLVEWKNATETQWLKDSPSQPLQQSLKDLERAYKNFFRKRAAFPRFKKRGQNDAFRYPQGVKLDQENSRIFLPKLGWMRYRNSRQVTGVVKNVTVSQSCGKWYISIQTESEVSTPVHPSASMIGLDAGVAKLATLSDGTVFGPVNSFQKNQKTLARLQRQLSRKVKFSNNWQKQKRKIQRLHSRIANIRRDYLHKVTTTVSKNHAMIVIEDLKVSNMSKSAAGTVSQPGRNVRAKSGLTVRYWIRAGMKCAASLSTSSSGVAVRCLLFRQRTQASVARAVVIQRKKIACHKVNSDARYVDIQRTPM

SEQ ID NO: 15309 - protein, 551 aa, Mycolicibacterium sp.
MTGRGLRRIADPVVAAGPAGVRIRTRLQLNAGEASALNEVGQYLGSVYRGELAHRITLGHMDRQARTRWRTERKQAVTVVSSSRWAGALTRAVDDQYQLGMRALSAHVTDLRSAIDVIEKRCARRPGELDPAHGDGRARSRPVRGYATAAERFSKTRRLAILRQRLAAAEGALAAGYPSITVGGNRLWRTRQNLAAAQITEQVWRQRWDAARMFLTADGETGKTGGNETIRVDESGRLRIKVPAALADRFGTHLQLAAPVAFNHRAVEWTERVAGRRAVRYDITYDPDKNRWYLDASWSLAPEAPSDLQELRGGRVLGVDLNADHLAACVLDPSGNPVGEPVTITADTARLRASRRDGRVRAAITALLDHATTAGCTAIVVENLDFADARATGRETMGRGKRGKAFRRTVAGIPTAKFRDRLTAMATRRGIHVIGVDPAYTSRWGRQHWRKPLQQQTSDPSTVTVHHGAAVAIGRRGLGTPIRRRPAGLRTQQRIGAHTPPARPERQSSSHGGAVVPAHPHTIKVCGSTGQHPPPAANTVRAAQDSLLITN

SEQ ID NO: 15310 - protein, 416 aa, Mycolicibacterium sp.
VKQVVQVRLVADAAQLDALTRTLTACNDTANLVSAIAHRERTFRGRDLRAISYVKARAHAGLGAQVAQACIRKVADAYTTLRANVRNGRYGAPGSPRRRKAQADPIRFRPLAAQPFDDRCLSWRHDTDTGGSVSIWTVDGRLKNLRFTGEAGQIAMLRQYRSGETDLVIRRHRRGPEPIVAYLVATIDLPEPPVRTGTHLDSAAGWIGVDLGIENIAVTSDRTLARELMSTYGAGAPDGPAGRGSVKDRRTRNRELRQKLQAKNTKSAKRLLRRRARAEARFAADVNHQISKRIVAEAERTGRGIAVEELTGIRERVRLRKPQRATHTSWAFAQLGVFLTYKAARAGVPIIAVDPAYTSQRCTTCGHIDKRNRTSQARFVCRDCGYTAEHADILGADNIAHRAPTTWAQSTVPSAA

SEQ ID NO: 15311 - protein, 414 aa, unknown
  TnpB Polypeptide
MAVQLVEQHVIDRKDPRFVAIDSASFASKNLYNAALYVLRQAYILEGRYLSYSEMDKRMQQHEAYKALPAKVAQKVLDQLDKAWQSFFDARKAYKEDPTKFLGCPRLPKYKHKTKGRNLLVYTQQAVSRKGLKRGLIQLSMLPITVKTKQQHLDQVRIVPKSSYYVVEVIYEKAVQPADVNPAFCAGVDIGVNNLAAIASNKPGFVPVLVNGRPAKSINQYYNKRRAQLQKKRKVHEEDTSRMERLTTKRTRRIYHYLHTASRQIIALLVKEGIGTLVIGKNPQWKQGVNQGKRNNQNFVSIPHARFIEMLSYKAELVGIRVVITEESYTSKASFLDLDELPAYNPEETEQYRFSGKRVKRGLYRASGRRYINSDVNGAYNIIWKVAPDAFAKGVEGAVVHPVRIALTKQNPIS

SEQ ID NO: 15312 - protein, 521 aa, Thermus sp.
MKPGMPEAKAPKLYLGVHARLVFLKKEDEQAVLDLMRRFSSATRFAYQRLLEGKDRKELKREDSPLCRLFGLNTRYADGAIEKAQAALDSARELGQDPRKVVFGGRKLFEQLTRGHLSGKALLALKREWKERRQGLLYSRGDAAKKGNANLRLEPQGDALWLRVNLGNGAYVRAQVRTSHPHLKALLQRAYASLPYNVTIRLKDGKVYAHFTWSEELPPPVHTKANGVLGIDVNGDPYHLALAVVSPDGNLKRHLTLSLEEVDRAPNKGAKEILLWRIAHQVVAAAEKHGVAIATERLKYLRKSKRGDGSGRHFRRKQHRFAYRSLLEKIHSLARKRGVEVLEVSPQDTSTIGMLKYAPSLHLSKDVAAAYVIGRRALGYEEKLPKGYEVLLRDDAFFAHVQGFYQSRLQELRKLKEAEKNPHLRRRLSRDMGKAKAALTLVSSLQGSPGSRKGSTSGRNPSGTNAWRVLRVSLFLPLLGLEVPRDLSLLKPILHGSWKGWKVGSGPSPGGGPECANVHFC

SEQ ID NO: 15313 - protein, 390 aa, unknown
  TnpB Polypeptide
MRMYPNKIQRELLQKHFGSCRFVYNHFLQVKINHYKSTKKTINWQDMATQLPKLKEEYDWLSEIGSQSLQQSILNLDRAYTAFFRSGHGFPKFKSKKCARKSFIVPITNGNIKLNYDTNRLVIPKFHEGIKCVFDRPVPKEETIKQAIVSQDRDGKYYVSILVEVNKDFPTKPEPKKNKAIGMDFGVKTFLTLNDGTKIENPKVLKQSADKLTKHQQDLETLTKGSTAHISKQEQITKLHSKIARQRKDFLDKLSYKLTHDNQVGTICIEDLSIKSIQQMNFSPTNRVIGDLAWNKFVNMLQYKSDWYGKNFRKIGRFDPSTKMCSQCGYVNHSLTLDDREWKCLTCGTQHDRDVNAAKNIVDFAFPKMEYKMGRNYPIETHNHSVVSSS

SEQ ID NO: 15314 - protein, 398 aa, Anaerovibrio sp.
LIQKGGERRMQRAMKIRLLPTREQEIFFWKSAGTARWAYNYFLSANEQAYKDDRRITEGEVRKYINNVLKKTTHTWLKEVGSNVMKQSVKYANLALQRYFKGISSKPKFKSRRKSKISFYVNYESLKRTKNGFHGEKIGFVKTVVALPKIAKGTHYINPHISFDGKHWYLSVSYEVKKEQVELTGESIGIDLGVKELAIVSNQDASRKKFYKNINKSAKVRRLEKKLRRAQRKASRKLEANTKSHDKNRHPVWKRPLRECRNIQRQNKKIQLLHKKLTDIRNNYLHQATAEIVKTKPSQVVMEDLNIKGMMKNKHLAEAIAKQKFYEFKRQIQYKAEMYGIKVVEVDRFYASSKTCSHCGHIKKDLKLSDRTYVCPVCGVKLDRDLNAAINLANYKTA

SEQ ID NO: 15315 - protein, 204 aa, Lyngbya sp.
LQLLLQEKPGTETNFEQLEINLSASVLRFNPNALSRQNACLEGSLERNRGFGHWVNHNISKQLVQEAEQLNSAIAFEDLSGIRLRTKVRKKTRTEINSWAFYQLRLFTEYKARIAGISIILVEPRSTSQTCSRCHHIHPQKGKSYRKGKVFKCGFCGLEHDADVNGALNIAQLAETWQFLSSQSFQDGAAVNPPEISTYSCQLE

SEQ ID NO: 15316 - protein, 429 aa, Lyngbya sp.
MRLAYQYRLRLTTEQKARINHWLELLRRHYNYLLGDRFDWWERNRCPINSCSILVSHLPGLREQPEYYGQKRDLVRLKQLFPEYKDIHADVLQDMVKRVKLAFDRYLKGDCNGKKSGKPRFKSKGRYRTFSYSRVKVDCIQDGYIQLPKLGKIKLIYHRPIPEGVTIKTALVTKKADGFYVTLSLVDNTVPDFNPDDIEPTENNSIGIDLGLEKFGTLSTGEAIPIPKYFRKAEDKLEKLQRKAASRKKGSRARKLLYGKVAKIHQRIQRQRKQFHYEQANQLIAKSDVIFIEDLKIRNMIKRCKPKQDETGKYLPNGQAAKSGLNKSLADAGLGQFVEILSFKAENAGVKVVKVNPRNTSQFCSNCLNIVPKELSERWHSCPHCSTELDRDLNSAILIKKVGLGVKLTIKRSRRNSILSDPYSVSLGC

SEQ ID NO: 15317 - protein, 456 aa, Halorubrum sp.
  misc_feature (147)..(147): Xaa can be any naturally occurring amino acid
  misc_feature (303)..(303): Xaa can be any naturally occurring amino acid
  misc_feature (403)..(403): Xaa can be any naturally occurring amino acid
LTANLVQKGIRRAIEATKSGVARLKKGETTSQPHFDAWSVVYDKRSATFHRDHVSLSTVNGRVECEYVIPDDPTGTPIGEYLLNEDYEFRMSTLQYDRLTDSFNLHARMRRTEHDEHEQSTVASSDATHRTVLGVDLNVDGSLAVTXVHSCFFRCHAQNSPWRRSERGRLARRDVDRRVHRECRRDEPSTPRVREDPRVDATGGHAVGTPVDSVDGRSRTPLDTGRTPSRLEPDSRRSSRPRLYPRRVREFDRYSRANGWCEAIPRVGVPPFVRVRRIQSRNARYRGRAGESRVHEPAVFEVXLYEYVEYKAEMLGIEVEQVSPAYTSQRCSKCGFTHETNRRSKHQFVCQKCEYELNADYNASKNIARKLLKRLHSGQTSSSGGAPCQCALTSGTLNLNGGXRLHSGQTSSSGGAPCQCALTSGTLNLNGGFTATVDSAAEGESTDKPTASVVGH

SEQ ID NO: 15318 - protein, 155 aa, Halorubrum sp.
  misc_feature (137)..(137): Xaa can be any naturally occurring amino acid
VDGSLAVTSTGAFIGNADEMNHRRREFEKTRGSMQQAGTRSAHLSIQSMDDREHRWIQDELHRASNQILDEARDHGCTHVAFENLTDIRERMAGAKRFHAWAFRRLYEYVEYKAEMLGIEVEQVSPAYTSQRCSKCXCTSTSNTKPKCSVSRSSR

SEQ ID NO: 15319 - protein, 456 aa, Deltaproteobacteria sp.
LRYTRIMKSASATVVRIYTFPQLPKAMLARISAGRTESAKVWMHCRDMHAAARKDKAPWPKRTELQKATKGQFALHSQSVQMVCHTFLANIDTTAQLRREGNVKMKYPWRDKRYYPLLWPAQAVTVEGNYIVLPMGRGRASLVLPKPEGFEPGGCKLVWNGSANELHVTVEVPVQDRADSSVKATVDLGQIHQCAVTTSTGAALIVSGRGQRSLKRRMNQMHGEIARLQSRCKKGSRRHKKLARARHKHAGRLERQVRDLAHKGTRVVADFCAANQVGEVFIGDPQGVRRYNNGRKHNQRMAQWEYGRDKEYLAQKLSREGIASFTGSERGTSSRCPQCGHKHKPKGRVWHCKACGFTGHRDLVGSVNMHEDNFEKLTTFPSLKDVTYLRPGAVSMAQAGRMKTCQLGSSSRPDTGHDAESSVALLCEPCEDTDCYRSAPSGAGHLARHSTEAHRL

SEQ ID NO: 15320 - protein, 409 aa, Calothrix sp.
VSYRVYPSKELAVIWKKWVAAVRKVYNISIAYLNQNQGFEKVGNKGGKMGFRTMLKSSGLIPQWCNDLNVSKILDNASMEAYKAWSLTARNPNFIGKGKNKKPHPQAGLKIAKFRSVRDQKLTIQFDPTAYKNGRWMVSTTKHLPKPEFKGQEFCILTDGSTELTYNKGRWFAHFPVESEKTPSVTNKVIALDPGVRTFITGFDGSDFLEFGNGDFNKIAKLCSHLDKLKSRHDKAVGRKFKRLKYKLRQAMERIRTRIKNLRSECHKQVGSYLAKNYDIIVLPTFETSSIIVKKKRKLKNKTARAMMNWAFYQFSQTLEHLCNRYGSKLVRITEEYTSKTCTKCGHVHRKLGSSKNFKCPNCSYEIDRDFNGAVGIFLKAMWDTTFTDSVGDVVLNIQNVLDVQRCPG

SEQ ID NO: 15321 - protein, 441 aa, unknown
  TnpB Polypeptide
MIKTIKLPIYLSKKDKKIILKYQKNQNNVIRFTYNRLVEFGALSTKEVTVLQKTMNNVFVDSHFLNSAGYKAKEIYSTQKETRETVVFGGKKLFIKRCQKKISAEAFRLERLLPLISIGEANYKANRKFLLQENNTILFKPEKSCHLTLGLPKLRNNIKKELKLLLELQNLKQIPITYQLSMDYVWISFDDKILHTELNYKPVESRFMAIDMNPNYIGFVITQYENEVSTILKSGVFDLSKISAIPEKRNFETTHVAIELVKIFKANHCKVFGIENLNMKTKDHKKGKKFNKLVNNGWARNCLVNQIKKRIDRIKGTKFLEISPEYSSFVGNMLYRDTTYPDMVLSAIEINRRSYEFYTQYVIKSRPIIKNIIFPIWENILDPLAISLEEFGFRIDDFSGWLDLYTYCKNSKLKYRVPLDAKASRVFSLNSTKSKVFYYAL

SEQ ID NO: 15322 - protein, 416 aa, Methylacidiphilales sp.
MRISYQFKIKPNKEQAEKIDSTLEMLRYQYNYLLAQRFDWYEMNRCAIDRCSLICHLPELKDKPNYYSQKASLTQLKIDRSWYKNIHSQVLQEVPKKVETTFDRWLKGDSNGKKSGRPRFKGVGQYKTFTFPQFKRHHFSRDRITLSKIGDVKVIVHRQIPDGFDIKTVYVTKKADGYYVTLSLDDKTVPVIKTDFNADNIVGIDVGLIDFFVTSDNERISAPKFLRKAERKLKSAQRKVSRRKKGSNRRKKAIKKLGKQHKKVADTRKDFHFKTAKLLLDKYDVIAVEKLNIKGLAKSRLAKSVNDAGWGQFISILSNKAENAGLKVIAVNPNGTSQECSSCGHKVKKPLSQRIHNCPVCYISLCRDLNAAINIKARGTHALKAQLMSSNEESLRSHTVPVLRERVWSMSPNLPT

SEQ ID NO: 15323 - protein, 389 aa, unknown
  TnpB Polypeptide
VKKIRFYPENEGAYFDLLSLFRRAYNLAVEQYINGTHVENPTDKKWRNLRPEIKSIAKPEFETSERAYNAIVADNGVLAAANTFSKVCAKNKKLKGATSGFSKISFKSRKDTEQTFTIDRFPKGKNPCERALGKIHLTEKIPGECFDRSCSVTFKNGRWFIQVQQIIPLQPDIQGDVKCVAVDPGVRTFATCYSDQETLIIGDNLAKEKLFPLMQQVDKLISRKQKVLNTQKVGLFKDMPQWARDEIRHCNRLIDVLKCKKDDLVLDLHNRTAHHLVTNYDVIFLPTFETQNMVMRRGKVRTIRRNTCRQMLDLGHYKFKMRLKWYARKYGKHVVDVNESYTSKTRSWDGTIDDKLGGKKLIRGLGFSVDRDINAARNIYIKYLTRQAA

SEQ ID NO: 15324 - protein, 417 aa, unknown
  TnpB Polypeptide
MANQVTRTYVASIRNHQQVREDLDSLGFAASKLWNVARWTCDRIWTEIGTIPDDGVLKSYLKSHERYADLNAQSSQAILEELAEAFDSWYTLRGNGDENANPPGYRKHGDDHPRSTVTFKEDGFKHDLDHNQIRLSKGRNLKDGRRDFILCEYAADPDVDVQNVQQVRAVWTGTEWELHIVCRVEIAESDPPGDRVAGIDLGICNFAAVAVGDEALLYPGGALKEDEYYFQKGRAKCDDSVSREAHRLDQKRSERRGHFLHAVSKDIVTECAARNVGTIAVGDLTGIRADADRGDHGNLDLHGWAFDRFVSMLDYKAAAHGINVEGVDERDTSKSCASCGTTDDTQRVERGLYACEECGLVANADVNGAENIRQKVLPNLACDGGDRDNGWMAQPAVRLFDKSTGRVAPQEQVTREP

SEQ ID NO: 15325 - protein, 374 aa, unknown
  TnpB Polypeptide
MIVATRKIAQKIPFKPTKKQIKLFADCFGARRFAYNSQVAVFNTYSEKNKELVYPKITDLKRENEWLKTSVVPAHSLSNALMDFGKARTAYFKKANYGKNRPSFQSRHDYTQSFRNGMPLKTIRDNGRYQLSKKLGYIKIRKRDKLRYPIEQMTQWTIKREGEKYYIVFLFTVEVETYPETTGAVGLDLGIKDFVITSDGEKIDLPKQIGKLEAKVIKEQRKLSRKQKGKGKQSNNFYKQKAKLQKAHAKVRHVRENFQHHVSKQLIEENQFIAIETLRPSNMIKNHKLARSIARAGWRQFTNQLEYKADWYGRTVQKVGTYYPSSKTCGNCGNVYHNLTLSEREWTCTHCGVTHDRDLNASQNILKEAQRLAS

SEQ ID NO: 15326 - protein, 263 aa, unknown
  TnpB Polypeptide
MLRATKVRIYPTPKQVAFLDRQFGAVRFVWNKALAIKTHRYRARGQKLKGKRDLKPLLAVAKRSRKYGWLADFDAMSLQQTCINLDRVFINFFEGRARFPRFKRKRGAQSSYHCTGKIAVGEDWITVPKVLGRIPAIVHRQTVGKLTSITLTKTRTGKYFAACLFDDETEPPAPPQVVRDVIGVDVGLAHVAIDSTGRKTDNPKFLKRAQRNLRRKQKALSRKQKGSKNRAKARLIVAKAHEKVANARADFQHKLTAVRLSDQ

SEQ ID NO: 15327 - protein, 410 aa, Okeania sp.
MKLIEKHIISKHHSNYQEIDKLCFLSKNLFNAVNYIVRQEFIFNQKYLNSTKTYHLIKKSVDYKAMPSKVSCQIIRLVDRCWSSFFASIKDYSKKPHKYLGKPNLPRYKDKLKGRCVTIYPAQAISKRALKKGLLEPSGTQISIPTKIKGKINEIRLVPRNGYYIFEAVYEVESGKPLNNNRVAAIDLGLSNLATVSSNVKKFKPFIVNGKPLKSINQFYNKKKGELQSQLQKQAGERLNSNKIKKLTAKRHFKMETYLHQASRIIINNLRENQIGTLVIGNNQKWKQEVNLGKTNNQNFVQIPHHKFIEKLTYKAELVGITVIINEESYTSKASFLDLDNIPNYSQGVKHKFSGKRIKRGLYQSKNGLLINADLNGSYNILRKAVPNAYADGIEGLGVIPFRITPGKVS

SEQ ID NO: 15328 - protein, 425 aa, Desertifilum sp.
MSFMTLIVNYRYRIYPDATQEQTILHWLEISRQVYNYALREIKDWVNSRKCSLDYCSLEREYIIPADQPFPTYYIQQNALPKAKKAFPLLGEAPAQVLQTTIRRLHEAWNYFQNRGFGFPRFKKFGQMKSLLFPQFKANPITGWQIALPKVGKVPINLHRPIPDGFVVKQARVLRKADRWEVVLTIESDVAIPEAQPHGDALGIDLGLEKFLTTSDREFIARPRFLTSLYRELELLQRKYARTKPGSKNREKARIRVARFHNHIANVRKDWQFKLANHLCTKVGIGMIFVEDLNLKAMSRGMLRKHTLDAAFGQFLNLLEWVAKKHLIYFLRVNPDGTSQTCPKCNTHTGKKELQIRVHRCGECGYETHRDHAASEVIRLRGLELSTQGLCGIENAYAVGLPGTEETLSRSEAKLRKGRTRNAQQ

SEQ ID NO: 15329 - protein, 314 aa, Salmonella sp.
MLRATKVRIYPTPEQTEYLNAQFGAVRFAYNKALHIKKHAYQRHGVNLNPRKDLKPLLAVAKKSRRYGWLKEYDSIALQQAVINLDVAFSNFFNPKLKARFPAFKRKHGKQSSYHCVGVKVLDGAVKIPKISAIEARLHREITGSLKSITITRSATGKYYASLLCDDGIDAPAKPTLVSTVTGLDMGLSHYAIKSDGDKVANPRHLINASRNLRRKQKALSRKKKGSANRRKSRIQLAGVHERVANARADFQHKLSRTIVDENQAVIVETLKSANMMNNHHLARAIGDAGWCGFISKLEYKAAEKGVHVVKLDH

SEQ ID NO: 15330 - protein, 379 aa, Thiomicrorhabdus sp.
MLKATKVRIYPTKEQIEFLNAQFGAVRFAFNRGLAIQSHFYKVKGVSLKPLKDIKPLLSKAKKSRKYQWLKQYDSIALQQGVIQLDKAFQNFFNPKLKSRYPRFKSKYGKQSSYHCTNVSVGDDWIKIPKCQPIPAKIHRDIQGQVKSITLSKTTNGKYYASILIEEGVALPAPVQTIKTAVGLDLGLTDFFTASNGHVEVNPRHLRSAERNLKRKQRQLSRKKKGSANRAKARRVLANAHEKLRNIRNDFQHKLSRTLVDENQAVIVETLKSSNMMKNKHLAKAIGDAAWNSFISKLEYKAKAKGHYLHKLSQWFAGSKTCSCCGHKMDEMPLNIREWLCPSCSTRHHRDVNAAINHLKQGMIELKAAGLSFSLAESV

SEQ ID NO: 15331 - protein, 420 aa, Azohydromonas sp.
MLIKAYRFQLRTRSGVERLLRRFAGSLRWVWNAAIAEQRRRREAGEKFSPYAAMCRWLTEWRHAPETAWLAQTPIHPLQQTLRRLDAAYRRFFAGVGGHPRFKRRGQEPGLRFPDPKQFELDQGSARVKFPKLGWQRLRLSQAVVGELRNATVTCERGRWFVSLQLEQPDVLPSADLMPTLGIDLGVALFAALSDGRTLQPLDALKQQQRRLRHAQRAVSRKQKGSRNRRKAVNRLGRLHARIAAQRSDWLHKLSTELADQHPVIAIEELKVAALSASAAGTSEAPGNRVRQKAGLNRAIFDQGWAEFRRQLEYKTAARAGAVVAVNPAYTSQACSQCGSVDRGNRRTQALFACLACGHTENADANAAHNILAAGRAVWAARPAACGAEVSRARPARAQRAAAMKQEPTEATPAAPAGAR

SEQ ID NO: 15332 - protein, 389 aa, unknown
  TnpB Polypeptide
MKKLKKAYKIEIKPTKEQIVKIHQTIGVSRFIYNFYIAHNKEVYEKEKKFVSGMDFSKWLNNEYIPNNQDKGWIKEVSSKANKQAIMNGEKAFKKFFNGEGGFPKFKKKKNQDVKAYFPKNNKTDWTIERHRIKIPTLGFIKLKEFGYIPVNSVVKSGTVSQKADRYYVSVLVEEDIQVYNVDYSKGIGVDLGLKDFAICSNGLTKKNINKTKTVKKEEKKLKREQRKLSRKYESLKSRNKKEKGKATRQNIQKQIVKVQKLHQRLTNIRTDYINKTVSELVKQKPSFITIEDLNVSGMMKNRHLAKAVAEQKFYEFRTKLTSKANQNNIEVRVVSKWYPSSKTCSCCGSIKKDLKLSDRVYKCSCGISIDRDLNASINLANAKEYKIA

SEQ ID NO: 15333 - protein, 401 aa, unknown
  TnpB Polypeptide
MSRYRLLPSPAQEAVLRGHCAHARYVWNLAVEQHEHWRPGRATAPGYLEQCQQLTQARAGFPWLAAGSQTVQQQALRDFAWAMAAFFDPSNPARRPSWRKAGRDEGFRIVGQRGRQWDARRLSRKTGEVWVPKAGWVRFRWSRAVPEGVKSYRVTMDRAGRWHLAFAVIPEPVSAPGNGETVGIDRGVAVSAALSTGELLRVPGLAVRERTRLRRLERRLARARRGSNRRGRVKHAIARLRACETDRRRDWAEKASTGIARRFDVIRVEDLRITDMTRSARGTRQNPGRNVRQKAGLNRGILRSGWGLLVRRLEQKAPGRVEKIRPYHTSQRCSACGQVDRRSRESRAVFQCTACGYACHADVNAARNIAAGHAVTARGGDGVTRPANREPQLLASLTGCE

SEQ ID NO: 15334 - protein, 415 aa, Nostoc sp.
MFMYSTQKNQLRNLSKAEFSALRELCRLSKNLYNVGLYTVRQYFFEERKHLRYESAYHLCKKNENYQLLNTDIAQQTLKVVDRTFNSFYSLIKAVKSGVFQQKVRLPHYLPKDGYFVLIIPRIQVKDGKFKVPMSNAFKRQFGEVTIDFPSRLSSETIKEVRIHPKYDARFFEVEYISKSETEPVETFPGNAMAMDLGLDNLATCVDTNGASFIVDGRKLKSINQWFNKENARLQSIKDRQKIQKLTERQARLYIARTNRIRDYLNKTARLIIDHCIKHQIGCLIVGYNPGIKQEINIGSHNNQNFVQIPFHNLRNKLKSLCQRYGLIYKEQEESYTSKSSYLDSDELPIYNANKPATYQFSGKRIKRGLYRSKEGHLINADAQGAANIGLKSKQNGFTGLSRGCLAQPLRIKIC

SEQ ID NO: 15335 - protein, 408 aa, Microcoleus sp.
MRIAYQYRLRPTRQQSTVLDRWLSMLCAQYNYLLADRFNWYEQNRSPVNACPLICHLPELRDNPDYYSQKKTLPQLKETHPWYGEIYSQVLQDVVKRVKVTFDRFLKGDSNGKRSGRPRFKARNRYRTFTYPQMKEGCLQSNLINLPMFGKVKVILHRPIPDGFKIKIASVTKKADGFYLTLSLEDKTVPEIKPDFNPDKITGIDMGLKEFLTTSEAETVAIPQHYRKSQKRLRVIQKRVSRRKKGSNGRLEAIKQLGRQHKKVADKRKDFHFKTVNWLLSKYDVVAHEQLNIKGLARTRLAKSVLDAGWSSFLSILTNKAVNAGLMVVPVNAHNTSQDCSGCGEKVPKKLHIRWHSCSCGCELDRDHNAAVNIKNRAVGQSVLKAQSMSEAIAGVAEKPTPTEYSMV

SEQ ID NO: 15336 - protein, 268 aa, Exiguobacterium sp.
LKGVIALLKAYKFRLYPTKPQQEYFVKTFGCVRFVYNKMLEERIRLYEDSKLNPHTKQKLPTPAKYKPEFPFLKEVDSLSLANAQMDLNKAYHNFFRDQSVGFPKFKSKHNDRDSYTTNNLKGSIRIEDRKVKLPKIGFVKLKQHRPFDGVIKSATVSMTKTRKFFISILVDQAEAQWVPAKNKVGIDLGLEHFAILTNDERVSEKVDNPRFLRKSEEKIKKAQRALSRKKIGSKNREKARVILAKKRPLQFAKQISGELFTYVLPKF

SEQ ID NO: 15337 - protein, 377 aa, unknown
  TnpB Polypeptide
MKAIKVRIYPDDEQTEMIAKTIGCCRFVYNWALAKRIAFYQSNKKTLGKFVIMGELIGLKREKEWLNDVPSQSLQQSVDDLDSAFSHFFRKNNSFPRFKSKKNARQSYRVPQGFEVNKISHYIRLPKLGWLRFIDEFCIPEDAEFRNMTVSRNGNRYYASVCYKTPEKRVEQHKVEPDKTIGIDLGITTLATISDGTKIENPRHLKQHEDNIRVEQQELSKKKEGTKAYEKQKARVNEAYRKVTDTRRDFFHKLTTSLVENQNWTSFCVEDLAVSTMMQNNSTPMSRAIGDAGWRMFRSMMEYKCRDAGKNLIVIGRFEPSSKTCTCGCVNHTLTLVDREWTCPVCGVHHVDRDVLASNNIKRFGLRKEAGQSLLVA

SEQ ID NO: 15338 - protein, 374 aa, unknown
  TnpB Polypeptide
MRKSFKYRAKMDKTTEANCNHWLELCRNLYNQMLEERINVYKTTGKSISANEQKKELPELKRKYPEFKVVGSQVLQDVVERVDRAFRGFFRRLKQKNGKAGFPRFKGKNRYDSFTLKQSGWKLEGRYLYIKNVGRLKLFLSRPIQGDIKTITVRRSSTGKWFVAFSSDNVPAKKYQETRAQVGIDVGIRSLCVDSTGNAFVNPKYFKQSEKLLRRRQRRLSRRQKGSERREKARILVAKAHEKVSNQRKDFLHKVANYYIENFGTIYIEELNIQGMLKNRHLSKSIADSSWGMFFSLLSYKAAEAGRTLVKVAPHGTSQICSQCGEKVPKSLSVRIHHCPLCGLNLDRDYNAALNILRVGQTLQAPTSAVAGVA

SEQ ID NO: 15339 - protein, 378 aa, Saccharothrix sp.
MISVKQVVEVRLLPTHEQATALRNTLHVCNTAASWLSEQIHTAGVFRKFDVHKRFYAELRERFGLAAQPTIRVIGKTCDAYTTLRANLRAGNYGPPGSDRRRKIEATPVVFRPEAGQPFDARCLSWCLGDRGREGTVSIWTTAGRLRNIRIVGNPGHLALLRTRPIGETDLICRSGVWMLHAVIDSPEAPQREPVNGFLGVDLGIVNIATTSDGDRMSGSHLNRYRTRQQRIRKRLQAKKTSSARRLLKKRRRKEARFASDVNHQISKRIVAEAERTGRGIAVEQLTGIRDRVRLRKPQRAALHSWAFAQLARFLAYKAGQAGVVIVQIDAAYTSQQCHRCGWVDKKNRRSQASFTCGRCGFVGHADHNAAHNIAQRG

SEQ ID NO: 15340 - protein, 241 aa, Streptomyces sp.
VGTAQACPDRSVVLRFGYDLTGTADQRDAQVRHALTRLLHWTKRHSLAIAVEDLDFTAETTQEKHGGRKRFRKLISGMPTSRLRARLVSMAAELGIPVVAVDPAYTSRWGAQHWHKPLTGKTRKTTRHDAAAVAIGRRALGHPIRRRTAPPPAHRSDEQGHRTVQAGPGAPGREAVPDSGLRRGPPPASPDHGHDPSAPGAERTRSTRTPNTVRGVRLSTNPGDRTNSRSVSRNGVSSTTP

SEQ ID NO: 15341 - protein, 422 aa, unknown
  TnpB Polypeptide
MQLAERHIIKSTEPRFAEIDQLAFKSKNLYNAANYVIRQNFFYGWGYVNYNEMNRLMKFHEAYKALPAKVSQQILMVLDKNWKSFFEAVKAYKADSSRFTGRPKLPKYKDKVKGQNLLVYTIQAVSSKQLKNGVIKLSGTKLSIKTKVNPDQICQVRLVPKCDSYVIEVIHDEPESTAKDNNFVASIDLGLNNLVALTSNQPGFIPLLINGRPLKSINQFHNKRKAQLQSQLKGNRKISSRIQRLTRCRNQKVDNYLHHASRTIVDVLVTQQIGTLVIGKNAQWKTDINLGKQTNQNFVSIPHARLIEMLEYKAFLVGIKVIVQEESYTSRANFLGLDPIPVYVKTEKEPVFTGKRIKRGLYKTSTGQLINSDVNGSFNILRKAIPNAFSDGIESCVVQPRRVNPLKVKVKGEGLDASHVYK

SEQ ID NO: 15342 - protein, 132 aa, unknown
  TnpB Polypeptide
MLSAKINRKIANKRNLWNNIVSKDIVINNDYIAVETLNISGMFRNKHLSKALEDASMGDVLAKIKYKSIWHDRIVIAIDRWSPSSKRCNCCGYIKRDLKLRTREWICPVCRTQHDRDINAARNILYYSMNLN

SEQ ID NO: 15343 - protein, 372 aa, unknown
  TnpB Polypeptide
MSMIRSLTFKLRLPGGEDASLLGTMHAYTTAFSESARWGFENRTWNKVENHKATYHVVRNAVPRLPSSLVQGARDCACEALKAVRCKATPVRKPLAALRYNQRVIRVNMIHGIATIASINGRIKATFPVPETYWQYLGWILRSSILSYNWRKRRFYLHVQIERADPEPIQNLRVLGIDRGIVNVAVCSDNTFFNSKRVRSARGKFAHLRRSLQSKGTRSARRRLRKIGGRERRFMADVNHCISKKIVNSESTVFALEDLSKIRVQKRRGPQFNRNLGNWAYSQLEQFLRYKAEALGKQVILVDARYTSQKCSRCGHVYRWNRDGSDFRCRSCGFQLHADLNAARNIAQTGISCLGRLPVNQPNASVVSHWNH

SEQ ID NO: 15344 - protein, 417 aa, Mycobacterium sp.
MLAGRRFRVEFSAEQAEFAGQIGAVCRAVWNTGLEQRREYRRREAWMSYGIQAHELAAAKAEHEWLKDVPGHCLQQTLMDLDRACRMHGTFRVHWRSGRRWAPSFRFPEGNKMVVEKLNRCHARVKLPKLGWVKFRASRCLEGETLRSATVSRQGAHWYLSLLVDDGIEAPAAHVAPGTAVGVDRGVVVAAATSEGELIDRTFVTDGEHRRAVALQRKLSRAGRGSANRAKIRSRLAKLRAAERHRRADFCVQTAARLARTNAVVVAEDLKTRNMTRRPKPVEDPDNPGHYLGNGAAGKSGLNKAILGKGWHRFGQALSSVARYTGTQVIKVPAAFTSLRCSACGQVDPKNRESQAVFRCTSCSHGPVHADVNAAKNILAAGLAVIACRETTTPAGAVVTPTQEPAGNREELLLQPA

SEQ ID NO: 15345 - protein, 369 aa, unknown
  TnpB Polypeptide
MRHRGHRIQLNPNNAQATYFAKACGISRLAYNWGLARWKELYAAGEKTSGRGIKKDFNAIKHIEFPFVAEVTSCAPAEAFDNLNRAFQNFFRNLKTGKRPGYPKFKKKGVHDSFTIDNSKFVVDGTRIKIPRLGWVRMTEELRFKGKVLSATILRVADKWFVSIFVEMPDEDRSENQALPSVGIDLGLSKLATLSDGVVFENPRTTRQFEGRMRRLNKSLSRKKKDSNRWKRAKLKLAKGHYRVQCVRQDAIHKMTRFIADNYSTVCLEDLNTAGMVRNKRLSKHISDAAFREIRRQLEYKSFATSVVDRFFPSTKLCMDCGKLHKMLLSKRIFECCAGPIDRDLHAAQNILRQGLSEVKHVETKALAS

SEQ ID NO: 15346 - protein, 334 aa, unknown
  TnpB Polypeptide
MGATTTIRRTYRFRLEPTTAQEDGFKRFAGARRFVWNRALQQTQAHHAATGKGLPEKDLSARLTALKSEPATAWLKEVDSQVVQQALADLKKAFGAFFAKRAGFPRFKSRKRDVARFRIPQRVTLTGGSLTVPKIGCVKVRQSQAVEGTTKSATFKRDACGHWFVSLAAETEMPDVPLPAPREERTVGVDLGLKDAVVTSDGERVAAPRYYRAAQRHLRRAQRSFARKAPGSANRAKARQRVARVYQKVANKRNDFCHKLTTALVANHDAVCIEDLHVRGLARNKRLTKSIAAHQEHNGCLHGHDPATVGVQGRMASHAYRGRRSLLPLVKVVP

SEQ ID NO: 15347 - protein, 487 aa, Asgard sp.
VKILTNFKKISPSEIQKTLLDDLTKEEIEKVKRQIINIEQKPIYLTTKIKISPTEEQKEILWILAENCRLIYNFALEERKLWWEKNKDKPKEQRESNPSYISQQNQLPALKRKFPRYQQNYSKTLQCTLKQLQANYKSYLTKLNNGDKTAQPPGYKGKKHFAPLIYNQSGFKFNEKTVTFSHYYPTKNSQEVELSYQLDSKINFHDKEIKQITISQNHKTKEFFLSLTYKEGTTYYQDNNIYQAIDLGVMNIVASVNSHAGKSLIIKNNRVDKYWQSKIEEVQSKRDKCLKFSNRWFWYNTKLQKMKRKQTNQQKDFQHKLSRKIIENTKANTIIIGDLNVKEMSKKSNKKNDKSLNRTTQNTGCLSRFAGFLTYKAELVGKKVIRISERRTTKRCCYCMKKKIRTLSERIIHCDFCGLVIDRDINGACNIMQRFLAIISLSHKRLVVGQRLLKNFRLLFFAINSQTSNVGFSSNGVVRTRKKSLQR

SEQ ID NO: 15348 - protein, 420 aa, Nonomuraea sp.
VQPRCSYRIDPTPAQRIAPAKAFGCARVVFNDALALRNQAHQNGEPFITDTDLSVRVITAAKKTPERAWLAEVSAVVLQQALADWTTAFRNFFDSLAGRRKGPKLGPPRFRSRKDTRQAIRFTKDARFAITPGGRLRLPKIRDVAVRWSRNLPAEPSSVTVIKDAAGRYFASLVVEVKSEPLPDTGGEVGIDLGLGHFAVLSDGRKIDSPRFLRRAEKKLKRLNKALSRKEKGSANRAKARLKVARQHAKVADARREFHHQLSTEIIRENQAVYVEDLAVKGLARTRQARSVHDAGWSAFTDMLEYKAKRYGRTFARVDRFFPSSKLCSVCGAVADSMPLRVREWACPCGAVHDRDINAAINVRNEGRRIVAAGRKPAPEMGGKRRRKTPVETGKTKPPARPRRRKGAVGEAGSHGSAAA

SEQ ID NO: 15349 - protein, 319 aa, unknown
  TnpB Polypeptide
MPVFYRDVMYREGAEGKDEAYLKLYDGHDWKWFCVRLDHTDMEYLRKCWSGKKASAPTLEKRHRKYFLRFSYKEEVTLTKTPVKEQIICSVDLGINTDAVCTIMRADGTVLGRRFIDHPSEKDRMYRTLGRIRRFQREHGSAQTQGRWAYTKRLNTELGKKIAGAIVRYAEENHADVIVFEYLEMQGKISGKKKQKLHLWRKRDIQKCCEHQAHRKGMRVSRICAWNTSRLAYDGSGAVTRDWENHSLCTFQTGKRYNCDLSASYNIGARYFIRELLKPLPATERSLLEAKVPPVKRRTSCVYADLRKLHSEMERLKAA

SEQ ID NO: 15350 - protein, 432 aa, Thermococcus sp.
MKRTVTVKLHPSKAQEKTLKELVLISSKVWNRVNYLRRQEFFEGKPVDFIKTEKIVYEEFKTEIGSATVQQICRKNAESWRSFFSLLRKKRNGELSNWFKPKPPNYIKEGSLIVFRNDQYKIEWNKLILKGLGKFKKLEVQFKGRIHLKGKQGRLEITYDPIRRKWYAHVSYTVGEKLRGGKWVELPRQPLGNLSAGIDLGVNNLMAVYVENGESFLVNGRPLKSIAFYWRKRIADYQSKLNKSGAKRSRKLSRMHQKAKLQAKHYINTAVRQTVDKLYQMGVSRIVVGHPKEIARNSNRGKKQNYLLSHVWRFNYAIKRLKEVAEEYGISVIVVDEAFTSKVCPVCGKLHKGTRFVRGLFKCPEAGLIFNADLVGAFNILKKAVKTITPSLPGLTVGRGNWGKTVPEGFEKPVSVRVLMKTPQTFPSLARG

SEQ ID NO: 15351 - protein, 376 aa, Citrobacter sp.
MKRAYKYRFYPTPEQTELLAQTFGCVRFVYNSILRWRTDAYYERKEKIGYIQASARLTALKKEPEFAWLNNVSCVPMQQALRHQQMAFANFFAGRAAYPAFKSKRHKQAVEFTASAFKYRDGKLYMAKSKAPLYVRWSRQLPSAPSTVTITKDAAGRYFVSCLCEFEPVSLPITVSTVGIDVGLKDLFVTDSGFKTSNPRHTAKYAKRLALQQRMLSRKKKGSKNRAKARLKVAKLHAKMSDCRMDNLHKLSRKLINENQVVCVESLKVKNMIRNPKLSKAIADASWSELVRQLQYKGEWAGRSVVAIDQYFPSSRRCSCCGFTMKNMPLDIRQWLCPECGADHDRDINAARNIKAAGLAVLAHGEPVNPEPHHAA

SEQ ID NO: 15352 - protein, 296 aa, Burkholderia sp.
LGEVRNATVSLSAGKWFVSIQTAREVEQPVPQASSAVGIDLGIARFATMSDGSYLAPLNSFKRHEARLRRAQQAMSRKTKFSNNWKEAKARIQRIHARIGNARRDYLHKATTTISQNHAMVCIEDLQVRNMSRSAAGSADAPGKNVRAKSGLNKAILDQGWFEFRRQLDYKLAWRGGWLIAVPPQNTSRTCPACDHVSAENRQTQARFACVACGFEEHADVVGAINILATGAGTPRGSLWRAGAVGPLGEAGTRRGDLRWASSFQTRSESPAFRLEGCQASLFFHEENAAGGRGMR

SEQ ID NO: 15353 - protein, 452 aa, Natrialba sp.
MGEEATKTIQTRLHIASGERSWLHDARLASREIFNQTIRLKQQGDNRTEIQKEVDRDDFLRNNKCAVVGKALQTWDSYQSLKDWWENQDDPDRGKPTPPSTDKSSAYPLVMAHTEGYRLTVNDNTNRVQFRISPKPYKKVKGHLRGEPDAMDELRDALTSNEVDIGQAELLSRKSKIFDESSKCSRTSRYRDGVYYLHVTVTREFDVPEPDTADTVIGVDINERNVALTALDRETMQTKGTLALDYGRVKQERQRYHTITTRCQEHGKTSIHHRLGDKEERFTEWVLHRLSRAVVEFAAQFSNPVIVFEDMSGIRDEIKYGAYMNRRLHKLPFHKFETFVSYKATWREVPTDTVDAYYNSKTCSCCGERGYRQGRRFRCTNDKCNLAQDHADRNASVNIAWREKTKLDGNTTNYRTHKTQPQVRVVRLSGSGRVSRPTSSRFLAEQGVLAHG

SEQ ID NO: 15354 - protein, 527 aa, unknown
  TnpB Polypeptide
VSLDDEAVLRAAGSHLGSLAGRDLAARCAEGRLDARGQAASRAARKRALTAESSSRWAGAITRTSEDQHRLAEQNLRAERASLQARLHRIGDRLAVPAGGRSGNRRGYATAAERHAKDIRRRALQARLTRVERRLAAGTVPVTRGGRGLLRKRANLAAAGLSEAQWRARWQVARLFLTADGEAGKTWGNETIRFHPGQGWLEIKLPAPMAGLANRPHGRYRLSCPVAFPYRGDEVAAQAASGAIRYDISCDAASGRWYLDSSWKTVRGPVPPLGELRRHPVVAVDMNAGHLAVAVVAADGNVAGVPVTVPLDLAGLPAATRDGRLRAAITGLIATAKRHGAQAVVIEDLNFAEARAEGRERHGDRPSRGRRGRRFRQAVSGIPAGRFRDRLVQMAANAGLSVIVVDPAYTSRWGAQHWLAPLQDHHPNTTGHHAAALVTGRRGLGHRARRRATGNRTAPEEAARLAQARTRKPRPPGPHPGSPPPQEAPGSRKAPRPGSLTGPRQATRRPKTVRGHRAARITSCYLN

SEQ ID NO: 15355 - protein, 382 aa, Halorientalis sp.
LTIRLKTPDTLSPEARGDWSWTEYERGGYEAFHDLLAHGDLSAPEFQPSCRKTGDAYYELSFPVDVEQTRASDDGGCVLALDAGMRKDMTAVVVTDDGEQLSTPHFIQFTDRDGMRRLHRERTRLNDRLAALRRNGRSHTEEFAHIQSEYERVNAKIQHKREQLTHDVANQVLALALVYDVDAIVHEDLRSLSPPRDEGTLSWELSSWARRDIIENIEYRADCAGLTVERVYPEGTSRSCPRCGSTGHTCKSPDHQQEHWWGGHFRCDNARCGFEGDRDYIGALNVARVFFSETDELDHGFTSSYTGDAEIMLASRSAGTRLTFGTGVVAYEPEQARATAGGGSAVIAPAVALPESNADGSNGRGPAVQQCTRFLLCTTESY

SEQ ID NO: 15356 - protein, 404 aa, unknown
  TnpB Polypeptide
MERAILLQTEATDRKLDTLRRFSKEALRQANWILSQRTDGSSKRLHGKTYRRVKESSGFQAQVVCDLSRSLAKSKGRHLNGITVKFNIPRNCKTFGTTGFFFVELGMYPRKRLAVPIRKNRNLDRFFGLLGNAWTCKTYGLTPSLEIVAFLFKEEGPPLLVPQRNVLGIDINSKRFAYSVVTPEGRVLKQGYFGQQLWPKKVHFAERRALLQCLNALKKLKRMRHRQRNFVYTNIGQMVREIVLIARRFGAGISIERLRRFGPKGGRFNKKAMSIPFFLFKRILQARCFDRGITLNTVDAYHTSKWCSHCGAVGKGHDGGNYALFRCRECGQVVNADRKASLAVAVKSLLERSANFPNQNTLQISSRRVPVNGLVRSSGSDAPGPMAVPMLVPGKGQAHDFSRG

SEQ ID NO: 15357 - protein, 168 aa, unknown
  TnpB Polypeptide
VSWPKDVRESDWGKTGNKKLHSWAFDRLYQYLEYKGEMRGVEVLKENEWNTSKTCSRCGDDTKSNRVERGLYVCSSCELVANADCNGSENMRQKITPSPHGEDRSNGCVAQPSTYLFDRESGCFTARAGRVVDQQISHLRYGASLAVYGEEDVTFGGGNSESQLENDS

SEQ ID NO: 15358 - protein, 410 aa, Nocardiopsis sp.
MTSKSVKRAFRYRFYPTDAQAAELSRTFGCVRLVYNRALAEHTAAWNTQQRGLSYTDSSAALTAWKRTEELAFLTEVSCVPLQQTLRHLHTAFRNFFDKRARYPRFKSKKTSRASAEYTRSGFRYRDGQLTLAKMAEPLDIVWSRPLPEGARPSTVTVSRDAAGRWFVSLLCEDTITSAPAVNNAVGVDAGITSVVTLSTGEKVANPRHERRDRAKLTRAQRALARKQPGSANRAKARRKVARVHARITDRRRDFLHKLSTRLVRENQAVVIEDLAVRNLVKNRRLAGAISDASWRELRSMLEYKCAWYGRDLVVVDRFFPSSKLCSTPGCGYVHTSLPLRVRTWTCPGCGVAHDRDVNAALNLEAAGLAVVACGAGVRPQRESSRTGRPATKQEGHGATRDEAPASNHR

SEQ ID NO: 15359 - protein, 180 aa, Nocardiopsis sp.
MVGVSKIVAWVKPTPSPEQAAVLASTLGALNDHAAWVAKAAHEQGNTNHQISKRIVAEAERTGRGISPEDLTGIRIRVRQRRPQRVTLRTWSFHHLDQFIVCKARRTGVPVVFVDAAYTSQTCAGCGHVDHRNRVDQATFLCRGCGVVAHTDRNASADIAARGRVVRNAGRKSHVPPDHP

SEQ ID NO: 15360 - protein, 562 aa, Nocardiopsis sp.
MAGTGTRRLRSIADPFLASAPTGVSVRDRLKGLTPEDEAVLRAVGVHLGSLASTDLATRYTDGTSHGKDSWAARKRELTPESSSRWAGALSRASNEQWALARRSQLAHLHRLQTGIDTLRHRLSQPLGTKGTKGVPGGYACRQEWHAKSRRLAALENRYAAAVADWEAGRVHVVRGGKRLLNTRRHLDRAGLTRAQWRSRWEAARFFLSADGESGKRYGNETIRITPGGQVSIRLPAPLADLANAPHGRYVLSCRVAFAHRGAEWADRVEADGAVAYRLHLDADRGRWYVSASWTPAPVPQVPWEAALARGVVGVDANADHLAAWQLDTHGNPIGNPRRFAFELSGSASHRDAQVRHALSRLLRWATASGVRAIAVEDLDFTREKSRERHGRRKKFRQLISGFPTARLRSRLVSMAHTLGVVVIAVDPAYTSRWGAQHWQQPLSTKRRKVSRHDAASIAVGRRAQGHPVRRRTAPPPHHQGDGVGHRTIQATPDSSGREELRRPVTARAHDARRRTGTARTRRTSASNTVGDAPVAQVWVQDPLLDTVQERSPGSAAPTAPR

SEQ ID NO: 15361 - protein, 410 aa, Nocardiopsis sp.
MTRKSVKRAFRYRFYPSDAQAAELSRTFGCVRLVYNRALAERSIAWHQRRERMGYSHTSAMLTAWKRTEELSFLTEVSSVPLQQTLRHLHTAFGNFFDRRAKYPRFKSKKTSRVSAEYTQSAFRYCDGQLSLAKMAEPLDVVWSRPLPKGARPSTVTVLRDAAGRWFVSLLCEDTITSAPATRDAVGVDVGITSVVTLSTGEKVANPRHERRDRARLAKAQRALARKAKGSVNRDRARRRVARACARITDRRRDFLHKLSTRLVRENQVVVIEDLAVRNLVRNRRLARAISDVAWRELRTMLEYKCAWYGRDLVVVDRFFPSSRACSTPGCGHIQASLPLRVREWTCPRCGVAHDRDVNAALNLEAAGLAVVACGAGVRPQRESSRTGRPAVKQEGHGATRDEALASNHR

SEQ ID NO: 15362 - protein, 360 aa, Halorhabdus sp.
LEELAEAFNSWYSSDDDRDNPPGYRKQNYYDNNGNRVHEEHPRSTVTWKQNGIRHDTKNNRVRLSKGANHKEHPRAREYILVEYETRPGVTVENLQQVRAVYDQAKERWELHLVCKDEIETPDPPGNETAGIDLGISNFAAIAYSTEDADLYPGNRLKQDGYYFPKEIAKCDDSSSDRVTRLHKKWSERRAHFFHALAKHIVERCVEKGVGRINVGDLEGVRKDENGDSKNWGKHGNLDLHGWAFDRFTNILEYKAKVEGIEVVGVSERDTSKTCCICGKEDDSQRVERGLYVCETCNAAFNADVNGAENIRLNITESNSESAPSLGEDRSTGWLAQPGVYLYDLSGGFQPQEQVVDSKP

SEQ ID NO: 15363 - protein, 161 aa, Halorhabdus sp.
MHDTLEGREERFVRDRLHKVSRHIVEWSHQFENPCIVFEDLKEMRDSIDYGTRMNRRLHHLPFRALQYYTSYKAAFEGVPTAWIDPEYTSQQCPMCGHTERANRNKKRFKCCSCQHQDHADRSASVNIAVKGIGKHQDWNVPALNSLPQVRKISTERRSLS

SEQ ID NO: 15364 - protein, 364 aa, Cylindrospermum sp.
MENKNVTKYDLNKYCAVLAAEFPFADELNSMARQSAAERAWSAISRFYDNCKKKVKGKKGFPKFKKHCRSVEYKTSGYKLSVNRKAITFSDKKGIGTLKLKGTYDLNYYDIKQIKRVRLVRRADGYYAQFAINVHALVETQPTLQVIGIDLGLKYFIADSKGNVETAPKFYRKSEKALNRANRKKSKKFSAARKKAKLRQSNNYHKARNRYARKHLRVSRQRKEYCKRLAYSVIQSNDLVAYEDLNVKGLVRNRHLAKSISDAGWYTFRLWLEYFGYKYGKVTVAVPPHNTSQSCSNCGEKVKKSLSTRTHLCPHCGYVADRDLNASVNILKLGLSTVGIRSFTLQEICPLGRLAQACCLTASL

SEQ ID NO: 15365 - protein, 471 aa, Kutzneria sp.
VIIVKRTAPVRLLPTPEQAVALRSTLHACNVAGSWLSRQMHANHVFGKHEAQKRWYSEIKARFGLSAQPAIRVIGKTADAYATLRANLRAGNYGPPGSERRRAVEAAPIVFRAEAAQPFDARCLSWQLDERGRGGTVSIWTTTGRLKGLPLVGGDAQVALLRTRPIGESDLVHRDGVWLLHAVVDIAEMPLREPVNGFLGVDLGIVNVATTSDGDRMSGSRLNRYRKRQLQQRKRLQAKKTSSARRLLKKRRRKEARFATDVNHQVSKNIVAEAERTGRGIAVEELTGIRARVRLRKPQRATLHSWAFAQLGQFLSYKAQRAGVVVVQVDPAYTSQTCHVCGHVDKRNRRSQAVFHCGRCDFVGHADHNAALNIATRGVQRWGEVKRPHAAPILAASQDGSSKPTNRRQRRPANSSPQGRAHDAVSKSRAAAWAGCSTAASLFISERGVGEVKIRRPTASPAQPASSAARA

SEQ ID NO: 15366 - protein, 400 aa, Kutzneria sp.
VRRSFKFLLRPAGKQSTALTEMLRDHCSLYNGALQERRDAYRHLSKTTVRYRDQSAQLKDIRAFDPERHGRWSFSSQQATLRRLDKAFAAFFRRVKAGDRPGYPRFRGVCRFDTVEFPKDGDGCRWDSTPKDTVTRVRLHGVGHVRVHQHRPITGTVKTISVKREGGRWFVILSCDGVQAVPLPVTGRQVGIDMGIAHFVTTSDGTHVANPRHGRDAAAALKQAQQALSRCRRGSNRRLKARRRVAALHAVVRRRRLDHAHKAALALVRDADVIAYEALRIANMVRAPKPRPDPEQSGVFLSNGAAAKVGLNRGIHDAGWGVFLGILEGKAESAGRRLVPVDARDTSRTCPDCGHVAKDNRLAQAEFVCVACGHTANADVVGALNVAHRAGLVLREAPAA

SEQ ID NO: 15367 - protein, 401 aa, Kutzneria sp.
MHADQVFRKFDVQKRFYGQLRERFGLAAQPAIRVIGKVVDAYTARNANLKAGNYGRPGSDRRRKVHDTPIMFRPQAGQPFDARCLSWQLGDAGREGTVSIWTTAGRLKDVRLAGSAVQMALLRSRSIGETDLVYRDGMWLLHAAVDIIETSQREPLNGFMGVDLGIVNIATTSDGDQFSGSRLNRHRRRQLRLRRRLQAKKTSSARRLLKKRRRKEARFATDVNHQVSKNIVAEAERTGHGIAVEELTGIRARVRLRKPQRATLHSWAFAQLGQFLTFKAQRAGVAVVQVDPAYTSQTCHVCGHVDKRNRRSQAVFHCGRCDFVGHADHNAALNIAARGVQRWGEVKRPHAAPILAARTAAASLRTAASGGRHPRSLTDEPMTVSEGPAARWAGLVRVVAW

SEQ ID NO: 15368 - protein, 346 aa, Kutzneria sp.
LSVVADSVLGVSRYRLLPTPDQEAGLLAHCGHARFVWNLAVEQHQHWRPGFVSAPGYVEQARQLTAARAEHSWLAAGSVTVQQQALRDFHQSMASFFRGTHRRPTWRKAGVHEGFRQVGVRHGQVKRINRRFGGVAVSAALSTGELLVCPGLRSAEVMWLRRLQRRLARAKRGSNRRKKIKTAIAGLRARETDRRKDWVEKTSTDLARRCDVIRVEDLRIRNMTRSSKGCRDQPGRHVRRKARLNRGILANGWGRLVTRLEHKASGRVEKISSVFTSQTCHACGHRASENRESQAVFRCVACGHRAHADVNAAKNIAAGRAVTARGALQPLGGAVNREPHPATSTA

SEQ ID NO: 15369 - protein, 431 aa, Lyngbya sp.
MLGERFNWWEQNKCAVNACPLICHLPELKDQPNFYNQKKQLPVIKEDLVKVGWSGKLLDFTGVYSTVLQDVCARVKNAFNRFLVGNKNGKRSGKPRFKNAARYRTLSFPNADNSWLKFCTVNGKWLFVNVPKIGLIRLRTHRPLPNGTNLKQLSITKKADGWYCNLSLEDKSVPEFIPDSITSTWDNSIGLDAVLDRDFYLATSEGEKLPSLKPLRRNQDRLTKTSQRKNKRKKGSKARRKLAKREARIHQQIARSRKDFQYKTAHKLVNTGKKVFFHEELNLRGLTRRNAPLSDGDGGFLPNGQSSKSGLNKSWLDAAFGQFFKLLGQVAAKANASVIEVKPNYTSQILSYRDDFVFTDRNMRFDFDEGLKLYIDRDVNASINIKRVGLDVFPTIKRRKGNPVVVSSTTNSTSKEVLNALFEHQKPTLKA

SEQ ID NO: 15370 - protein, 377 aa, Borrelia sp.
MGANKAYKYRIYPNTNQKKYFSKVFGCVRFLYNKMLSDKKDYYEKNKKSLSVNPSNYKNEFPFLKEVDSLALCSAWIDLNSAYSNFFREIKKGNRTQGFPKYKSKKNRQTFRTNNQKNSIRIENDYIKLPKIGFVKLALHRNIKSNELIKNVVVEKDTDDKYYISVAVECLDVKNNDKTKCNKKEIVGIDMSMRHFLVSSGGEKINHPKCLLKNERKFKKCQRKLSKKQKGSRNRAKSRLRVAKLHRKISNQRKDFLHKLSYYFVANYKNIAIENLSIKGMQKGMFGKSVNDLGWHEFVRQLSYKSEWSKSYLHKVDRYFPSSKLCNNCGIKNTTLKLSDTRWTCSGCNILHDRDINAALNLKAYYYKEIKTKAGTA

SEQ ID NO: 15371 - protein, 366 aa, Streptomyces sp.
VKLVVQVKLLPTPVQAAALEATLRACNEAATWASRLAFEKDVKNNFALRKLAYGEVKTRWRLGAQAAQHVIKKTCDAYATLRANLKAGNLGRPGSRRYRRATEKPIAFRPHGAQPYDDRMLSWQIAERRVSIWTVSGRVKDVAFTASPEQLPTLALYRQGESDLLERDGLWFLNATCEVPEAEPNTEPVDFLGIDLGIVNIATTSDGEILAGRELNRIRARERGLRAKLQKKNTPSAKRRLKKRRRKEARRAKDINHKIAKHVVAEAGGTSHALKAVGEHRSRDRPGRPGRDPRTGTASQAPTGHPAQLGLRPAGRVHRVQGPQGRGTGGARRSGVHLPHLRRMRPHRQGEPGLPGLVRVPVLRIR

SEQ ID NO: 15372 - protein, 429 aa, unknown
  TnpB Polypeptide
MIQRASKGQIVNLSDDAAGAIEFHLRDQRRVWNMALRLNEMFYRSTGQFVFYHELAACLTIARTVRQFNAGGVAAQQQCLRSFDRALRESLPSANSRKGFPRYRKRSSDCSIRVPAVSVKTVRQDGEITHVGFPKIGLLRVRNLRVPEGAKINSFALTTRAGKYYVSVQYAVEIEIPKPSNDRIIGIDAGLSVYATLSNGEQVQALRPFRSSVKRLRRAQRALSRKRRGSVNYRRQRRKVSRVHARVANVRRNAQHQLSRRLVNEHGTIAIETLSLAGLKRLKHQGKAWSDVGVGELYRQIRYKAEAAGVTVYEHPRFARSTGCCPDCGYIGERLELNIRSWTCPACGREHDRDIAAARWLEKCARQAQLVGAACPEPSEAPPWAKRGKRGRHRAVAVMRPVPSGIPANVGSPTNVPLTSVAVPHASTG

SEQ ID NO: 15373 - protein, 453 aa, unknown
  TnpB Polypeptide
MVEVNRTVVIPLNIPEESKSDFHQTILPYAYCQQETVDHCWPDNPKQPDDLETSKQAAENALYDRLRGDTDEQLNANLVQKAIKDATSAISSCKTSWENGDRISKPNFCDRDSAGYTMTYDKRAATYKRYEASFSTVNGRVACQYELPRELEGTPYAEYVLDRRWSFGTSKLVFDGERFWLHTVMNRQFGADPVYAPETETGSDTHNEDTIRVLGVDLNVDGSTAVTSTGQFYGNADALNAYREDQEQLRGELQQTGTRSAHLRFQQRRGVEWRYYDQYAHYVANSIKQEALRVRATHVAFENLTRIRKRISNLPKFQQWLFKKVRKYTEYKLERYGVTVDTVKPNYTSQACSHTDCDCVEEDNRDGKHFECVECGYTVNSDYNAAKNIGFRYLNNKVSNPASHTCSSGQAASQLALMSGTLSPDGDFAETEWVSTDKPHPQQASGSSSARAQ

SEQ ID NO: 15374 - protein, 373 aa, unknown
  TnpB Polypeptide
MKLTAKVKLQPTAEQAQLLRQTLEAANRACDYISTRAWDTKTFNRFKMQKLTYTQARLKFDLTAQVVVRCISKVADAYHLDRNHKRRFRPHGGIAYDSRILNWRMTDSTVSIWCLGGRQIIPFVAGPRQLELLAHQQGETDLAPIGGKWYLFAVCEIEEPAPGDVADVLGVDLGVKNIAVDSDGNVHSSAQVNGLRHRHRRLRQKLQAKGTRAAKRLLKRRSGKEARFASDVNHTVSQRIVATAQGTGRGIALENLHGIRSRITARKPQRATLHSWSFFQLRLFLEYKARQVGIPLVLVDPRNTSRTCPACGYIDKANRVSQSTFSCVVCGFSGLADYIAALNIRVLGRAAVMRPYVSDAQTIAQRQGQATPL

SEQ ID NO: 15375 - protein, 407 aa, Desulfurococcaceae sp.
MSLPVRARATARVEAVAPEGGEGLLVEFLRAYRDAVQLVVNEVWKQDKVPSTKKLHVMFYGKLRALGFRAHHVSEIYKRAREVVEATKKNKGSKPILKKLVARIHQLDYNVDFNTKTLRVAVLNGYWVELKLKWYSYLDKYLDGSWRLGEIQVGYRDGRIFIYLTFSKEVQLGEPKTIMGVDLNFNNITYTVVDLSGNLVSMGAIPFRGLSRALHFKKLTEELQKRYPKSWRFLRWAGRVRARWLKRARNILLDSPHHVAKRLVEIAKEYSAVIALEDLKKLRGRANGGRLSWELQLWCYRRVQGFVEYKALVEGIKVFYADPKGTSKTSPNGKPLAFINYRFVKLGDSVTTRDVVASWNLALRGLKQMRGCRVRLTPDSSVDAGMRTRPNTENPGVYSQVFTDNYK

SEQ ID NO: 15376 - protein, 393 aa, Bifidobacterium sp.
MKSHIAVRFRAYPTEEQARLIDRTIGCARFVYNLMLETRIAHYQTTWESCHPTPALYKDTYPFLREVDSMALCNAQLALEKAYRRFFDNGCKGFPRYKSKRRGKAAYTTNRIGGNIGLDDKARRLKLPKIGWLAVRQHKHIPNDWKLKSVTVEHRPSGRYTATILFERETQTPEQVEPVRIVGLDYASHGLYVSSDGKKAEYPGYYRKTQNKLAREQRRLSRMVEGSANWYRQKQRVGRLSEKTADQRRDWQHKKANGIAAAYDMVAVETLNLKGITAKPKPKPDPDHPGRFLPNGRKAKSGLAKNTLDNAYGMFCTMLEYKLARQGKRLVRVDGWFPSSQLCHDCGYRNPQTKDLDVREWTCPQCGVLHDRDVNAALNIRDEARKTVERRDS

SEQ ID NO: 15377 - protein, 514 aa, unknown
  TnpB Polypeptide
MASVTRTHPLRPYACFDKKTGAGLDLHNILEEVRADAELCATEATKHITHKNLELVSQYDGKFTCDVGKALGIELYPKRIATGRYSFKKMVQDYAVTQLRNWRFRVDAHTGKRPFRDSVRKNLSPNRPQNLKPILPLYATNSNYRSIRINGATAELSMVVAERWVTFHFKTPEKFLEPGARVIAPKIHIDDRDRVMFDWYVELPVERAEFSTKYVVGVDVGIANLATVVVRDITTGEVVETSFMNRRIRSLENKIQRTKSQLAALHRTGRGNEAEPHRKALSNRRKEVAILIGQEVADLSWRYGNALVAVEDLSHIINNMKYGRWVRGMIVDRITEMVESNGGRVMTVPAAYTSRKCHQCGKNLDLTNYRTPVCFSCQVAWDRDENAAANIAGKLKEKSRHKKACQTRKRSASKNRLRRSKDTTRPLKHPLRKTGPTPKAPQNQPKNRGNSHRVHHKHTVIKKRGGGVFPVLCAADQPLRDSNVTISAVAPVHGCSDNQPHDYSMMIAPEYLEL

SEQ ID NO: 15378 - protein, 501 aa, unknown
  TnpB Polypeptide
MCVDKKTGIGLDLHDVLEELRNDATLCAIEAYKHITVENLEQISEYDGLKPAEAGRQIGIKLSSTGRGTGRSRFEKMVQEYAITMLRSWYERTTTRNNKDSKYVSAGYRRTNNGNKPDFLKPRLALSATDKKYHTVRLNGTTIELDMVVNQRWVTFTFKAPERFIEPGIRVIAPTISINDNNRVMFNWYIDVPVERAPFSTKYVVGVDVGLTNHTTAVVRNIETGEVVEASFMNQRIRSLENKIQRTKTQIAALHRKGRVSEVEPHRKALSNRRKEVAILIGQEVADLSYNYGNALVAVEDLSNITNTMKYGRWVRGLIVSRITDMVESNGGRVMKVNPAYTSQLCHKCNTKLDVSDYHTPICVNCRVGWDRDENAAANIAARLKDKHTKSCTTRKKHASSKRRKNSKGSLRPLKHPLKKTGPTPKAPQNQPKQENSHHVHHKNTVVKNRGGGVYPILCAAGQSLHDSSVRVPAVAYAHRSDKKPHDYPTSKHRLNDLCLH

SEQ ID NO: 15379 - protein, 483 aa, unknown
  TnpB Polypeptide
MPEYITTRTYYSKKLDEQTYSELKLIAKKLGILRKIIWHQFSSNPKKLNDREIRDQWLNAKNNETNFYPKIIDQLPARLWKETLRDTIGTINAYFEAGFKEVIKTLYRKHSKQKGKELAKILKIDYKSNNELHRLIRKTIPKGVSKADNIICLDDNCYSFADQDTNIMQVMSLTKFKRLAIPLTTKYRPKGNFKIILNNDRCELRVNFKYQTKVQIEKPYEAIGVDKGYTEVFTDSTGERHGKGLGELLTKKSDFLNEKYKNRNKLYAIMKKADEAGDKKKAENIKKNNLGNKKLNNQKEKMKIELREVIYSAAKTITKKANVIAIEDLSFTSNSTKYKSVNRRLSSWLKGVIDEAITKYCFIYGAKLVYVNAAYTSQGDSRYDCALVGKRIGNSFIGFDEVVLDADINAALNVLARLYDQEISLYTPPEKVKEILIKRANAVFSGLVETAQLRLQPETSTNLSFLAKSELSGNFNKDLARFS

SEQ ID NO: 15380 - protein, 361 aa, Oscillatoriales sp.
MLLGFKTELKINNQQRTALMKHCGVARHAWNWGLWLTKNILDHNRQNPQEKLKFPSAIDLHKLLVAMVKSKNEWYYECSKSAPQQALIALRDSWKRCFNKTAGVPKFKKKGKGDSFTLEGAVKILGNNKIQVPVIGVLKTYERLPQVKPKSVKISRQADRWFISFRRSVAEQTTVNTSIVGVDIGVKNLATLSNGEAIQGAKSYRKLEKKIARLQYLHRHKVKGSSNWKNAHIEIAKLHRKIANIRSYTLHKLTTLLAKNHGTVVIEDLNVSGMMANRKLAKSIQDMGFYEFRRQLTYKCKLYGSKLVVVDRWFPSSKLCSHCGAKKEILSLGERVFECDRCAYVIDRDLNAAINLSKTVS

SEQ ID NO: 15381 - protein, 191 aa, Bacillus sp.
VQSYTTKHTNGNIAIVDRKVKLPKLGLVKLAKSREVEGRILNATIRRNPSGKYFVSILAETDVQPLKKAESSIGIDLGITDFAVLSDGRKMDNHTFTDKMEKRLKREQRKLSRRALQAKNKGMNLLDAKNYQKQKRKVAQLHERVRNQRDDFLHKLITDIIKNHDLICIEDLNTKGMLRNHKLAKSISDVS

SEQ ID NO: 15382 - protein, 255 aa, Haloterrigena sp.
HVTVTREFNIPEPDTSDTVVGVDINERNVALTALDRETMQTKGTLVLDYGRVKQERQRYHTITTRCQEHGKTTIHRQFGEREERFTEWVLHRLSRAVVKFAEQFSNPVIVFEDMSGIRNEMQYGSYMNRRLHKLPFHKFERFVSYKATWREIPTDTVDAYYNSRTCSCCGERGSRQGRRFRCPNDECDVAQDHADRNASVNIAWREKAKLGDTDTNYRTHKTQPQVRLVRLSGSGRVSRPPSSRSLAEQGVLAHG

SEQ ID NO: 15383 - protein, 412 aa, Haloterrigena sp.
MATETTATKTLEATLAPPTTDKEQRLERTVATYRRALSAAFESGADTQSAVNDVVTGYSLTSYAKDALKNYVPQLRRTYNASEIEDGHPVRFTSRGFRIDHSGDRMHEFCWRVPQAGRGNAFWIPLRINPEQESLWFDLLDESVSVGEFRLQQHRTSWVLHVTVEYEIVEPETPDDPTRIGFDIGESKLLTGCACQNDTPTQPYIYDGGRARALRKEMHTTLKRLQDRDADWRVDERFDHFQNALTDIIEKASREAVKYAESFEDPVIVLEDLSYIRENLDYGKYMNRRLHAWAFARLIDRIEDKALEVGIPVEFVNPGYTSQTCHACGHIGRRGSQAEFKCTNAECWVTEYQADINAAANIAGRFDPWGESVPWKPERDDSPRNGSRCDTATGHRMPSRQSRQTTLAAFES

SEQ ID NO: 15384 - protein, 521 aa, unknown
  TnpB Polypeptide
MERTNIVKLVVDKNTHEKLRGLAIVTAKCWNEVNWLRRQQFKKGERVDFIKTQKEVYEKYKHVLGVNAQQVARENATAWRSFFSLIKEKKEGKLPKWFKPRPPGYWKDRYEGYKLIILIRNDRYKVNEENRVIYLKDFKLSLRFKGKLKWHGKRSRLVIIYNEARRSWYAYIPVEVENANENANGGNIVRGDGNLRASVDLGIVNLATVYVEDGAWYIFKGGSVLSRYEHYSKQISRVQKLLARHKHRTSRRLKLLYDKRRRFLKHALNSMVRKIMEELKKRGIVEVVIGYPKEINRNHGNKLTVNFWNYSYIIRRFEEIGEELGIKTVEVDEAYTSKTCSLCGEAHEGGRVKRGLYKCPRTGQVINADLNGAINILHIPESQGSVSRGQLTVRDRGNGLKTQPVVYRWTNGAGWVATPTSNEVVRMKAVNHEPMSHPKGNPSLMGGEEVGRLVPSDPRMDSLLVNASMAKLYWTLERLGRKLRRGEVSMDEALEILKRVAFDPDYELAWSKIERDVQSKC

SEQ ID NO: 15385 - protein, 316 aa, unknown
  TnpB Polypeptide
MPRFRLQPTPAQEAVLREHCAHARYVWNLAVEQHGHWRAGRRSAPGYLEQCRQLTAVRAEHPWLAAGSQTVQQQALRDFAQAMGAFFDPRNPAGQPTWRKAGRNEGFRIVGRSGRQWDMRRVSRHVGQVRVPKAGWVRFRWSRPVPPGVKSYRVTWDRAGRWHVAFAAIPEPVPAPGNGEVAGIDRGVTVSAALSTGELLHAPRLTRSERARRRRLERRLARARHGSRRRARVKEKAPGRVERIKPAFTSQRCSACGLVDRRSRESQAVFRCTACGYVCNADVNAARNIAAGHAVTARGGFRDAGPVNREPQVLAS

SEQ ID NO: 15386 - protein, 304 aa, Bacilli sp.
MYKAYKFRLYPDSSQKQLLSKTFGCVRLIYNYFLDICIKNGFIKAFDMCREVKELYIKYPFLKEVDSCSLRCAIFNLEDAFKNYFTKRSNYPKFKSKHNKQSYRTTCIRSKYKDKEYSNIELDLVNRKIKLPKLGLVDIRGYRNLKNICGIIINATIEKETTNKYYVSIVVEEKENVTSNVTPQSIVGLDLGIKDLVVTSDGEKYANPKEILKREKKLKRLQRKLSRQIKGSNNYYKTKEKIARIHSKIKNSRKHNIIYIVNKLVKEHDIVVSEKLHVKEMPHNHNLAKNILDASFNRICQVLK

SEQ ID NO: 15387 - protein, 549 aa, Streptomyces sp.
MTEPEKKQLRTVDAPFVALGPSGVAIRDRLKHLTPQDDKVLRLVGEHLGHLASLDLKVRCADGNDHDAQRWAARKQSLTAESSSRWAGSITKSTHDQWALSRRCQLVHIQSLETGIRTLMHRLSQPIGEKGTKKAPGGYRSKSEWFHKSRRLHTLEHRLGVARAEREAGAVNVVRGGRKLLNTRHNLTKAQLTETKWRKRWEAERWFLAADGESGKRFGNETIRVTPEGEVSIRLPAPLAHLSNARHGRYVLTSKVTFKHRGQEWRDRVEANRAVAYRIHLDVARGRWYLTASWQRPVVQTIPLQAARANGMIGVDTNADHFAAYRLDEHGNPVGDPHRFHYDLSGTANHRDAQIRHATTRLLYWAKRCGVAAIAIEDLDFTAEKTREKHGRKKRFRQLISGIPTGKLKARLVSMAAESGLSIVAVDPAYTSQWGGQHWQKPLVTPRRKMTRHDAASVAIGRRALGHPVRRRTAPPPHDQSDRAGHRTVQADRGVRGREETRHPVTERAHDARRRAGTQQGTRATSASKTVRDARSTGTWVQDSLLTTD

SEQ ID NO: 15388 - protein, 217 aa, unknown
  TnpB Polypeptide
MEADGTVAGREFLSLPAENDCLDHAVGRLKKAQRNGAKRVPRLWAAVNGINDNIAVRTASFIVEQAVKYNVDTVVFEHLDTSGKKKGSKKQRLHFWKAQYVQKMVADKAHRLGMHISRICAWGTSRLAFDGSGTVKRGKASEKTAGNYSICEFQSGKIYHCDLNASYNIGSRYFIREILKSVPVTVQQDIGAKVPRCLKRSTCTLSDLISLAAVLAA

SEQ ID NO: 15389 - protein, 522 aa, unknown
  TnpB Polypeptide
MFVSLQFKLELKKEDKEKLIKLMRKQSSAIRVAYNMLKELEKEKIKNPHAQIYQRLRQLFPDLPTKYIDSAIYKAKQYPTDKPVVFGGKRLFEKLCKNHLSGKTREKLKKQWRELRQGTLVSIGSKSDRGNRLIRFEDLNGQLHLRITTGNREFIYAKVLREPSNSKDKWITFMAMLLESWRIQSYFPYTVELKLRDGEVYGGVSFELPTPEVKYTKENGVIAIDTNASPIHLAIAEVLKTGELLSYKTISLHHFLELSQNSKDHQEWILAHQIVDLAIEKGKAIAVENLKKLKKGMRGDGKAELRRRLHRWNAKKFLQKLKRVAMLKGVEVIEVNPAYTSIIGMLKYAPQLSIDKDIAGAYVIGRRALGFNEDMPENYEKPLKDKVYLEFALKRYEEREKELRELIEKETNEYKRNALESELNNVQNAKKLLTDILQSLQSEPSGCEGAYGRNPEQGRVAKTTLQGVWQVLKVALLFPILGKVLPRDLSPLKPVLVEGVWDRVRSRLVPFEAGGTVPIRDF

SEQ ID NO: 15390 - protein, 431 aa, Streptomyces sp.
LLFVKLVVQVRLLPTPPEAAALEATLRACNEAATWVSGVAFEMDVKSNFALREHTYRQIKARWGLGAQAVQHVIKKTCDAYATLKAALKAGNLGRPGSKRYRRAVEKPVAFRPQGAQPYDDRMLSWQIDQRRISIWTTAGRMKDVAFTAAPEHLATLALHRKGESELVYRDGMWFLNATCEVPEAAPNTDPVDFLAIDLGIVNIATTSDGQIMAGRELNRLRARERTLRTKLRKKNTPSARRRLKKRRRKEARRARDINHKIAKHVVAEAERTGRGIALEDLKGIRERGRLRKPQRAAHSSWSFAQLGQFIAYKARRAGVPVVYVDPAYTSRTCAQCGHIDKANRVSQAWFACRSCGFVDHADRNSSRNIRARAWALWRRGAQSTAPAHSPNRRVGQDANAAPQPVAPVVQARDLSPGSLTRRSGPPCGCA

SEQ ID NO: 15391 - protein, 506 aa, unknown
  TnpB Polypeptide
MHTVQLILKPTEYEKTVINKRFHAVSHIHNVCVKHARKLLMQLDHDNEYQSWRSEYCTLLKQKELPKADRMRKFELLKQMLARRQEIGLSKWALQSYIKVCGKRYSRLISSQQVQAEAANVWTGVEKCLFNRGKDIHFKKFMDFDTIGGKSNLNGARLNTDTMTISWLGLELKCYLPKKASDRDYILESLDHKISYCTIKRMMFSNGWRYYLVVTLDGNAPCREHKTKTGIMGIDPGVSTIAAVSDTACILEELAPDANIYKKQIHKLEQHMDTSKRISNPDNFNPDGTAKKRRDCKPWVFSNSYKAARRKFKTLYRKKSAYTLHSHRNLCNRLLENADSFTVEMMDYAALAKRSSKTERQNRLTDIVQKDGTVKTVNKFKRKKRFGRSINRRSPSRFLSELKRKVESSGGAYVEVNTQTFKASQYNHVTDECVKITLSQRFKLIGNDSVQRDLYSAFLIKNTDSTFEHPDRDKCIYEFENFVTVHNETINYMKESKISMKQCFGF

SEQ ID NO: 15392 - protein, 378 aa, unknown
  TnpB Polypeptide
MNKAIKYRLYPTTEQSVMFAKTFGCCRKVYNLMLADKLESYDKTGKFVSVTPAKYKKDHPYLKEVDSLALANTQLNLQGAFRNCFSKSRKKRNGFPKFKSAKHSRRSYTTNNQHGTVAIYEKAVKLPKIGMVKAVIHRKPEPDWMIKSATILQESDGTYYVSVLFAFEKPVNTYVADKTNAVGLDYASDGLYVDDKGNIGTNHKYYRESYKKLAKAQHKLSRMVGSQKGELKSHNYIKQLRKINKIHRHIVNQRLDNLHKISTEIANQYDVVCVESLDMKAMSNKGFGNGKATMDNGYGMFLSMLKYKLAGRGKYLVKVDKWYPSSQICHCCGRRHPEMKDLQNRMMKCDCGLIMNRDQNAAINIKKEGLRLLNSSVA

SEQ ID NO: 15393 - protein, 418 aa, unknown
  TnpB Polypeptide
MLLSHKTSVKLNKDYSNIIGHMCYAAYKLWNVCNYERLHYKEIGLNAYPDWYYQKKSHKNDLWYKNLPSQTAQEVCKLLDKSWKSFYKLVKTHGVANPHPPKFKHSKMPVTYMQNGIVHTPGSDMVRLSISKQMKDYMSKAYGISENYIYLKNQIFKSTDNIKQIKIYPPVNENCDIIVIYEIEDIDTLPDNGRYLSIDLGIHNLMACYNSISGETFIIGRKYLSLCHYYNKEIARMQSQWSRIQSSKGVKHPKPSKHISKLYVKKNNAINDYLHKITRYIADYCHGNNINTVVIGDITKIRKNKDCGKVTNQKLHALPYKKLYIMLKYKLVLYGINFILQKEAYSNQTSPLMDTVCKQNANKDNRVKRGLYVDGGYNWNADSVGAFNILRLYFQKQKIDTRLNPVSILTPKIIKVAA

SEQ ID NO: 15394 - protein, 259 aa, Streptomyces sp.
MEELLGRPRRRAELQRPPRLPDGRADRDKWLNPREKAKLLGLEQRAARRKQHRRRGEKTSRRLRHTYDQIKQLRATATRRAVDWQHKTTTSIAKRYGTVVVEQLTIKNMVKSARGTIEEPGRNVAQKSGLNRSISQEAWGRTVTMLTYKTARHGGTLHKVPAPGTSLRCSACGFTTPGSREDQATFVCKNPDCGWSGNADWNAARNVLHLYRMGHALIPAAGRAVVRRPRGVKPATAKGRQESPSTRESTSDVPLACRA

SEQ ID NO: 15395 - protein, 246 aa, Natronorubrum sp.
LHIVCRHEVEFRSSGDRTAGIDLGICNFATVSYGDEATLYPGGALKEDIYYFAKERAKCDDSASWEARRLDRKQTERRTHFLHTLSKRIVSACKQRSVGTIVIGDLGGIRDDENGDARNWGDHGNLDLHGWAFDRFTSMLEYKAEDEGIEVVRKSERDTSKTCSSCGTKDGNQRIERGLYVCDDCGTVANADVNGAENIRRKVLPNLATDGGRDRDNGWMAQPAVHLFDRSEGSFAPREQGSNREP

SEQ ID NO: 15396 - protein, 289 aa, Escherichia sp.
MASWLVEWKNATETQWLKDSPSQPLQQSLKDLERAYKNFFQNRAAFPRFKKRGQNDAFRYPQGVKLDQENSRIFLPKLGWMRYRNSRQVTGVVKNVTVSQSCGKWYISIQTESEVSTPVHPSASMVGLDAGVAKLATLSDGTVFEPVNSFQKNQKKLARLQRQLSRKVKFSNNWQKQKRKIQRLHSCIANIRRDYLHKVTTTVSKNHAMIVIEDLKVSNMSKSAAGTVSQPGRNVRAKSGLNRSILDQGWYEMRRQLEYKQLWRGGQVLAVPPAYTSQRCACCGHTNSS

SEQ ID NO: 15397 - protein, 423 aa, unknown
  TnpB Polypeptide
MQLVYKFNIRCDIETRRKLLEWCKVSKNLYNQALFTYKRELKEHQVYLSYFDLDKAMKITTNLEGEINYKLLKAQVAQQCLRGLSANTSSYFNAIKEWKQRPDKFNGMPKLPNYVKSKTRQLVFTNQACTIKDGKIFFERNASIKIPQYEKYAESFKAFNQVRVLPKYDGEVLECEIVYTTNETNSEVDSMRFASIDLGVDNLATMVTDYSNPIIYNGKAVKSINQFWNKQTANLKSEIKKSQNKGTSKKLTKLNNKRNARINDIFHKVSRDIVNNLLANNVGNLVVGYNKGWKDSIELGNKNNQTFVQIPFARLISFLEYKCRKVGINFILNEEAYTSKCDSLALEKICKHDEYAGKRIKRGLFQSSTNKLINADVNGAFNIMRKVVDDSYANKIVNSGLLFNPSKVKIFEKRTYSKIIQVA

SEQ ID NO: 15398 - protein, 345 aa, unknown
  TnpB Polypeptide
LATASKDGNLENYQAISLHELLDVSSEKRQYLEWQIAHQIIEIAKKENKAIAIENLDKLPKGKRGDGFAKLRQKLQKWIYKRLLNKIEITARRNGIEIRKVNPAYTSVIGKLKYAPQFNIDKDIAAAFVIARRGLGYKEKLPKNYKELLNDKDFLLFSEASIEDNIAKLKKEMKEEKNQYKRNKLKSKLSKLRKELKALQKHLSFVIESEKSKSVSQQPVNQRKEQVRDLPVGRYKNWQVLFTAFTLSCLESYRDFSPLKRLMISRDWVRMANRLVPVLGAGTMMLPKYRLLGSEVSEMAEYKYPNSSCTEQYSFVVCFKHFSELLSGCECSLAPKCVSTALQFG

SEQ ID NO: 15399 - protein, 374 aa, unknown
  TnpB Polypeptide
MVKSVKIRIYPNATQLKAITDILDACRFVKNKYLEYNIDRHSKGEEFINGNEFVKIINKLKKEDEDYLWLDAIYSKAIKYAIKEEDSYLNAYYTKRKSFPGFIAKNRVDNESYYFIKDSIQYISKNVIQLPALGNTRITSGDKLLPDRDSIKSGRIVRNYNKYYVVFIYDTEGDNKNMVKNDITLGIAIATNNNDYIVTYDGNECRHYKSYRGLDTYKHIRERMGKLEQVVSIKSDYNFNRLFNNYMNEHGTSPNEEEKEKMREESYNTSNIRRVQLKINKCRIKLDNIVDDFIKKLVNELTVKIKPYQINLEDLDMIDIPDDETQRIVQMLMEETNFHKFKNRLINKCKEYGIKLWAVSSDRFSEYEDLLEKK

SEQ ID NO: 15400 - protein, 407 aa, unknown
  TnpB Polypeptide
MIRAIKLRLYPNAKQKEIIINTLGCCRSLKNLYIEWNNKEYETNKKFINAFKFDKLINKLKKENSDYKWISKCASKAKQEAVQSAERSYQKFFKKHAKYPKFRKRKDAKESFYFVNELFTYYTDNKNIIKIPKLGRIRISSGEDLPEDPTCIKSGRVVREYDKYYVVFIYNKYNDNYDTAKRHIKLGIDLGVKDYATIYDGKQAWKVPHFKDNPRYKELYNKITALRKVVSRKAEYNYGKLLNIYMDKNGPDISDKDKKRLQRESRESNNINKLQARIGKLNKKMVNIRMDFIKKLCYDITARIKPYQINIEDLSVINMLKNTKDHKLLRYIKESGFYIFKEHLISKCVEYGVDLNILDPFYPSTKTCCACESINNNITLTDRTFECPVCGLTIDRDINASINIHNA

SEQ ID NO: 15401 - protein, 767 aa, Cupriavidus sp.
VQLFSIGELAQMLGVAVITLRRWHKAGKLVPACRTIGGHRRYDAMKVREVMGMTTPAAGKTIAYARVSSHDQKEQLQSQAMRLRRHCEAQKWDGVEVITDLGSGLNYKKKGLLKLLTEILHHRVRRLVRVTKDRLLRFGSELLFRICAIYGVEVVILDADEDIPKEQQLTKTSLRSSPCSRQGYTAHAVVKTCAHLRHRHNCGHLYPIAHFVQLTTQTRPTITPEAALVLARLVGHYGMQLRKLYAVVAAKGGKVKDHKTEFCKAHGITARYFNGLANDLQGSIDSVRELLKQNVKDRNAALKKLKKRVAGFDKKFADLDAKRIAVTTKVFRRWTAQQRKLQLKVKRLEHKIAELQRRLKANVPGICFGSRKLFQKQFNLAESGYRNRAEWLADWRAARDHQCFFLGSGDETGGNQSCTLSVGEDGLLALRIRLPDAVIAAGKEKSECDGSPVEKPTGKDKYLVLGGLSFPYDEPALRWALREGKPLSWLIHKDHKGYRLIVSFARPAAPISTLSAKFGAIGIDFNADHLAVTETDPGGNMIRSWRVELPLEDKSTGQRAALLSDALEGVVEHALQAGKPIAAEDLDFTDKKKDMSAMSPAQARALSGLSYAKYQQLLASKCHRRGVELIKVNPAYTSLAGQIKYAKPRGLSVHKAAAGVIARRSQGYKECIPRLKSTPVSVKGVTVLFQLPARNRAEGGGTSWDELHVALGKFRRAIVAAQKKTSVARKVGTSRGKMPRGPSGGTVTPAGNKSSRSPDRGEQICSW

SEQ ID NO: 15402 - protein, 410 aa, Streptomyces sp.
MQLRYQFRVSPTPGQRTRAARVFGCRRVVWNDALARVKLVKAANKLLGTPDNRFAEGPYLRVPKNPDLSKTLVTEAKKTVGRAFFTHCPVGVMQQTLRDLDAAWKAHEDSKTGKRKGPKVAPPRFKSRKDNRQSARFTRSDRWAITEGSRLRLPKIGDLKVKWTRDLPSVPSSVTLVKDRSGRYWASFVVETDPAADVLPPVDRDQGIDLGLTRFAVLADGSHIASPKYLRRAEKKLKKRQRELSRKKKGSHNRDKARIKVARAHAKVADSRRNFHHQWSHKLTSENQAVFTETLNVRGLARTRLAKSVHDAGWAQFVMFCEYKAIRHGRSLTKVARDFPSSQICSACGRRDGKKPLNVRIWTCPEPTCGTVHDRDWNAGRNVRYEGRRILAATAPPTPGPGALARQRAR

SEQ ID NO: 15403 - protein, 658 aa, unknown
  TnpB Polypeptide
VDGDGVIVSARVLAERVGWLADITTSVAGRVLAERWTPETFTVLNAGVSPDGRNLPSQAFMAVRRLGWSVPDPAGVYVPDRVRRCAEENAMRTLRTAQHREAATMVIVRSWPDRDGFETGNRHKRTREEWAHLEQAETQLGVKLDKVTIRNRTRSVAKFVRAHDRLPTHVTELEDVPHVARQVLLAAADKQLVILTRVSDTRVRANLKLPLVSAPKQRKDWERVLVEFTVGKHVPADAVLKTPTLRLKDGKVLIDLPWEQPTPEPLARTGKRHAGHSRAVAADWGVNTLLTAVSGSIDETRAKVPVVRTDGRVYTFDAQGPALKLHRLRKQTEDLSAKIDHLSRLIENTPVPHLVDVARVAQLDQAKAERAHVSTRRSNLSREVAWAAASWLVDLAVAQKASVVYVEDLRTMEGRGHGRAQNVRLSNQVRGVVLTALRHQAAKHGIMVVVVPARNTSKLCPHCLQKLKHVKAPNRLSEPGHAWAFCNTCGLSSNRDHAAAQRVLTRGLAAQHSAHLDASKHWQITKIVDVPVRITRTSRAAHRKTMGLPTKPKSRPGKTGSTAKQQSSRPHGRGSSGGMPQRRTVPVTGSRGQVQCPAGPDSRNAASHVVVQVGNTFSVVSNRSRAPSKRARRTAGRGFHPLMHPTFVPKPSAENSLH

SEQ ID NO: 15404 - protein, 441 aa, unknown
  TnpB Polypeptide
LYNVASFYIRNAYSASIKSNEDRFPHELQVLEELNGVVDELNVIRQKHHSTPIHIIDHDHRFVSMQHLDGFFKLRDQIDYRALPAQANQNVLHMLYRDWKSFFAALADYKAHPDKYEAIPYIPRYADKNGYKPLIFTNQICKLRKDKHGWYVKFPKAVLQAGCVRDRYDLGKMDLHEQKLKEVRLIPNGDTIKLEIVCEIEIKEPTITIHEATRVAGIDIGVDNLTAIAFTSGHRPVLIKGNEIKAVNQYYNKQIAHYRSLLRIGKKDSKGIHQTKRMKRISEKRNRRVKDILHKASRKIIDLCVEEGIEVIVVGNHAGWKKRIHMGKKNNQTFVQIPFRTLIEMIKYKGEAAGIRVVVCEEAIQSKASSIDEDQIPVYGNDVTHAFSGKRIKRGLYRSKNGILMNANINGASNIIRKVYPCMPERERWSRGTVNVPVTCI

SEQ ID NO: 15405 - protein, 545 aa, unknown
  TnpB Polypeptide
MSTPRPHVPCSVSTLTHFGNGQMQDRSSTYELRRDDGCMTAHHCPPSPDQKSCMPVCPHEDNDTTLNPKSEHYELAIQTTKWSSISPAVLTSSEKDLTPYWSEFCLERSKKLSLLTKTGSVGSDLNSSSPLQDSTTQGSWFSTLHRNHLKRSLSETFFPSSTYSPAVFTASESTVNRSRKIRIYPRPESLPRIQQYLGISRYWYNKAIEYLRQKGTKASLYEVRKIQALEHPEWALTCPQRIREHAIADACAAVRNAKRKFVTVGGFQAVKFRSRKNPVQGFGFDAQSLHETFVFRGKNTCGFAATEPFEAELEGCRVKRESGRWFLTLPCRVAISKPENQRLGVVALDPGVRTFVSYYNPLCSGSFGAGDFRRLYRLCLGLDKLISKKALAPSKCKRNMRKAEQRLRWKIKDFVADIHNKVAHFLATNFDTILIPYFKTSKMVGRLRSKTARSMLTWAHHRFKTVLKSVAERYSALVVEVSEAWTSKTCSYCGEVQNIGSKKVMRCACGATVDRDSNGARGIFLRALSATTWTGEPRLASVSNS

SEQ ID NO: 15406 - protein, 393 aa, unknown
  TnpB Polypeptide
MSIRTIALTLRPSAAEKTALARLQEQFNAACNYVSGVAWEAQEFNKIRLQRLVYGDVRAAYGLMAQHTIRAIAVVADAYKADHKTKRAFRADAAVVLDTPRLYRVTHNRARITTLDGRLNVALGIGGYQRRMLTDAVKLAEADLIRDRKGRWRLMVSAHYADPPPMQADGGVLGVDLGRMDIAVTSEGATFSGTPITAVRDRYTRVRRSLQRRAAQGTRSTRRRARAVHKRIAGRERRFQRDINHGISRHIVDCACGHGPALACEDLTGIRQRTNTQRRTKTERRRSNSWAFAQLRLFLAYKCQAAGVPFVLVDPAYTSQMCHGCFVLGDRAGKRFMCRNSACAWWGDADYNGARNIARVGASVMCPGGPPLCCLYQPDGRATTSPGAFALGT

SEQ ID NO: 15407 - protein, 375 aa, unknown
  TnpB Polypeptide
VVFNDALRVRGEAYQAGIKMSDSEIQRRVITAAKTTEERGWLCEVPSVALVQSVNDSRRAWRNFFDSAAGKRKGRRVRRPRMKSRKDRRQSFRLTRNGFAIRDNGRLFVAKVGEVQVRWSRDLPSQPSSVSIIREPDGHYYASFVVDVAATPMESVDREAAVDVGLTRLATIAVSDGRRLDVANPKYLGRKLRKLRRLEREKSRRQKGSNNRVKTRRKVAVAHNEVARARRDYHHKQALALVRENQVIYIEDLTIVGMVKNRRLARAISDAGWAQFVKIITEKADRYGCAVHTVSRWLASSKTCAGCGHRLDELPLQIRWWTCPACAEVHDRDYNAAQVILAAGRAERLNDCGTCVSPHPVAAVGVETGSTPTAA

SEQ ID NO: 15408 - protein, 357 aa, unknown
  TnpB Polypeptide
MLQTLMVKLAPSQAQHADLLETVHQFNHACNYISEVAFEHRCANKIALQKIVYYDVREKFDLSAQMAVRAISKAVEAYKRDKSIKPTFKPEGAMVYDQRILSWKRADTVSILTLSGRQRVPIRVGEYQKARMDRIRGQADLIYRKGIFYLAIVVDAPEPSEFDPVGVIGVDLGIVNLAVDSDGESYSGEKVDTVRQKNTKLKAGLQKVGTKSAKRHLKKLSGKVNRFNRDVNHIISKNIVAKAKRTGKAIALEDLKGIRSQIRVRKGQRNRQHSWGFYQLRSFIEYKAVLSGVPVIFVDPRGTSHICPECGINERRNRPNRDTFKCVQCGFAGPADHIAAINIAARAAVNQPIVACV

SEQ ID NO: 15409 - protein, 377 aa, Fischerella sp.
VNTKALFPEYKTIHSQVLQDCVERVKKTFDRWLKGDQNGKKSGKPRFKGVGRYRSFTFPQMKQDCIQGKYINLPKIGFVKLIQHRPLLEGFKIKTATVTRKADGWYITLSLEDKSVPKLTPETPTFDNTIGIDVGLKSFLVDDSGQSIPIPQPSRKADKRLKRLQRSLSRKKKGSNRRKKAVKRVAKAYLKVSNQRKDFHYKTAKKLLSQGKHIAHEKLNIKSIARTRLAKSTHDAGWGQFLQILSIKAERAGLLAIAVNPNGTSQDCSNCGHKVKKELSDRWHSCPNCGFECDRDHNAAINIKYRAVGHPVLKAQETPDAVAGVTEKPALIVSMSVGSMSRCLDCVRGVCILMLGKWGWFATTEVVTTSPFTSGVG

SEQ ID NO: 15410 - protein, 419 aa, Leptolyngbyaceae sp.
MYEDFTYNNIMRTAYQYRLRLTQQQQATIDSWLELCRRQYNYRLAERFNWWTQNRCDVNACPLVCYLPELKDRPDFYSQKRDLVNSKRLFPEYKDLPSHTLQDVIARVEKTFDRWLKGDSNGKKTGKPRFKGQGRFRSIAFPDPVKAEHIDGRMIQLPKIGKLKMILHRPLPAGFQVKTAAIIKKVDGYYLTLSLQDSSVPVLSPDRPTMDNTIGIDMGLKVFLVNDVGEEVAIPQHYRKAEKRLKRVQRSLSRKKKGSNRRKKAIKRVAKLHLKIANQRKDFHYKTAKKLLDKGKKIGYEALNIKGIARTRMAKSTHDAGWGTFLQILEIKAARAGLSTIAVNPNGTTQDCSSCGQKVLKTIRDRWHSCPHCGLELDRDHNAAINIKHRAVGHPVLKARGVRRNSGTAKREARSLCEA

SEQ ID NO: 15411 - protein, 430 aa, unknown
  TnpB Polypeptide
MERRKVTFKLYPTKQEAERLTCWLSLHCELYNAALQERIEAYRKNGTTISYYDQQNALPQIKADRPEFIELGSHALQQTLRRLDLAFQAFFRRVKAGEKPGFPRFKSCKRFSGFSYPDPAGWKLHQEGKRGGMLRLGSGKQAMRIRLRGKHRFGDDVRPNDLTVMRKQGEWLASITLRVSTTSCARVRTDHQHRGIDFGVTDWATFDNGEAIANPRWTQTELPRLADLQRQRARKRKGSLRFKRLTRKIGRLYDLIANQRREFVHQETTKLIKTSAVIATEQLAPKNMSRSARGTTANPGKKVRQKSGLNREILSAAFGMAHQMLSYKAVEAGTRVHLANTRKLKPSQRCAQCWRIVPKTLTQRIHDCPHCGLVMPRDRNSAMVVLMIDAFTPGTGVAARQKPLTRQRAKSKSLTRETHSTTPYEVDYGV

SEQ ID NO: 15412 - protein, 411 aa, Limnoraphis sp.
MKTLKFKLYQHKRNRYLKLAINAAGVIYNHCIALHKRYYRIWGKHLNCADLQKHISKLRKRNKFWQLVGSQAVQDICQRIEKAYQMFFKHNKKGVRPPNFKKVKKYKSFTLKQAGYKFFSGNKIKIGSKVYQFWNSQPIEGKVKTVTIKRTPLGEMFLVVVVDNSNKPEVKSETKNGYEIEKRIKLSVGRTDLGCQQISESVLPCSSSVSTGKIAGFDFGLKTFLTCSEGFSIQSPQFLKQAFNDVKKASRNLSKKRKGSNNWEKARKHLARQHEKVVNRRRDWFWKLAHQLTLQFDVLCFETLNLKGMQRLWGRKIGDLAFGEFMEILEWVATKKGKLIVFIDQWYPSSKTCFHCGHVLEKLELAVREWRCPNCLKINGRDENASLNIKRVGASTLKLDGVRQAFPATVV

SEQ ID NO: 15413 - protein, 403 aa, Limnoraphis sp.
MIVLEFKVQGKTTQYAALDEAIRTAQFVRNKAIRFWMDNKGVGQKELYRLSKAIRHEFPFANALNSSVCQAAIERAYSSISRFYENCKKGIPGKKGYPKFNKNNRSVEYKTSGWKLSETRKQITFTDKKGIGKLKLKGTWDLNFYQIDQIKRVRLVRRADGYYAQFLISVDNKVETQPTGKSIGLDVGLKEFYTDSNGYSEPNPRFYQTGEKRLKFYQRRISRKQKGSANRKKVINKLGRVHLKISRQREEHAKRVARCVIQSNDLVAYEDLRIKNLVKNHCLAKSINDVGWYQFRKWLEYFGVKFGKITVAVIGAYTSQQCSNCGAVVKKSLSTRTHVCECGFELDRDWNAAINILKIALSTVGHTGTWILDQNALGDSTSTQVGEILPEQVGSVNKESPHF

SEQ ID NO: 15414 - protein, 353 aa, Dehalococcoidia sp.
MQVLTYKFRLKDGGSKRKHLNRWACAVNQVWNYCNEASFQILRKYSKWLSKSDLEKLTAGSGKELGLNSQVVQQVCKEFVQRRVQFKKMRLSWRRSHGTRKSLGWIPCTNQNVIVTGDFLKFGGKTFRFWKTREIPTKIKSVSFNEDALGHWYVNFMCEVEDIPQVGTVDLGIDLGIKTQATLSDGRKFERDNLTKKYEDRLAMAQRAGKKRLAKRIHNKVANIRKDFNHKTANTILKDARLVVVGDVSSTKLVKTNMAKSVLDSSWGQLKSFLIYKSRRLGTTVKEVNESWTSRTCNVCGAIGEHQGLSGLSVRDWVCPNCGAEHDRDVNAAKNILRIGLGHQTPIKGIPRL

SEQ ID NO: 15415 - protein, 366 aa, unknown
  TnpB Polypeptide
MEVKSGLKFRIYPSKQQQIMIDKTLGCARFVYNHFLRIRMDEWNCNHNSLQYKDTNLMLTDLKKYPEYSWLKEVDSTSLQNSLRDLQKAYDNFFAKRTGYPHFKSKHNYYLSYKSQCVNNNIRVIDDRVQLPKIGRVKTKFSREVVGKISNATITRTASGKYFVSLCVTYEADVLPNAGSQLGIDVGLKEFYSDSNGNTVANPRTLRKWSRKLAREQRKLSRKMPQSHRRDKQRVRVARIHEHIANIRQDFLHKLSTKLVRENQTIAIEDLKVKNMMKNHKLAKAIADVSWSEFFRMLEYKASLCGSEVIRIPTFYPSSQTCHSCGYQNPITKDLSVREWDCPECGHHCDRDVNAAQNILAVALAS

SEQ ID NO: 15416 - protein, 388 aa, Paenibacillus sp.
MLRSYKTEINPTPEQIQVIKKTIGVSRFVYNFYLAHNKEKYKNGEKFVSGMEFSKWLNSVFVPGHLEYSWIKQVYAKSVKQSIMNAEKAYKNFFKRLSEFPRFKKKNNQDVKMYFVKNDKKMIIRCERHRIKIPTLGWVCIKEKGYLPIKSLIKSGTISEKAGRFYVSVLIEEETSFVSTDLNDGIGIDLGIKDFAVVSGIDKPFKNINKTARVKKIEKSLKRQQRKLSRKYESFKKQNKTKGGTATRQNIQKQVLKVQKLHQIISNIRENYINQVVNSIIKQKPRFITIEDLNIRGMMKNRHLSRAIAGQNFYRFRVKLAARCIRYGIELRVVDHFYPSSKRCSCCGVIKKDLKLSDRMYTCECGHKMDRDKNAAINLKNAETYRVA

SEQ ID NO: 15417 - protein, 402 aa, Streptomyces sp.
VIRAYKFLLRPTARQAVALGEMLRDHCSLYNGALQERRDAWRHSSKTSIKYGDQSAQLKEIRAFDPERQGRWSFSSQQATLRRLDKAFQAFFRRIKAGQAPGYPRFKGVGHFDTVVFPKDGDGCRWDSTPHDPHTRVRLQGVGHVRVHQHRLVQGRVKTISVKRDRNRWYVVLSCDDVPAEPLPSIDAVVGIDMGTTHFLSTSDGEHVANPKFLDAAAVELADAQRHLATFPKRTRQRTKKHRAAARKVAKLHAKIRRQRLDFHHKTALALVRDHDAIAHERLNTAGMTRAPKPKPDPETPGVFLPNGAAAKAGLNRSILDAGWAQFLGILANKAESAGRLVVPVDARNTSRTCLACGHVAKGNRATQAKFECVTCGFTANADHVGATNVLNRAGLVLCKVA

SEQ ID NO: 15418 - protein, 624 aa, unknown
  TnpB Polypeptide
VTTATTAAVVSAGTSTPAVEPKPTKKPGPKRREFRSDWSPGAYRFTLDLDDRQEAALTRAVGAARFAFNTVLAEVKANLDLRSAEKTPVTEPLNWSAYGLRAVWTGVRDDAAPWWGQVPKWAFDTGTAQCADALKNWAASKNGTRAGRKMGFPRFRSRRRPGAQSIRITSHDKIKVGAVQGARDNRHIVLPGGLGGQVRTFENLKRLTRRIQAGSAAVTGATISRTPSGRWAVIIHVQQHQPVPGHGQMSPTGAPPSGTTRTAGPEPELAQEELLEPAADTHEPAGRSSSSSSSSSRSSSSASRPRSSCSSSVVGVDLGVGAQNLMVVADPDGVEVWRVENPKALDRVHSQIARLQKKIGRAHRVAVAEGRVDAAGRPVDSQRVLALRARIARLHRRAADIRADSLHKATSHLAAAGHGTIVAETLNVAGMMRRGGSRKKGLNRAFADAALGEVGRQVGYKTEWAGIRLVHAGRWFPSSKMCSRCAAVKPKLPLSVREYRCDHCGLVLDRDCNAAANLARVGVDPSWETSGWVDVGGKQQAVPTRAASPGQGSRHQTNNENTPASGRGSRRKPRSGADGGHGADPHQGRELRTLTSAAAGAGPHGEGTGNRHGGPRLSHQSQQD

SEQ ID NO: 15419 - protein, 234 aa, Synechococcus sp.
MRLNGNMATEVAKGAFLPALKYGASSPTRCEIAKTSTDKGWDAKQLNQVRDHFAKVRASLQQKASKGTRSSRRRCRQVLQRLSGRERRFQRWLNHSISASIIREAKQLHAMVAIEDLTGIRDRINQQPRNTTERRRSNSWAFYQLRQFLEYKGIKEGVEVVAVPPAYTSQTCHCCLHIGLRTEKKFKCGHCGWIGDADLNGAINIALLGQSVTLPGGSWLACEIAGGLQKASPF

SEQ ID NO: 15420 - protein, 435 aa, Synechococcus sp.
MMFLAVQKDIFQPDKQLAQLLTELARLANNLYNQGVYESRQYFFEQGRKPFKVLKYVNLYAKLKESENGKLLHSQAAQQVLKSVNEAFKSFKSLSKLFKLGQFEHEPKLPRYRTKGGLYQVVFTGQSLKVEKGLIRVPLGNGGKAAVGRDAFYIPLPERLKDVHIRELRFIPTNGQWVVEYVYFTMDKTAQCCKLCPENVLALDSGLNNLLAGVTNTGLAFVLDGRGLKSRNQWFNKQVAKFKSILTHGKPSMKGATSKRIQLITHKRNCYVRDYINKAARWVVNFCLENDIDTIIYGRNNGQKDEINLGAKTNQEFVQIPHYKLFGRIKQLCLIFGIRLVETEESYTSQASFFDNDFLPTFGEKPEGWKASGKRILRGLYRTAQGWLINADCNGACNIMRKVSTKLNIDLSGVCRGAVAAPSKVKLEQIGFALA

SEQ ID NO: 15421 - protein, 389 aa, Synechococcus sp.
MPQQILTIVCQLNPTAEQIVKLDQVLQGFAEACRYINSTICPSITNKNRIQKEVYRAVRQQFGLTANLAVRACARVAANRKVGKVKGFRATSVDYDARLFDYRAKEQCVSLSTLNGRERIPLVVGNYQIEKLKGKKPTSATLCKRKDGKFYIHIQVKEEVPEPQTGHGVLGVDFGRTDIAHTSEGDNWHGQQLTKVRDHYSKLRAVLQHKASKGTRSSRRRCRELVKRLSGRERRFQAWVNHCISKTIVARAKATGSVIALEDLTGIRERTNQVPRSKTERRRANSWAFYQLRSFISYKALKAGVGLVLVNPRYSSQTCHSCLHIYPDPKQSYRTGKQFKCGHCGWTGDADFNGASVIALLGAVVNQPRGSGLSCSLAEHNRLRATESP

SEQ ID NO: 15422 - protein, 283 aa, Synechococcus sp.
MLVREAKLLNGTAEQYQALDEAIRTAQFVRNKCVRYWMDNKSVNKAVLYAHCKDLSKEFAFAKKLNSSARQASAERAWASISRFYTNCRNKAIKKGYPKFKKHCRSVEYKVSGWKLSGDGMSITFTDDFNAGSFALYCNGEARHHILNSKINRVRVVRRADGYYAQFCLDVERKEQGQYTGNVIGIDLGLKHFYTDQNGNTVDCPKFLRRSERRLKQHQRRLSRKFRKGAKPQSKNYHKQRKRLGKVHLKVQRQRKDWAIKQARCVVASHVRLWRRGALCRGV

SEQ ID NO: 15423 - protein, 205 aa, Synechococcus sp.
LQQGLRHLQSAFSNFFAGRAKYPNFKKKRNGGSAEFTGSAFKWKDGKVFLAKCSEPLTIRWSRQLPDGVEPSTVTVRLNPAGQWYTSLPFDDPRDLTLPPSTNAVGLDVGISSLVTLSTGEKVANPKHLDQRDKQLRRAQKALSRKQKGSRNREKARLNLARIHQQIANARQDHLHRVTTRLIRENQTIAVACAGVGLSQLWSPP

SEQ ID NO: 15424 - protein, 427 aa, Synechococcus sp.
MRVIEAKLKGTQEQYQSLDEAIRTAQFVRNKCVRYWMDNKGVGRNDLYAHCKTLAQEFDFAKKLNSAARQASAERAWASISRFYTNCRNKEAKKGYPKFKKHCRSVEYKLSGWKLSADGLSITFTVRVSGTESFGFSAGTFALYCNGEARQYILNSKINRVRVIRRADGYYAQFCLDVERKEQGQYTGNVIGIDLGLKHFYTDQNGNTVDCPKFLRRSERRLKQHQRRLSRKFRKGAKPQSKNYHKQRKRLGKVHLKVQRQRKDWAIKLARCVVASNDVVVYEDLQVKNLVKNHHLAKSIHDASWSQFTQWLDYYGKVWDKAVVSVPPQYTTQDCTHCGHRVPKTLSTRTHSCPKCGFELDRDQNAALNILKKGLSILGMEWQNSTFGQKGTGEKSRTTGEISTSAMDGKPEMVSAVAELVTRIPCL

SEQ ID NO: 15425 - protein, 290 aa, Synechococcus sp.
MRVIEAKLKGTQEQYQSLDEAIRTAQFVRNKCVRYWMDNRGVGRNDLYAHCKTLAQEFDFAKKLNSAARQASAERAWASISRFYTNCKNKEAKKGYPKFKKHCRSVEYKLSGWKLSADGLSITFTVRVSGTESFGFNAGTFALYCNGEARQHILNSKINRVRVVRRADGYYAQFCLDVERKEQGQYTGNVIGIDLGLKHFYTDQNGNTVDCPKFLRRSERRLKQHQRRLSRKFKKGAKSQSKNYHKQRKRLGKVHLKVQRQRKDWAIKLARCVVASNVRLWRRGALCRGV

SEQ ID NO: 15426 - protein, 410 aa, Synechococcus sp.
MEYGCQQVFINDKGLMPILEYLCQQSNKVYNCALYYARQVYFKTKRLVSYANLCAEMTRTKNKHFMAMYVSSAQQTCKSVAEALSSFKANLRLGAKPRLPAYRKAGLFTVAYPKKWLKIHEGQVRVPLGLQVKAWFGIDTLWVQFPTNLQWEDIKELRILSRNGAFYLEWVYVKPPEPKPLDPAKALAIDHGVNNWLTCVTNLGHSFIIDGRKVKSFNQRYNKQVARLKTGKPQGFWSRQLDSITEKRNRRMRDAINKAARLVINYCLDHSIGKVIFGWNKGQKQESNLGRVNNQNFVSIPTGRLKQRIAELCQHYGIEFIEVDEAYSSQASFSDGDELPNYGEKPDGWQASGKRVKRGLYQTAKGWLVNADANASANLLRKVSRTLGLCLKELCRGGLLTPLRVRLWTT

SEQ ID NO: 15427 - protein, 229 aa, Synechococcus sp.
MLINKAYKFRIYPNQEQEQCFAHHFGCVRFVYNRMLALFKETRQFNKKGFVKYQVTAPRYFRKAEARISRLQQVLAAKQKGSNNWRKVKKKLAIAYERVAFKRADLAHKISYQLTQENQLVGLETLNIQGMLRNHCLAKSVSDAAIRVLHVYTTYKGKWYGAAVQFIERWFPSTKLCWDCGSLNDNLTLSDREWTCPSCGRQHVRDVTAAWNILQEAVRLLPGNPELSP

SEQ ID NO: 15428 - protein, 429 aa, Synechococcus sp.
MFGCQQVLLNPNNELKGVMEFVCSEANKLTNQGIYYARQLHFKTGQWIGKHSLSYEYKTSKHFQALYSQAAQQTLISVYESFKSYRALLKLWQGGELAEKPKMPNYRKKGGLAVVSYPKQALKLVDGMIRVPLGQLVKVWFQIDSFTVPMPSNLKFEDIKELRILPRNGCFYTEFVYRLKPVQIDVDPMRVLGIDSGLNNWLTCVSNVGTSFIVDGLHLKSLNRWYNKQIAKLKEGKPQGFWSKRLAQLTEKRNRQIRDAVNKAARIVIDHCTRNRIGRIVFGWNPRQKDGSNLGKKTNQKFVQIPTARLKERIAQLAEQYGIEFVETEESYTSQASFVDGDFLPTFGEKPDSWKSSGKRTKRGLFRTAQNWYINADCNGAANILRKVATMLGLSLSGVGRGSLTAPTRIKLWVTAQGKSEATRLQPVA

SEQ ID NO: 15429 - protein, 206 aa, Synechococcus sp.
LRPITTTNEQRLALAKSFGCCRWYWNYSLNLCQETYQSTGKGLSRSAIQGVLPSLKKQHPWLKEAYSQCLQVVALNLSTAYKNFFEGRAKLPRFKSKKGRQSMTYPQNVKVEGDDVKLPGNVGTLYCCQHREFEGKIKSATVSLNPDGKYYVSLLVEDGREQPPPSPEGKAIGIDLGLTHFAITSDGSKFDHPRHLAKHARNLKRK

SEQ ID NO: 15430 - protein, 420 aa, Synechococcus sp.
MLVREAKLLNGTAEQYQALDEAIRTAQFVRNKCVRYWMDNKSVNKAVLYAHCKDLSKEFAFAKKLNSSARQASAERAWASISRFYTNCRNKAIKKGYPKFKKHCRSVEYKVSGWKLSGDGMSITFTDDFNAGSFALYCNGEARHHILNSKINRVRVIRRADGYYAQFCLDVERKEQGQYTGNVIGIDLGLKHFYTDQNGNTVDCPKFLRRSERRLKQHQRRLSRKFRKGAKPQSKNYHKQRKRLGKVHLKVQRQRKDWAIKQARCVVASHDVVAYEDLQVKNLVKNHHLAKSIHDAGWSQFTAWLDYYGKVWDKAVVSVPPQYTTQDCSNCGHRVVKTLSTRTHSCPRCGFEMDRDQNAALNILKKGLSILGMEWLNGTFGQKGTTSQEGTLGERCTSAFDGQPDEVSALAEPRTRIPCL

SEQ ID NO: 15431 - protein, 385 aa, Synechococcus sp.
MKQTLTLVCKLATTPEQNAKIEAVLQAFAAACNYANERVKPKTTSKTTIQSLVYNDLREQFGLSANQAVRVCARVGANRKTAKVKGKPVKAFRPTSADYDARIFSFREKDWTVSLTLLGCREHIKLEIGHYQRGQLKGCKPTSAQLCKHRDGRYYIHIQLSDEAPEPIQSDKGIGVDFGRREIAKTSTDQGWDAKQLNQVRDHFAKVRASLQQKASKGTRSSRRRCRQVLQRLSGRERRFQRWLNHSISASIIREAKQLHAIVAIEDLTGIRDRINQQPRNATERRRSNSWAFYQLRQFLEYKGIKEGVEVVAVPPAYTSQTCHCCLHIGLRTEKKFKCGHCGWIGDADLNGAINIALLGQSVTLPGGSWLACEIAGGLQKASPF

SEQ ID NO: 15432 - protein, 381 aa, Dehalococcoidia sp.
VNISRRYRIYPNKKQEVILSKHFGCVRFVYNHMLALKVNAWENNKISLSRFQLSSLLPQLKEAEETCWLKEVNSQSLQVALADLESAYSKFSRDKTGFPRFKNKHGKQSFQAIQNIKVLDRAIKLPKLGKIKTIIDTPLVGIVKNITVSRTTTGKYFASVLCEIDEPIPEKLPITEAGTIGIDLGIKHFATLSTGEKIENQRPLKKRLKRLQRAQRKLSKRTRGSKNRDKQRKRVALIHEKISNTRKDFLHKLTTRLVNDNQVDSFAIEDLAVKNMMQNRKLARSIADVGWGEFRRQLEYKAERKGKNILVIGRFEPSSKMGPCGHIKEDLKLSDRIWTCHCGVTCDRDINAARNIKRFALHPQNFVGRDAPELTLEEIGC

SEQ ID NO: 15433 - protein, 555 aa, Scytonema sp.
  misc_feature (318)..(541): Xaa can be any naturally occurring amino acid
MLVLEAKLKARQSQYNSLDEAIRTALFIRNKALRHWIDNKDVGKNDLQKLCAVFAKDFDFAGKLNSMARQASADRAWFAIKRFYDNCKAKKPGKKGYPKFKKRGHSVEYKTSGWKLSNDRKYITFNDGFESGRFKLVGTRHLSFYSLKQIKRVRVVKRADGYYCQFCVDVERKEEHQHDGRQLGIDVGLEFFYTDSDGKTVENPRLLRKAEKSLKRKQRQVSKCKKRSSNRRKAVKKLAKKHLKVSRQRKDFALKTARALVQSNDLVVYEDLQVKNMVKNHRLAKSISDASWSLFTDWVDYYAKVFGTWAIAVAPHYXXXXXXXXXXXXXXXXXXXXXXXXXXXXXXXXXXXXXXXXXXXXXXXXXXXXXXXXXXXXXXXXXXXXXXXXXXXXXXXXXXXXXXXXXXXXXXXXXXXXXXXXXXXXXXXXXXXXXXXXXXXXXXXXXXXXXXXXXXXXXXXXXXXXXXXXXXXXXXXXXXXXXXXXXXXXXXXXXXXXXXXXXXXXXXXXXXXXXXXXXXXXXXXXXXXXXXXXXXXXXXXXAKMRLNRRYYEPAE

SEQ ID NO: 15434 - protein, 317 aa, Scytonema sp.
MLVLEAKLKARQSQYNSLDEAIRTALFIRNKALRHWIDNKDVGKNDLQKLCAVFAKDFDFAGKLNSMARQASADRAWFAIKRFYDNCKAKKPGKKGYPKFKKRGHSVEYKTSGWKLSNDRKYITFNDGFESGRFKLVGTRHLSFYSLKQIKRVRVVKRADGYYCQFCVDVERKEEHQHDGRQLGIDVGLEFFYTDSDGKTVENPRLLRKAEKSLKRKQRQVSKCKKRSSNRRKAVKKLAKKHLKVSRQRKDFALKTARALVQSNDLVVYEDLQVKNMVKNHRLAKSISDASWSLFTDWVDYYAKVFGTWAIAVAPHY

SEQ ID NO: 15435 - protein, 377 aa, unknown
  TnpB Polypeptide
LKIKRIHKGGETVQITVQAKILPNKEQSNSLNFATKEYIRLINQIVSDYVTAEKDLKYTSKTIRAELPSAVKNQAIQDAKSVFKKYKKNVRANARLRTEDQKEIKIPILKKPVAIWNNQNYTIKDNLISFPVCMDGKSKRLQVPIILTDYQKRLLTNKLGSLRVSQKSGKYIAQIAIHVPESVARGNQAMGVDLGLKIPAVAVVKDGKTKFLGNGRQIKYSKRKHCSVRRKLGKLKKLEAIRKRDNKEQRWMKDQDHKISRQIINFAQDNNVSVIRLEQLSGIRQTARTSRKNEKNLHSWSFYRLAQYIEYKAVQAGIQVEYVNPKYTSQTCPNCGERNKASDRKYQCGCGYKGHRDRVGALNIISAPVVDGNSLSA

SEQ ID NO: 15436 - protein, 434 aa, unknown
  TnpB Polypeptide
MIRCLHSSFHTSKDDLNRLFACNRISALVWNKVLDLSKFYRIITNGKWITESDLKLVLKNIYPIYSESVQAVIEKYIQNREDTLLANKKGFKNKYPWKYKYNFPTTWKVHGFKIKDNILELSLAEFNRKRQSKIKIILPKHTVKELKSKQIQQIELIYKHQLLLSFMYKIKDNNKKINNNNIVGIDFEQSSKQQVAEVDSRTSSIQPMTGVDLGEIHSITTYTNTNKNCIITGRYLRSLRRLQDKSLGKLNHMLSRCVKNSKRYKRLKRAKRRMLMKTNNQIKDCNHKITNELVKFVKQNNISKVIIGDIKGIEKNTRKKNFGNKHNGRLSKWNYGEHIRQIKYKLDSIGVDVELINEAYTSQTCPCCGKRNKCKTRNYRCTCGYKCHRDIHGARNILNKYIYKKIYTEGLEIEEVKYITYLRPLKNKRANKVS

SEQ ID NO: 15437 - protein, 422 aa, unknown
  TnpB Polypeptide
MMRIKVKRNAKLIGLDTREIDEDHKRTIQLCRRVSKYIRKEIVDGNIVEINKRVIYKDGTSLDNTAFKNKVSHLFDDDAHSESLRRNSVIYVMERYAGYISRNGLDRFLKIKSPISIKDTSFYFKDNFNKIDKENKILYVKTMFTGDREYRKVPYKYVLKGDKISEDKKHGGNLTFPRKKNKAKTYVIAVDYEREPAYEPEKLIGFDLNKDKKSWIVLDDGQRITPNQQIQDSTENIRVLNTTLDKDKKAPIDKRSLRSKDRRPIRLKWKKAHSKLKAEISKVAETVVNKARDEKALLCIDSVTTGQKNGTFGQDHLIETLQVMCENQGVPFYVVPCKNTSRRCSSCGYIAKGNRVNTDEFHCEDCGHKCDAQNNGAKNIVFQGQRMYNAGVPYGNYRRRAVDTLVKEYSQQESSVDTSEAS

SEQ ID NO: 15438 - protein, 393 aa, unknown
  TnpB Polypeptide
MDRINIHKVYKFRIYPNKEQEILLAKHFGCSRFVYNYFLNERKEQYQKDKKSDNYYTQAKTLTDLKKKEEYEWLKEVNSQTIQFALRSLDTAYVNFFRGTAQFPKFKSRKHKNTFTIPQFGVVKDSKILIPKFKDGIKANLDKREIKGKVGKMNITKTPTGKYYVSIFTEQEIEQLPKTNKKVGIDLGLKDFVITSDGIKYKNNRYTNKYSRKLKKAQQHLSRKKKGSNGFEKQKLKVAKIHEKISSCRLDTLHKVSYQLVKENDLIVVEDLNVKGMVKNPKLSKHISDVSWGNFVNLLNYKCDWYGKELVKVNRFYPSSKNCNCCGWINQNLKLSDREWNCKCGEKHDRDLNASKNILKEGLKIYGKGLAITKVERKSDFCEEAYSVKPETH

SEQ ID NO: 15439 - protein, 386 aa, unknown
  TnpB Polypeptide
VRKLLKSFKTEINPTPDQKVKINKTIGTCRYIYNFYLSHNKALYDKGEKFMTGKSFSVWLNNEYIPNNPDKAWIKEVYSKALKRSIEDGCTAFTRFFKHQSAFPNFKKRGKSDVKMYFVKNNLKDCKCERHRLNIPTLGWVRIKEKGYIPTTKDGWNIKSGTVSVKAGRYYVSVLVEVPDVNIRNNTNDGIGVDLGVKDMAVISDGKIYKNINKSARLKKLEKQLRREQRCLSRKYENLKKGESTQRNIQKQRLKVQKLHHKIDNIRTDYINKTIAEIVKTKPSYITIEDLNVSGMMKNKHLSKAVASQKFYELRIKLKDKCDDNGIELRVVDRWYPSSKICHCCGNIKKDLKLSDRIYRCKCGYVEDRDFNASLNLRDAVTYEVA

SEQ ID NO: 15440 - protein, 390 aa, unknown
  TnpB Polypeptide
MDIGWKDSALSAIIKAKAGDTMKTYCFKLYASKRNRKLHREINAAGRIYNHCIALHKRYYRLYQKSLNVYALQKHLTKLKKLPRFSYLKEIGSQAVQDITQRIDRSYKLFFKNLNRRVRTTPPSFKKVKKYKSYTLKQAGWKLLEGNTVQIGAQKYRYFKSRAIEGTVKTVTVKRDALGDIYLYFVCETAENEVLARTGKSVGYDFGLKQFLTASDDKDMEAPLFFKKNADAVRRAGRELSRKRKGSNHRRRARLALARLHKKTANQRKDFHFKLANAICGEYALVCIEDLNLRGMQKRWGRKISDYGFADFVKILAHQAGKTGTTIQKVDRYYASSQTCHICGNQNPGTKDLRVREWTCPHCGTAHDRDRNAAINILKVGASTFFGEAL

SEQ ID NO: 15441 - protein, 405 aa, Bacillus sp.
  misc_feature (203)..(396): Xaa can be any naturally occurring amino acid
MGVKRMMINKAYKFRIYPNQAQATLINKTIGCSRFVFNHFLSLWENAYRETGKGLAYGTCSAKLPAMKKEFVWLKEVDSIAIQSSVRNLADAYTRFFKKQNSAPRFKSKKNNVQSYTTKQTNENIAVLGNKIKLPKLGLVRFAKSREVKGRIVNATVRRNPSGRYFVSLLVETEVQELPKTHSYIGMDVGLKDFAILSDGTTXXXXXXXXXXXXXXXXXXXXXXXXXXXXXXXXXXXXXXXXXXXXXXXXXXXXXXXXXXXXXXXXXXXXXXXXXXXXXXXXXXXXXXXXXXXXXXXXXXXXXXXXXXXXXXXXXXXXXXXXXXXXXXXXXXXXXXXXXXXXXXXXXXXXXXXXXXXXXXXXXXXXXXXXXXXXXXXXXXXXXXXXXXXXXXXXXXGLPFLSYTP

SEQ ID NO: 15442 - protein, 410 aa, Streptomyces sp.
MSRFRMYPTPAQAEQMLTHCAHARYVWNLAVEQHSRWRRWRKSAPGFAEQCRQLTEARRVNEWLGAGNADVQQQALKDFAKAKNARFTSGFGEPTWRKKFRHEGFRVIGTDRVPEYNEDGSPKLNAKTGKQVLGRSVVVQKLNRRWAQVKVPGCGWVRFRLSAKGKGAKLPHAKTFRVTFRNGQWHIAFAVIPGLTPAPGTGEVIGIDRGVTITAALSDGRKLNCPQLTVKERAQIRKHERRAARAKKNSPQKTAEYAKAAKLRAREANRRKDWCEKTSTMLARSYDVIRFEKLNIKNMTRSAKGTIEQPGKHVAQKSGLNRSILAQGWGLLRQRTEHKTPAGSRTFPPPTPACGAVPAVGSRRSRARAKPTSCACPAGSPATRMRTQQSMSRQDRAGFPAPGTQPVPEG

SEQ ID NO: 15443 - protein, 437 aa, Escherichia sp.
  misc_feature (365)..(408): Xaa can be any naturally occurring amino acid
VKRLQAFKFQLRPGGQQECEMRRFAGACRFVFNRALALQNENHEAGNKYIPYGKMASWLVEWKNATGTQWLKDSPSQPLQQSLKDLERAYKNFFQKRAAFPRFKKRGQNDAFRYPQGVKLYQENSRIFLPKLGWMRYRNSRQVTGVVKNVTVSQSCGKWYISIQTESEVSTPVHPSASMVGLDAGVAKLATLSDGTVFEPVNSFQKKQKTLARLQRQLSRKVKFSNNWQKQKRKIQRLHSRIANIRRDYLHKVTTTVSKKHAMIVIEDLKVSNMSKSAAGTVSQPGRNVRAKSGLNRSVLDQGWYEMRRQLEYKQLWRGGQVLAVPPAYTSQRCACCGHTAKENRLSQSQFRCQVCGYTANADVXXXXXXXXXXXXXXXXXXXXXXXXXXXXXXXXXXXXXXXXXXXXRAVVIQRKKIACHKVNSDARYVDIQRTPM

SEQ ID NO: 15444 - protein, 309 aa, unknown
  TnpB Polypeptide
LANKQLDLQKAFKNHFDKNRKKKTGFPKFKSAKHSRKAYTTNNQGTTIRLFENGIKLPKVGIVKAKIHRQPEPDWIIKSATISQDSDGKFYVSVLFEYEAPTCTYVPDTANAIGLDYASDGLYVDDNGNVGTEHKYYRESHKKLAKAQRKLSRMVGSRKGETKSKNYMKQLQKVNKIHRHIVNQRLDNLHKISTEIANQYDVVCVETLNMRAMANKGFGNGKATMDNGNGMFLTMLEYKLSERGKLFVKVSKWYPSSQLCHRCGAIHPEMKDTHNRTMRCSCGLVMDRDHNAAINIKREGLRLLMSSAA

SEQ ID NO: 15445 - protein, 417 aa, unknown
  TnpB Polypeptide
MGYRRAQTNVRVQLIHLRLNPAQMAHCAALRQEAARCWNALLQAHLASRDGRWLSEHALQQQFKGQFALHSQTVQALAQKLIANVDTARALRKTDPAARYPYRAKLYQTVVWKQSAIRCTGAGIVLSNGQGNAPLVLALPAQFATTAILKCELTWRADHYELCLTLDTGALNPPLATHAVSAGVDLGEVNIAAVVTEDGTAISISGRYLRSVNRLRLKRHSALNSRMTRCTPGSRRHKKLLQSQARASAAFYRQSRDVLHKAACQLVNFARGAGVAHLAVGDVRDVADGTDKGRHHNQRMSLWAHGQFVGYVQDKARQYGIATEYIGEEYSTRTCSVCRHCHTRAPRGRVFTCAGCGAIISRDGNGAANICSRYRYGEYGQVQVQSLTYLRATAVVLRTTARLPTGVGSHGPLGPVV

SEQ ID NO: 15446 - protein, 414 aa, unknown
  TnpB Polypeptide
MLVRQAFRYELAPTAVQCAALANHAGAARWAWNWGLAVRRKAYRRRGETLTAVDLHRLLNRLKRTPMFAWLYEVSKCAPQEALRDLDRAYANYWRGRRRGRRVGLPRFKKRGRCPQRFRLTGAIRVEEGAVVLPRIGQVATKEPTGKFRGRILSATCRREADRWYCSLTVEVVRPDPAPVDGPVVGVDRGIHTFAVCSDGTSIESPRALERSLRKLRRCSRAVSRTQRGSRNRAKAVLALARCHRRIRNQRVDALHKATTALATAKSAIVVEDLNVAGLLGNRHLARAIADQGWAEFHRQLAYKCHWYGSKLLVAPRFFPSSRLCSACGALKAALPLDVRVFRCQVCGLVIDRDLNAARNLARLADGPAGSVAASSAETQNACGEGGAGQAGNSLVELPSAKQERTRISTLTDA

SEQ ID NO: 15447 - protein, 435 aa, unknown
  TnpB Polypeptide
MIGYITRKDRVFINTSILKTPCFSYGDEKMAARRRDILDVYTIICYNVSMQQKRAYKYRVYPTGEQKHVLARTFGCARFVYNWALRQKTDAFYQEQQRLSSKDLSEALTFLKQQDDYAWLSEVSAVPLQQALRHLEKAFLNFFEGRAKYPTFKKKRNRQSVTYTSNAFKWDGTSLTLAKMTDPLDIRWSRPLPDGTTPSSVTVTKDCADRYFVSLLIDEDIKQLEPVKQSIGVDLGLKEFVILSTGETVGNPKFFHKDEKKLAQAQRRHAKKRKGSKNRAKARVKVAKIHARVADRRRDFLHQLSTRLIRENQTICVESLQVKNMVKNPKLSKAISDVGWSEFVSLLSYKAQWYGRHLVKIDTWYPSSKRCFDCGHLLDSLTLDVREWTCPECGVVHDRDLNAARNIHAVGLTVFEACGEAVRPGRAKARVGKPR

SEQ ID NO: 15448 - protein, 388 aa, Streptomyces sp.
LIVVTFGIRVTLPVTLCEGVGVHAESETPHLGSALDAAYKNFVDAVKGRRHGRKAGPPRYKSRKDTRQSIRLTTNAFSLQDNGTVYVAKVGNLKVKWSRQLPAAPTSLTVTKDRSGRYFLSFVVDIEPGILPRLKTDAGLDLGLSAFAVLSDGSKIDSPRFLRRAEKKLRRVQRELSRKAKGSKNRAKARIKVARQHAKVADRRRDWHHKASTQIIRDNQAVYVEDLAVSSLGSTRLAKSVHDAGWSAFVGMLEYKAVKHGRTFAKVDRAFPSSQLCSACGIRDGHKPLHVREWTCRKCATVHDRDHNAARNVLFEGRRIVATGRVETLNASWSAGKTRTTVPAQRGEAGSPRRGQPTPAGFAGFKASEHVKMRACESSVCPTTIRKR

SEQ ID NO: 15449 - protein, 433 aa, Streptomyces sp.
MSRFRMYPTPAQAEQMLTHCAHARYVWNLAVEQHSHWRRGRKSAPGFAEQCRQLTEARRENGWLGAGNVDVQQQALKDFAKAKNARFVSGFGEPTWRKKFRHEGFRVIGADRVPEYSEDGSPKLNAKTGKQVMGRSVVVQKLNRRWAQVKVPGCGWVRFRLGAKGKGAGLPAAKTFRVTFRNGQWHIAFAVIPKPIDAPGTGEVIGIDRGVTITAALSDGRKLNCPQLTVKERAQIRKHQRRAARAPKSSDRKTAEYAKVAKLKAREANRRKDWCEKTSTMLARSYDVVRFEKLNIKNMTRSAKGTLAEPGKNVRQKAGLNRGILAQGWGLLRRRTEHKAPGRVEDVPAPFTSVRCSACGWIEKKSRKSQAEFVCVSCGFTCNADENAAMNVAAGQGGIPRPRRSAGAGGVTAATGRSSAREPQPTWVGIPLF

SEQ ID NO: 15450 - protein, 304 aa, Meiothermus sp.
MGPPGWPNRCPMGLIRARSASFGEGRWFYAVFTVKRSVPSRRPVGRVIAIDPNHKNLGYGVGTDGVATEILNPWFLKILDRRIDEVKSLRDRCPRKSVRVVRKDGSEAWLPSRRWRKLNEQLEELWRVRREQTKVYLRTVANRLYREYDGVFVGDYAPHGGGISRGMRRAMNHQSLIGRFKETLAWVAARSGKVYGEWDEDGSTRTCHACHYNVPGGIPPEVREWTCPECGTYHIRDENSSINGLEQVLKNLEVPGSGRLGDKIVVRTRRAWRFDGLGIAEVPGAVGGRVRDHAAGRQEIKCGA

SEQ ID NO: 15451 - protein, 376 aa, Halorussus sp.
LVEEWKRGCQLAVNEAWGVCHTRSEVQQLAYDRLREETDLGSQHAVLATHRAAEAIKRARDGEGSKPQFTSPTVAFDTRTMTVFDDRTVSLTTTGERVRCDLKLPDDGGYQSQYLDDEEWEPAKSTLHYRDGEFTFHLGFRTPSPDIDLPTEGATVLGVDLGVENLAVTSTAEFFPGGELTHRREEFEALRTDLEATGTRSAARTLRQAGNRLDRFVRQRLHEVANDIVAEAVEYDCELVAFGELSEAAELLPEATAYHEWLFDRLLSFVEYRAAERDIAVVEVNPEYTSQRCMECGFTHPQNRNLDESQFECLKCEASAHDDYNAAKNIAFRCVRRGPLSSRGLGASACALQSGLVTPDDGFTPYAELSEAPRSD

SEQ ID NO: 15452 - protein, 426 aa, Halorussus sp.
MSQTVTKTLEATLAPPTQHKEQKLQTLLSTYREALHEAFDAGCTTMTATNDIVTPYDLPYQTKDALKSYVPKLRDTYDARELDDDHPVRLVNRAAKFDYDDSREYGVCWNVPQPGRGTNFWIPLRLNPEQRDRWMDLLDDDHPASAGDLTLQQNRTTWTLHVTVEFPVESPDYSPTDGDVTHIGLDIGESALITGCALKDGLPTDPFVWNGGRARQLRNEMHTTLKRLQEREASEWRRDDRFDYYQNALTDIVEKASRAAVDYALDYQNPVLVMEDLAYIRENLDYGKYMNRRLHNWAFARLQGRVEDKAREAGIPVEYVRPEYTSQTCHSCQRLGRRDSQAEFRCPNDECHVSTFQADINAAANIARRIYPWGETCPLNPDGNDSPRDGSGSDTATTHRETSETPSQMTLSAYSGSKPSTRNENA

SEQ ID NO: 15453 - protein, 290 aa, Halorussus sp.
MEVQRTVRVKLDVPDERQDHLHQTIEQFTTAVNYSIENGRTDDGYLITAKTTIHDEVYHDLRGVTDLPANLCVRAYSKAVEMMKSTVADWKQGNSRPVPTFDQPTVVYDKRTLTINDRSATLSTVESRVEVNFDIGEYQANYLDDDDYEKRMGTLHYDNQEDEFYLHIVIQKEVKEREGDRVLGVDLNLKNVAVTSTGSFYDGGELLWGQNHYFRVRRSLQDKGTRSARQALARLSGRENRFVLDRLHTISRRIVNEARQYDCSYIAVEDLTHIRERMDASDDQLKRQMH

SEQ ID NO: 15454 - protein, 632 aa, unknown
  TnpB Polypeptide
MKRKKKEELFDIDSFIKDINDNIINTQNNFNFICDNNKKSTKDIDINNVNLSNVEKNINNYDLTDFIKFNSDYIYNNFDSFNKKIYTRLTTYFTNIDKYNFIVHFDLNTRINKQFFYFVNKYNNFNKLCIEKISDIVDAGINDYYNFILLIKDNKCTPFWNDKIKVMSNKLFLPTDNNLKKAQTPKLFNYDNWFETSHFIKLSNDVTDNLTVSIDNREYKSEIRCHNIKLYLNGRQTECIKRLIGAYRYFYNRAVSYINNYDKKRNISFYYTDVKDIKTLHEIDLNKEKNIFSFYTMRDLLKENYPEWVEKLNVPSHLISDAIKEASINYSSCMTKLKKYKTLFKLTPKTKKDKYQTISIENLSIVENTNSIFYNYKYRGEYVFRNLTSSTLLNEYEKICGSSITHNIRTNEFYFNLNFKDERIIEGKVLTKDEIASVDPGLKTFATVFSSNSVNKIGIGIMKKINKICLETDIINKKINSKNEENKNKRNHQQRRSLRKALHRKIKYLENLKKELHNKTVKFLCDNFGKIIIPPFETQKMVSKENKLSSKISRNLLNISYHKFLQKLKSRCRETGIVLVIRPEYYTSKTCTRCGNIKKELKGEDVYECKKCGLKIDRDTNGARNIMLRNIN

SEQ ID NO: 15455 - protein, 492 aa, Bacillus sp.
LDNDNPLAACTKRNHDEGHVHILFRFVPNIDLSKVILMNSLRKMVKIMARKKAVKVLRKQKKRETMQRFTQKQNIGRACLTAKEFRLLQRMSHSSKALRNVGLYTMKQSYLNHNRMATIKEVDTAMQADMNYWGVQSNSVQAIRRAVFTEVKSFFKVLEQWKKNPEKFTGRPKFPNYSRSTDKRIIEIYQVPKVDDSDECCIQKKIGSIKIRMPKNIRNKKISYIEIVPKQKGRFFEVHYTYEMHVSQMKKKSTTTSNALSCDLGVDRLLSCVTNTGDTFLIDGKKLKSINQYFNKMIRNLQEKNMDNGISKRVVTNKMATLWNKRERQINGYISQTVGLLFKKVKAFGIDTVVVGYNAGWKQKSDMGKKNNQTFVQIPFHKLMAAIENKCIKESIRFLKQEESYTSKASFLDKDPVPVWSKDDKMQYLFSGKRITRGLYQSKSGECIHADINGALNTLEKSKVVELEENLKVKTPILLEVQKRKAVASRIA

SEQ ID NO: 15456 - protein, 405 aa, unknown
  TnpB Polypeptide
MQKTRKLKIKNSEQLDQQFDELASASAELWNTICTWYWRTVDRQDHWLSQGAMMRWHCKGHSDFHSQTAQAVADQFYSSVKSWHAKGRKGKPPLDREKEWNKICWKSKAIKLRSDGQLRLSNGRGNEPVLINWPVDEEPKFVEIGWNQGYEVRATYETEVKDKTTGDKIAGVDLGEKHLAAVTTKDDSFLLNGGRLRAIRKYQNQTKALLQEKISRKERGSNRWKKLVKSKNKQLDHLDNKITDLLHKLSRKLIDMCLERDVSTVVIGELKGLRENVDYGQRMNQRLHQWAHGRFANYVEYKAEENGIEVEYVNEMYTSQTCPRCKTAKESHKNGRKFKCSSCGYEAHRDSVGAWNIREKYASEEEENRASSCLSGAMASPSGVRFHSQLPCSSRSKGLCMPSPC

SEQ ID NO: 15457 - protein, 436 aa, unknown
  TnpB Polypeptide
MSKRKNKLPTEIVLTYKAKQDYNLDNILNEFIKIAQKAVDIIWKNINWKEKKVKHRYKVKKKYKYYTTIRLIPEIPKDKTFKRELRNILLKNWNFASHYIDGAIKVAYSTIESWKSNYLNGKRGRNKPIFKRPFVRVKNTLIKYDKEKGMIRITIKPRREYLTLNIKNEWFFDKVRDFTIGEVILKDKEALITFKKPLNLSDKRILIGIDSNLKSLDLYHPEKGWIRIDLFELHRIKRVYDIIIDRLKSIYKRAPKRIGKLLKKYWNRRKNRVNDFISKLTSQLSKLFPDAIFVFEDLDKLSMYGNNSSFNRCLDRSSWRDIARRLKYKSVVFYVNPHYTSKTCPVCGSRMKSQEGQVVKCDKCGVFDRQFVGCFNVFKRGVGLVKKLLGGVGVPVSGVKVNDLLSNEPRGELRLMPPNPDVRYIVDLNGRALLQV

SEQ ID NO: 15458 - protein, 236 aa, unknown
  TnpB Polypeptide
MLKLSKIGMVKITTHREITGTVKSCTIKKEYSGKWYAVLAVEEYPVLYSPNRQAIGIDVGVKEFATLSNGETISNPKHLEKSEKKLKTLQRSVSRKKKGSKNRIKAKKKLARQHEKVRNQRKDFHHRVSSQLAWKYGKIAVEDLRIQNMVKNHNLAKSITDAGWGEFVSMLTYKAESAGREVTKVMPHGTSQQCSRCGNIVKKDLSVRTHACPHCGLVLDRDHNAAINILYKVKAS

SEQ ID NO: 15459 - protein, 407 aa, unknown
  TnpB Polypeptide
MAMERMHRQRRPVLLQAKKKRPRENQGRHDGRTRIPRARLPDEAVPRQDHPIQHQNTRNPQETRPQDRNGRVHERGQVARTPTTGDHVRIRGQKARIQNIPGWVRVRGVGQLEGWEQAKAVLTSEADGWHLHVTCYMDKEEHRKRREAKRLAPVKNTIIGLDMGVKTAITCSDGTEYDVMVEETDRLKREQRKLNRKKKGSNNRQRNRMRIRRAYTKQQNRLNDAANKTAAELLRNETIFMQDEQVKAWHRRYGRKIQHSILGRVKNRLTRHAGQVVVLSKWEPTTQLCPVCGTKTRIPLERRIYKCATVDIRPQETSKPLRPWSGWDNPNIRTKYPWNEGNTSLWRTHRSHTWTICVCSPCVGEAGNRDGFSLTVVHRRCTVGSNRSRSTGGTRSRPFVRHVRHRV

SEQ ID NO: 15460 - protein, 394 aa, unknown
  TnpB Polypeptide
MNRTCIVKLSHLSKNVFERIRFGQIESAKVWNYCTEQLKLCFEKKREWVKKYDLQFETKGKYALHSQSVQQTCRTFVGCVEQTRKNKKIDKRRRYPWKEKKFMPILWPAQAMSISGNKVILPMGRGRKNLVFDKPDWLKEKAPSKIIWNSGYEWHITIEKPNKCKSDIVQEKPAAIDLGQIHLGAVVTETGESVIVSGREIRSLKRQQNMVIAKMQKRISKCRKASKLFKKLVRSKKRFLTSMRRRIRDVRHKATRQIIEFCKENNVTKISIGDPSGVQKKKCGKKHNQRMSQWEFGKDIQYITEKAKEYDIDVSKCSERGSSSTCPKCQHRQKVSGRNWECKSCGYKEHRDIVGAINILRNNIGFTVESLSTTYLQPLKNGSSRCSDTSQLAA

SEQ ID NO: 15461 - protein, 218 aa, unknown
  TnpB Polypeptide
LAFLRWYLSLYTINTCELVQDARGHWYACITVKEFPKTVCGTGQVGIDLGCKDAAVSSEGDQLQIKVTHQYAEKLAIAQRAKNKKRVKVIHAKIKNTRQDLIHKFTSKLVKANSLIVVGKIKSNSFTSSKLAKSVYDAGWFEIKRQLDYKCANAGCHYIEVNEAYTTQTCSCCGSRQDSPKGREGLGIRAWFCRSCKTTHNRDVNGAKNILAVGLGRL

SEQ ID NO: 15462 - protein, 363 aa, unknown
  TnpB Polypeptide
MNKGIKFRAYPNKEQQNLINQTFGCCRFIYNKGLAMRNDAFVNGQKIGYVQTSAMLTEFKKQEGFAFLKDVDSIALQQSLRNLDHGFKNFFEKCARHPRFKSKHNNHQSYRTINQGDNIRIVGKYIKLPKLGYVKIKQSMEVGHINNVTIERTPTGKYFVVLNINFEPELRPNNGRMVGIDVGIKEFYSDSNGNVVNNPKYLEKSMHRLTREQRKLSRKRKDSNNYNKQRTRVAKIHEKITNQRNDFLQKQSTMLVSENQTICIEDLNIKGMMRNHKLARAISSVSWGEFFTMLEYKATWYGNDIIKVPTMHPSSQTCSCCGYKSPLVKNLAIRSWECPQCHTKHDRDTNASINILNKGLSIA

SEQ ID NO: 15463 - protein, 443 aa, Desulfurococcaceae sp.
MENTLKTREVVRTYSVPINNERIRELITWYSEMLQRTIEKIWSSIIWEYRFPEIVRKKKGIKVKIGRKIRVPKIPSDKNFKKKLRDSLLTQCPYAKHWVDAVIRTAYSIISSWRKRYLKGKARKTMPRIRRRFARCKITLMRVDYERKIIRVTLRPGEYLEISWANRWFINRVRGWSVGEIIIKDARVLIPFKKNEVEIIEDLVAWDSNELSLDGYSPSKGFIKVDLRYLQSIKIVYEGKKAKAQSLGKRELYEKYSRRERNKEKDFINKLAKQITILFPKAIHILEDLEKEDMVRKEEVEKNRRKRNSRTPWKQIHRKLSEKAFIAKISPKNTSRTCPQCGYIVKTQVGRIFKCKRCGFELDRQKLASLNIYLKYTRMWGFPHSYEPEISYEGELWVGVTLNGWRPMIWAPMKGALRPMKPREERLISLDINRNETQTPLSR

SEQ ID NO: 15464 - protein, 370 aa, unknown
  TnpB Polypeptide
MLKAYKYRMYPTPEQQEQFFQHFGACRFIYNWGLENKIRSYEQDGRSVSRFTLNKMITDLKAEHGWLNDINSQSLQGATLNLENAFTKFFREKKGFPHFKSKKYSFQSFSVPQFYKVDFDNNKVKLPKIGWVHTKLHRKYNGVEKTAKVSSTPTGKFYISILVDDEQEFPVKSAFDEKATVGVDVGIKDFAVLSNGEKIENPKYLKNSMKRLAVLQRRLSKKQKGSKNKAKTRLAVSKLYEKISNQRTDFQHKLSSKLIGENQAVALETLNVSGMLKNHCFAQSIADASWSSFVTKLEYKAEWYGKTVLRIGQFEPSTKICNVCGYHNGRLTLADREWQCPDCKINHDRDINAAINIKKFALDKQNLIGI

SEQ ID NO: 15465 - protein, 414 aa, Streptomyces sp.
LTVVQLRYNFRVYPSPGQRISLAKAFGCARVVFNDALRVREDARAAGLPFVTSGELSKWLTVVKRTPERVWLGEVSSVVLQQSLRDLDTAYRNFFGGLKGKRPMMGAPRFKSRRDSRQAVRFTANAGWRITDGGKLRLPKIGDVRVKWSRQLPSVPSTVTVVKDAAGRYFASFVVETDPAADLGRMPETDTVVGIDLGLTHFAVLSDGRKIDSPRFLRRAEKKLKRAQRAMSRKAKESKNRDKARIKVARAHGRVADARRGFHHRLSTELIRDSQAVAVEDLAVKGLARTRMAKSVHDAGWSAFVAMLEYKAARYGRAFLRIGRFEPTSQVCSNCGVKDGPKPLHVREWACGACGAVLDRDVNAAVNVAKAAGLAVSACGAQVRPERVPAQRGEAGTHSKGRRPTAAQAGISVP

SEQ ID NO: 15466 - protein, 483 aa, Bifidobacterium sp.
MYCMSQKVVIERVQVRGAIPYLGTHTTEDGQHAPLYSSDPDIVMRWLCDGWRSRYNQLRSRRRKWDKTRQALIPLGDEPDMRTDKQARAECSWLAAMPAMILQSPNRIENTDWWSANKRRKTLRKQHRTPGMMPRFKSRHDDLYFVCWHNKGMNANWRKLNKHHGEIIITGQNPKPVNLDGQPCRYRIHIRVRVSQPIRDYTSIGVNWTRKTVIFINEPLPIARERTNRMVGLDRGVAHTLATSDGGFIDLPKARLARIDREIRRRQKAQARRVKLSGEPVNEYKRHASRAYRRTQTQIAGLYAKAHRIIDDWQHKTTTALVRAYDLIAIENLNLQGMTRRANIKPDPNHAGRFLPNGQAAKRGLNRSLRTAALGGIASKLEYKTQAAAHSQLILVNPAYTSRTCSKCGHCAKENRESQAVFQCQQCHTRMNADVNAAINILNRGVDHVLGLDEAERATRMSDARTAQRGKNATATARKTSTR

SEQ ID NO: 15467 - protein, 381 aa, Erysipelotrichaceae sp.
MNPHKISLTAKLQLFVDDDDIRALKDTMHAYTKACNFLSDYIFRSMDMDKRHIHDLYYYQIKEDFGMKAQMAESAIKTVLARYKSVLSNHHEWTRVKFQAYEYDLVYNRDYSFLSDGRLSVNTLNKRIKLSYHTEGLEHYFDGSWKFGTAKLVNKHGRMFLHVSVTCSKSEPYHIGCTNIVGIDRGLRFAAVTYDSKGETVFYSGAKMKQKRAHFKRIRSSLQRKRTPSSRRRLKAIGHRENRWMQDTNHCIAKALVNSQPENTLFVLEDLSGIRSATEQVCIKHRWYTVSWPYADLAEKITYKARLHECATYFVDPAHTSQTCPVCGYVDKNNRDKQTHTFKCIRCGYQSNDDRIAAMNLFAKGNEYLEELEVSILSFTG

SEQ ID NO: 15468 - protein, 360 aa, Geobacillus sp.
MLKRRKKGGDSVANHHLEYSFFPHNPQLLRQLGEEYIRVVNELTEQMEDQKSFPKITTKHVNANLPSAVLNQAIRDARSVFKKMKKTGKRPILKKRVYFVNNQNYSIGKDIIAFPIMQNGKVKKTKFRAMITERDQKFLANAKLGLMRIVEKSGKWYAQVSIDVPVSEKDNEKVMGVDLGLKVPAVAVTSTGKTRFFGNGRMNKYIRRKYQEQRKKLGKLKKLSAIRKLNNKEHRVMTDINHKISRQIVNLAIQEEVSVIKLEKLTNIRQTARTSRKNEKHLHTWSFYQLSKFIEYKAKLAGISVVYVDPKYTSQLCPQCGAKNKAKDRQYRCQACGYTTHRDRVGALNIMSVPVMDGVA

SEQ ID NO: 15469 - protein, 365 aa, Streptomyces sp.
VNTAFPTAGELSKKLITRARQTVERCWLGEVSVVVLQQALRDAEAAYRNFFASLKGARKGTRVGAPRFKFRKDNRQSIRFTANARWSITGSRRLNLPKIGAVKVKWSRALPTAPSSVTVIKDAAGRYFASFVIGTDPAADAHRMPDSDQAVGIDLGLTHFAVLSDGRVINSPRFLRRAEKKLKKAQRDLSRKQKGSKNREKARLKVARAHAKVADARREFHHQFSTKLIRENQAIGVEDLAVRGLARTRLAKSVHDAGWAQFVHMLEYKAVRYGRTPVKIGRFEPTSQTCSTCGIKDGPKPLNIREWACPACGTVHDRDHNAAKNVKTAAKLAVAACGAQVRPGLVPAQRDEAGSHGFSPEPRAA

SEQ ID NO: 15470 - protein, 405 aa, Streptomyces sp.
MATRHVKRTFKYRFYPTTEQADELFRTFGCVRKVYNMALDARSRAWTDERRRISYPATSAMLTDWKKTEELAYLAEVSSAPLQQSLRHLQAAFTNVFAKRAKYPRFKSRKKSRAAAEYTRSAFKWRDGQLTLAKMRAPLDISWSRPLPHGTEPSTVTVSRDAAGRWFVSLLVEDPGVRPLPANSSAVGIDVGISSLVTLSTGEKVSNPKFARVDSARLAAAQKDLARKEKGSRNQAKARLKVAKIHARITDRRRDFLHKVSTRLVQENQLVVIEDLPVHNLLGNRTLARSIADASWTELRSMLEYKCGWYGRELVVIDRFFPSSKTCVTCGLRRDELPLSVREWSCEGCGTRHDRDHNAAQNILAAGRAVSACGAGVRPQRSSSGRAVGDEAGMTMAQAVGVPAP

SEQ ID NO: 15471 - protein, 383 aa, unknown
  TnpB Polypeptide
VIRRQGYRFRLKPTQADAALLRRFVGCSRFVWNEVLALNELRHERGEKRLGYNAMAGYLVYLKSEYPFLREAPSQPLQQTLKDLATAYERAFDPHLAAQFPRFKKRGRSQGIRFPQGFAIDGSGVSLPKIGWIGFRKSREIEGVLKNTTVLYDGTHWYVTIQAQREVNDPVHPSRSTVGIDLGVAKFAALSDGTFVESVNAFKKYEKRLAFYQRRMARKVKFSANWTKAKQKVTTTQHNIGNIRNDMLHKASTRISKNHAVVVMEDLRIINMTASAKGSVERPGKNVRAKSGLNRRILDQGWGEFRRQLGYKLSWNGGALLLVDPRNTSRTCALCGHTSAENRQTSPIIDTEGATTRPTPIPTPPSISYEGLDRAGSPVEIRR

SEQ ID NO: 15472 - protein, 375 aa, unknown
  TnpB Polypeptide
MKKTAIKVRLIPTKEQQRLLWMHAGTRRYAYNFAKNYSENYYKEHGRSIFASEIAKIFRAQYDQIPWIKDICKDVVHEAIKDYGKAREKSFKDFEDGFHTSFKSKRDLYQGFAVDARKIKIDGKVYLPMIGWLSVNQTPKRRKYGNPRVVFDGQFWYLSLVLEISETEVELTDEVIGIDLGLKSLAVVSNGDIYENINNTKQVKDLEKKKKSLQREMSRRYKEGSKVQSKNYMKSKREHLKVSRKLKNIRQNHLHQVSAAIVKTKPKAIVLEDLKVSKMLKNKRLAKPISEACWYTMRQFITYKGERCGIKIVLADEWFPSSRLCSNCHEKFNEVEQGRTWGLGIREWTCTCCECKHDRDLNAALNLKWYYNNQV

SEQ ID NO: 15473 - protein, 636 aa, unknown
  TnpB Polypeptide
MLHKLSGRKCNNLDLGVLSQSFSSYRKVVNLILEKVFSDLRYADEVRSELAKQRGMLYLALRREKHLKWTPDNEFGNLVFERLHRNALETAARIILADYTRQRLVNSVLDVLSSDEEQLTRLMIKRRIPSDIVRRVKDAIEKKSDGSYQYALSACRQVRRVLRDNVREAYPLKEGERRKSTRELLNENSLERARIQFILINRVREWKEDGFPFVTPTFTKDTVDFSASTENTTGQGYWFQQDTERENEIILFIKTPPGIVSHEQDTISPYKSQTVRLRFLNWFPRKAERARRKAQEARNQGHFQGAIQLEYRAARFEDMNQQLLNSINLQRFARELARERAHPEKDEMRINNLKTIIRDLKKSRRSTPPTIKLVGKRATLLIPFIAPDEKLLKTVLKNLSMRKKIAGVDRGLRHSMVVSVKNGEDTYEEAMIGRQELFEKRENLRQRTRVLMSQVALRRNNWERKHAGQHPPAIILKKEQELEAIWRKIRRLDKEISHQVATETAWFCEHHGVKAIYFEDLRSFQGKGGMRRHSWNLSTNLWGMMIEGVRYRREALGHRNGGIWLVNPAWTSQTCHVCGIRGVRVDDETSTTEKKGGEYFHCPNCAEHFHADVNAARNIMHVQHTIKPTAASGRTA

SEQ ID NO: 15474 - protein, 405 aa, Halobacteriales sp.
MEITRTAVVKLSVPDKRCDDLKRTMNTFQDAAQRFVDRGWDGDDDGYVITSSNHLQRLRYDDIRDETALHADLCVGAANYAADVLSSVAEKMKDGERTSKPVFTSNTTVYNTNAITYFDGYCSLAAYGGSRVHAEYLYPNDSIQAEYMERDEWTKQGAKLRYDHQTDTYYLHVSIKKEREESSGEVENQTVLGVDRNVDGYLAVTSTGAFIGNADLLNHKRREYERRRARLQQRGTRNAHLTIQSIGDTFANWSEDFFHQVSKELVKEAVLQECTAIVFEDLEGIRNGISNASKFQQWGFNKLKRQVEYKAKAEGLSVETAHPQYTSQRCSATGCGFTHEGNRDGDEFTCQKCGKELHSDYNAARNIAHKFIQNRRKSGSGGATYHLALKSGTVNGTGDYSPSTA

SEQ ID NO: 15475 - protein, 144 aa, Clostridioides sp.
  misc_feature (142)..(142): Xaa can be any naturally occurring amino acid
VKKAYKFRMYPNKKQQELINKTFGCCRFVYNKYLAKRIDFYKNDKETFTYKQCSSDLTNLKKELKWLKEPDKFSLQNALKDLENAYNKFFKEKTGFPKFKSKKTNRFSYKTNFTNGNIMYCGQHIKLPKLGMVKIRDKQVPXNT

SEQ ID NO: 15476 - protein, 462 aa, unknown
  TnpB Polypeptide
VSEKCKSITYIIRKENVMNIFSAYKVKIKHYNKIFEDTVKIYREAVSFFIDICDKEWSILEPLKNIERCREIEKLALYTKQNPNPKYSFHEKFYKMPSYLRRSAVNTALGCYSSYQSNLKNWKENPSGKEPKLQPDRNVMPTLYKNNMYIRTGTDMARIKIFHKNDWVWLDIELNRQDVKYIQNHCRFKKEYVPTLKKQGKCWYLTFPFEDKVKFENADIQNQIICSVDLGINNNAVCSVIQSDGTVATRKFVSLASEKDHLYKALNRVKKVQQNGARKTPVLWKHVNDINTDISRKTAKQIIDFAAQYRADVIVFEYLDTAGRKKGSRKQRLHLWRKQEIQKTVEHKAHILGIRISRVCAWNTSRFAYDGSGKVERGTYYQNGEKKYNYSICIFQNGKQYNCDLNASYNIGARYFVRELLKSDSVRKRLPKQTKDSDYGTGTTRTLSTLIRLNADLCGMSA

SEQ ID NO: 15477 - protein, 288 aa, unknown
  TnpB Polypeptide
MVLCAFKSHRYGISAQELVGKKASAPTLEKRHHKYFLRFSYTEEVTLTKTPVKEQIICSVDLGINTDAVCTIMRADGTVLGRKFINHPSEKDRMYRTLGRIRRFQREHSSAQSRGRWAYTKRLNIELGRKIAGAIVKNAEENHADVIVFEYLEMQGKISGKKKQKLHLWRKRDIQKRCEHQAHRKGMRVSRVCAWNTSRLAYDGSGSVSRDPKNHSLCVFQTGKRYNCDLSASYNIGARYFIRELLKPLPVTERSLLEAKVPSVKRRTSCVYADLKELHLQMEILKAA

SEQ ID NO: 15478 - protein, 334 aa, unknown
  TnpB Polypeptide
MLADKIAAYQKNGIMLKCTPAGYKEEFTWLKEVDSLALANVQLNLETAYKSFFTQKKSGFPKFKSKKHSRCSYTTNNVNGNMAVGDAFIKLPKAGHVKAVIHRIAPADYILKSITVSREPSGEYYASVLYEYETIESQAVLKSQDAKVLGIDFAMNGLGAMSDGSRCDYPGYYRLSSEKLAREQRKLSHCEKGSKNHNKQRKKVARLHQKVKNQRKDFLHKLSRKLAGQYDVIAVEDLDMKAMSQCMNFGKSVMDNGNGQFVSMLEYKLKDKGSKLVKIDRFYPSSKRCCRCGNVKKELKLSDRVYRCDCGNNMDRDVNAAINIREEGIRILFA

SEQ ID NO: 15479 - protein, 519 aa, unknown
  TnpB Polypeptide
MFVSLQFKLELKKEDKEKLIKLMRKQSSAIRVAYNMLKELEKEKTKNPHAQIYQRLRQLFPDLPTKYIDSAIYKAKQYPKDEIVVFGGKRLFEKLCKNHITGKARERLKKQWRELRQGTLIAIGSKHKTAQGNLLLRFMELDGKLHIRITTGNRKFIYAKVLREPSISKDKWITFMAMLLESWQTKNYFAYTVELKLREGEVYGSVSFEIPTPKVKYTKENGVIAIDINASPIHLAIAEVSKTEELLSYQTISLYHLLGLSQNSKDHQEWILAHQLLDIAIQKDKAIAVENLKKLKRGNRGDGKATLRKRLHQWNAKKFLQKLKRVAMLKGVEVVEVNPAYTSIIGMLKYALQLNIDKDIASAYVIGRRALGFKEDTPENYEILIKDKAYLEFALKRYEEREKELTELIEKESNEYKRNALKSELKNVQNAKKVLTHVIQSLQSEPSSCEGANGRNPEQGETKKVSQIAWQVLRVALLFPILGKVLPRDLSPLKPVLVEGVWDRVRSRLVPLEVGGASQ

SEQ ID NO: 15480 - protein, 224 aa, unknown
  TnpB Polypeptide
MPDNGNYLGIDIGLDNLASCVSNNGSCFIINGRPLKSINQYYNKRLAFLKSKLKDNKHTSKQIRSLTNKRNNKIKDYLHKASRILVNHVVSNGINTIIIGHNKCWKQEINIGKRNNQNFVSIPFNVFISMISYKATLEGINVKIVEESYTSKCSFLDNERICKHESYKGRRIKRGLFKTSSGKTINADINGAFNIIRKSEKESFDVTMLPKGRGFWWNPVRISV

SEQ ID NO: 15481 - protein, 542 aa, Nonomuraea sp.
MAEPAKKPTKKLRTIDPAFVALGPSGVSIRDRLKGLTPEDEKVLARVGAHLGSLASKDLKARCADGLEHSTESWAARKRELTADSSSRWAGSITKATHDQWALARRGQAAHLQSLEAGIKTIAHRLSLPVGDKGIKRAPGGYRSAHEWFCKMRRLHVLRDRLAAVRADRDNGVVHVARGGKRLLGTRHNLDAAQLSEPEWRKRWETARWFLAADGESGKRYGNETIRITPDGEISIKLPAPLAGLANAKHGRYRLAAKVSFAHRGQEWADRVEANRAVAYRIHLDVTRGRWYVDACWTFPITQTISMETALAHGVIGVDTNADHLAAWRLDTHGNPVGQPRRFSYDLSGSADHRDAQVRHALSQLLNWAKTCGVRAVAVEDLDFTAEKTREKHGRKRRFRQLVSGMPTGVLRARLTSMADATGIAIIAVDPAYTSTWGAQHWQKPLTSKTRKTTRHDAASIAIGRRAQGHPIRRRTTPPPHHQSDGAGHRTVQAGSVALGREGTRRPVTDRGQEPPARSGTQQGTRATSASKTVRDARGVGQ

SEQ ID NO: 15482 - protein, 559 aa, unknown
  TnpB Polypeptide
MTEAKVARAKAAAAVKAELRARAGLSRTIKLRLYPLPVQAKRINHSISTVRHVWNEIWLPMLQAAEQARRDHAKANAETPEAWKAAWKLHPDPKNDTPYNRARIAAQAPGAGREWIAKALQSPLNRAAITFADAAKASRGRTRDGAKRKAKLGRVRPRARRDDCRQGLEWQLQGSAPFRGRELGRVVDLAAGVVNVPVLGAVKFQDKARQLGAYLVSGVEACELTVKRVGEHYYACIAVRGLQPAAAHVAEGVAVGIDMGVTNLLATSDGALITHHQGHDIRARLSRLERRKLRVKRQYARKLRHAAKRAGALTPTGGIRKGVKIDNSNRMRRWMARQAKIDRQIVGYRADWQRNRALEIARSSEIIVVEELSIQNLTASAAGTALAPGRNVRAKAGLNRAILARGWGTMRQRLKTKAEEFGCQLREIDPAYTSQTCPSCGHVSRDNRKTQAQFACTCGFQEHADIVGATNILARGLSAGAPPAAGRRGLATGAVPSGLDAERAVEASNKSPREPHVSRKGARGPRGAKSHVRTNCNTERTYPDATAAIVLRGSRDGPE

SEQ ID NO: 15483 - protein, 347 aa, unknown
  TnpB Polypeptide
MQLTVKFKILPTKEQEKYLEQTLNEYINTVNNIVQIIINNKNIKLTSKDIQANLPSAVKNQAIRDAKSVYRKYKKTNNLPILKKPVCILNNQNYKINDYVSFPVMINGKSKRIKVKTILTDYQKQQLNNKLGTLRITKKSGKWIAQISVDVPEKQNNDTEIMGVDLGLKVPAVAVTSNGKTKFFGNGRQNKYVRRKYKSLRQKLGKAKQLKKIKQIGSKEQRWMKDQDHKISREIVNFAKENHVSVIRLEKLANIRNTARTSRKNEKNLHTWSFYRLAKYIEYKAKLEGIKVEYVNPEYTSQKCPHCGTLNKARDRKYVCKSCGHITHRDRLGAINIMKAPVVDGVA

SEQ ID NO: 15484 - protein, 369 aa, unknown
  TnpB Polypeptide
MKVRKAFRYRCYPTPAQADTLTWALDRCRELYNAGLEERREAYRMCGVSVGYLQQQNQLPTIKEDRPEYKQIGSQVLQDVLRRLDKAFAAFFRRVKEGHPTPGYPRFKGRYRYNSLTFTQAGWKMDTRLHLSGVGAIRVKLHRPIEGAIKTVTIKRDVDHWYVTFSCEVEVDPALVADKPAVGIDMGLEYYATLSTGEHIENPRYYRKSQGVLARRQRSMERKRKGSGKRAKAGILVRKAHRKIANQRRDMQHKAARRIVDTYGAVAVEDLNIAGMVRNHSLAKSISDAAWGQFIAILQSKAASAGVVVVAVNPRGTSQMCSGCGAKPESPKTLDVRWHTCAACGLSMQRDTNAARNILHRAGLARRAA

SEQ ID NO: 15485 - protein, 401 aa, Brasilonema sp.
VLVLEYKVKGKKQQYQAIDEAIRTTQFVRNKAIRYWMDASREAKINRIALNNYSTVLRKEFKFVEELNSMACQAATERAWSAIDRFYGNCKSKKPGKKGFPRFQKDNRSVEYKTSGWALHPTKRRVTFTDKKSIGEVKLLGKWEIHTYPVKSIKRVRLVRKADGYYCQFAINVDAKPEQRTGDSEIGLDVGLEFFYSDSSGHHEPNPRFLRKAEKAIKHAQRAIFKKEKGRNQRRIARQRYAKKHLRVNRQRNEHAKRIARNVCKANALVVYENLNVKGMVKNHCLAKSINDVAWSLFRRWLEYFAVKFNTAVVAVNPKMTSQKCSDCGAIVKKSLSTRTHKCNCGCELQRDVNAAINILNLAKARGGHPQSNATGVGTSTLVGASLLEQVLTMNVESPSL

SEQ ID NO: 15486 - protein, 439 aa, Crocosphaera sp.
MLVTQSIQIRGLTAEQYEILRYQCRLAKNMYNVGLYSVRQFFFAQNRCLSYESNYYHCKDNENYGLLYSQVAQQCLKFVDEAIRGFFKLLERKREGKLAARISLPHYLKKDGYFPLVYTQPNIKEGAIQFSVSNQFRKNYREETGKAFKAFKFLIPPMIKGKKIHEFRIIPKYNGRYFVAQFVYEIKEEIAENLDKDQCLSLDLGLNNLVAAIDTKGSSFLVDGRKLKSMNQWYNKQLSKLQSLKDLQGIKRLTNKMAKLILKRTNQVNDYLKKTARLVINYCLKHKLGTLIVGVNEGWKTSINIGKVNNQMAVPPLGETPRPHCLNFVQIPFHALRQQLAYLCKRYGISYIEQEESYTSLASALDLDELPEYNADNPKTYQFSGQRIKRGLYRTKNKKLVNSDINGSANIGRKSKANLFKKREVLEGLLDAPIRYFIV

SEQ ID NO: 15487 - protein, 566 aa, unknown
  TnpB Polypeptide
MITLHTRIGNLTAQQETALSAYAERFNHVAHHLAADMVKERRTGPSFKNAYLRRFDITARQFNAVRLYVEGLATNRVENLKHQENILSDKIAATKKLLPKIGKQIEKAKKNGVSTSDLQHLENRLHQKKRKLRNLLERQSKTIDDLHRPFASGLCFGGRKLFHSQFHPEENGYADHAEWLAEWKSARASQFFVLGSKDETTGCQGCVARVQEDGSFLLDVRLPGDSEKGVTIGPLRFSYGNEKLRAALSLHAGLSKTKLPRITKLSKAGKPYSRIVYPEDLSALSWRFQRDKKGWRVLVSFQEPSVAVQTRIKAGAIGVDLNADHLAWAELDRFGNPVETGSIPCVTYGKTTAQAEAIIAAAAVELSRRAKQAGKPLVLEKLDFSRKKTQLSEEQGKRYARMLSSLSYRKIHDAISARAAKDGVEVKTVNPRFTSVLGRINYASRYGLTVHQGAAVVIGRRAFDRFAKNPHTGKNFKEFGLRETPIGQTGRDGVKTLTVPDGRGAQVTFPYPEWNERKHVWTLLGKVSRKMKAALAAQRVAEKSDPPERTAESARMKPEVPVVAAV

SEQ ID NO: 15488 - protein, 181 aa, unknown
  TnpB Polypeptide
VSILFAYEESISPAVVTKETTIGLDYKSDGLYVSSEGDTCGMPHYFRQSADKLAKAQRKDFLQKKSTEIANQYSFVCVEDLNMKAMADRGFGNGKATLDNGYGMFLTMLDYKLRDRGGQLIKVGRFFPSSQLCSHCGFKNPLVKNLSVRHWDCPNCGTTGIDRDVNAAKNIKKEGIRLLTA

SEQ ID NO: 15489 - protein, 365 aa, Sulfolobus sp.
  misc_feature (350)..(350): Xaa can be any naturally occurring amino acid
MRRKKEGKTYTDKPELRNVTVHLDDHLWRFSLGEVRIATRKGWVSLKPFFTKLFWKYYNKGWALASESSFKLCKGNVVKLYPVFKKPLPKPYDVKGFIPVDLNEDNVSLLLDGKPLLVETSVKKITLGYAYKRKRISEGRSTKDRDVKRALKSLKERFKKLDIRRKLAKLIVTEALREGKGIVLEDLPKNTPEKMVQDIKDKQLRDRIYKSAFASLKNAIVEKAKEFGVPVLLVNPAYTSSVCPIHECKIIYPPDGSSAPRVGVNPAYTSSVCPIHECKIIYPPDGSSAPRVGMCEKGREEWHRDVVALYNLLKKAGYVSPMPLGSKESHDPLTVRLGEWLRAKSLHLTXAQCRWARRSPMTHSP

SEQ ID NO: 15490 - protein, 334 aa, Lachnospiraceae sp.
MIKTIRVMLIPNNKQKTQLFQYANTARFAYNWALGREQENYKNGGKFISDDDLRKEFTKLKKTETYAWLNNISNNVTKQAIKDACEAYKRFFKGYSKFPRFKSRKYSVPSFYQDNVKIKFTDTHVKVEGFATSKKKNKQKLNWIRLAEHCRIPTDNVKYINPRIKYDGLNWWITVGIECEDYTTLPLNEGIGIDLGIKDLAICSDKNIYKNINKTQKIKKLEKHKRRLQRSISRKYEKNKTKGKYCKTKNVIKKEKLLLKVNHRLTNIRHDYLHQITSEIIKRKPSFICMEDLKLSERIYKSLRLMWICTDTLVRNLRLWSVQELVSRYCRNTN

SEQ ID NO: 15491 - protein, 432 aa, unknown
  TnpB Polypeptide
MALSVGKLGFVMKRVERIRLYPTTRQATRLQFALDITRELFNALLEERRDAWRRRRISISAKQQYAEITALRSHGQRLDGRMSAVYRECEDAVLHRLDLAMRASFRRIRLGEKPGFPRFKPRSRWHQLEFPHGSRALIFDSMQKRVKIPKIGLVRLRKGRRIPECFGRAWVVERNDRWYLCVEHEIRVKPKRATTHIVGIDRGVHVLAATSNGDLIKNLAVGEKRKVAVGRLQREVDSRTKKDAAGRCINRKDPSRIASVKRFARAKEHEANARRDYAHKKSRHIVDNFDCIGLESLNLRRMTRSARGTAARPGRSIRAKSSLNRVLLDAGFGLLRQMIESKAEEAGVTIVTVDARFSSQTCSRCGNCERGNRRRRRFRCLRCGFATHADINAALEIRRRAELKLLSSEPHPAEEAGRSAFARGVGSHNEAR

SEQ ID NO: 15492 - protein, 611 aa, unknown
  TnpB Polypeptide
VAEKTGARQERNDRHSRVVFLPVPSKDWSAAAMALTHEAKNLYNTTVFAIRQISSAYHYDGEGKVHVLKDDLHDNQRQALEAFNAHISTINAKRRAKCKADDEPKLITDLEPRMSASPLSAALNVTLLDNVVRNWPDERGQAVYRRLPASSAQQVVRSVIDMWKASLAAIRDWSVHPEKYTGRPQLPGFLPKDGHFPLEIPFASITKGFPRPKVLGEVGDLGKRSEELQSIFYDHDLRSSVDVACRARGWDVFQPRHIRIVEKGGRIVIEAVVDLVMAFPEGSFLRKVYDKNGDALRDMQRVSERERFIIAKANEDFGDIRIAGVDFGESNVAAMAFSTGHRAVVHSGERPIAIARKYQALLDARIAELASPRMKELQAKQAAFEAQGLRLGKAEHVELRREQARIFRDPLYRSLVSNLSRKNGDYEHKVTTDLVRQCLRNGIDVIVVGQNKGLKSDGGRGRRANRQSHSIAHHRLLALLRYKAERHGIAVVTTEESYTSKTSFVDNDELRMFGDKTKGRKNTTTETVDDTASQDTDAPAVVHSGHRSTRNRNWFIRHNAAGRLAKVHADVNGAFNIIRKVFKGFCHHAGLSLKFNLRRVSPRLGAVPLFA

SEQ ID NO: 15493 - protein, 220 aa, unknown
  TnpB Polypeptide
VGIVRFATLSDGAFYRPLNSFKRHQTRLRQAQQSMSRKKKRSRNWNKAKARLQRLYVRISRAQADYLHKLTTSLSKNHARVCLEDLQVRKMSRSAAGTREAPGRRAGAKSALNRAILDQGWSEFRRQLAYKLEWRGGRLDLVSPQNTSRTCPRCGHVSKHNRPTQPRFDCMACGPQAHADLVGAINVPRGGHARLACEVSGAAMPPAAGTHRSDSLMRTA

SEQ ID NO: 15494 - protein, 429 aa, unknown
  TnpB Polypeptide
MKKSLRQNLRNLDREEYEILRRMTRLSKNLYNVHLYEVRQHFFNNGEYLNYYNTYNRIKSNENYEELPSQVAQQTMKQVDQGFKSFFKLVEKKHEGKYNEETNIPSYLDKDGFYLLDFPRQSFQLKEDYIRVGVPKQFREEYGFDRKEIRIPFSYEEVREKDIKRLQIHPQKNAQYFEYRIIYEQETEGVETEEDTFLSIDLNLDNLAACVDHSGRSFILDGRKLKSINRWYNARRAKLQSIKDKQGIDRETERMYRIRKKRENLVHDYFNKAVHGLVEYCVEHKIEKVIVGDGKGWKQNIDLGDKINQSFVQIPFDKFKQKLKHKLEEKGIEYQLQNEAYTSKCSFLDNEPVKHQEEYEGSRVSRGLFRASDGTRINADINGACNIAKKAIGKPNSELFDSSEDGVESVVDTPKRIRKPEFSQVKMAV

SEQ ID NO: 15495 - protein, 408 aa, unknown
  TnpB Polypeptide
MSVRSAVFRLDSHLVPEAMFLMEDFRLATNGAIRAGLQAKVTSRNALNKLAYKDFREEHPGIYAQHLVSAFEVAAVILKNHRRQLRNTMTGRATRTPYVKRLMMKTENQAYKLDRKEGIIDLPVKAGLHVRLKLVVSQYHRRFLDDEAYSLGSLTLLPDKVIIAFRRTSPKPYLPKSVLSLDTNERSLDGVFIREGSSNAVRAEFPDVAIIQQRHHDRRKRLQKKKAHDRRTARALCRRQGQREHHRVEYRLHQVANTILSFAKSQESAIVLEDLKGIRHKKGKDLNRRLSLWPRRKLHRIIAYKAEDEGIPIVIVNPRYSSKKCPICGSIQHSRMGTEFECECGWHMDRHINASINLLQTASSKGLAGGLRFDPGAFRHDAMMILYEPAMAARSEPNGMSEEGVVVP

SEQ ID NO: 15496 - protein, 362 aa, Filibacter sp.
VKRVSQIITVKIKLLPTKEQIQLVEQSSRAYIKIINTLVSEMVEAKASTKKSTKDIEADIPSAVKNQAINDAKSIFSKKVKKSNYKIIPILKKPVCVWNNQNYSFDFTHISIPFMVNGKSTRLKIRALLIDKENRNFDLLKHKLGTLRITKKSHKWVAQIAITIPTIEKKGSRILGVDLGLKVPAVVITDNDKARFFGNGRLNNYMKRKFRSIRKKLGKQKKVNAIRQLNDKEQRWMQNQDHKVSREIVDFATANTISVIRLEQLTNSRQTACTSRKNQKNLHTWSFYRLAQFIEYKAALAGIKVEYVNPAYTSQTCPKCTKKNKVKDRNYMCRCGFEKHRDIVGAMNIRYATVIDGKSQSA

SEQ ID NO: 15497 - protein, 494 aa, unknown
  TnpB Polypeptide
VEVELSGKLTQGQDPLLERASGAVKGLVEPGAEIDAVRFRVYPSRVQQQILKRWIGAQRYIYNQKVEELSYQLWLKNNAKFSNRFQEPLENYCPWDQAFSKYKVSAPWLEQIPSFIRRNACSRFRSAMANWGKGGGRPQHKTRGAVRSVLLTSECFTLRTCDGEDCLFIGTKSKNLGILKWVRHCEYKEPRQISITHEPDGKWFVGFSFESGRILPKTAIPENKQEVLGVDRGVVNPVTDSTGRFYDFTPSEKVKLERREKKRAKLQARLARQKKGSKRRAKTRRSIAITHARDRRLRASVAHRIANHVVNHAIETGCKAIALEDLRLDSMTRKCKAKQGDDGRNLHNGQAAKRGLSRSLLGRALGQIKTFVEYRCRRVGLLFIGVDPAGTSTQCPHCHHREKRNRLTQADFECVRCRHTEHADVIGSVNIRDRAFKKITEISPGTSLKNARAFKRPEKRSTRASSISPRNTSKTRRSRWVDYIEDPPSAASPA

SEQ ID NO: 15498 - protein, 357 aa, Paenibacillus sp.
VLKAYKYRIYPNTEQQVYFARVFGCVRFIYNKMLADKIEHYKRTGTMLKNTPAQYKKGFEWLKEVDSLALANAQLNLEKAYKNFFRNKSVGFPKFKSKKTTRHSFTTNNQNGTISIEDGSIKIPKLKTRIKINLHRPCIGSIKSCTISKTPSGKYVACVLVETDIAPLPKADRKIGIDLGLKSFAVTSVGELIDNPRHLRKSEERLAKLQKDLSRKKKGSNNRHKVRLKVAKLHEKISNQRQDFLHKISSKMISENQVIVMEDLRVKNMLQNHKLAKAISEVSWSMFRTMLEYKAQWYGRELIIAPKHYASSQLCSCCGYKNAEVKDLALREWTCPVCNVHHDRDVNAAQNLLNLAM

SEQ ID NO: 15499 - protein, 376 aa, unknown
  TnpB Polypeptide
MKQVRTKKIKIQPTGTMIQAMKNYLPACNWLSEIVLKNKETKTNKLHKLYYSIIRSKFQLPSQVTCSLFRQVSVTYRSMKTKRKWKLAIFKKPVMPICFRRDFNVSKRNGFTIWNQPIQMFSDLPEANLKDSKIKNIKQKWYILLTYEIEIPDPKQQGTVVGVDRGIKRILVASTKGKNPLFIKGGGLEHLRRNIQNTKSKVQAVGTRSSKRLLQRLRRKEKSVTEEVLHIASKTLAQYAELVGAKTVVFENLTESIRKSSKSKGKRFRKQVHRWPYSSLLFKCEYKLESRGIGLAFVNPKNTSRGCPSCGFVSEKNRKRLLFLCKSCGYSNDADLVGSINIRNRFISELLEKDDSEKGSSQSPIVADSYSLATSP

SEQ ID NO: 15500 - protein, 426 aa, Halobacteriales sp.
MANKVVTRTYTASIRNQSRVQDGLDSLGFAASKLWNVGRWVCDRIWSEIGHIPGHSELTAYLKSHECCDDLHSQSSQRVLQELAEAFTGWYGKRQNGDANANPPGYRKHGDDHPRSTVTFKSAGFELDTKYRRARLSKGSNLKEYWSDFILCEYQTRPDVDLSTVKNVQQVRAVWAGGEWELQFVCKVEIEVAEAPGEKTVGVDLGINNFAALAYEDGHSELYPLNCLKQDDYYFSKRIARCDDSDSVQSTRLSQKKSARRTHYFHTLSKHIVQRCVDEGVGTIVVGDLSGIRKDEGSGESKDWGKHGNLDLHSWAFDRFTDLLAYKAEMEGITVEEVSERDTSKTCSCCGQKRDANRVERGLYVCDECGTVANADVNGAENIRQKVSPSLACDGGDRSNGWLAQPSTFLFDKETGAFAPQEHVTS

SEQ ID NO: 15501 - protein, 395 aa, Halobacteriales sp.
VAEEYLYRTAITRLRVEESDRRLLKRTIDQFRDGCQLAVEEGFPRVTEKRTLQSIAYDTVRDETALKSQHAILATHRAAEAIAGVRDRWSEGEKASKPEFTSPTVPYDGRTMTLFDDGSVSLTTVEGRVRPDLILPDDEDGYQYEYLDDERWSVTESSLTARDGEFYLHLGFRRPKTEPTAEDGTVLGVDFGIENIAVTSTARFFSGREANHERDQFKKRRASLQQTGTRSAHRTLQRLSHREERQHRQRLHEIANGVLQEALDHDCSVIALEELTGLHDEIPDANWFDLWAFRRLRAYIEYKATAEGIAVESVDPRDTSKRCSECGHVAGGNRSSRGRFHCDACGSEANADYNAAKNIALKHVRRGPQSSRRTGTRQCALKSGTITANGTFVPM

SEQ ID NO: 15502 - protein, 284 aa, unknown
  TnpB Polypeptide
MLRAYKYRIYPTDEQKVLFAKTFGCCRFVYNWALNLKITAYKERKEMLGNVYLTNLMKSELKVEHEWLSEVNSQSLQRSLDRLKLLQKWLSRKQKGSANRNKARIRVARLQEHIANSRKDSLHKITHTLTHDSQVRTICMEDLNVKGMQRNHHLAQAVGDASFGMFLTLLEYKCSWYGVNLIKIDRFAPSSKTCGKCGHVYKGLNLSERSWTCPECGTHHDRDFNAACNIKEFGLKALPTERGKVKPVDCPLVDDRPRVLKSNGRKKQEKRGGIGISEAAKSLV

SEQ ID NO: 15503 - protein, 266 aa, Pseudoalteromonas sp.
VPIILHRELASKIKTVTIQYRHGKWECSITQEVECKTALRVLKTITGFDINSKQTVVGSNGYVGDNPKFLKQSKAKLNQLQRQLARRNKGSNRWHKTKQRINKLHGKISRQRLDFAHQISRQITNGNDILVFEDLNVKAMQKFNGSMVADNVMALITQLSKYKAELEGKLYHEIGRFEKSTGICAECGQHHVLTLNDRHFICVACGANQNRDLSAAKSIANTGELDLIAAGIVARVNPTSQRKAANKIKVFELSKFAVGSEKKEAA

SEQ ID NO: 15504 - protein, 471 aa, Moorea sp.
MYRTIPLKATFTDEENAFWLFQCEQSNSLWNCATYYSKQKQYSWLQEQPEAFTTYWRGDELRYGWKTYKCAIKYAELCKKLKNNPHFKAMAAQSAQQTLKTVAESIASYNQLVGLYYKGQADRPRLLRYRQKGGLAAVTFPRQALTYKKGLFYPSISKETKPELLTEITLTPPDFVDPDWVKEVTVRPYLGQLWIDWVIDDGKEPVETNPDLDYSQAWSFDHGGDNWLTGVSTHGKSLIIDGRKLKSMNQGYARLVAKYKAGKPEFYWDANLDRVQRKRNNQMRDGINKATRFIINRCLSDSAKPTLRERIGNLIIGWNERQKDSANMGRRGNQNFVTIPTKRLIERLKQLCPEYGIKLTITEEAYTSKASFLDEDSLPRHGEKPSGWKPSGRRVRRGLYKTAKGYLVNADCNGAANIARKVAAQLSLDLTKVGSGSLTLPHRYDVFNSLKKLYRTRGEVARENRCHVTSL

SEQ ID NO: 15505 - protein, 410 aa, Moorea sp.
MRLAYQYRLRLTKSQIAKIEKWLDMLRHQYNYLLADRFDWYEQNRCAANSCPLVCHLPELRENPDYFSQKKTLPDLKKSRPWYEEIHSQVLQDCVKRVDLAFKRFLKGDCNGNRSGRPRFKSNNRYRSFTFPSLSKNPINGNLLTLPKFGQVKMIYHRPIPDGFKIKTATITRKADGYYVTLSIQDDTVPDIIPINSVSKPIGIDMGLKSFLVKSDGTEVEIPQYYRKAHKRLKKIHKAVSRSKKGSNNRKKAVFKLGKAHKKVADTRKDFHFKTAKGLLDDHDMVAHEKLNIKGLAKTKMAKSVLDAGWGQFLSILSVKAENAGLVTKAVDPRNTSQNCSNCGKKVPKKLKDRIHSCPHCGYTADRDINAAINILNLAVGHPVSSKAFRVSEPMGGVGKKPTLNLKRSV

SEQ ID NO: 15506 - protein, 427 aa, Escherichia sp.
MHQENTMLPRRISVSLFIDQSIIWPVKRLQAFKFQLRPGGQQEREMRRFAGACRFVFNRALALQNENHEAGNKYIPYGKMASWLVEWKNATETQWLKDSPSQPLQQSLKDLERAYKNFFRKRAAFPRFKKRGQNDAFRYPQGVKLDQENSRIFLPKLGWMRYRNSRQVTGVVKNVTVSQSCGKWYISIQTESEVSTPAHPSASMVGLDAGVAKLATLSDGTVFEPVNSFQKNQKTLARLQRQLSRKVKFSNNWQKQKRKIQRLHSCIANIRRDYLHKVTTAVSKNHAMIVIEDLKVSNMSKSAAGTVSQPGRNVRAKSGLNRSILDQGWYEMHRQLEYKQLWRGGQVLAVPPAYTSQRCAYCGHTAKENRLSQSKFRCQVCGYTANADVNGARNILAAGHAVLACGEMVQSGRPLKQEPTEMIQATA

SEQ ID NO: 15507 - protein, 401 aa, Streptomyces sp.
MRAYKFLLRPTVRQEQALAEMLRDHCSLYNGALQERRDAYRHSSKTSIKYGDQSAQLKDIRRFDPQRQGRWSFSSQQATLRRLDKAFKAFFRRVKAGQTPGYPRFKGVGHFDTVIFPKDGDGCRWDSTPHDRQTRVRLQGVGHVRVHQHRPAHGHVKTISIKREGRRWYVVLACDDVPAEPLPPTGAIVGIDMGITHFLTTSDGKNVANPKLLNAAAEELAAAQRHLATFPKRTRQRTKKHRAAARKVAKLHAKVRRQRLDFHHKTAHALIRDHDTIAHERLNTAGMTKAPAPKPDPENDGAFLSNCAAAKAGLNRSILDAGWGQFLTILANKAESAGRLVIAVDARNTSRTCLECGHVSAENRVTQAKFKCTACGFTANADHVGATNVLNRAGLALCDAA

SEQ ID NO: 15508 - protein, 638 aa, unknown
  TnpB Polypeptide
MKKKRKKNISKSIFEPKSRGNFIVVKTSLKSILKDYGNNFPILNNLVLECNEIVIRTYQFIRLFILHKYYKNETIPKLDKDTILYFIRACGIRNKCGKKPTNKEFAKELNDFYNTEYQPCINKQKFNLKKKSYLTPYLAQQIQTSFNNNLKEHFITRIRRFMNIMKPNNTLDKKMFNKIKNFILLDKMNNIPEDYKQWSQNIKDNYLPKQYEKCYGYDVKVKPEKYLFYTIKMNEDIEKLNNSIKNNKDLTEEDKRCKIKKLFQPIPLRNTIVPNYITIDTNVILSLFKQKGESKMSKKTKKYKNHIWNKIFKTNKRVMKMNGYEYKTILTDGIGVSICFQKIKKNKIGKNNENHELYINELCDNDLEKCKSKKIVTIDPGKSNMVFMMDKNKNKLRYTCCQRRRESLSKRCNKIILREKQKNNIIEEETKLSYLNCKSVDYIQFKEYIIEKTKLNDKVRQFYENELYRKLKWRTWIYQRKSEDKFLNRIENTYGNKKDLLLCYGNWSNNKQMKYIMPTKGVGLRRTIEKKFNVVLVDEFRTSKLCSKCNCELESYNNLHRVLACRGCKSSGSESKNTTFMNRDMNACMNMLHIYNSWIQSKMRPKNFCRTSDPDFSLEEIKRGPSVVFTEGNTSNLS

SEQ ID NO: 15509 - protein, 412 aa, Candidate division WPS-2 bacterium
VASRFDGQLRWLHKVRVYPTCAQERALVKMLRVTRELYNALLQQRRDAWTSRRLSLTSREQYLQLTELREVEARFAGVYRDCEDAVLHRLDLAFAAFFRRLKRGETPGYPRFKPIARWNQLEFPHGDRALKFDIVQGRVRVPGVGAVRLRKGRVVPEFGRAFLVTKNGRWYAVFEAHRTVSPLPATGCSVGIDRGIRVLAALSDGTMIENLRPGSRRKAVVKRHQRALDAVTVKDAIGRPLNTKHQARIAAVRRLARAKESEANARRDWLHKVSRGVVQRFDCIALESLRMRSMTRSAKGTPEVPGVGVRAKAGLNRALLDAGFGMLASLIREKAEYAARTVIEVDARYSSQTCVACGCVCKESREGRRFTCVRCGHAADADVNAAQVILLRAESPPMRAPGTARGRQHYAA

SEQ ID NO: 15510 - protein, 396 aa, Microbispora sp.
VAVRRSFKFLLRPTAKQAAALAACLEDHRTLYNAALEHRRTAYVKAGVSVRYGDQSAELKHIRGDDPDGQGRWSFSSQQATLRRLDRAFGAFFARVKAGRTPGFPRFKGRGWFDAVEWPKDGDGCRWDSQPEHPSATFVRLQGVGHVRVHQHRPVRGRVKTISAKREGKRWYVVLACDDVPAEPLPGTGAVVGLDMGVACLVTMNDGVHVANPRHLAATADRLAEAQRDLARGERGSRRRRKKVARVAALHGKVRRQRIDYAHKVANALVRAYDVIVHEDLRIANMTRSASGTVEQPGRNVAQKSGLNRSILDAGWGVFLTVLAHKAESAGRELIAVNPADTSRTCSRCGHCAKENRVTQAEFVCTACGHAAHADVNAATNILRAGLALRQAAEAA

SEQ ID NO: 15511 - protein, 440 aa, Bacillus sp.
  misc_feature (239)..(239): Xaa can be any naturally occurring amino acid
  misc_feature (429)..(429): Xaa can be any naturally occurring amino acid
LNVKKTFKFRIYPNHQQIELINKTFGCSRFIYNYFVGKQKNKDAYWSIVNEMVQNGQLSQNNWKGEFFNKNQSIKAVRELKKTYTFLKEVDSIALQKSVEIVHDSYTRYYKKQNRLPRFKSKKNPVQSYTTKFVNGNIQVKDKHIKLPKLGLFFNKNQSIKAVRELKKTYTFLKEVDSIALQKSVEIVHDSYTRYYKKQNRLPRFKSKKNPVQSYTTKFVNGNIQVKDKHIKLPKLGLXRFAKSREVEGRIMNATIRRNPSGKFFVSILAESEVQPYKKTGTSVGIDVGLKDFATLSDGTTHKNPRFFRTLEKKIVNAQRILSRRQLGSSNWTKQKKKVARLHERIANARKDMLDKISTEIVKNHDIIGIEDLSVKNMLKNKDLSKGISEVSWARFRSMLEYKSLWYGKQVIATAKNFPSSQLCSVCNXKESCPAARKNR

SEQ ID NO: 15512 - protein, 554 aa, unknown
  TnpB Polypeptide
MSVNTVTLTYDVTLPKFLWKYLHKLFETGKIEVNQIIRNLWNEEGFSLLKQKGEASAILKGKINRPDNLPSRVFRNVLECAGRIIRSQIERKETFEELVKYSVEEDFNIRKYVKDTGKNLLLVENILRQIENLRKKGELPDSYFQLPSPDFRGDIFLTSADDSIGKGQFKKLKVNEESIELKIKLPISFDKWKWFEAKIRTPEKIKEALALGGKVKAPLLKRVRNKNNKQIFVLSIPIEFRVEEETELEEKVLGIDLSPSISRLAVGIIREGEKRSRPIYLKAERLVRKVLRIREEVSCLERKIDNIRNQIEETKSGKHKERLKNRLKHLFAEQKLRQKKLKNIRKQILEVLTREITEIAKLTGVSLVAIEKLEFKDIPEWKDKTLRWLFSNWFYSKFSERLEQKLKLSGIRLKRVNPAYTSRECHICGSKLKGEGLYLVCENCKKVWDRDYNASVNIAERGLRILKGIREKLMNKLSELQKERKPGGHVLKGVREITVPPDSLLHSWSEVVEVSCSILQPRKEVVSSVKKNGTDSLTSQGSGISLYSQRCEPF

SEQ ID NO: 15513 - protein, 497 aa, unknown
  TnpB Polypeptide
MPRKVGATLKISTQIVPVVGMAESVELELLSTMKKLAVVRSESYNKLGSISHWGLDWKKAIPEVKSFRNPDTLGLPAKIMDWTINDVAKAITAQQAACIDAVAKKVYKRFPGKENQNKRKELCKQLKTLAFLDNSLLHRLVRKDFQRGHSWVKNQIVYQQVGYKCKRLSRNTYQLELAGLRTRKRNRIVVRSNRKIKGQIRLIHNQLLQRFEIHFLVDHGTVGIPSERRSVGVDKGYTEAFYDSEGQAHGKGLGKVTTKKSDRICEKNRNRGKLWALHRKLEKIDPAKSARILRNNLTRKTENKRYRQDQSVLKAIIGAASKSLFNGESLKVFAVREAWPTASDLTQPIKTKRQSKAMSRKLNSWMKGVMRNSLQKWADWTGSVVTEVQPSYTSQVDSVTGTLLGKRSGDNFTRFNGVVLQADHNAAKNVLSRGTDKDITRYMSKTEVQAVLLRRTARFLEGMGLSLLDAVELGWLDSKHELCSGFQATPDRDVRNV

SEQ ID NO: 15514 - protein, 445 aa, unknown
  TnpB Polypeptide
MTIYSSYDIRIPTREFNRVFNDTVDKYRAAVAFFINTRMMEAPLFAELKTQHDQLRKMELLTHQTQDNPSPKYSFSEDFYKFPSYYRRAAIAEALGKVSSYESNLKRWNSTHAGKKPGKPAAGYVYPALYRDNTFIRVDSLTARIKVWIHNTWDWITIPLRKTDVSYIQRHCSGRKECVPTLRRKQKYWVLSFSFEEKASLLDVPLEEQTVLAVDLGVNSACVCTAMRSDGTILGRRFLHFPKEEDSLTHSLNKIKKAQQHGNCKTPGLWAKVKGINDQISVLTAQFIVDTAVLFSAFTIVMEHLEIRGKKHGGHNKRQRIHHWRSQYVQSMVMDKAHRLGIRVSRVNARGTSAYAYDGSGKVIRGKEAGFITNAMCKFQNGKIYNCDLSASYNIGARYFIRELLKSVPATERLRIEAKVPHCSKRSTSTYATLISLCAELHASA

SEQ ID NO: 15515 - protein, 372 aa, Taibaiella sp.
MKLTISIQLKPDEKQAKRLLNTLEKANEAANAISEQAWDTRTFQQFKLHGITYHWARETFELTAQMVVRIIAKVSDAYKLDKKRQRVFRKHGSIAYDDRILRYQTDKVSIWTLKGRETIPFVCGEYQQKLLQFRKGESDLVYRDGKWYLFAVVDVIEPAPDEPDDFLGVDLGIVQIATMSNGEAFAGNTVNNVRARNVKLRAKLQSKGTKSAKRLLKKRNSKEVCFAKQVNHHISKRIVQTAKAQGQGIAIENLMGIRDRVRLRRRQRSTLHSWSFYQLASFILYKARKEGVHVEVVNPRYTSQTCAECGYSCKANRRTQSQFLCVGCGVVANADHNASKIISYLGRAAVNRPYAVSYQSARLEEQLQCPAL

SEQ ID NO: 15516 - protein, 406 aa, Cyanobacterium sp.
VITLTYPFKLKVNRQQTQEIEHILSVCRSVYNYALAERKHWYNSRKSPVNSCSLISEYIIPANALYPSYNNQAKNLTVAKKTNQDLKSVNAQVLQQTLKTLDKAFSDMKSKGFGFPRFKKQMKSFVFPAMLKNCLAEGKVKLPQLGWLKITQSRDYPTGFEAKQARIVKKATGYYLMIAFQSQESCPSAPVGKTSLGIDAGVESFVATDKGELIKAPKFLLKAQSQLKLLQRRLKHKIKGSNNWLKLQNKIAKLHEKVANTRRDWHFKLANYLCELTDNIFVEDINFTSWSRGIVRKQSLDSGIGQFINEILPFVCWKRSKFYLKVNKDGTSQECSNCGNHTGKKHLKERIHHCQYCGYTAPRDVVSAEVIKNRGLIAVGHTVNQNAYGDVLTGISQDLISLVKCL

SEQ ID NO: 15517 - protein, 177 aa, unknown
  TnpB Polypeptide
VKHPNHRYFKQSEKRLRHAKRKLSRKPKGSNNREKQRIKVARLEQKVARQRRDTLDKLSTMLVRRHPIICMETLMPKNMVKNHRLAKHVSDAAWGEFARMLDYKAGWYGRKVVHVDRFYPSSQLCHDCGYLNPEVKNLDVREWTCPQCGVFHDRDVNAANNLRDEGLRMLGQLETAA

SEQ ID NO: 15518 - protein, 632 aa, unknown
  TnpB Polypeptide
MTEVQDHSTPTVVIPSDQELKDKEEQLKKEQRKKEENDEKIRKAEEEALGIDIPSLISTLGSVRTSYKKETPNVWSINCQMVVIEFVELILQMSHPYLQLSNDHRKSIVKSLKTNKLNLVQENPDILKSVNQIILVLRKMDKALMYNEKGFVSYMNQFLKDSCKNLWLPEKGDFLDIDSNGLSNRMMLNSWFSIKQTVRSTDFLQKTSPLFYRSLLADEITEESDPLMRSKKIKLSLTPVQKEILKVWVDHSRYSYNRAVSILNVLGGNVSKTSLRDFIVPAKVCNHRCPWVLDTPKPVREGAVFEAHKNRKAGMTNLIRGNIQTFSLNFISKKKESWTLNGLNSVRRVNNREFTMYPTFGLGEFKTKENLPLPTQEELIIPEEGTPYPSLSSYKNLCSMHFDGCNYYLCVPIEKSPEKIVKPSFTLSCDPGVRTMHTCYVPDMETCFKIGDGASNKLFELDEEVEKFKVKAREAKTKQYRRFFKMRIIKNRAKIQYLQSELHWKTARWMCLNFRHIVIPRFGSTSMVCRETSKLSADNKRRMFLLAHGKFLSRLMSKAEEFGTTVQIVDERNTTRTCSHCDYVKNDIGKAEEWTCNNCKFRHDRDCTASRNIFQKQFKKKYLGVRELPPIA

SEQ ID NO: 15519 - protein, 632 aa, unknown; identical to SEQ ID NO: 15518
  TnpB Polypeptide

SEQ ID NO: 15520 - protein, 529 aa, Mycobacterium sp.
VNALAHKQSGLRPIADPFVVAPPKGVRTRTRVHLTPHEEVALEQIGVFLGEQYRATLVDRIALGAATRKEQGVWRQVRKQALTASTSSRWAGAITRTAIDSYDLGMRGLNAHVNSLTAAVSTLSARLAAPVGGTSREANRPHAKPVRGYATENERFGKSRRKAHLEARLAQARARQEAGRPRIVVGGGRLWRNRQNLAETSMTPAQWEKRWTEERMFLTADGESGKRFGNETIRVTDEGVLMLKVPGALVAEHGIRLTVTAPISLNTHRGDEWADRIVAGRAVRYDLHRDPRGRWYLDASWGYEQAPAVPLAALRTRRTLGVDLNDGHVDAAVIDPHGNPIGIPQRLDFTLTGCTARRDAQVRHVITRLIRLATEHGCASISIENLGFDEARNTGRETMGRGRRGKRFRRTVAGIPTATFRIRLAAMAATAGLSVIAVDPAYTSRWGRQHWLPALQTSDPTIDGHRAAAVVIGRRSLGHRARRKPVGPATRQRTRDGQPTRPATRRSQPSRLRVTATPRAHDAAGPPDR

SEQ ID NO: 15521 - protein, 537 aa, Rhodococcus sp.
VLAAGHDRQDRRLPAQGHVAAARLGWNPTYPDGIYVPSRVTRVVTAQVMATLRTLAYRDTAIAALSARFDPATGVVAPPTEPGDYVPSGFARGVRRQLIARPRRGGGVPAGRLRITEVQGPPQTSAMARLSAADRQLAQITSTERELVLTVKLPTCPAPAGRAQWRSVRLTATIPVHLYGRAITDWHLPTLVLDRKGLLWLCAATELVPAGEPDSATVAVGVDWSPSTLGAAAIVAEGSGGLSSDYRGWTYDDRGLGVKLARLQAEGQLLHAKAARLTRLAATAPPEVRAQLEEKIAVLDEHRTAVGIKRGKINRELAFHFARQATDYAATAGAQVIAVEDLTTLETRGHGRVNNNRAAQSARRQAITALAHTAAAAGITVVSVPARGSSAQCPGCDEPLSRPGGYHDAWCPGCRLGGNRDHIAGVNLAKRALLGRNKATRRRGQLPAIRVADHARVRRCRDKNGPTPGRPRHRRVRRSLLTAPQWLGVTPKQHVPAPQASVWDTVKPTPPHGDAGSRATHTPLQSATRVADSMRSM

SEQ ID NO: 15522 - protein, 378 aa, unknown
  TnpB Polypeptide
MLRAIKIRLYPNKAQEQTLNKVLGCYRFVYNQMLAQKQEAYKEDKTNLSVTDLSKWFHGIILKDEQYAWLKEQNTKVMKQAIIQMDGAYQKFFKQHNGFPKFKSKKDKQSALFPLEAISKRNKFNERKITLTKSLKDIKFRCSDAYFKRLQTYKEEIRSATLSKTKSGKYFLSILIDLPQEEFVKFGHTNKHVGIDLGVKDFVITSDGEVFENRHFFKKQEVKIAKLQRQLSKKQKGSNNRDKQSIRIAKAFEKLTNQKVAYIHSVANELLTYYDTVFMENLNVKGMLKNHKLAKAIQEIGFYKFKAILEDKARNNYKKVVLVDRFYPSSKTCSNCGYKKRDLKLSDRFWICPKCGIYLDRDINAAVNILHEGVRIIS

SEQ ID NO: 15523 - protein, 509 aa, Streptomyces sp.
VLRLVGGHLGALASRDLKARCADGLDHSNETWAGRKRGLTVESSSRWAGSVTKATHDQWALSRRGQAAYLDSLDTGVRMLRHRLSLPIGEKGTKRAPGGYRSKREWFVKSRRLAVLEERRAVVAADREAGVVHVVRGGRKLLNTRHNLTAAGLTEADWRKRWESARWFLAADGESGKRFGNETIRVTPQGEVSVKLPAPLADLANARNGRYVLASKVSFPHRGEEWRDRIVGNRAVAYRIHLDAGRERWYLDASWTRPVVRTMPLEAARAAGIVGVDTNADHFAAWHLDVHGNPVGDPRRFPYDLTGTASHRDAQVRHAITRLLHWAKRCGVSAIGLENLDFTAETTREKHGRRKCFRQLVSGIPTGKLRARLVSMAAELGMVIVAVDPAYTTRWGAQHWQKPLATPTRTTTRHDAASIAIGRRALGHPIRRRTAPPHDDRSDRRGHRTVQAPSGIRGREETRQPAADRAHDARSRTGTTRTRATSRASTTVRDARSDHTWVQDPLLIT

SEQ ID NO: 15524 - protein, 570 aa, unknown
  TnpB Polypeptide
VSIHESRHCWISHASPKRLKRQRTIVCNTDEDHTARDLQPQLPHSVVAEVPTVDTRQRGRRPCAKHPPRNRRRQGLRNTRPDRSTRPHPPIRQQSPETRPVSSRQLVQRHLVAEIQPPLRRQRRREDSMGAGLLRGDGGPCVQRNGTGLHSASWRGRPMTELTMTLELKLVDPNAHKRQKLRETRNTYQQALRDAFDAGCTTQTEANDVVINYDLSGYAKNALKKYVPQLTTTYNAGDLHDDHPVRFTNEGLRLDHKPENAIEWYVKIPHHEDYHLWMPAQPNPNQRDWLEALNAGDADMGESRLFQRDGTWYLHVTATRDVEDKSEASGSERTPIGVDIGEASLVTVCHRDDHGSPTRPELWADEGKTVRRLRKTYFIATRRLQERGSERIAESFGDDLWNQIDDLFHRVTREVVEYAESTENPVLVLEDLTYIRESMDYGEYMNRRLHGWGFAKLHAQVRYKAVEKGIPVETVNPRNTSKECHACGEVGYRPKQAKFKCTNGDCWMGEYQADVNGAINIADRYLSGESRSREHPNDDDSAEDGARLTAPQDSQADAEIQQETLGTYAS

SEQ ID NO: 15525 - protein, 237 aa, unknown
  TnpB Polypeptide
MLSSNFLLMARRVKAIRAPVSMKIAPSEPLLTLINNYVKALRFVLFWLKENVPNPNEKGVLGKVHEGLYTRLREEYNLPSKVAEDCYRDALSVYKGWLNNPKKGRFPRVYKPTVWLTPKASYDVYFEAMSVRIASVGELPILGYPRNLREYMSWRMKEARLVIKDGKAFLKVVFEKPLDSVEPKESIAVDINMAEVVVGKDDKHYVRIPTRLEEVHHWKSLAENLQKKYPRMWRGGE

SEQ ID NO: 15526 - protein, 381 aa, Proteus sp.
VSPAVQYIVFNRALALQNENHEAGNKFIPYTKMTSWLTEWKTDPETQWLKKAPSQPLQQSLKDLERGYKNFFQKRASFPRFKKREQNDAFRYPQGGGKLDQSNSRISLPKLGWIRYRNSCEVIGEVKNVTVSQSCGNWYVSIQTEYEISEPQHDSTTMVGLDAGITKLATLSDGTVFEPVNSFKTSQKKLATFQRQLSRKVKFSANWQKQKRKIQRLHSHIANIRKDYLHKATTKINKNHAMIAIEDLKVSNMSKSAKGTAEQHGRNVKAKSGLNRAILDQGWHEMRRQLEYKQLWRGGQVLAVPPAYTSQRCACCGHTAKENRLSQSKFECLECGYTENADINGARNILAAGHAVLACGGMVQSDRPLKQEPTEVSQATV

SEQ ID NO: 15527 - protein, 538 aa, Streptomyces sp.
MLAASFVVPGPSGVAVRTRLKQLTPADEKVLALVGAHLGALASRDLKVRCAEGLGHSAETWAARKRGLTPVSSSRWAGSITKATHDQWALARRGQLAHIQSLETGIRTIGHRLSLPIGAKGSKHAPGGYRSKREWHAKTRRLHVLEDRLERERADREAGTVHVVRGGKRLARTRHQLSDAQLTEAKWREWWEASRWFLQADGESGKRYGNETLRISPDGEVSIKLPAPLVGLANAPHGRYFLACRVAFPHRGQEWADRVAANRGVAYRIHLDVARGRWYVTASWQIPVSRTIPVTAALAHGVIGVDMNADHLAAWRLDAHGNPTGNPHRFFYNLTGMAQHRDAQVRHALTRLLHWAKTCGVKAIAVENLDFGAEKTREKHGHRKRFRQLISGIPTGKLRARLTSMADQTGITIIAVDPAYTSKWGAQHWQKPLTHENRKTTRHDAAAVAIGRRAQGHPIRRRTTPPRAHQSDVHGHRTVQADRRAPGREEPRPLLPGPRTRSVPPDRGANAGNQNAQHRSGRSAENESWQQDSLPLSL

SEQ ID NO: 15528 - protein, 236 aa, Cyanobacteria sp.
LVLLEETTNNFFKVLTLSYEFKLEPTQSQASTIDGGLEVCRKVYNHALAERKAWVNSRKCSINACSIRGEYIIAADAKRPTDASQGKSLATAKKESSNFRIPQSHLLQQPLKRLETAFVGMWEQGFGLPRFKKVGQLRSFLIPQLNRKVIVGNRIKLPKIGQVKVRRSRSIPDGFKIKQARVIRKAEGYFVILSLQSDVEVPSIPLSGYPIGIDLGLESFIATSENQFIARPPKAS

SEQ ID NO: 15529 - protein, 409 aa, unknown
  TnpB Polypeptide
MVQMLLKGVVFRLKDELPSEGKSLLEDFRLAVNNAIRVGLQARATSKYALTKLAYKDFRQGHPKMYSQHLVSAFEVAGSILKNHRRRVRKGDRARVPFVQRLFMKTENQAYKLDRAKGVVDLPIRAGCHVDLKLVLSDYHRRYLDDSTLSLGSLTLFSDRVIIAFRKNAPKSYLPESALSLDTNERSLDGVLAKGDSIVPVKAEFPEIAMIQQRHHDRRKRLQRKKAHDRRTSRNLCRREGRREHHRIEYRLHRVANVVISFAEDHRSAVVIEDLKGFKPIWNKELNRRLNLWPRRTLHQIIEYKAQWRGIPVVKVDPRYSSRTCPICGRIQDSRMGAEFVCRCGWRLDRHINASLNLLQTAMSKGLEVAGGLRFNPGAFQHDVMMTLYDPVTGARSEPNGTSGIGEVT

SEQ ID NO: 15530 - protein, 372 aa, Methanothrix sp.
VKTAYKFRIYPNNQQEAMLDVILETCRHLYNTALADRKNSYELDGISRTYEDQAAILTLEKKDKPYLKAVFSQISQDVLRRLDKAFKAFFRRIKSGEDPGYPRFKGKGCYKSFTYPQVGFALEGSKLTLSKIGSIRIFKHREVEGKIKTCIIKRDHLGHWYATLVSEVEDVPQVEVKTTLGVDVGIKSLVALSTGVTIQYPRYYIRAEHKLAVAQRNLSRKKKGSANRRKAKLEVAKISQKIQDHRDNFLHLVSRELVDTADLIVFENLNISGMLKNHNLAKHIQDHAWGKLIQFTQSKAAKAGKIVELVDARYTSQKCSQCGAMVPKALADRVHLCTNCGLEMDRDINASVNIRTLGLRGRAYEGTAKAGL

SEQ ID NO: 15531 - protein, 375 aa, unknown
  TnpB Polypeptide
MIASERIKLSPTDEQLVLFKKFCGTARFTYNECLSYKIDCYQKDGYSCKVQDLIEHIQDLKYTDEFSWIKETPEAVTKQAIKDLDKAYKQFFKRGNTGFPKFKKKGKCKESFYVRSDKFKQLDTTHIKITGVKTPIKTSKHGLITQFLNPRITFDGKYWYLSYSYEIDCCDKSNSDRVIGVDLGIKSLAVTSDEGFYKNINKSKRVKQLEKRKRHLQRKLSRKYQMNKKGSKYVKTNNIIKLEQEIRLIDRKLKNIRNTYIHQVTYDLVKTKPACIVIEDLNVKGMMKNKHLSKSIQQQEFYKFRHYLEYKCQFAGVDLVVADRFFPSSKTCSCCGYKKKFLSLKERTYYCPECGMVMDRDFNAALNLRNYALAQ

SEQ ID NO: 15532 - protein, 431 aa, unknown
  TnpB Polypeptide
MFKLVDKKENKYLVLDTGDGVIEEYFWEDIINFLQSGVVIEGCHETEQGYHFDIDNSDYQVIYKGYKFRLYPNKVQQEYFAKCFGCARFIYNKMLADKIEHYQETGEGLTVYLADYKADFPFLKEVDNSILGYERLHLQRAYNNFFKNKGFGFPKFKSKKNNYRSFSTSNDTRCNTVEIIDNKYLKLPKSKNFGLIKVKISQPIRGTIKTVTISQVPSGKYYVSMNVAIWYQSLPSRGSSIGLDLGTKDLVITSNGDKFDNIRTLETHQAKLAKLQRQLAHKQKGSRNYEKARIKLAREYEKIANIRKDYLHKISHKIVSENQAIFSEDLNVKGLMKNHRQAKSIGDASWYEFTRQLEYKSAWNGRVYHKVDRFFPSSQLCSSCGFKYEAVKTENLREWRCPNCGAYHDRDINAAINILIRGSQDLGLSLA

SEQ ID NO: 15533 - protein, 178 aa, Microcystis sp.
VPHRCENRYKKKKGSKNRQKARQRLAKTHLKVSRQRKDFAVKLARCVVHFLDVIAYEDLGIKNLVKNHCLAKSINDAAWYQFREWIEYFGVKFGKITIAVPPNYTSQNCSNCGETVKKSLSTRTHQCKCGCVLDRDENAAINILKKGLSTVGHTGTFAARPDKRLGREYLYFFRSDSV

SEQ ID NO: 15534 - protein, 250 aa, Oscillochloris sp.
MKLIAQIRLNPTPEQHAALLATLVEANAACDAISVIAWQAREFRRLPLQTRSYHQVKDSFQLGAQVLIRCIAKVADAYKLDRKVQRTFRPHGAIAFDDRNLSWYTDKHAVSIWTVEGRQHIPYRLGAPQRVLLPYRKGESDLVYHKGVFYLLAVCDVPEPDEQQMEGVLGVDLGIANLATDSDGESLSGQQIDHKREWYADAGRRCKRSARSRPNGGCASCRVDSAGSKRTRTTASASGLLRRPNARSGR

SEQ ID NO: 15535 - protein, 381 aa, unknown
  TnpB Polypeptide
MNTSNITNYKPKDFAELLGVSVKTLQRWDREGTLKANRTPTDRRYYTYDQYLQFKGINIENDKRQVVIYARVSTRNQKDDLLNQAAFTRFFKHQNSFPRFKKKNRSDVKMYFVKNNPKDCRCQRHRINIPSLGWVRIKEKGYIPTTKDGYVIKSGHVSIKADRYYVSALVEIPNNKIANSFNEGIGIDLGIKDFAIVSNGKTYKNINRSVRLKKLGKQLIREQKNLSRKYENLKKGESTQKANIQKQRLKVQKLHHKIDNIRTDHINKTIAEIVKTKPSYITIEDLNISGMMKNKHLSKAVASQKFYEFRIKLQAKCNENGIELRVVDRWYPSSKTCHCCGAIKKDLKLSDRIFKCDCGYTEDRDFNAALNLRDATTYEIA

SEQ ID NO: 15536 - protein, 397 aa, unknown
  TnpB Polypeptide
  misc_feature (266)..(266): Xaa can be any naturally occurring amino acid
VVAVRRSYKFLLRPTRRQEIALAACLEDHRQLYNAALEHRRTAYRMAGVTIRYRDQSAELKHIRADDPDGQGRWSFSSQQATLRRLDKAFAAFFRRLKAGQKPGFPRFKGRGWFDTVEWPKDGDGCRWDSQPEHPTATFVRLQGIGHVRVHQHRPVKGRVKTISVKREGRRWYVILSCDDVPAEPLPTTGAVVGIDMGVASLVTTSDGTQVANPRHLAATADRLAAAQRDLARKKRGSKRRLKAVARVAALHAKVRRQRLDHAHKXALALVRNYDVIVHEDLRIANMTRSASGTIDNPGRNVAQKSGLNRSILDAGWGVFLRVLAYKAESAGRELIAVNPANTSRTCARCGHCAAENRVTQAAFRCTACGHTAHADVNAAENILRAGLALRDAAEAA

SEQ ID NO: 15537 - protein, 292 aa, unknown
  TnpB Polypeptide
LSQTSIKIKTSIPRERITNVRIVPKGNHFIIEVLYDVEEPSIDENDFSRVAFIDPGMNNLMTVTSNVFSPILYNGKPAKAINQLYNKDRAKIQSRLPFRKPAVDAPSYRQVNAVLKPYQTKTSKLLQGITKNRNYRIHDLFHKITTHLVNHLVENDVKVLIFGHNIGQKQDINLGSKTNQNFVSLPFTKLILMLQYKCERLGIQFIVTEESHTSKCSFLDLESIEHHDDYVGRRVKRGLFKSANGTCINADINGSLNIGRKYLTSVNQYSDQLHSELVAHMSNPRRLNIVLN

SEQ ID NO: 15538 - protein, 395 aa, unknown
  TnpB Polypeptide
MQTILDSLCDYRRYCWNQGLELWNTLYEARLIGLPDELRAKIKESLTDKTIQFSEEEQALRALFPAPSERKVRDELVAQKADWQFELSSRVLQLAVKDLAVAWNLFFNNPITAGKPGFKSRKKPKQGFKTDSARIKNGRLVLDMHQRHKDEWSSIRFKGASIPDGDLKLCAVTRTKGKYIATITMDVETVALPKTGKKTAVDANVDHFDTTNGQTSLKPELLDPLYAKVRTYQRQLARKRKVNKNYRHSKGYQATRAKLQATYERIRNIQNDLLHKFTTDLYRQNDTIVIEYLDVKGMQMKKKAKNLHRSLFGRFRQFMEYKAEKFGKTLIIADRFYPSTQRCSNCGHVKTGDDKITLSGNAKHGTKHHEYVCYKCGHEDDRDHNAVLNLLALAK

SEQ ID NO: 15539 - protein, 390 aa, unknown
  TnpB Polypeptide
MQENQDLQQGQVNIHKTFCYRLQPTKKQEQQLKQFAGCCRFVYNWGLARWQERYAANESTSVFAISNELVLLKKETEYAWLNECSAQALQQSLANLGSAFKAFFEKRSSYPVFKKKGKREAFRFMQYFKVLDRHLQLPLLGFVKYRKNRPVEGTVKHVTISLSGEHWYASVTCEVRVEKKYNNPRTIVGVDVGVKNFATTFDGNESKHHHHLLSLQQETDKLKKLQRQFCHKQKGSNNRNKARLKLSKQHQRIKHIRHDTIHKLTTALCKNHAAVAVEDLCIKHMTKSARGTKEYPGKRVAQKRGLNRSIAQQGWGILFRQLLYKCNWYGSLFVLVSAKNTSQMCPCCDFIAKENRPTQSGFKCIDCEYTQHADIVGAMNIRRRGMSCFG

SEQ ID NO: 15540 - protein, 509 aa, unknown
  TnpB Polypeptide
MNDSHVPANFSHAPSDWPENRSFVFGQADLIVCTVTLSSKVHPQAKTFLEQAAREVNQVWNFCNQTSYKAWNNYVGQRKWLSAFDMNNLLAGCGDGFHKIGIDIAQCVASEHANKRNQTHYSKLNWRKSGGLKKSLGWVPFKANTLRFSVQDAKGKNVRIKGDAKPSIPAWPQKMVGESKENYACRKKVFEPTRIAAEEQLMRWEYRRVRACEKIKVSFMGKTIRLFNAHRLLNAYRLAMQGVGSLRAGNFSQDSVGDWYLNVVIDRVELPLAAIYGADSSIGLDPGQKVAMTGSDGSYYQTYNDEILKANEIPELRSQRYREIEPKIQQAQRRGHRRKAKRLHRKATRQRKNDRDVFCKEIVSLYQRIWIGNLSPRKMAKSALKGQAKSIMDAGIGMASATLKSLGHRAFRVVETIDERYSTRRCSVCMKLSGPSGLESCDVRQWVCGVPVGNIMLGIRGCNTLHLRDVNGGENIRHSGELQWNGLSLQQRRANTAAPRYWRPFAGTR

SEQ ID NO: 15541 - protein, 464 aa, Saccharopolyspora sp.
VKAAKTTRIAYSDGLNPGKQAALTEQARRPGRVRAKVWREYGALAGVGVTDRDIRDRWLADGTADQFGVLANAWKETLRDTIADIATYREAATAPVRRAIARLAVSEAERKRLYTALRRDTWPQDGYLSRMMRQHWRHGHSRVANRIIVRADQYTTWAHPASGNVWLSVPGLERRSPVRIPLNTNVAPSGTLRLILRDGRVEVHHQIDAATMPTSQRPCGTGDVGVDKGYAEALVDSHGNHHGDGLGELLASESDHRKCKGQSRSKLRALAQHELAQGNRAKHDRIVANNLGTVKWQRRAHRLEQRVRTLCFTAAHQVCDHANHVVAEDLAKPFSARHSRGRTTNRRLNQWTKGVLAEALSSASERRSSALSPVNAAYTSQVAPCCGCLGDRAGDRLHCTRCGDVWRADHAAAITILRRHGDPDISLHTPHKRVRQILQDRDRRSEETAPPGLRPPDGWRAKHP

SEQ ID NO: 15542 - protein, 281 aa, Saccharopolyspora sp.
VPVPTYTSLHIDDRRYAISRPMRVHEPGSARCRGKEHDDRRRSRSRRGARGRGGAVAAGVDRGVTITAALHDGHQLNCPQPSTKERATRRKHERRAARAPKGSQAKGDEHAKVAKLKAREANVRKDWVEKTSTELARSYDLIRFEDLRITNMTSSAKGTVDNPGRNVRQKAGLNRGILAQGWGMLRSRTEDKSPGWVEDVPAPYTSLRCSDCGWIDKNSRKSQAEFVCVSCGFTCNADTNAGINVAAGHAARASGGPDPAGSCAGGTTTREDPSVRERTAA

SEQ ID NO: 15543 - protein, 195 aa, Saccharopolyspora sp.
MVVARGPDGRWFVTFSVDTDEPELEPEAGRAAGTDLGVRDFAVTSDGERIANPRHLDRKARDLTRYQRRMAREQRGSNNRHKAKEKVARAHRNVRKDFLHRTSTNLVRYPSPETCSVCGHLLDHLKLATRAWTCPGCRTRPGSQRGQEHPCGSPAGPLKGGEEVKSLLRPPPMTLSATLSPMPVIGASSRAVSVR

SEQ ID NO: 15544 - protein, 491 aa, unknown
  TnpB Polypeptide
VIKLYRTIPIKAKFTDEEKAYWIDQCQNANSLINCAIYHTRQSHYQWREKQPNALAFYWLCDEFRCGWKLYRCRTTYPELDRQLKLNPHYKALAAQSAQQTLNSVGESIKSYNSLVDAYYQGNVNRPSLPKYRKKGGLAAVTFPRQALTYKDGCFRPSISKESKPELITQIELPLPEFIDSDWVKEVAIRPYLGELWIDWVIDDGKKLIKFNPNLDYSQAWGFDHGGTNWLTGVSTQGKSLIVDGRKLKSMNQGYCRLVAKYKHGKSEFYWDTNLDRVQCKRNKKVRDAINKAARFIVNRCLADGIGNLVIGWNEGQKNSPQMGKRGNQNFMPIPTGRLIERLKQLAGEYGIVLTLTEEAYTSQASFLDGDLLPKYGEKPEGWTPSGTRVKRGLYRTSDGQLINADCNGAANIIRKVATQLGVNLAKVGRGSLALPKRYDLFTNLKRSYREKCEATVFQAVASHQLRILSLLRRGDVNLNKHPLSHDPISS

SEQ ID NO: 15545 - protein, 403 aa, Nostoc sp.
VFNLTYEFKLKPTQKQILLFEEWIETHRRVYNHALAERKDWYKSRSCQINACSLHSCYIIPAEAPRPTFASQCKSLTAARQENEYLKRVNAQSLQQTLRRLEKAFVSMWEQNHGFPRFKKPGRMRSFSFPQLGQNPLTNNQVKLPVIGAVKVRQSRSIPDGGIIKQARVARKVSGWYVMLTIQWDVSIPERLPHGEAVGIDVGLTNFVATSNGLLVKRPKFFVDAERKLKLLQQRVKKKRIGSNNWRKAQRKVASLYEYVTNCRKDWHTKLSHQICNDTGMVFIEDLNLVGLSRGMLDKHCLDGGFGQFFSILDRICFKRSVYFQKVDSRKTSQICPNCQSVTGKKDLSERIHNCSNCGYTTHRDVAAAQVVLQRGLAAVGHTVKMLAEGKFVGIPVKQESSA

SEQ ID NO: 15546 - protein, 308 aa, Thermoflexales sp.
MLRTYKFRLYPHARQSKTLNHLLDLSRTVYNAALEQRRELYAESSVGVTYTEQSKYFGQLRRQDVDGLGLLNFSCMQHTLRRLAKAFCAFFRRVKAGETPGYPRFKGRNRFDSYDDRRRALLYIQNVGEIKITYHRPIPDDAQIKPVIVRRSLGKWYVCFPLELPDPEITEGEAREVGIDGGLHSLLALSDGTLAENPRWLRNALAELGRRQRRKAAFPVAKQHEPIANQRRDVWHKITRALVDEYSLIAIEDLTHSFMTHNHHIALSARDAGLGLFRQLWESKVAETGSQDVVMPPAHIAAGLCKKI

SEQ ID NO: 15547 - protein, 260 aa, unknown
  TnpB Polypeptide
MWYDNSMLTITHEYQIKPNRQQEAEMLSWLETCRKVYNYALSERKAWVESRKCAVNACSLRHEYIMPVDAPRPTFASQCKSLAFSKKNIPELALPHTHVLQQALRTLEAAFVAMWERGHGFPRFKKPGRMRSFLFPQMGVNPVVGNKLKLPKLGVVKMRLSRAIPEGFELKQVRVVKRASGWYAMLILQMDVQVPERMPHGEPVGIDLGLLSFLATSTGETIARPRFFVDLQGQLKLPFGFASSLRRETLLQDWTHCNGD

SEQ ID NO: 15548 - protein, 346 aa, unknown
  TnpB Polypeptide
MKVKKTIKGKILELRKRKEELLKHEYENFQRYLHGDKTVSLYSATKQQADRLLKKLKGKIKPNKEYPLILRRDVYRANTKLTPYWLKIPIYGVKGGINVPIKTHEAITEDMVCREAKIIRKDNEWFVFITVEKEVEEINPKSILAIDIGIRWIATTVNSNNPKPKFYGKELRKVKGHFFYLRRSLALKKAYKTIKKIGNKEKRVVNDILHKISRTIVNEALKNNSMIVLGNLKGVRKNGKGRKFKRKLNIGFPFYKLTEFIEYKAKWLGIKVVKISEKYTSKTCHKCRSIGLRVGSLFKCFNCNYQCNADYNGAMNILKRAMGYMLIAGAERALSSGLDTAHNSVG

SEQ ID NO: 15549 - protein, 268 aa, unknown
  TnpB Polypeptide
MLVKISKIGEFKILGYPRNYKEYLYWEMKEARLVFNNGKAFLKIVFEKFAQKIEPKDSIAVDINMQNITVGKDDKNYVKINTRINEIHSYKSLAEMLQIKYPKRWKENKNIKRRIMTFHLKAKNIAEDFAKKVGKKIVEEAIKMNANVIILENLKYMIKKVKKIHKKFRDKLYLMQYRKIQYWIDWQAKKHGLLVKYVYSGYSSIKCPKCNRRMKEIDHRWLKCNCGYENDRDIIAIMNLNGRGSLGLSTAPQMRDVIPNQLRGTLVL

SEQ ID NO: 15550 - protein, 387 aa, unknown
  TnpB Polypeptide
MTRRIDAIRATVSMNIALTNSLLVFAKNYLEALRYVLYWLKEKRINPNKRNILSITHKALYNILKSFNLSSKIAEDCYRNALSIYKGWYNNPNKGRFPRIFKPTVWLTPRLSYTVNFEKMLVKILKIGEFKILGYPRNYKDYLSWEMKEARLVFNNGKAFLKITFQKLMQKIEPKDSIAVDINMQNITVGKDENNYVKINTRINEIHHYKLLAENLQRKYPKRWKENKNIKRRITAFHIKAKNIAEDFARKVGKRIVEEAIKMNANVIILEKLKYMIKSVKKLHKKFRNKLYLMQYRKIQYWIDWQAEKHGLLINYVYAAYSSTKCPKCNNKMKEISYRWFKCDCGYENNRDIIAIINLNGRGSLSLSTAPQMRDVAPNQLRGTLAF

SEQ ID NO: 15551 - protein, 404 aa, Streptomyces sp.
MIRAYKFLMRPTVGQSATLGEMLRDHCSLYNGALQERRDAWRHTSKTSIRYGQQSAQLKDIRAFDPEHQGRWSFSSQQATLRRLDKAFAAFFRRVKSGDKPGYPRFRGVNWFDTVDFPKDGDGCRWNSTPHDPTTRVRLQGVGHVKVNQHRPVVGEVKTVSVKREGRRWYVILTAEQTAPEPLPETGRVVGVDMGIVNFLADSGGEFVPNPRHGSRAAAKLEAAQQALSRFPRVSRDRRTGNHQRAVSKVADLHRKVRRQRLDHAHKTALDLVREHDFIAHEDLKIRNMVKAPAPKPDPEQVGSFLSNGAAAKAGLNHSISDAGWGVFLTILHAKAESAGREVIAVDPRNTSRTCPECGHVNAENRPTQEKFHCVSCGHSAHADTVGAINVLRAGLVRRNANPA

SEQ ID NO: 15552 - protein, 394 aa, Streptomyces sp.
VKRAFKYRFYPSVAQAAELSRTFGCVRKVYNLALEARSTAWARDQRRVSYADTSAMLTGWKQSEELGFLAEVSSVPLQQTLRHLQSAFTGFFTKRSGYPRFKSKRKSRASAEYTRSAFRWRDGKLTLAKMDAPLDIRWSRPLPEGTQPSTVTVSQDRAGRWFVSILVEAPITPLPVTDGRVGVDAGLTSLVTLSTGEKVTNPKHEKKDRDRLAWAQRQTARKQKGSKNRAKANRKVARVHARITDRRRDFVHKLTTRLVQENQLIVIEDLKVGNLLKNHHLARAISDAAWRELREQLEYKCAWYGRELVVVDRFLPSTRTCSACGLIRERLPLDVREWTCEGCGTLHDRDVNAANVLLAAGLAVSACGAGVSPAWTVSVRAVGDEAGKLRRSAA

SEQ ID NO: 15553 - protein, 440 aa, Streptomyces sp.
VSHPATVKRQFGHRARLALSPAEVLTLDAQAHAARTMWNLLHHWWTMLPKDKRSLAAADAAIRQARKDIDWLAVLPAQAAQAVLKTYFQSWKNCWDGRAGDPNFKARFRTAMSIDVPQGRDLNIIRVHRRWGMVNIPKLGRVRFRWTKDLPVGKRANKENRITGARLVKDALGWHISFRVQTLEAAPEPHQGPQVGIDAGVNIPLALSNGDHQDHSRPPRLPDGTSDRDKWLTPKEKAKLLRLERDAAHRKSFRKPREKSSRRLQHTYDQIKRLRATATRRALDWQHQTTTYLARTYGVIVVEQLNITSMVKSARGTVEEPGTNVKAKAGLNRSITQEAWGRTVTMLTYKLARYGGELVKVPAANTSRRCHACGFITPGSRETQARFVCKNPDCGWSGNADWNGARNILHLYRIGHVVVVPAAGRAVARRARRVKPATAR

SEQ ID NO: 15554 - protein, 413 aa, Fischerella sp.
VYTKNIALIYKGGDKQLRTAYQYRLRPTKQQATEIDRWLSMCCAQYNYLLADRFNWYEQNRCPVNACPLVCHLPELRDNPDYYSQKKTLPELKKTHSHYGDIYSQVLQDVVKRVKVSFDRFLKGDSNGKRSGKPRFKPRNRYRTFTYPQMKDGCLQGNLIDLPKLGKVKVILHRPLPDGFKVKTASVTKKVDGYYLTLSLEDSTVPEIKPNINPELITGIDMGLKEFFTTAEGETVTIPQHYRKAQKRLRVVQKRVSRRKKGSNRRQKAVKQLGKQHKKVADKRKDFHFKTAKNLLQKYDVIAHEDLNIRGISRSRLSKSVHDAGWGNFLSILTNKAENAGLLVIPVKASGTTQECSSCGTKVPKKLHERWHECSCGCSLDRDHNAAIVIKNRSVGHPDFKAQLMSGSSSRSH

SEQ ID NO: 15555 - protein, 395 aa, Lactobacillus sp.
  misc_feature (252)..(324): Xaa can be any naturally occurring amino acid
MLVADKKYWQYTQSARILQLAISDLGKAWKNFFDKTQPSWGKPKFRSKREARQGFKSDRSKIKDGILYLEQARGSSVPKDQWRGFKLSEKPLSDEFGTVSYFKEKGRYYVAIPYKIKAEDVKLPDKTGKATAVDVNVGHFDYTGGRVNVLPKKLDRIYKKIKHYQRKLAKKQVENGEVACKIENYLKTKAKLQACYRKASNIQNDLIHKFTTELVNDYDKIVIENLSVKGMLMSHVASKGVHRSMFGKFKQXXXXXXXXXXXXXXXXXXXXXXXXXXXXXXXXXXXXXXXXXXXXXXXXXXXXXXXXXXXXXXXXXXXXXXXXXPSTQRCAACGNVKKGDDKIPLYGNKKHGTKHNEYVCYNEKCPNYNKVVDRDKNAMLSLLALTEYPELNHAL

SEQ ID NO: 15556 - protein, 362 aa, Bacillus sp.
MKRMSQTLTVKVKLIPTKEQIRLLEESSHEYIRVMNMLVSEMVEAKKSTKKSTKDIEANIPSAIKNQAIRDAKSLFTTKVKKSKYKIIPILKRPVCVWNNQNYSFDCTHISIPFMVNGKSTRLKIRALLIDKNNRNWDLLKYKLGTLRIIKKSNKWIAQIVIKLPTNERVGTKILGVDLGLKVPAVAITDDDKVRFFGNGRQNKFKKRKFRNRRKKLGKNKKVNAIRRLDDKEQRWMQDKDHKISREIINFAVDNHISVIRLEQLTNIRQTARTSRKNEKNLHTWSFYRLSRFIAYKAMLAGIQIEYVNPVYTSQICPKCAEKNKARDRKYKCQCGFETHRDIVGAMNIRYATVIDGNSQSA

SEQ ID NO: 15557 - protein, 416 aa, Rhizobium sp.
MVFPMKERLGYRYRIYPDARQARLFRQTVGCCRLVYNLCLEQRSMACAMPSRHRLSSFDQIKELPGLKAHLPFLKDVPNHCLQQAAVDLDKAFKNFFKGHAAYPKARRKFQNESFRFPDPKQISFGEKGILLPKAGWVKLVLHRPFLGEVKNVTVSADGDHWYVAVQTEREVDEPASVLDLPDLVELGGDLGVVNALALSDGTVYDLPRMTEKEKRREANLARRVSRRSRGSKNRLRAQRDLRRFRARIVRRRRDAKHKMTTDVVSRCDVLYLEDLKLKNMTASAKGTVEEPGTNVAQKSGLNRAILDVSPGATRLQFEYKMRRRGGAVFYVNPARTSQRCAECGHVDPKNRIDRDRFECVRCGHAACADHNAGRNILHLGRKARTGGHPGMACGSNLAGGRKQEEDGSSQVAQAA

SEQ ID NO: 15558 - protein, 363 aa, unknown
  TnpB Polypeptide
MFAIKRALKLNNKETTLMAKNAGYRRVVYNMALSLRQQLYGVVKTSDSRAINEIKKILTNHIKKRPENAWMNELSGRVYQNALRDLSNAFSRFRKGLAKHPKFASRKDGQSFAVENSAGKSVLAIGNKIKIPTLGTFRLHEPFDERYVTQTFNLTKEGKNWFVSFCVDADRLPVNHTQEAVGIDLGIKSFATLSTGKTFDAPKPLKQAKTKLAMLQRKASKQIKGSNNQRKTYDKIRNLHFRVRSIRKDFLHKLTTHIAKTFKLIKIEDLNVSGMLANHKLAGAIADLGFYEFRRQLEYKALMYGTKVETVSQWFPSSKTCSSCGHIQDMPLNVRTYDCSSCGISIDRDFNAAVNILNYQPSA

SEQ ID NO: 15559 - protein, 518 aa, unknown
  TnpB Polypeptide
VKLVKTLKIPITGSRQNMALLGRLLEEEQRLINNALTILAQPRPSPLSRNDALRILGRRTSQQYILRDTGITRQIFAEGIVTKAFQLYEGQSRAFRQRLYRQVRTWDWVDLVVLRKVIEAQGGSWAGLRGTTAGGSLPFGLTAETAGEVARSERVPMRPIQKPLAFLRSRTLRFVKTRRGNLGVILLHPWRRGHRLFFRVRGHGRDAFIEELMRREGQGRGTATAELRVEDDRFVLCVLYAREVSPPTYVPETYVGVDLGYVNIAVAAAVTPDGKRLIRPKFWSAGSVRGRLNVLRARDAAHQSCGKRPVTTAHHRRYWTYRIARELVEFAKGFPSPALVLEDLRGLRHGRRDWGRRANGEFHTWDHGRMYRFVEHLAGWEGLRVLRVPPRGTSSTCPKCGGPVNRNRKKRASRCRNPACGYQNNDDLIGAFNVALRGASVAPYPTSPAKRLHLHAGTSTRGEPEFHRLRGHRVRPQMIQGGDRGERSSSNVANPTSRGTLAASPGPHRAVRRQTGQA

SEQ ID NO: 15560 - protein, 386 aa, unknown
  TnpB Polypeptide
MRTFEYRLYPNKEQSKLLMSCLAESRHIYNEMLDMLKAQYEQDGTFPSKYDLNKQFKGHGGEHVPATTVQMLADRLSKSLKRFLAAKELNIASMGFPRFKKPNRWHSIQLRQYGYRRDARLAEDKKHLIIPAKLGGSIKIKMHRPIEGTPRTVHLVHRADGHWYALIVCETEPHTEHAPSTCNHPDIGIDVGLKSFLTDSEGHTVPNPRFYRTSQKTLRRKQRQLCRRKKGSHRRRKAARNVAKTHLKINRQRRDHHFKTAKPYTEGYQIIAVEDLQITTMVKNHHLSKSIMDASWGTFLDILEAKAESAGHQVIRVNPRYTSQKCHQCGEIVQKSLSVRTHICPFCGFVADRDVNAAKNILLKARAWPSGTVSNGSPAELRSPQR

SEQ ID NO: 15561 - protein, 314 aa, unknown
  TnpB Polypeptide
MARATRCWSRAAVTKPPARKPRRSGRGGSTYGAPPMVLRSLLASCKGEDGVPVPGVPGRGAAADAVAPGRWFVVLHVDVPGPEPLPATGQAVGVDVGLKDFAVLSTGERIPHPRHMERHERRLRRCQRRLARCQRGSQNRARARVKVARQHTRVTDARRDFLHKASTDLVRRFGVIAAEDLNVAGMVRNRSLARAISCTGWGGFRAMLEYKAERYGRTVVAVDRWYPSSKTCSACGHLLASLSLGTRHWTCPACGTRHDRDVNAAKNILAAGLAAGAGNGADACGGGVRRAGATRARSPVKQEPLGVSPGIPVL

SEQ ID NO: 15562 - protein, 337 aa, unknown
  TnpB Polypeptide
VYSISSACTRRFTIQSRGHTAFPPNLLYVQSARLPMHTNSTEKKQRRFREFGAITYDSRVLSYNTQRGICSISLIDGREKMTYTCYRPQLMKFAKGEADLVLVKGKFYLYQTIDIPDEEEETAEDFLGVDMGITDIVSLSDGTNISSDEIKNIRNRYNKVRASIQSKGTRNCHKLLKRLKGRERRFATIVNHRISKQLVAKAREEHKGIAIEDLKNIRWGMNSKKRNKTFRRRSNSWNFYQLRSFLEYKCKLAGVQIVAIPPAYTSQTCHECGHIGIRNGKHFHCAHCGNVADADVNAALNIATWGYVNTHERWELLSCPIHDDISTSKAHKFLHCE

SEQ ID NO: 15563 - protein, 522 aa, unknown
  TnpB Polypeptide
MHAIISQIVKGRETHEGPPRSVVSRTYPRVPHAAFGKNGESLDLGKVLDDIKKDAELVTRYALKEMTERNLALVSSFDRYKPAEAGRRMGLFLPEEVKKRFKSGASRLEKMFQERAVSALRSWASRVSVTNQTHSGYVSAGWKRTVRGSQPKMLQPRLALSAADKYYRRMSFTGERIVLEMVVQGQWVTLHFPTPPQLLEEGVRLGVPDIWIDSQDRVVFGFHGTVDPARPEFSSRYIIGVDVGVTNPATYVVWDSIKEEIVEQSILGQRARSLHNKIKRTQTQIASLKRQGRDDEAVPHREHLSNRRKELSILIAQEIADTAWRYGNALVVFENLSHISNTMRFGRWFRGEVYRRTRDMLEADGGRALKVHAAYTSQKCYICQTKLDTSNYNNPMCNSCNITHHRDINAAANIAQRTNHAKACQTRKRHATKTKRVRRSKCHVKPLKHPGTKNRPTPKAPQNQKKTHTPAPRREVNVRICPADTRVSAVDHMKWFQTNSGTTNPVDTQTTKNTVDMVYPKE

SEQ ID NO: 15564 - protein, 381 aa, Corynebacterium sp.
VQLRYNFRLYPTPGQQTTLAEAFGCARVVYNDALAARMEAFQKGERLTDAELSKRLTAAKSTPERAWLREVSSVVLQQALADLNTAYRNFFASVTGKRKGPRIGLPRFRSRRDTRQAIRFTKNARFAITTGRKLRLPKIGDVKVAWSRELPSDPSSVTVIKDAAGRYFASFVVQIDDEPLPPVASEVGIDLGLTTFAVMSNGKTIDSPRFLRQAERRLRKAQQALSRKEKGSRNRAKARQKVARLHAQVADTRRDWAHKHTTRIIRENQAIFVEDLCVTGLGRTRLAKSVHDAGWGQFVTMLEEKAHRYGRIFGKVDRWFPSTRMCSQCGVVGDKKPLHVREWTCGCGATHDRDVNAAINILTAGRAGSLTACGGTVSPSV

SEQ ID NO: 15565 - protein, 480 aa, Vulcanisaeta sp.
VSPLGEFFQDGERGPTTPAIPGEGIYPVEFTNRRTIIVRLLPNGAQERKLKRLANISAKLWNELNYERRQQFFRNEGIDFRGTWSKYYEKYKEILGVNAQAVMQKNNEDWNSFFTLLRLKKEGKLPPHMKRVSPPGYWKDKETDRRKLIIVVRQDRYEVDVERRVIILKDFNMEVRFVGRLRWFGKQGRLEIIYDDDAKNAWYAHIPVEVGVEEARTGKRSKHIVRGERRVIQIESPKGNKVASIDLGINNLASVVVSDGTWILYKGVRTKEDYFYLQRLISRIQSLRDSLKYKLLDDAIDELNHEVRRLFGKLMRRLLHLYRNLAKHLIEQLHELGVSTIYLGYPLNIAQEKGNKFTVNLWSYRKLMEAIELKAQEYGIRVFEVVEYNTSKYCAYHNVEVKRKPRGVVHCPFGHKLHSDLNGALNIMRRAIGKIPLVIKKPLSFIVDHNRVAPAKRGVTSKTPRKPRPSGREGVIRTIN

SEQ ID NO: 15566 - protein, 364 aa, Vulcanisaeta sp.
MKAHRTLLIRLPRDKCDIDYIRRLMALANLAYRGYEVWVPDIPKSIQYQLYNFKDFKTSLIFGTAPKRWFARTWVPLKTLRVYADGSMKGDKGAPVVLDFRSSVIRLRQVCKNEPRYVVELPMPEWVVERVGEGGDVKYTMIGLRGEEPYLALVAERTVEPYQPSGYRLVVDVNSWRYGIAWGLIKNGKLITWRTEGPGTFLINTLYHQAVDRERKTGKLRRLGYGGTAVVNRVRRQAFTRRSRIYRVTRDKAYFLASKLVRKALKYKALLVIDDMSEESRRELLEEGLPRDVIKLLMSNLRRFVHQLETLAQWYGVPYRFERLPSTVCPVCHHELIQLPGRTMACGNCGFKAPRDMVPMYWVI

SEQ ID NO: 15567 - protein, 464 aa, Moorea sp.
MKAPTKVIRTDKWQLNPTPDQKVLLGETVNVYRHACQYLVGIIHTHWAELGELTADQMTPAVEKLMHQTAKRPNVKYPQFNKAFYKFPSYLRRAAISFSAGQVSSFVTRYRDWQSGNRKRRDAKPPRLNADTGCYPSLYKGQCYKLHGYDQVEIKVFNGSDWVWTTIQVTSLRERHLVASNKIMSPSLVLNERGYYLSVPFACKPEKRKPEANVTAVDLGINTTATIAVVTHSGTVIHSAKPTLREREFVHPGRDIDRRDKRLKSVSTRASKTMGKGGRLHKGFCSKTYEKCRRINHQIGHIVSKRIVEIAEQFNSVRVAWPTALAIVFENLKGWKPKGGKKRSNLRQRFHGWLKAKIRNFTEMKWAELGGKVIEVVAAYTSKLAYDGSGKVRRSSKNYSLATFPSAKRFNADLNGAYNIGARGVFKLVRRNSNEGRSSKRFGRPPRSWVCLCDLWTNGSSRLA

SEQ ID NO: 15568 - protein, 196 aa, Calditerricola sp.
MPMKLSEWAKKRGNTYKTAWRWVREGKMPVPAPKPLAKRLRLLQRRQRAHSRKEKGSKNRQKSALRLARLYRKIRNIRLDFLHKLTTELVRTHPVIAIEDLNVAGMLKNDRLARHIADVGWSTFRALLEAKAKRWGVRLVKVSRYEPTSKTCHACGHVMSELPLSVRTWTCPKCSTHHDRDVNAAKNLLRFALTVA

SEQ ID NO: 15569 - protein, 395 aa, unknown
  TnpB Polypeptide
MLLAHKIALDPNAAQRLYFARAAGTARFAYNWALAEWRRQYAAGEKPSDVSLRRQLNAVKRDQFPWMYDVTKTAVQEAIIDLGAAFRAFFEKRGKYPKFKRKDDRQSFCAANAAGTFRADGERIKLPVIGWVRMREPVRFTGSLRRATISLEAGHWFVALMVETDDVQPVEQPSPVVGVDLGVSVLATLSTGETITGPKSHAKALKRLRRANKALARKRRGSANFRKAKRRLARLHARITNIRRDATHKLTTRLTKTFGAIGIEDLNVKGMAANRSLARSIMDGGFFEMRRQLTYKARMYGAQLVVADRWFPSSKTCSCCGVVKPTLALSQRAFSCDACGFVADRDHNAACNLERIAASSAATACGAERSDVKRKPRVKRAATKQEENTALPEAA

SEQ ID NO: 15570 - protein, 363 aa, unknown
  TnpB Polypeptide
MLKAFEYKLEPNKARRYAFARTLDVCRELYNDALQQRKWQRISRYEQSEQLTILKTEVPVYKHVYSQVLQNVLDRLDKSFKNFLHYGFGFPRFKSASRFHSFTYPQSGFSLEGKYLKLAKIGNVKVRLSRPLPEGAKIKTCTIKQTVNGWFAVLVADVPVQPLPACNMKIGIDVGIENYAALRDGTMIQNPRFYENGQAELKRAQRRVARRKKGSHRRAKAVILLRKVQARIAKRRLDWLQKTTTKLIRKYGKIVVENLNVKGLAQGILSKQVNDASWGTFFRMLDWKAESAVNRAIEYVPCQYTSQDCPRCGNREKKLLSQREHKCSVCGYRTHRDTAAAQSILARIEPSGTNVGEGIPCVA

SEQ ID NO: 15571 - protein, 414 aa, unknown
  TnpB Polypeptide
MDAMRWMHRVRLYPTATQEGRLRFMLDVTRQTYNALLDERRYAWTARRISITSNQQYAEITALRAEDARFKAVYRECIDAVLHRLDLAFAAFFRRCKSGETPGYPRFRAASRWRQLEFPHGDRALKLLGERQDRVRIPGVGTVRLRKGRPVPRFGRAFVVVRNDRWYAIFECSREPQPLPKSGKVIGVDRGVHVLAATSDGELIRNKEPQARRSRITARLQRELEALTKRDENCRCLNYDDPARRKAVKRLARSKEREANVRLDAHYKAALRIVRSADAIGLEKLDLRAMTRSAKGTKKQPGRNVRSKSGLNRAMLDAGFGILARLIRGKAEYAAREVIAVEARFSSQTCGRCLHVAARSRRRRRFACVSCGFTTHADVNAALEIRRRAQSARTSGLSQGRTLLLPHDAAEGRT

SEQ ID NO: 15572 - protein, 469 aa, unknown
  TnpB Polypeptide
VKRKISNPLTLKIKYTCADSDVSTIAMIIEAYNPVIRFTYNRVEEKSNINTKELSELQSKLNNINPIIGSHLFNSAQYQAKAMYKSRKATGTNKPLIFGGRKNFVRLCQHKITKEEWLEKRLLPLHSVGEANQKGNRLFRILDTHTVLFKPNKDIHINLDLQSVGKNNTRKLKRLIELQNQKAISLTYQLDKEYVYITYDNSIFEQYNYALKSNRVMAIDLNPNYIGWSVMDWQDNYNYTLVDSGMFSLKLLNDYRDSLHIKSSDKLSIYVTNKRNHEIIDIAKQLFNLCQHYHCETFAIEDLSINSVTKETFEDRNRRKLINNHWNRNLLIQQITKHIKSSPTSLVEVKPEYSSIIGNLVNRRLGLPDPVLASIEIGRRGFEYSTQYIFKRRPVQKTVIFPLLEAVIQAISLSLEELGINVPEQNKWEDVFKLVKNPEVKYRVPLSKSQLDSPCSKIYKQKYLTVYNF

SEQ ID NO: 15573 - protein, 457 aa, Moorea sp.
MYKTIPVKAVFSDEEKAFWEFQCQQANSLFNCAIYYAKQKHYKWLEEQQAYTTYWREDELKAGWTTYKCGVKYPEIDKALKMSPHYKAMAAQSAQQTLKTVGEAIASYNQLVGLYYKGEVDKPRFPRYRKSGGLASVTFPRQALTYKQGLFYPSVSKESKPELLTQITLDPPDFIDPDWVKEVAVRPCYGQLWIDWIIEDGKQPLATNPDLNYSQALGIDHGGDNWLTCVSTLGKSFIVDGKKLKAMNQGYSRLVAKHKTGKPEKYWNSTLDRIQLKRNNQMRDAVNKAARFIINRCLNDGIGNIVIGWNEGQKSRSNMGRKGNQKFVVIPTKRLIERLKQLCLEYGIKLIITEESYTSKASFLDDDSLPKLGAKPEGWRPSGKRVRRGLYQTASGMLINADCNGAGNILRKVTTQPFDLAKVARGALTLPHRYDLFSHLSKSYRYKGGAVRVHPTA

SEQ ID NO: 15574 - protein, 355 aa, Campylobacter sp.
MSANNNELISISHKIELKPNNKAKTHFKKAFGCARLAYNWGLAKWQEYYKQGIKVTHLDLKKEFNAIKKEQFPFVYEVSKYATQQPFLNLNLAFQKFFRDLKQGKVSYPKFKKKKDNFGSYYIGGDQAIIKDEKYLKVPNLGLVKMRENLRFNSKINSATISQKGDKYFASFSVEIPQDEFIKTHKIKENKGGILGIDMGLKSFVSLSNGLSINAPKPLNKLTRKLKRVSRQLSKKQHPKAKGDKTKKSNNYLKQNLKLRKIHTKIANMRNDFLHKLTSILANHYKYFCVESLNVQGMMKNHNLARSISDVSFFEFKRMLAYKSAYRGNEVIEADRFYPSSKTCHCCGYKKEFQL

SEQ ID NO: 15575 - protein, 477 aa, unknown
  TnpB Polypeptide
MKAILVDETNDQKQIMDNMMLVFCTAKRYSFNRLLESKVKIGELEKDVSRKYSLNIRQAKDAVESARQTILSQKELVKKNCGSYEKKVKSIEKVLSQSTKRLTDKKRNALLSKLGKRQRKLNYWESFIDSNTIPPVIFGTKQMFLRRCKGLISNQEWKDCRNNRIYSRGDKTKNGNPNLRVIIKEGMSFLEISTLEKTKSNRAIKIQVPIYLPQKLSKKTGKINGINYRDLFLKHLASGETYQVEMLKINGRYYCHITFELPKTKVIYTGHNGIIGIDTNPDGFALTMIDNKGNHKWHTYLKQHELLYARTNRRENLCGELVKQVVLIAKAYRCGIAIEDLKFRNDKDVYSKFARIKNNFIYSKLLIMLESACIRKEIEVIKVKPQFTSKIGLYKYCHQYGMVVHNGAAMVIARRSYKFKERVPKILNDKLIEDSDKFNNKNEWARWNEINKNIKRKVGVNPDLWLVNRKKILGIVS

SEQ ID NO: 15576 - protein, 419 aa, Geitlerinema sp.
MILTYCYRIKPSAEQEVVMLHTLEWLRRHWNYALGQRLDWLRRTRCRIDRCSLVSEPIGDISERVTYYTQQSALKETKQLFPEYKTIWAEAQQVNLQRLNRAWERWLVPDRSGKRGGRPRFKKPGELRSFVYPRINCPKAGAHLKEGILKLSKIGGMRVILHRPLPNGFKLKTCTIVHKADGWYCCISMEDKTVPDPLPLDEVKSPIGVDVGLKEFLTTSMGETVPRQQTYRKAQRHLARQQQKLARQQKGSKNAEKQKNRIARVHQRLGRIRKDFHYNTAHHLVKNHDFIAVEDLNIKGLARTRLSKSVLDAAWGQFITILDAVAVKCGIRVVKVTPHGTSVDCSNCGAKVPKTLSIRLHQCHRCGLEMDRDENAALNILMRALNAVGLIVSACGGQENTQPLKQEAECWSGVQLSLF

SEQ ID NO: 15577 - protein, 402 aa, Actinomadura sp.
MARQVKRAFRYRFSPTSEQAVELSRTFGCVRLVYNRALEERTRAWYTDQRRVSYVETSAMLTAWKRTAELAFLTEVSSVPLQQALRHLQTAFGNFFAKRAKYPRFKSKKKSRASAEYTRSAFTFRDGRLTLAKMSEPLDIRWSRPLPEGAVPSTVTVSRDSAGRWFVSLLCEDTIDPAPATGRAVGVDAGITSLVTLSTGEKITNPRHERRDRERLARAQRDLSRKAKGSANREKARRRVARIHARITDRRRDFLHKLSTRLVRENQTVVIEDLNVRNMVKNGSLARTISDAAWRDLRTMLEYKADWYGRELVVVDRWFPSSKLCGACGRVGERLPLNVREWTCGCGATHDRDINAARNILAAGLAVSACGDGVRPQRESSRTGQSSMKQETPPAQVGIPRL

SEQ ID NO: 15578 - protein, 422 aa, Actinomadura sp.
VFEVEAGLRRSFKFLLRPTARQAGSLAACVEDHRALYNAALEHRRTAHRRAGAMVRYGDQSAELKDVRAADPGGQGRWSFSSQQATLRRLDLAFAAFFRRLRNGRSPGYPRFRGRGRFDTVTWPRDGDGCRWNSQPGHPTATFVRLLGVGHVRVHQHRPVAGTIKTISVKREGARWYVVLSCDGVPAEPAASTGTAIGIDMGVASLATTSEGDHVPNPRPLAATARRLSTAQQALARKSPGSERRRKAVRRVAALHAKVRRQRLDHAHKAALALVREHDLIVHEDLRIANMTRSARGTAERPGSKVAQKTGLNRSILDAGWGVFLTVLAYKAESAGRELIAVNPAGTSRTCAACGHSAAENRVGQAVFHCRACGHAAHADVNAAVNILGAGLALREAAQAAQREAASARKRRSHNPPHRTRN

SEQ ID NO: 15579 - protein, 432 aa, Actinomadura sp.
MAGHLLLRVLSVAVGKFVGMSRFRLQPTPTQEAMLLEHCGHARFVWNLAIEQHAYWRPGRRPVPGFAEQCRQLTRARAEFDWLRTGSVTVQQQALKDFAQAMTNFLSGTHRRPTWRKRGRHEGFRIVAVKPDGVRRLSRRVGEVRIPKVGWVRFRWSRPVAASAKSYRVTRDRAGRWHIAFAAVPDPIPAPGSGEVVGVDRGVVVAAALSTGELLPLPGLRDTEKARLLRLLQKLSRAKPGSNRRAKVKAAIARLKARESDRRKDWVEKTSTGLARRFDVIAVEDLNVRAMTRSSKGTTDAPGRNVRAKAGLNRGILAAGWGRLVTRLEHKAPQRVHKVDPAYTSQRCSACGTVNAKSRESQAAFACRSCGFACNADVNAARNIRNAAGHAVSARGGGSLERPVNREPQSTLLTAQGWVGIPRLRAREDVKA

SEQ ID NO: 15580 - protein, 403 aa, Actinomadura sp.
MMVVRTAYKCRAYPDPEQAAVFNRTFGCVRLVWNKTLAERHRAWHADGNRGSYKETDAALTAWKKTEDLAFLNEVSSVPLQQALRHQHAAFANFFAGRARYPRFKNRNSRQSAHYTRSAFRMRDGELRMAKTTAPLAFVWSFDDVDLVTLNPTMVVISRDCDGRWYVTFAVDTDERVPLPAAEHQIGVDLGVKDFAVTSDGDRIANPRHLEKKQRNLARYQRRMARCRPGSNNRRKAKAKVARAHRKVRDARADFLHRTSTGLVRRADTIVIEDLNVSGMVRNRTLARAISDCGWGEFRRQLEYKCERAGRTLVVIDRWYPSSKTCSACGHLLAELSLSTRRWTCPGCRTRHDRDHNAAKNILAAGRAVAGDTPGDVCGADVRRQGTSLPQSAAKQKLPRREP

SEQ ID NO: 15581 - protein, 386 aa, Actinomadura sp.
MKIVVQVRLIPDAAQAVALECTLHTVNECANQVSAASFAAYGLNGSVKNLRSMAYGQLKARGLGAQAAQHVIKRVVDAYTTLRANLRAGNLGGEGSKRRRKATSKPIAFRADAAHTYDDRCLSWNYDGQTVSIWTMDGRLKNVRFACSAGALKQLTQYREGESDLACRDGKWFLIATCEIPEAERYEPQDWLGVDRGIANLATTSDGDNHSGRRLDRYRRWKARKKAELQAKRTCSAKQLLKKRARRESRHATHINHKVSKTVVAVAQRTERGIALERLQGIRERVTVRRDQRARQSSWPFHQLGAFIAYKARRAGVPFIEVDAAYTSQRCPRCGHTAKANRPSRDAFSCRRCGLAGPADVVAGVNVRDRARSAWVFVNMPQPAPA

SEQ ID NO: 15582 - protein, 409 aa, Actinomadura sp.
LSVVAGRFRAVSRYRLRPTPVQQEALLRHCSHARYVWNLAVEQNTWWTPRRGPAPGFAERCRQLTEARADNRWLAAGSVTVQQQALKDFAQAIANFLGGTHRRPTWRKAGRHEGFRIVGRRGTAWDVRRLNRKTGEVKVPKVGWVRFRWSRPVPDGVKSFRVTRDRAGRWHVAFATVPAPVPAPGNGAAVGVDRGVTVSAALSTGDLLHAPGLTVKEAERLQWLVRKLSRCKRGSTRRTRIKAAIARVKARQADRRKDWIEKTTTRLAREFDVIAVEDLNIGGMTRTARGTTDNPGRNVRQKAGLNRGILAAGWGALARRLEDKAPGRLVKVNPAYTSLTCHSCGHCAPVNRESQAVFRCAACGHRANADVNAARNIRDIAVGRTVTARGGRAVAQPVNREPQPDLLSG

SEQ ID NO: 15583 - protein, 370 aa, Actinomadura sp.
LVYNRALEERTRVWYAEQRCVTYVQTSAWLTEWKRTQELGFLSEVSSVPLQQALRHLQAGFTAFFDKRAKYPRFKSRKRCRQTAEYTRSGFRLRDGCLTLAKMSEPLAIVWSRALPEGAEPTTVTVSRDAAGRWFCAIVCEETVARLAPTERSVGVDAGITSLATLSTGEKITNPRHERRDRERLARAQRDLAHKAKGSANRDKARRRVARVHARIADRRRDFLHKLTTRLVRENQTVVIEDLSVRNMVANHSLARAISDAAWRQLRAMLEYKADWHGRELVVIDRWFPSSKLCSQCGTITEAMPLNLRAWECRCGMVHDRDVNAARDILAAGLAVTACGADIRPKRRKPGGQTATKQETQRVTAGLPCL

SEQ ID NO: 15584 - protein, 413 aa, Actinomadura sp.
MARTVKRAFKYRFYPTDEQAKELARTFGCVRLTYNRALEERTRAWHSERRRVSYAETSAMLTDWKKTQELAFLREVSSVPLQQALRHLQAAFTGFFEKRTGYPRFKSRKKSRQSAEYTRSAFKYRNGRLTLAKMRGPLHIVWSRPLPDGAEPSTVTVSRDAAGRWFVSLLCQDTIARLDSVDRAVGVDVGITSLVTLSTGEKVANPQHERRDRERLARAQRDLARKVKGSANRDKARRRVARIHARIADRRRDFLHKLSARLVRENQTVVIEDLNVRAMVSNRSLARAISDAAWRELRTMLEYKSDWYGRELIVIDRWYPSSRTCSICQAVREKLPLNVREWVCGCGARHDRDVNAARNIVAAGLAVSACGAGVRPQRESSRTGRSATKQESHGVICGASALRREAKPRTMSP

SEQ ID NO: 15585 - protein, 480 aa, Actinomadura sp.
MCERDAPPCVVRSPATVIGVGVLSGRPVTVGVVQVTQAYRFALNPSPRQERMLSSHAGAARYAWNWGLAACRDRYDAEGKWWSGAELHRLWNKAKKADSALGWWSENSKCVYQEAFRDLERALRDFVRSRKGARGGRHLGFPRFKKRGRCRDSFRFSTGALRCAGRTVTLPRLGVIATHESTRKLARRLDNGTARILSATVSRTAHRWHVSFTVRIDRDVPGRHARPGSAVGVDLGVATLLTAVDDHGTVIEITGPKALRAGLRKLRRLSKAHSRTQRGSANRTKAAGRLARHHARVANVRADALHKATSDLASRYETVVVEDLNVSGMVAHRRLARAVTDQGFGIARRMLAYKTGWHDGRLIVADRWFPSSKTCSGCGGRKPSLTLAERTFRCDACGLVLGRDVNAARNLLALAASGTERLNACGGDVRPGPGRAAAREAGTRHCARRSDRDRHRANDGYLSGELIPSPAPHGTVNGTC

SEQ ID NO: 15586 - protein, 395 aa, unknown
  TnpB Polypeptide
MQAVLDSLCDYRRYCWNQGLELWNAMYEARLIGLPVELRARIKALLTDKTIEFSEKEQALRALFPMPKERVVRDELVAQKADWQIELSARALQLAIKDLAVAWNLFFNNPKTVNKPGFQSRKKPKQGFKTDSARIKNGRLVLDKPQAYKAEWSSIRFKGASIPDGTLKLCAITRTKGKYIATFTMDVETVALPKTGKKTAVDVNVDHFDTTDGQTSLKPELLDRLYVKVRTYQRQLARKRKVNKNYRHSKGYRATRAKLQVTYERIRNIQNDLLHKFTTDLYRQFDTVVIEDLDVKGMQMKKKAKNLHRSLFGRFRQFMEYKAEKFGKTLIIADRFYPSTQRCSNCGHIKTGDEKITLSGNAKHGTRHHEYICYKCGYEDDRDHNAVLNLLALAE

SEQ ID NO: 15587 - protein, 288 aa, unknown
  TnpB Polypeptide
LTKHTQYAISQAGVAVRSFTLTRTRLSLCIARDTPTIECISTAGVDRNLRNLTVGNDDRIHYYNISETMRIAKVTTRIISSFKRDDIRIRKAIASKYGRRRACRTKHILHSVTKKIIAAAVQEKTAIALENIRGIRSLYRKGNGQGLKYRGRMNQWSFGEVQRQIEYKARWVGLPVVRLSKCETRTSSVTCPRCGKRLQSDKRLKRKLWCEKCRMVMDRDRVAAINLARRGRVRFARSRPPVIEAQGGAVEAVKGNPTTTVFPGVDALKPTSHTASRSNHPIVTLGSS

SEQ ID NO: 15588 - protein, 643 aa, unknown
  TnpB Polypeptide
MDKKKNLLPLQKQVCFLDCHIKHFVNLAIARKYAAIKHLPAIEDSVNKIWKNCAILMLLVTKNPNIKRITISTLASLPKSNWMIFLDKLSTFKPEDLNTIHIHLFQTLLQELISKEKDYKPFWTPAYTELSEKLLLPIEIDCVDSVLTSSKLLSKKAEEQLPFLTMKKINLQNRNSPKIYYQLSTSIAVDKWEKEAIIPNNKLKALKIKMKPTIAQRMILDEWINTSNYVYNKTLECINAGDAIDHFKLRNKLVTENTKMNNPEYKDFLSKLDMLNKEKKRLVEESRKYTKPSTQYNAINEQIEIQNQLIHTKKQSRKEMASTLTSEKNDNINDWEFDTPKGVRDGAVSDVCKAHKTGFANLKAGNIKYFKMKYKKKTNPCKSVVIPKNLVKNKNGKIQLSPQFFKENCDFKMGKKAIKKYKNLIIENDARIIKQKNEYCIIIPIKIIDTPKTPLINYCGIDPGVRTFMTTFGNNGCIEYHHNKHALKHLNQKIKILKELRLSKQRKRIAKNTISKIEKRKSNLIDELHWKVIGELLERNDVIFYGDIKSHGIVKNKHNRTLNSNINDLKFYKFKERLLFKSFEKNKRIVLVNEAYTSQTCSFCGSIYKPECSKVYECKNCNNRMDRDINASKNILMKGIINL

SEQ ID NO: 15589 - protein, 374 aa, unknown
  TnpB Polypeptide
MLLSHRTSLKICPEYSNIIGHMCYAASKLWNVCNYERHHYKELGLEKYPDWYYQKKAHKGDLWYRQLPSQTAQETCKQLDKAWKSFYVLKKTGGIKEPNPPRFKQDNIPVTYMQMGIRHEKGSDQLRLSLPRDLKSYMEETYGIHEKFLYLENKIFRNMDHIKQLRIYPPENGTCELIVIYEIEEPEQLSQNGHYLSVDLGLHNLMTCYDSGNGRTFILGRKYLSLERYFHKEIARVQSVWYAQQSERGIKYPKSSKHIQRLYRKKQNAVKDYLHKTTRWIAEYCRKEDIRCVVVGDIRNIRKEKDMGHKTNQKFHGLPYNRLYIMLEYKLKLYGIQLIKQGESYTSQCSPLSPEVSNSVYDTLELPKKSVRIP

SEQ ID NO: 15590 - protein, 420 aa, unknown
  TnpB Polypeptide
MSEASNLRKTTYRLYPTPKQSLALDALLRSHQQLYNAALEERISAWAKTRKSISYAEQCKSLTLLRRDLPEWADAANCSSQQMTLRRLDKAFAAFFRRIKAGQTPGFPRFKSLARFPGFSFKGHGDGWRFTPEDGWKHGSLRLSGVGQIRARGQARQGGEIRSSDILHKDGRWYLSLTVAVASPERTRQTDGALAYDWGVERFLSGVTHTGKLENIDNPRWWQQVKNEIVALQQAVSRKTNKRSNRRKKAVRSLAAARAKVARRRMDWAHQQTAALAGKYALVATEELTLKNMTRSASGTAREPGRQVAQKAGLNREILDTAPGLFTSLLRYKVLETGGEWVDAPTRKLKPSQRCPKCWHVAKKQLSQRMHCCEQCGHQENRDTASARVVLRWALESISGQELAATGVCCTRETPSFASA

SEQ ID NO: 15591 - protein, 393 aa, unknown
  TnpB Polypeptide
MPMIVRYRFRFCPSARQRRLLGKTFGCVRHVYNRALALRKDAYAENKTKINYAQTSAALTQWKKQPELLWLKEVSCVPLQQGLRHLQAAYSNFFAKRAAYPRFKSKRGQQSAEFTRSSFRWDGKQLNLTLAKIGHLRIRWSRQFASDPSTVTIIKDCAGRYFATLCLDETVAQLPKTGDEVGIDLGTEHLATLSTGDVVPNPKPLERSLARMAKLQRTLARRKQGSGRWHRQRLRVARLHAHVTDSRRDFLAKLTTGLVRRFDLVCIEDLDVRGMMDGRHRARRMSDVGPFTFRQMLSYKCAWYGKELQVVDRYFPSSKRCSHCQRDLDSLPLSVREWTCLNCGSFHDRDHNAAKNILSAGQAASARGGHVRPTATRVAAGSARRSVNQPALP

SEQ ID NO: 15592 - protein, 393 aa, unknown; identical to SEQ ID NO: 15591
  TnpB Polypeptide

SEQ ID NO: 15593 - protein, 384 aa, unknown
  TnpB Polypeptide
MSDDLIRTVPIKLDVDGHGSVLSETARRFNAAATWIADICWREGITNTHTAHHRVYGETRRRFGLGAQLAVCARAKAMEAIRATRKTGSDTCPTFGPTGSVRYDARTYRLLPLDGVSLSTVAGRVTARLLPGAHQRRLLLEQGWQIGGADLVQRRGLWYLHLTQHKPAPTPAAPGGYVGVDLGIVNLATTDDGQTFSGARVTAVRQRRFAHRRRLQQRHTRRSRAHLRTLARKEARFQRDVNHCISKALVAKASRDCKALALEDLTGIRARVTVRHEQRRERESWAFYQLRAYISYKSKAAGIPVVLVDPRNTSRTCFACGHCAKGNRRSRSHFCCLSCGHVAVADVNAARNIALRAAVNRPIVLPGADLPIASTSPPALAVGR

SEQ ID NO: 15594 - protein, 372 aa, unknown
  TnpB Polypeptide
MKTYKYKFGDQSNCIRIGNLLDDMWQVHDYFHRWQDERYRDGLPYADYPAMSAHLTDLKRTTHPHWNALPSQAIQEELKRIDTAYVRFFKKLGGKPKRKPRHKFKSITYPGSAGWSLKNNRITLTFRKWNPRTRKWQYDKVAYTFHKHRQWHGTISRITIKRDSCGDYWLCITTTYTDFRPLPATGKSVGADFGMKDAYLTLSTGEKIQHPQPLKSNLKKLRSLNKSLSRKVKGSNGWWWCVRQIARLYRKISNQRKDFQWQLASKLCKKFDTIVLETLNLDGMKRLWGRKVSDLAFYQFVEILKYKCQKHKREFLQVGQWTATTKPCSDCGFHNETLTLSDRQWICPKCGSHHDRDINAAINILRAGIAVT

SEQ ID NO: 15595 - protein, 394 aa, Actinomadura sp.
MRTAYKCRAYPDPEQAAILGRTFGCVRLVWNKALAERHRAWRSEGRRISYKEADAALTAWKKTEELAFLSEVSYAPLQQVLRHQYAAFAAFFAGRARHPRFKNRASRQTAHYTRSAFRIKDGELWLAKTTAPLPLVWSFDEVDLATLNPTRVVVSRDPDGRWYVTFAVDTDVPAPMPAIGHAIGIDLGVKDFAVTSDGDRIANPRHLEKKQRSLARYQRRMNRKQPGSNNRHKARTKFARASRKVRDARADFLHRTSSNLVRRADVIVIEDLAVANMMRNHRLARAISDCGWGEFRRQLEYKAGRAGRVLVVIDRWFPSSKTCSACGHLLETLGLSTRHWTCPGCRTRHDRDINAAKNIVAAGRAVAGQAPGEVCGADVGRQGISPPQSARKQK

SEQ ID NO: 15596 - protein, 399 aa, unknown
  TnpB Polypeptide
MILSHKIALDPNNTQRTYFAKAAGTARFAYNWALAEWQVQYQAHLLNPLLAQPNEGALRRQLNEIKREQFPWMLEVTKCAPQQAIMQLGTAFKNFFAGHAKHPCFHKKGLNDSFALDNGQFVLDGSRIRLPYLGWVRIRETLRFPGKVLSATISRTADRWFVAVVMDTDQTLIRPAENQGVVGVDLGVTTLATLSNGEQVIGPKAHKAELKRMERLNRSLSRKVKFSRNWRKAKAKLARLHARIANVRQDAMHKLTSDLARRFHTIGIEDLNVSGMVQNRHLARAVSDMSFFEFRRQLEYKTAMRGGVVMLADRWYPSSKTCSGCGHKIDSLPMSVRHWDCAACGSHHDRDLNAAINLAKYAASSAVSACGGEGAGAGRKVRVKPAPVKQEVNFIHVCA

SEQ ID NO: 15597 - protein, 295 aa, Sulfolobus sp.
VLSAKIIRKNSREAREGHPKKLMKLSLSHLGVFKVLVHRDFPLDKVKRVIVKLIPSGRIYISFVVDYEFPKLPQVNKVTALDVGIKTLIMTSDGEYFPNLKPYEKALWKVRHLHRILSRKQFLSKNWFKAKIKLAKAYEHLKNLRKDLYMRLGKHFARNYDVLVMEDIQVKKLVGNSLRRMRMRLHDVAFHELKMILKYQMEKHGKSIALVDPAYTSKTCAKCGYVKEDLTLLDRVFSCPRCGWITDRDYNASLNILRRSGSVRPLGPVEFRPLPVLRYWQGGARKQEAPSVRAG

SEQ ID NO: 15598 - protein, 412 aa, unknown
  TnpB Polypeptide
MIRVERHYIKGSPEIINLCSVSKELYNRCNFFMRQAWFSKQRLPDICILVIKTQDLNCFKNLHNTKTAKQTIRQCLNDWTNFKRALSAYYKNKTKFIRRPKPPCYKNKLAQVIFYNETMRKKSLKLGMLIPTNDCFKINSTKNFKQVVITPKTFGFIVEVQYEIDQLKQKLDKNKVASVDIGLNNLCTITSDQQRPILVNGRIAKSFNQQYNKKPCKKNSRKRYFRIENYFHHVSKFVVDFCIKNNIGKLIIGKNDGWKTGINHGKKNNQNFCYIPFYMLFEKIKYKAEQTGLDVIFTEEAYTSKASFLDHDELYKYEKGVEHTFSGKRKHRGLYVSKEGYALNADVNGSLNIRRKVIPEFVFTGIGDRSLAARPVTINPLKAFGCSAKNGVPKVVNSSNVKTNKIFINGKA

SEQ ID NO: 15599 - protein, 371 aa, unknown
  TnpB Polypeptide
MKTFKYKFGDQSNTIRLGNLLDDMWQVHEYFHTWQRQRYKDGLPYANYNVMSAHLTDLKRTTHPHWNALPSQAIQGELKRIHLAYDRFFKKLGGRPKIKKRHKFKSFTLKQTGWSLDDNRITLTFRKWNPKTRKWQFDKVPYTFHKHRKFFGNISRITIKRDACGDYWLYIITDFVEMKLLPTTGQSVGADFGMKDAYLTLSTGEKKQHPQPLKYSLNKLRSLNKSLSRKVKGSNGWWRCVRQLARLYRRISNQRKDFHWQLASELCKRFDTIAIETLNLEGMKRLWGRKVSDLAFYQFVEILKYKCQKHGRTLLQVGQRTATTKPCSNCGFHNENLTLSDRKWTCPECGSHHDRDINAAINILRAGIPVT

SEQ ID NO: 15600 - protein, 403 aa, unknown
  TnpB Polypeptide
MKRTFKYRAYPTKPQEQWLYSEFKHQKQLQNYMLQMRNQMWDYGRKSVSMYDQINHLKKLRSTTSHYSEHPQDMQVSTIKRVNAAHEHFQRRCREGSQKKGYPRYRASVRSLSWSLRKHTLKTGERVRQNPIRETCQRHNLLKVPKLGEVKIRQHRPILGDPKEVTLKKTARGWYVFIVCEVPDTLKCVPKSACGVDVGTHNFLTTSDGETEDNPRFYRQAERKLVKLQRDLSRKTYRSKRWYKAKDALAKQHDIIACQRLDFIAKTVYKLFHHRDFDAVVAEKLKPSNMVKNRHLAKSISDAAWGIFFEWCHWAAKRDGKHFHQVLPHHTSQTCSGCCQQSPVKLKLSERVFHCKSCGLKLDRDHNAALNILYRAACALRGEVWDAILCETRNPLLQQACWG

SEQ ID NO: 15601 - protein, 378 aa, unknown
  TnpB Polypeptide
MDMYQWRRGYPHAHDNFWFGKDCEGWVDKNLSKSQPLHSQSIQAIRKQYFKSWKSYSALKKSGGVANPKPPNKPKNYMTTRWLKSAIAFVDNSLFGKRLVLSMGSGTDKLGIQLPSNFNMSEAEHIATIDLVYNYGQWELHFSYRYEVGDTESGEGVVGVDIGEIHPMVTHDGIDTHIYNGRYIRSLYRLRNKVLSEFNHAISRCKRHSKRWWKLTRRKWKRITKIDNQIKDALHKHTTKFVKYCRTKGIGTIVIGDLTGIRENINYGNRANQRLHQWAFGKITSLITYKSKVLGIKVVQIDESYTSQTCPSCGNRKKPNNREYACKCGFKYNRDGVGAINILRKYQGGFGDPVVAAMGLSRMAPPLGFRLEVPVALA

SEQ ID NO: 15602 - protein, 481 aa, Moorea sp.
MDSLKPIEGFDAPIIGKSLKSLHNIITHVSYNNLAMLTMTYEYKLEPTAEQIKSIEQTLDICRSVWNFALRQRKDWCASRKSPINACSIQCEYIISADEPFPNYHKQAKQLTQAKKLYPHLKTVHSQVLQQTLRTLDRAWEDMKARGFGWPRFKKKYRMRSFVFPQLGKDPIRNDGIKFPKLGWVKWRQSRPIPNGFEVKQARIVRKASGYFVMLSLQLNVNVSSPMPHGHPRGLDLGFDKFVATSDGEEIKRPRFLITLQRKLKLLQRRLKNKQKESNNRHKLNQKIARLHQRISDTRKDWHFKLAHHVCDGAGMIFVVGEACPKDIDINFVSWARGMLSKASADAGFGQFVEILHWVCWKTDTYFAKVDKNGTSQTCPNCGAHTGKKTLDMRIHVCSECGYTTTRDVAASQEIRNRGISALGHSVSENVCGLEATGSIGHDTLVGTGRSRKPNSRDLGIPFLKVTELSSVTLRKGRMSS

SEQ ID NO: 15603 - protein, 409 aa, Okeania sp.
MRTTYQYKLRPNKEQLATIEMWLELLRRQYNYRLGERFSWWSENRCPVNACPLVMPIPQLRDNPDYYSQKRDLVNTKDKFPDYKLIHSQVLQDCIKRVKLAFDRWLKGDKNGHKLGKPRFKGKGRYRSFTYPQIKQSCMEGNKINLPKIGKIKLIKHRQLPDDFQIKTVTISRKADGYYITLSLEDRSVPASTSAVEPTLKNTLGIDMGLKEFLVTSEGESVPIPQYYRKSQQRLKTLQKRLSRKKKGSKRWLKALLAVAKQHKKVADRRKDFHLKTANELLSKAEVIAYENLNIKGLAKTRLSKSINDAGWGKFLSILTVKAGNAGQKTIGVNPKNTSQDCSNCGKKVDKELNIRIHSCPHCSVVIDRDLNVAINIKNRAVGHSVLKARGARCNGRAAKREAYTKLAL

SEQ ID NO: 15604 - protein, 740 aa, Catellatospora sp.
MARGDDEFVEFARANQARLQQAAYLLTGDRDQAEDAAQGVNCCSRLLSVTAFWLVVVAVLLWGCQGLVRVAVVSGVCPRLVTVGIGRGGGVVMAVGQLTATATCAAMSATVEADGRRVGERILAARVGWLAHLVGQMAGQIVAGHWTGTDLAILAAGVGPDGRALPVKGWMALRRLGWAAPVPDGVYASDRVRRCAQEQAARALRLGVYRREVLHAIVATLPADGRRDDADWQALRELLPAGVTGAVVANRTRQVRAYQHAQGRLPGDLTELEAAPAVAAQVLLAAADKQLAAIGRDGPGRALLRVQLPLTARPASAADWAWHALPITLPAHVAEHARLCAPTLRVVGHRVRVDLPHRAPATTAPVRGHRVALGLDWGVNTLLTGTAGRLTDTGRVVTDGRMLRYDATAVSAQLHRLRQHREHLAAKRDHHTTLTTGLPDDDPRARHLTVLAARATAEHGQVCARIRHLNKTLAWSAGRWAVDQAVALHAGVIYVEDLATLAARGRRKGNARLSGQVRGQVVDAIVHLAAKAGIAVVTVPARGTSRYCPRCGQGHTELTHTPAPDRAGERGWKWAICGRCNLSTDRDHAAAMRITARGLLAQHHVRTDRTTGRHRITTVVEGNVATVRRPATTITTPGRKLRPTPKRPTVGKLSHRVPDRRTAPAPPSGGQRPAGQAPKNHHQTVAASGPAHDHLKPRHHRTGFHHVHATPVITLTGDYGPGTTRPRPHPKRPKHTGKHR

SEQ ID NO: 15605 - protein, 130 aa, Pleurocapsa sp.
IEDLAIRNMVKNHKLARSISDAAWGEMFRQLEYKCKWYGRELVKIDRFFPSSKRCNHCGFVMDKLPLDIRSWDCPSCKTIGIDRDINAGQNILAAGLAVIVCGSDIRPDRHSSKGQLSKTRKGRKQKPKS

SEQ ID NO: 15606 - protein, 411 aa, Lyngbya sp.
MVTRRITYRLYPNRQQETQLHWARRMHCCLYNVAIANRKTQYQRFNHSVDYFEQQNSLPEFKQVWTEYKKLGSQTLQATLKRVDFAFKRFFKGLGKYPKFKASRHYSGWDYPNKQSWKVNTNNGINGYLNLRDLDITVQMRGKARTWGVPKTCTVFWRNGKWYASITVECCPGRLTGLGAIGLDFGSKVAIATSDGELIESPKFLKRAMENIAQLSKGLRRKRKPEKRKVKASRRWKKCQAQINKVKRKVANQRQDWTHKVAAQIVSGNSLVATEKLNLKGMTRKAKKGSKRKCQKAGLNRNLLDVAIGMLRESIKYKVVEAGGVFLEAPTKQLKPTQRCNECWELTPKTLSDRLHICSNKSCGHTADRDINSAQVCLTWARGLERASLDAESRISTDCGSMKQMWAKKRY

SEQ ID NO: 15607 - protein, 455 aa, unknown
  TnpB Polypeptide
LGAQSDRPPPQRLYGPRVAPRVSHPAKDAKHVDRRLFCEHGRAGIGGDNPALYRRPKHEGLTMMVRRVYRFRLEPTPQQEEGFRRYAGARRFIWNWALQQKRAHYTATGKGLSDKDLSARLTALKAAPDTAWLKEMDSQLLQQVLADLKKAFTSFFEKRARFPHFKSKKRDTARFRIPQRVTLADRRLTVPKIGRVRVRQSQEVEGATKSATFKRDACGHWFVSLVAATEMPVVALPAAAEERAVGVDLGLKDAVVTSDGERVAAPRFYRAAQRTLRRAQRGQSRTVKGSKNRAKARQRVARAHQKIAAKRNDFCHKLTTNLVKNHDAVCIEDLNVTGLAKTKLAKSTLDASMGTIRRQLAYKGVWYRTPVVAVDRFYPSSKLCHECGYKHDGLTLSERVWACPSCGSLLDRDLNAARNIKREGLRLLAAGHADSLNACGECVRRPMGATLAIPA

SEQ ID NO: 15608 - protein, 390 aa, Deinococcus sp.
MESTTLRAFKYRLSPTKAQTAALETTLILCQRLYNGMLEERKGAYTKAGKTISAYDQMKSLPEVKEALPEYLGVNAQVLQDVAKRLEKSFKGFFSRVKSGQKAGYPRFRSRDRYNSFTYPQPSQNSVTADGKHIYLPKIGNVRLKLHRPFAGKIKTLAVKREGTEWYAVLTCEMPRGEPLAQTSSSVGIDVGTTWFFVTSDGEYCKNHRLFQSSSKKLRVAQRSLARKPKKHSNRRKKARERVAKLYRKTARQRLQLHHEEARKLITKHDLICHEDLNVKGLAQGNLSKQIHDVGWGQFFQILSSKAEWAGKRVIAVDPRFTSQRCRVCGHTKRGNRASQAHFKCLSCGHTENADVNAAKNILAQGLRFVAQRISTETACHEKPRPLGLG

SEQ ID NO: 15609 - protein, 406 aa, Escherichia sp.
  misc_feature (325)..(328): Xaa can be any naturally occurring amino acid
VKRLQAFKFQLRPSGQQECEMRRFAGACRFVFNRALALQNENHEAGNKYIPYGKMASWLVEWKNATETQWLKDAPSQPLQQSLKDLERAYKNFFQKRAAFPRFKKRGQNDAFRYPQGVKLDQENSRIFLPKLGWMRYRNSRQVTGVVKNVTVSQSCGKWYISIQTENEVSTPVHPSASMVGLDAGVAKLATLSDGTVFGPVNSFQKNQKTLARLQRQLSRKVKFSNNWQKQKCKIQRLHSRIANIRRDYLHKVTTTVSKNHAMIVIEDLKVSNMSKSAAGTVSQPGRNVRAKSGLNRSILDQGWYEMRRQLEYKQLWSGGQVLAXXXXRRQLEYKQLWRGGQVLAAPPAYTSQRCACCGHTAKENRLSQSQFRCQVCGYTANADVNGARNILAAGHAVLACGEMVQ

SEQ ID NO: 15610 - protein, 451 aa, unknown
  TnpB Polypeptide
VSQKVRIDGVKHVGASVFLGVDHCGNPCWTRNPERIMVWLCDGWRTRFNQRREQRPHSVPVKDEAGDIIDWIKEPLGGPDTSKLISDREARLQCSWMAAVPSSILASTNKVEGTEWFAGLKRRKTAGGRVPGFKSRHRGLGFVCWYHPSGNSYNAVFHKTGRKSGVVVITGMNPKRWVKPGEKAHWHIIVHVRVSQPIRPYTSVHVDWTHRTLVFTNMPLPLPRTGNGAIGLDRGCVHTLASSDGAFMDMPKPTKKEMARLRYLQRRLSRQDWTNEARGGKAAKFASKRHQRTLNEFNALQGRIVRRKNDWIEKTTTRLAQENILVAMEDLDVRAMTKRPKSKPNPDNPGHWLHNGAKAKAGLDRSILSNCWGRVMKRLNDKMDANGGKLVIVPAAYTSQTCHQCGHVAKENRESQAVFRCVECGYMANADVNAAMNILDRALTKTGGGTA

SEQ ID NO: 15611 - protein, 430 aa, unknown
  TnpB Polypeptide
MKRPQAFQYELKPNGEQQRKMRRFAGSCRFVFNKALASQKSRYEQGEKKLGYAGLCKMLTGWRNSPETAWLADAPVHPLQQTLKDLERAYANFFAKRADFPRFKKKGQSDRFRYPDPKQIKLDQANSRIFLPKLGWLRYRNSRAALGEVKQVTVSARGGKWFASIQTERQVERPVPESASAVGIDLGVARFATLSDGTFHAPLNSFKRHEIALRKAQRAMSRKTKFSSNWNKAKARVQRIHARIGDARRDFLHKATTAISQNHAMVCIEDLRVRNLSRSAAGNIEAPGINVRAKSGLNKSILDQGWSEFRRQLDYKLAWAGGHLVAVPPHHTSQECPACGHVSADNRQTQARFRCVACGFEEHADVVGATNILARGMRKLRDEGQDTADASAGCASTARIACEVSGAVRPPAAGTLRSGSGMAQCRDRAP

SEQ ID NO: 15612 - protein, 199 aa, unknown
  TnpB Polypeptide
MLLSFRTALIPNNKQITAFKKASGVARHRTKAIKKLSLLHAKVANIRKDAIHKLTTYLAKNHSEIKIEDLNIKAFLKNHKLAGAIADCGMYEFKRQLEYKTQKFSSKLTLVDRFFPSSQICSSCCNHRHKMPLKVRVFECPNCGNVQDRDLNAARNIERWFEGIFVPKRSELAVSSTVSACGVDKPDSSHAVATKETGS

SEQ ID NO: 15613 - protein, 404 aa, Campylobacter sp.
MNKTKNIYNTIRSAKFVLKPSVKQKEMLESFFGLSRAIYNISLYNIKNSKFGDYEIQNGKNKGSVVPRIPTEFDLNKSFPKLKEEYNYLSLFPASYAQAVMKNLSKGFGNFYRTFNYPKFKSKKNNIQSFNCYQGSRVKMGGDYIILAKPRGSNYTNDDLKIRFKRHKIKYNFDKVTGFTISKENNKYYISFTFNTEIKSKETNGSIGIDLGIKDFCICSDGTVYPNMRFYEKSLRKLKISQRSLSRKQKGSNNREKQRIKVSKLHKKVKNQRNDYQHKVSRELADKFKVICLETLKVKNMVKNRRLSKALSDVSWSSFISKLEYKVAENQGYLVKIDTYYPSSKTCSNCGCVKDKLLLSERTYHCNECGFSIDRDLNASINILNLGLKNLVATDTTAGTTLKN

SEQ ID NO: 15614 - protein, 368 aa, unknown
  TnpB Polypeptide
VRRMNRAVKIRIYPNKEQRVQIEKTIGCSRFIYNQMLADKISYYQKEKKMLRNTPAGYKKEYPWLKEVDSLALANVQLHLESAFRKFFREPSCGFPRYKSKKRAGNSYTTNAVNGNIFLQDTHLKLPKMSAIKIKLHRQIPSDWELKSVTVSHEPSGKYFASLLFCCESQTVEKSPAEKFLGIDFAMRGMCVFSTGERAGYPMFYRKAEKKLAREQRKLSHCEKGSRNYQKQKKRIALCHEKIKNQRKDFQHKLSRGLAERYDAVCVEDLNLKGMSGGLHLGKGVQDNGYGQFLSMLGYKLEERGKHLIKVDRYFASSKICSVCGHKKKELALSDREYVCECGNRMDRDVNAAVNIREEGKRLYKECA

SEQ ID NO: 15615 - protein, 410 aa, unknown
  TnpB Polypeptide
MNQKYFKMQHNVCNVPTRTFKFRLDPNSDQQYKLQNNLAVCRWVYNKFVESAKNGFVSRNDCNYFLTELKQSESWLYEYHSKMLQMVSTQIDGAQKANLEKAKKGYKTGPLKFARYSEYRTFTYNQSGFEIKDGFLHLSKIGRIKIIQHREIPENAKIKQVIVTKSKSGKWFACVTMDISEPFVNIPKISFSRAVGIDMGIRSFAYDSDGYSTPNPLNLKKMLKPLARIQRKISRRKKGSNNRLKAILHMQKIHEKIANKRNDFQHKLSAQYAKNNDVVIVEDLKIPNMAKNHKLARSIMDSSWGAFLQKLEYKCKMFVKVPARNTTIDCSRCANRVPKNLAVRIHKCDKCGLVMDRDYNASINILNKGLNIFDKSPQATISVPQELRELTPVEIKIGQGSRKPICFSCG

SEQ ID NO: 15616 - protein, 422 aa, unknown
  TnpB Polypeptide
MTDTAKNIRIKESYAKTLAKRATQSCRVYTVKVQANKLNKQQREHLKMLFVEAKWMYNHVLNLSKRGDDIYGINYKDLGTVTHLDKDRNPIETELKHLSSQMRQAVIDGICGSIKGLAHAKAKGEKVGRLKFISEYTSINLKQASVSYKLVGKDKVKLQGLRKPIKVNGLGQVLSLGEYDLANAKLIQRSGDYYVAVTVYTAKKDNHEPKRMVGIDLGCKTCVTLSNGEKHECRVEETERIKELRRRISRSAKGSNNRHKLCLKLRKKEQELASKRDDFANKLCHMLDNYVVVMQDEQIAQWAKSRHGKAVSYGALGRVKDKLMKREDTIVLSKWCPTTKLCAECGERVPLKLSERTFVCPRCGHTHDRDVHAAENMLWFADHKIGVGRTVTLEEILKDIERLFQSDGTVNPQEAAKPSGWR

SEQ ID NO: 15617 - protein, 368 aa, unknown
  TnpB Polypeptide
MIRQKSYKFRLYPNLEQKIFFEKTFGCSRFIWNQMLADKISYYKETGELLKNTPAQYKKEFPWLKEVDSLALANVQLNLNKAYKSFFQSKFGFPNFKSKKAAQSYKTNSQKGLITILEGKIRLPKIGWVRLNLHRQPKGVIKSATISKTATGKYFISILCEEEVLPLPKTDSSLGIDLGLENFAILSTGEKVSNPKFLTSLSKRLAREQKVLSRRGLLAKKKGVKLSESSNYQKQKLKVARLHEKITNQRKDFLHQFSTYLIKNHDVICIEDLASRNLMKNHHLARAIGDASWAEFVRQLYYKADWYGKKIVTISRWFPSSQLCSSCGVSSGKKPLSIREWTCESCGTHHDRDINASLNILKEGLSLA

SEQ ID NO: 15618 - protein, 412 aa, unknown
  TnpB Polypeptide
MRSQKLRLKLTKEQECLAWWYSKVSRNFWNLLVDVDKRNNQGEFDEILKRNGNRTYYSKFYDREIYQLDQSDYLKLTKLVVAKNYEKNKELWSWYYQPNQFFIYNFLSRELVKIRKQNKGRLNFRSISKVQPNFNVRCDISSDKKRLSRIYLKENGKLQIPTIGDVKYGSARPNFDLSCKKQVANISFDGKYWYLSYTEDVETQVEDLPKFTDGIGIDLGIKTLATVSDGTTVPNIKTFRRVRILNKRLKRLQRKVSRKYLINKCNKHNKTKNIIKLERQIKLIHRSLRNIRINHIRKFVSELVKKQPQFIAIEDLNVKGMMKNKYLAKDIANCSFCTIRRHLIRKAKERFIAIRLVEQFYPSSKTCSNCGHYNKDLKLSQRVYCCSHCQEKIDRDFNASLNIAKTDNYVLA

SEQ ID NO: 15619 - protein, 393 aa, unknown
  TnpB Polypeptide
MRAYKTEIHPTQAQIELIHKTFGCTRYIYNQYVYENLKNLASGNDFISAFSYSKRVNNDPDTPSWLKEVPSKAVKQALIYADRAFRNYFSKRNGKPTFKKKGRNDSFYLIGTLKVERHRIFVPVLKWIRLKEFGYVPENISSVTISMKNGRYYISCVCKDEKDERIALSNESMGIDFGLKEQFITEDRAIPSINRSLCVKKLEKRLRREQRCLSRKMEANMIEKVYYQRGVKKGQLRSFRWAKPLSECKNIQKQKLKVARLHERLTQIRTDYNRKALRSLVLERKPSSITIENLAVRNLMRNRHLSKAISKAQWYQSRLYLENLCNRLGIELRVVDRFYPSSKLCSACGFKYKDLKLNERFWTCSNCGSEHDRDRNAAINLGRCQTYTVLTAV

SEQ ID NO: 15620 - protein, 378 aa, unknown
  TnpB Polypeptide
MLVLEFKTYGKTEQFKAIDEAIRICQFIRNKSIRTWLDKDAKSWFDLSKYCAIWAKEFDFANKLNSMARQASAERAWASISRFYDNVKKGVKGKKVSFPSFQKDCRSVEYKTSGWKLSADCKSITFTDKCGIGRLKLKGTRDLGFYDLSQIKRVRLVKRADGYYVQFCVSVDRLEVLSSTGKTIGLDVGLKEFYTDSNGDSVPNPRFLRKGETALKRSQRLVSRKVKGSLNRRRARVILGKRHLKISRQRKDHAIKLARCVITSNDVVVYEDLRVSNMIKNHCLAKSISDASWYQFRVFLEYFGKVFGRITIAVNPAYTSQECSDCGEVVKKSLSTRTHACKCGCVMDRDHNAAINILNRGISTTGHVGTSLLDNVNA

SEQ ID NO: 15621 - protein, 364 aa, Halomicroarcula sp.
MAVRRIKNSETVLESLEERGYDVGRLKWKKPREYRSITYNQKGFDVDHNTGQTEHAVVELKKIGDFHLNYHRPLPDNAEITQVILKKQKTGAWTISICIEYNADYPEKPPVESIDPVNAIGIGLGIAKFIYDSTGRAIRPLDEEGDRCRIEKRHRAVSRKEYDSENWNKARQQLAKAYDRLQNRWDDFYEKLAHDYTLVNDAVFLEDLNVAGMLQNFGNSRNVSSMSWRKALQAFQRHGEKNGCHVILVPPEGTTKRCARCGVESEKPLWVREHSCPSCGFEADRDMNSALEVKRLGLEELGVDFGWSDLGPDGPKKRLWRLRPLRLPTEVGFPQPMWWMQVASWKQEEAPSFRKPQMWLSRVG

SEQ ID NO: 15622 - protein, 315 aa, unknown
  TnpB Polypeptide
MAEMKKTEAYAFLREVDSIALQQSLRHLDTAFQNFFKQPKTGFPRFKSKKRNKSSYSTICINGNITISNGYLKLPKIGQVRLKQHRAVLNGYRLKSVTVSQTPGGKYYASILFQYEDQVQEKEMQRFLGLDFSMHELYRDSNGNEPAYPRYYRKAEKKLVREQRRLSKMQKGSNNRSKQRIKVAKLHEKVSNQRKDFLHKQSRQITNAYDCICIEDLDMKAMSRSLNFGKSVSDNGWGMFTTFLKYKLEEQGKKLVKVDKFFASSQICSACGYKNTKTKNLALRKWDCPQCGIHHDRDVNAAINIRNEGMRLVIA

SEQ ID NO: 15623 - protein, 367 aa, unknown
  TnpB Polypeptide
MLKAYKYRLYPNKEQQEYFAKCFGCVRFIYNRMLLDKIEYYKKTKQKLNNTPSQYKKEFPWLREIDSLSLANAQMNLQTAYNNFFKRPEVGFPKFKSKKNHHYSYTTNNQGGNIYVSDRYIKLPKIGLVRIKKHRDFEGVIKSVTVSKTPSGKYYVSVLVNCEEQKKLSQLDNEIGIDLGIKEFAITSDCEMIENPKYLRKSEKRLRKLQKDLSRCKSGSKNKEKCRIKVAKQHEKITNQRRDFLHKLSKRLIYENQVICLEDLKVRNMMSNHKLAKSIADVSWGEFVRQLEYKADWYGREIIKIDTWFPSSQICSNCGHIDGKKVLSVREWTCSNCGTHHERDINAAINILNEGLRMRTAGTVEIA

SEQ ID NO: 15624 - protein, 287 aa, unknown
  TnpB Polypeptide
LKAGVYAGKQVEHPRFKRKGVHDSFYVDNAHAKLCGKHIKLPRVGSVRMTESLRYSDCKIMSYTVSHDADGWYVSVQVEMEEEVRSFSNSFVGVDVGCKSLAVASDGTECKTPGMLKDLERQLKRKQRLLARKQKGSKNRAKARIKVARAYQRIRNIKRDAVHKFTAAIAKNHGIAVMEDLDVKSMQESADKRTRKGVHNSCMSEVHRQLMYKCNSYIKVDRYFPSSKTCSSCGYHKADLLLGERTFVCPSCGLTIDRDFNAALNLLHEGIRIYTAGHAGSACGEAR

SEQ ID NO: 15625 - protein, 368 aa, unknown
  TnpB Polypeptide
MISRAHKIKLKPNKAQAVMLSKTAGTARYAYNWALARWKELYDQGVRTSYVELSREWTKDRPEWASEVTGGAPRRAIMNLDKAYKSFFKGISKPPTFHKKGRKDSFYVSNDKAVIYGNKIRLPLIGRVRMTEILRYSDCKIMSYTVSHDVDGWYVSVQVEMDEEVRSSSDSFVGVDVGCKSLAIASDGTQCKTPNMLKNLERQLKRKQRLLARKAKGSKNRAKARIKVARAYQRIRNIKQDAVHKFTAAIAKNHGVVVIEDLDVKAMQESADKRTRKGVHNSGMAEVHRQLMYKCSNYIKVDRYYPSSKTCSSCGYHKADLLLGERTFVCPSCGLTIDRDLNAAINLLHEGIRIYTEGHSGCACGEAR

SEQ ID NO: 15626 - protein, 372 aa, unknown
  TnpB Polypeptide
MRTFEYRIYPNKEQRAMLMQCLIGSRTLYNEMLEMIKKQYEQDGTFPSKYDLTKTFKGRGGDFVPATTVQCLADRLSKSLKRFLTCKELGIKYGFPRFKKPNQWHSIQLRQYGKDTHLHEDKKHLMVPAKLGKALKIKLHRPLEGTPKTVHLVLRADSHWYALIVCENESKSEHAPSTCEHSDIGIDVGLKNFLTDSGGNTIENPRFYRTSQKTLRRKQRVLCRRKKGSHRKRKAARNVAKTHLKINRQRRDHHFKTAKPYADGYRHIVVEDLQIANMVKNHHLSKSIMDASWGAFLDILSAKAESAGHEVIRVNPRYTSQKCFQCGEIVQKSLSVRTHICPFCGYVADRDVNAAKNILKAGAQPSGVNVHQ

SEQ ID NO: 15627 - protein, 374 aa, unknown
  TnpB Polypeptide
MITAIRRTYKYQLYHSGKTEYLDAEIELARQIWNHCLALQKRYYRIYGKYVSANRLKIFVTRLRRRKYTEWQNLGSQAVQDVVERLDRSYQAFFDWCKTKTGPRKHPPKFKKYWKYNSFTLKQAGWSIDGNTIRIMGKKFRFWLHRPYNGTVKTVTVKRTPHGDYYIILSVVEDISLPDVHAGNAVGIDFGLKTFLTLSDGTKIDSPQWLLHGLENVRRANRQLSRKERGSGNRKRARLHYAKVHEDISNQRRDWFYKLARSLTAAYSVICLEDLNLDAMKRLWGRKVSDLGFAEFVHILEYEAVLNGCEIIKIDRWFPSSKACHCCGTINDNLSLKDRNWNCPSCHARLDRDVNAAINILNQGMLSKYGKVVI

SEQ ID NO: 15628 - protein, 372 aa, unknown
  TnpB Polypeptide
MIIIKGYKIRLLPTQEQDVLIRKSIGVSRFIYNWCLDRQMSSEKFITDNELRKEITKLKKFDEYLWLNEVGSNVIKQAAKDLCNAYKRYFNKLSNKPRFKKKGIANSFYVNYESMKKTSIGVQCEKIGNIKTAERLPNLINGKHYMNPHIVFDGKYYYITFGCERYADKTENTQDVIGIDLGIQNLAVCSNGSIYKNINKSNTVRKIEKRLKRLQRQVSKKYIKNKEGNKFIKTNNIIKLERQIKLLQRRLKNIRDNHIHQTTTSLVKAKPSRIVVEDLNIKGMMKNRHLSKAIANQGLNKYITILEYKCKWNNIEFIKADRFYPSSKKCSCCGDIKKDLKLKDRVYKCNSCGLVIDRDFNASLNLKNYRVA

SEQ ID NO: 15629 - protein, 427 aa, unknown
  TnpB Polypeptide
MRRSFKVEIQPTRAQRKALLQHAGCARWAWNWGLARKRDAWAERRAALETGVPKEDAPKVPSAVDLHKDLVKLKMTDLESGGVPWMYESSSRAPLEALRNLDLAYQAFFRRCKAGEKPGFPRFKSRSRGIGGFRLQAATHVSRHTIKLPKIGRVRLKPGERDYIPHGTYKSARVIEQAGRWYVSVTPDEDAIEAPPNGLIAVGIDLGVVRLATLSDGTVYENPRAMKHGRRRLRHAQKALSRKRKGSERRAKARACVARIHRRITDIRKDATHKATTDIAKNHGMICIEDLRVANMTRRCRGKGRRAKAGLNRSVQDANFYEFRRQLEYKAKLYGATVIAVNPAYTSQRCSVCGHIESGNRPSQAVFLCLDCGHNENADLNAAKNILVAGSCPETINARGASIRRGRRKTATRPAMKRESAVVVSYG

SEQ ID NO: 15630 - protein, 526 aa, Streptomyces sp.
MAIRARLRISETDAAVLREVGVFLGGLAARDLAARSRRGLAHDATAWAARKRELTGSSSARWAGSITKATHDQWALARRGQAAEMAWLRGQIAAIEARLARPLGAKANKREGLVRGYGSRAEWHAKARRLHTLKDRLAGLEADWAAGRVHVVRGGKQLAHLRHHLDQAGLKESAWRDRWEAARMFLAADGESGKRCGNETIRITDSGQVSIRLPAALGHLANAPHGRYVLDATVEFQHRGEEWADRISANRAMAYRIHHDPVRHRWYVTASWQRPAVPVLPMDAALAKGVVAVDMNDDHLAAWHLDIHGNPVGEPQRFFYDLSGTAAHRDAQIRHALTRLLHHTRRSGAAAIAVEDLDFSDGISRERHGRNKRFRRLISRFPTAKLKARLVSMAAEQGIAIVAVDPAYTSRWGAQHWQQPLTTRTRQVSRHDAASIAIGRRALGHPIRRRTAPPPHDQSDRAGHRTAQARPETRRREETRPRVPGPRSRVVPPGRGAKAGDQRAQHRSEHAAEPEPWRQDSLPLSL

SEQ ID NO: 15631 - protein, 445 aa, unknown
  TnpB Polypeptide
MKPGGLIRFNIDANIDVDVFHESQPTDMMLSHRIELDPTNAQATHLAQAAGVARFAYNWALGLWHDIYQLHKLDPDVAPTSEAELRRALNALKREQFPWMMKVTKCAPQMAIKNLGKAFDNFFAGHSGYPRFKVKGRDDRFTLSNDQFRVDGSRIHIPKLKWVRMREPLRFTGKIISATISRVADRWFVSITVDTPTNSHLRPAENQGAVGVDLGVAALATLSTGEVIVGPKPHKALLARLRRLSRSLSRKQKGSANRQKAKIKMARLHARIAAIRLDALHQLTSDLTRRFHTIAIEDLNVRGMMKNRRLARAIADMSFFEFRRQLEYKAAMRGGQVWVADRFYPSSKTCSCCGHKLEKLDLSVRAWTCPSCSTHHDRDVNAAINLKTMAERHGTNEPLAQTIAKANAVSSTVSACGEEGSGPVRQRGTKPASRKQEENNRFSQI

SEQ ID NO: 15632 - protein, 399 aa, unknown
  TnpB Polypeptide
MLIYEYKLDGSEKQYTAIDEAIRIVQFIRNKCLRLWMDEHGISKNDLQCYCAVLAKDYPFATCLNSQARQASADRAWFAISRFYDNCKSHKPGKKGYPRFQHDNRSIEYKQTGWKLEPDGKHITLTDGCGIGRLRLVGNPKQKIADFPTEQIKRVRIVHRADGYFVQFAVKAERAVVHQPTGKQVGIDVGLKAYYTDSDGNTIENPRYYRNAEQKLKRLHRLVSRKHKQSQNRKKAKQQLARAHLKVQRQREDFARKTASTLVSSHDLIAYEDLQICNMVRNHHLAKSIHDAAWGTFISWVKAYGVAHNVPIIAVAPQFTSQECSECGALVKKSLSVRTHICPSCGVVLDRDHNAARNILAKALACTLGHRETSGSPENASGQTASTRLSQRKTSKRAG

SEQ ID NO: 15633 - protein, 340 aa, unknown
  TnpB Polypeptide
VNLGAVNKQYAAIENDPFADGEIVLKMVIQGEWRRLIFNFDNERFTEGKVTLPVIKVEDGEPVFIFTVATDNPIVQFSGDYVIGVDVGVNNYATVVVRDVKTGRIVYETTLSQRVHSLWNSVRASERQVRALKKKSDRLLSQRQARMSALDEAQLHREAASRKKRELAILAAQEIANLSHTFDNAAIAVEDLGWIVNAMQNGRWNRGALVQWLTHYVSQNGGWVVDVSSFNTSQQCYKCGAKVSHPTHEVSVCAEHGAMDRDVNAAANIAARAVQRVVKARATRAKNRKLHPQAPLRTPAARNSLRYPGRDRTKNKPTPRRKNLCRAAREVILPVRPARA

SEQ ID NO: 15634 - protein, 536 aa, Streptomyces sp.
VGGLREVAAPFVAPGPTGVAVRTRLKGLTAADEKVLRLVGDHLGSLASRDLKARCAAGPGHDSEQWARRKRALTTGSSSRWAGSITKATHDQWALARRGQLAHIHSLEAGVRTIAHRLSLPVGAKGGKKAPGGYDSRQEWFAKSRRLQVLDERLQAARADWDAGVVRVVRGGKGLLNTRHHLDAARLTEEQWRQRWQAGRRFLQADGESGKRFGNETVRVTPGGEVSLRLPAPLAHLANAPHGRYVLTARVGFAHRGEQWADRVTANRAVAYRIHEDTGRGRWYLTASWTIPPAPAVPLEAARAQGLVRVDTNADHLAAWRLDAHGNPLGAPRRFDYDLSGNAQHRDAQVRHALIRLLYWAKRHGLAIAVEDLDFAAEKTREKHGRRKRFRKLISGMPISRLRSRLASMAAELGIPVIAVDPAYTSRWGAQHWQKPLTSKTRKTTRHDAAAVAIGRRALGHPVRRRTAPPPAHRSDEQGHRTVQAEPATPGREAVPISGLRPRAAPHSRTTDTIRARRTRSESGRPERPTPFGAFG

SEQ ID NO: 15635 - protein, 203 aa, unknown
  TnpB Polypeptide
MSLPPWKDGSVVGIDVGLASFATLSNGEKIDNPRFFREDELALAKAQSKRDKLPKGSSLRGKASKVVTRIHERIGDKRTDFSNQVSRRLVNRFGVIVFEDLDIQNMLKNHHLAKSISDVAWGMLVKATESKAAYAGSKVVLVDPKYTSQMCSRCGMIVKKDLSERVHSCSECGLTMDRDLNAAINILRLGMQSVRKSDRSPAI

SEQ ID NO: 15636 - protein, 384 aa, unknown
  TnpB Polypeptide
LPRDFDAVGGLLLTEKGLIVSFKRSVGGVEPKRWASFDVNLTNVTALIDGRVARYDLRQLYHVHRVYEEKRRRIQKLSKHKPKTAKRLMRKYSKRERNRARDLMHKLTTKIARELKELQSGAILEDLKNVKDRVLRRSKSLNRKLSKWNARQLQSMLEYKLKWLGLPVRYVSPKNSSRICPLCSGRMATYDGRLTKCGKCGFVADGDVVAVLNLRMWGSGATPKEDEPSRLIPQGRCVPKRTYVYQKLYLLNPLILPPSMLQFAPARKLLILISVFVGWEVRVMGKRDRAKLSSRMLKLQLAAGYLTYFVVIGMVTLNMFFMANWWAPLVPPSMFPVPLHIQDAIGIALLSILIALQTAFILSLYLLGKERGSEGDGEGGPRQP

SEQ ID NO: 15637 - protein, 382 aa, Campylobacter sp.
MLKAYKYRIYPTKEQVTLIEKHFGSTRFLYNYFLEYRQKAYAKGNQKVGYMVTQAELTKLKKQKEYEWLNECGSQSLQMALRDLDSAYSRFFKKQGGYPKFKSKKHTSQTFTAPQNIKVVNNRVYLPKFTKDGIKAKLHREIPQDAVLKQATVSRQNNQYFVSILIDDNNAIPKPIRAKNAVGLDMGLTDLIITSDGVKYPNNKYFVKSQQKLKKLQRRHSKKQKGSNNRQKAKLRVQKLHTKVSNQRKDTLHKISNEITNQYDIICLESLNVKGMVKNKRLSKSISDVAWSEFMRQLEYKATWKGKTVLKIDQWFPSSQICSNCGASSGKKELHIRKWECPECHAKHDRDINASINIKNYGLGQIDQRNTIVENTVGTIGI

SEQ ID NO: 15638 - protein, 358 aa, Pontibacter sp.
MLKAFKYRLYPTEEQATLLNKHIGSCRFVYNLALETKQTAYAGFKTNLTCFDLVKQLPELKKECVWLKEVNSQSLQQAINNLDTAFTKFFKGQADFPNFKKRTARQSFQIPQNVRVEDCKLIIPKFKKGIEVKLHRLLKGTIRQATISKSPTGKYFVSILCETGETNKSKPEIKEKSTVGVDLGIKSFLVASNGETFSNPKYLRTAMSRLKFVQRRYSKHKGKKTKHRLAILHEKVANQRKDFLHKASTKLIRENQSIAIEDLNISGMVKNHSLAQSISDAGLGMFVTMLEYKAEWYGVNILRIGRFDPSSKTCSICGVVNKDLTLQDREWTCANGHTLDRDVNAAENIKTFALRDKV

SEQ ID NO: 15639 - protein, 245 aa, Bacillus sp.
  misc_feature (6)..(6): Xaa can be any naturally occurring amino acid
  misc_feature (159)..(180): Xaa can be any naturally occurring amino acid
MVRKNXKKPSNPRVTFDGRHWWISVGFQEDFESQELTNESIGVDVGLKELFVASNGMKERNINKDAKVKKLLKRKKSAQRDMSRRFKKGVKIQSAGYEKAKTEHLRLSRKITNIRNNHIHQATAKLVKTKPMRIVVEDLPISNLLKNKKLSKAFSFQKXXXXXXXXXXXXXXXXXXXXXXGIAYVKADKWFASSKICSCCGVKYDHSVQPEGQWSLKIREWRCASCNSHHDRDVNASINLSRWVK

SEQ ID NO: 15640 - protein, 337 aa, Oscillatoriales sp.
VRPFLDRQPRSRAKRLVPSHGKKGYPTFKKNSRSVEYKVSGWKLSETRKQITFTDKKGIGKLKLKGTWDLNFYQIDQIKRVRLIHRADGYYVQFAISADNKVDAAPAGKTVGLDVGLKEFYTDSDGHVEPNPKFYRTSEKRLKFRQRRVSRKKKGSANRKKAINRLGRVHLKISRQREEHAKKLARCVIQSNDLVAYEDLRIKNLVKNHCLAKSINDAGWYQFRKWLEYFGVKFGRVTVAVNPAYTSQKCSNCGAIVKKSLSVRTHVCECGFVMDYEQRIPSPLGRGVSNSFPGPAARRNSFFSGIAANLTEGASSCKARTSTALPTPSASVTTLKQ

SEQ ID NO: 15641 - protein, 368 aa, unknown
  TnpB Polypeptide
MRRAFKYRVYPTKAQAAKLGAWLNLCRELHNAAIQERRDHWNNAGISVGFNDQSKRLPSIKQNRPEFAEVYSQVLQQALHRVDSAFQYFFRRVKNGGTPGYPRFKSADRYNSLVWPQDIGFRLVGMKRIRLSGIGEVKIKLHRPVGGTPKTLTVKREAGRWYAVFSCDAVPPRAYPDAVSEVGIDMGIESFATLSTGEKIENARWYRKAEKRMAEAQRALSRKKRGSKRRAKAKRRLARLRAKEKNQRTDFQHKLAHRIVSENAVVVVEDLKPKEMIEKSSTGLSKSIQDAAWSRFLSILEAKAEEAARRFVKVSPRGTSSTCSRCGAFRKKTLSERLHACPCGLVLDRDINASINILRLGRSLQVAS

SEQ ID NO: 15642 - protein, 469 aa, Micromonospora sp.
VKTTRIAYSQRLNVGKYRALAEQARRLGRVRSEVWRRYGSVAGAGLTDRQVRDQWLAEGTHRRFEVLANAWKETVRDAMADITASRESAKAVVRRAVGRHTADPAARRRLLGLLKTNKWSGDAYLARQMRKHWRRGHNHTHNQIVVRADKHHTHVDGNGLLWLAVPGLVRRQLVRIPLNTTIAPRGTLRLILRGDRVEVHYQIDAATMKTSQRPCGGATIGVDKGYTEVLTDSDGNHHGARLGRLLTTESDRIKERNRRRAKLRSIANNAARRGDQAKADRISQNNLGTVKRDRQAARHRAQVRTEIFTAVHRVVDKATVVVAEDLTKTFAGRKPLGRDTNRRLAAWTKGVTAEALASVSERRGSALVHVNAAYTSQVCHRCGCLGRRAGDRLHCTVCGVVWQADVNAAINVLQRHGDPDITLRTPHNLVKQIVQTRADRHRSRLPLPDFSPALLSEERIIRKSHPDQV

SEQ ID NO: 15643 - protein, 436 aa, Leptolyngbya sp.
MLTMNFTYRVYPSAIQQAKLLEWLETCRGVYNYALRELKDWIASRKCQVDRCSLEKEYIIPAAEPFPSYHRQQNNLPNAKKEFPHLGQVHSQVLQTTIRRLHDTWEAFQKRGFGFPRFKKYGQFKSIVFPQFKDNPIRSRGTGFANNGFELNLPKLGEMPIRMSRPIPDGFQVKQVRVLSKARGTQWYVVISIQSDVSVPCVPAHGRSIGIDLGLERFATLSDGSFIERPKFLKSQHRKLKLLQRRAARKQNRSANWEKAQVKVARQYHHIANKRKDFHYKTAHQICDQGQTIFVEDLNGVGLNRGMRRKECVDAAFGQFLSIQEWVCWKRGAFFMRVNPNGTSQTCPHCGATVHKSLDGREHHCPECNYRTHRDHAAAQVVELRGLDNLVLVDISAERRLRQRGTERVCAGVLAGSEMASQVPKARKGVTRKAKS

SEQ ID NO: 15644 - protein, 408 aa, Tolypothrix sp.
MLVFEAKLEGNDEQYQKLDGSIRTARFIRNSCIRYWMDNRGVGKNEISAYTAILAQQFEFADRLNSMARQASGERAWSAISRYDNCKKKRPGKKGFPRFKKEQTHGSVEYKTTGWKLSEDRRSITFTDGFKAGTFKMWGTRDLHFYQLKQFKRVRVVRRADGYYCQFCINSERLEKREPTGKTIGLDVGLTHFYTDSDGTTVENPRHLRKSEKKLKRLQRQLSRTKKGSKNRVKARNKLARKHLKVSRQRKDFAVKAARCVVLSKDLVAYEDLVVRNMVKNHHLAKSISDAAWTQFREWVEYFGRVFGVATVAVPPHRTSQKCSNCGEIVKKTLSTRTHICPHCFHIQGRDHNAARNILEIGLRTVGHTGTLIASGDIDLCSGEPLRCGEQCGLGLCPRGATAEGSPR

SEQ ID NO: 15645 - protein, 403 aa, Tolypothrix sp.
  misc_feature (46)..(46): Xaa can be any naturally occurring amino acid
  misc_feature (163)..(163): Xaa can be any naturally occurring amino acid
  misc_feature (333)..(333): Xaa can be any naturally occurring amino acid
  misc_feature (350)..(350): Xaa can be any naturally occurring amino acid
MIVLEFKAKGKTTQYTAIDEAIRTAQFVRNKSIRFWMDNRGVGQKXMYRLSKSLRREFLFVKALNSSACQASIERAYSSIARFYDNCKKSVPGKKGYPKFKKNSRSVEYKTSGWSLSETRKQITFTDKKGIGKLKLKGTWDLNFYQLEQVKRVRLVRRADGYXVQFLISVDNKLETQPTGKTIGLDVGLKEFYTDSNGHSEPNPRFYRTGEKRLKFRQKRVSRKKKGSANRKKAINKLGRVHLKISRQREEHAKRLARCVIQSHDLVSYEDLRIKNLVKNRCLAKSINDAGWYKFRKWLEYFGVKFGRITVAVNPAYTSQECFSCGAIVKKSXSTRTHVCECGFVIDRDXNAAINILKLALSTVGHTGTWIYYPNASGDSTSTHTGEILYQQVGSVIEESSPL

SEQ ID NO: 15646 - protein, 393 aa, Clostridiales sp.
MSLILTAHKMRIYPNNEQISIIETTFGAARRMFNSLHAQFEERSKMSTVERENHIYKNYTALKNEWDNENNWLENVASQALANVSLNYNKAWSNYKKNKKHYKIPTFKSKHIARKSYSLNRNNVKNDIYISKENNKLLKVPKLGFVRLSQKLRYKNYNLKKITISKSTTNNYYISILVAIDKKSLNHKGLKIKSNDKVGLDLGLIDYIVDSNGNKINNPKYLKKFEVKLAKEQKILSRRYEQAKKDGRLLSESKNYQKQRLKVAKIHEKIRNVRNDFLHKLTNTITNESQVVIVESLNVKGMMKNRNLSKHISDASWGEFVNQLEYKSERKERTFVKIDTFFPSSKMCSDCKEIHELTNDLSVREWQCPSCNSIHDRDVNAAINILNEGLTLI

SEQ ID NO: 15647 - protein, 254 aa, Streptomyces sp.
VKRAFRYRFYPTDVQAAELSRTFGCVRNVYDMAFAARTEAWARQERLNYNATSTMLTAWKKTGELAYLNDVSSVPLRQTLRHLQTAFTNFFARRAGYPRFKSRKRSRRSAEYTASAFRFCGGKLTLAKMAEPLDIVWSRLLPEGAVPSTVTVSQDAAGRWFVSLLAGDPAVTPLPATDTAVGIEVGLTRLLFLSIGEKITNPRHEHRDRAWLALAQRRLAKKAKVTAPIGPGLGARSPKSMPGSPTGGAITCTS

SEQ ID NO: 15648 - protein, 379 aa, unknown
  TnpB Polypeptide
MLRAIKIKLYPNKTQEQVLNKVLGSYRFVYNHMLARKQEAYNADKTNLGLTKLCKYFHHELLKDEQYQWLKEQNTKVMQQSIRQMFSAYDKFFKEHNGFPKFKSKRDKQSALFPIDAISKTNAFEDRKITLTTKLKNIKFRCSDLYFKRLQRYKDDIRSATLSKTKSGNYFLSILVDFDVTEYAKFKKTNRDVGIDLGVKDFVITSNGEVFENKHFYNKNEKRLAKLQRQLSRKVKGSSNFHKQCKRIAKTFESITNKKDDYIHSVVNYLLRHYDTVYMEDLNTNGMLKNHKLAKAIQEVGFYKFKSVLFTKALQNNKKVALIGRYYPSSKTCSQCGYVYNGLKLSERKWKCPDCGSYHDRDYNAALNILYEGRRINAA

SEQ ID NO: 15649 - protein, 403 aa, Cyanothece sp.
MYLGFKTQLKVTNSDTKTLLAKHAGVARHAWNWGLALTKEILDNNKNNPEAHIKFPTSIDLHKWLVALVKPEYSWYYEVSKCAPQYALKYLREAWGRCFTLKGGSPKFKKKNRDDSFTLDGAITVDNFQIKVPRIGWLKTYERLPQGVKPSSVTISRKADKWFISFKVEIEPKPTEKNFDVLGVDLGIASLATCSNGQVFSGVKAYKKLEKKLTKLQYHNRNKTLLSANWYKSQNRIALLHLRIANTRKDYIHKMTTSIAKNHSKVVIEDLNVKGMLKCGKLAKAISDGAFAEIKRQLVYKCELYGSELILADRWFPSSKTCCVCGSKKESLSLCERVFDCQECHNKIDRDLNAAINLRQCGLGVSPSRATAVAKLGQAVPEVTPVDKKTPKSLVEAGIRTLS

SEQ ID NO: 15650 - protein, 363 aa, Bacillus sp.
  misc_feature (257)..(270): Xaa can be any naturally occurring amino acid
MEVNQIMINKAYKFRIYPNQAQAILINKTIGCSRFVFNHFLSLWNHAYKETGKGLTYGICSAKLPAMKKELVWLKEVDSIAIQSSVRNLADAYTRFKSKKNNVQSYTTKQTNENIAVVGNKIKLPKLGLVRFAKSREVEGRIVNATVRRNPSGRYFVSLLVETEVQELPKTHSYIGIDVGLKDFAILSDGTPYKNPKFFRSLEDKLAKAQRVLSRRMKGSSRWNKQRVKVARIHEYISNARKDYLDKISTEIIKNHXXXXXXXXXXXXXXAKAISEVSWSQFRTMLEYKAKWYGKQVIVVSKTFASSQLCSCCGYQNKDVKNLNLREWDCPSCRTHHDRDINASINLKNEAIRLLTARTAGIA

SEQ ID NO: 15651 - protein, 425 aa, unknown
  TnpB Polypeptide
MPKGKTKNIIYGCQKQQLNHLSKKEYIALKTMCHFAKNLYNVGLYNVRQYYFQEQKYLSYESNYYLSKDNENYKSLNSNMAQQILKEVDTVFKSFFGLIQKAKQSNYDFRNISLPRYLEKDSYFTLVIGQIRIKPDMTLDIPMSPAFKREYGKVTIKVPENLRNKKIKEIRIIPKYKARFFEIQYTYEAIEVQKELDQNHVLAIDLGLDNLATCVTNWGKCFIVDGKRLKSINQWYNKENSRLQSIKDKQKLKGITKKQAILAINRNNQVNDYIRKTSRIIVDYCIKNNIGSLVIGYNPTLQQGSNMGKRNNQNFVNIPIGQLRENIKYLCKINGIQYKEQEESYTSKASFFDNDDLPVYNADNPQKYEFSGKRITRGQYQSKSGRIINADVNGALNILRKSKLVDLIILQCSGDLDTPLRIRVA

SEQ ID NO: 15652 - protein, 337 aa, unknown
  TnpB Polypeptide
MLRRSQISITESNSGKLATLDGIFLESKRVVNLYIDLIWTAKDFSSKFITFKVDTWLSARLQQCLGKQALEIVKSQRKKKIKHKPVFKKDVINLDARFVDVQYDKNSFDIWFRIGSIGNKIFLNLPGKKHSHFHKYDLWATKKSYRLRRIGAKYFIDMVFEKDAPELKLTGESIGIDQGFKKLIATSNSQKFDTGLEQAYLKIVSKKQGSKAFKRALAERDNKIGESINLIPFNEIKSIAVEGLKNIKHKSKFSKKFNNKLQRWSYPKVLDKLSLRCEELGILFKKVNPAFTSQKCCSCGFTHKSNRLGENFLCVKCGFVFDADFNAAKNILVLGSL

SEQ ID NO: 15653 - protein, 324 aa, Azospirillum sp.
VPQQARRRRRRRGRSPGPSRRVLRRLDKAFSAFFRRLKAKGKAGFPRFRAKSLFDSAEFRVGDGVTIRKSKRLGITGIPGEIKVNWHRDLPAGVKVGAAILSRSAGSWFACFQVTVPDGKVQQRDGTSVGIDVGLSSLIATSDGETFETLPWTKRAAKKQRRLQRALSRCKRNSKRRAKVRRNLARHIAATANRRRDILHKLSRSLVDRYAFIALEDLSVDRLARSMFAKAVYNAAWGQIRLFLEYKATNAGVRVEVVDPRGTSQTCPECGAVAAKTLSDRTHHCECGCVLDRNLAAAKVILQKAVSRMGPEHGLGAPSVPVAA

SEQ ID NO: 15654 - protein, 387 aa, unknown
  TnpB Polypeptide
MKHLATRKMFCYIEFMSTPRMITKTLKLRIKERHAKVLQLMASQVNQVWNFCNALSYRSIRERQQWLSGFDLQKYTAGFSQCDGILIGSATVQEVCKEYALRRKQFKKSKLRWRVSDPQKSKYSLGWIPFKGPSIRYHNGQLAFAGHRFSLWDSYGLSKYTLKAGCFTQDPRGRWYVCITVEVATKESTATQSVGIDPGCHTAFTCSDGTKLQGHWYRNLQKELGVAQRARKKNRVRAIHAKIANQRKDALHRFTTDVVRRFGAIFVGDISSRWALSGPLAKSAQDASWAMCKKMLEYKSHAAGVFYDEVKEHFTTQTCSSCSHMPPESPRGRAGLARSASCRAHGMEGIRQWKCGACGTLHDRDVNAAKNIVARGHSRLAEGIFVL

SEQ ID NO: 15655 - protein, 417 aa, unknown
  TnpB Polypeptide
MNVNEVLSKDYLHKISLEKTTPQKDALAVKTLRLRLKDKHASYLNQLAMEVNQVWNFCNAHGMKVYERERRFCTAYDMHPYLKGSSKEGLHLHSQTIQAVTEEYVTRRKQFNKIKLRWRTSRGSRRSLGWIPFKASAISYKNGQVVFNGTPLSLWDSYGLKNYELGPGAISQDARGRWYINITVKVNQWVCSNVLAKDVIGIDLGLETLLATSNGQKERPPKFYRTSEDALAKAQRAKKKQRVKAIHAKIANQRKNFLHQLSSALVKQCDAIFVGNVSSSVLTQTNHAKSVLDAGWSTFRTMLRYKCAIAGVWFHEVNEAYTTQTCSDCRAKTGPKGQAELGIKQWVCAQCHVAHDRDINAAKNIKMLGLQWLTDLLTTSNERLSYQEALNASGVGHGPLPTSWKASSKNKVGILCL

SEQ ID NO: 15656 - protein, 319 aa, Bacillus sp.
MLCQASCHEERVCLAKRSGQYCDSVVCSQPCGCVYTLFQKTNSAPRFRYKKNNVQSYTTKQTNENIAVVGNKIKLPKLGLVRFAKSREITGRIVNATVRRNPSGRYFVSLLVETEVQELPKTSSYIGMDVGLKNFAIMSDGTTYKNPEFFRVLEEKLAKAQRVLSRRMKGSSRWNKQRVKVARIHEYISNSRKDYLDKISTEIIKNHDVIGIEDLQVSNMLKNHKLAKAISEVSWSQFRTMLEYKAKWYGKQVIVVSKTFASSQLCSCCGYQNKDVKNLNLRTWVCPSCQTHHDRDINASINLKHEAIRLLTARTAEIA

SEQ ID NO: 15657 - protein, 245 aa, Microcystis sp.
MEKAYSFRFYPTPEQESLLRRTLGCVRLVYNKALHVRTQAWYERQERVGYAQTSSMLTDWKKQEELEFLNEVSCVPLQQGLRHLQTAFTNFFAGRTKYPNFKKKHQGGSAEFTKSAFKFKDKQIYLAKCTEPLPIRWSRQIPESCEPSTVTVRLHPSGRWHISIRFDDPTIKPLPVTDKAIGIDLGISSLVITSDGDKVSNPKYFKKHYRRLRRASKKPFCFLERVKKSRKGKNQSSKDSRSNHR

SEQ ID NO: 15658 - protein, 467 aa, unknown
  TnpB Polypeptide
MITLQCLLEFENKGDREVVLDLMRRFSSAKRYAYQRLLDDEKRKDLKKDISKLFNINTRYSDDAIFLANSIISLCKERGQNPKKVIFGSRKLFEKLNKNHLNGNRKKELKAKWKESRQGNLYSRGDKTKLGNLNLRLERVNDELYLRINVGDRQYIYAKVIRSVKREKDKWIELMFMLEQAYQTDQWFPYSVKLKLKNGKVYVFIYIEEKLPPVSIKRDNGIIGIDINAYPFHLALAITSKDGNLERYQSITLHELLDVSSEKRQYLEWQTAHQIVKILKKENKAISMENLEKLPKGKRGDGLAKLRKKLQKWIYKRLLNKIEITARRNGIEVRKVNPAYTSVIGKLKYAPQYNIDKDIAGAYVIARRGLGYKEKLPKNYKELLSDIEFLAYSTAKIEDNIANIKQKIKEETNQYKRNKLKSRLAKLRKDLKALQTHLSHIQSGKSEPVSQQPVNQRKEQGEGFTYG

SEQ ID NO: 15659 - protein, 280 aa, Streptomyces sp.
VETERWFLAADGESGKRYGNETIRVTPEGEVSIKLPAPLAHHANTRHGRYVLASKIAFAHRGAEWADRITANRAVAYRIHLDVQRGRWYLTASWQRPAVNTIPLETARAKGMIGVDTNADHFAAYQLDRHGNPVGDPYRFFYDLSGTAQYRDAQIRHAITQVLHWAKRCGVAAIAIEDLDFTAEKTREKHGRKKRFRQLISKIPTGKLKGRLVSMAAEQGLSIVAVDPAYTSQWGAQHWQKPLAAPRRKMSRHDAAGIAIGRRALGHPIRRRTAPPQHHQ

SEQ ID NO: 15660 - protein, 399 aa, unknown
  TnpB Polypeptide
MMSRRVYRFRLEPKPQQEEGFKRFAGARRFIWNWALDQKRTYYAATGATLSEKELSTRLTALKADPETVWLREMDSQLLQQVLADLKKAFTNFFERRATYPRFKSKKRDTARFRIPQRVTLTDGYLRVPKIGRVKARQSQVVEGPTKSATFKRDACGHWFVSIVAEVDIPVAVLPLAADARTVGVDLGLKDVVVTSDGERVVAPRFYRAAQRKLRRAQRAFSRKQKGSANKTKARHKVARVHQTITAKRNDFCHKLTTDLVRDHDAVCIEDLSIKGLAKTRLALSVLDASLGTMRRQLTYKGAWYRTHVVAVDRFYPSSKLCHACDYKHDGLTLSERTWMCPSCGCVLDRDLNAARNIKREGLRILTVAAGHAETQNVCGECVRRPMAAPDDEARILAF

SEQ ID NO: 15661 - protein, 418 aa, Microcystis sp.
MKLVERHIISQNHPFWSEIDHYAFLSKNLFNLANYHYRQYFFENSQKLSFNQLYHLVSKTSDYLALPTKVSKQIIRRLDQAWISYFAAFRAWKKHPEKFLGKPKIIKYKEKIKVRNLLIYSQESIYKKPLKEGICHLSMSDLKITTSRREIIEVRIVPKSSCYVIEIVYERRSETTDKQEIAGVDLGVNNLMAVTTNQTGVAPLLVNGRPLKAINTFYNKQRSHLQSQLKTQNNQHSSKRLILLTHKRNCRVENYLHTASKRVIDWCTIHQIGTLIIGHNERMKQSLNLGKRNNQQFVNIPHNRLIEMLTYKAQLKGIKVIITEESYTSQSSALDRDELPKYGEEKPLFKGKRLARGLYKMGTNQLLNADVNGSFNIIRKVIPDVIDQGIKGLPFNPVVLDPLVSEPVELRMTKLSGF

SEQ ID NO: 15662 - protein, 371 aa, Veillonellaceae sp.
MVKTYKFKLYRQKRTKHIDHQLWVACKVYNHAIALHRRYWNLYHKSLPKFTLSTHLTKLKKLSKYAYWSEIPSHAIQDICDRIQRGYKLFWENLKNKRKTAPPKFRSWRKYRSMSYNMVGKGIINGNTIKIAGRKYKFFKSRDIEGKIRLLTIKRDACGDYFVYIICETPEAKHETRLGESIGFDFGFKGKMLVAENPKDDITAPDFFKKQKNAIARANRKLSSKRMRSHNRRKAQLELARLHRRVANQRNAYQWQLARELCKKYSIICFEDLNMKSMQAGHGRKVMDYGFAEFLNLLEYVAPQFGSRVVRVDKWFPSSQLCYDCGFQNNEVKDLDIREWECPKCHTHHDRDRNAAKNIHCEGLHMLQQTS

SEQ ID NO: 15663 - protein, 506 aa, unknown
  TnpB Polypeptide
MRLGVESVPGTPKGGGESMPRRSDHADKDPRARGRAPGLGLRSAGKSKRTKIKKKIDGRDVIVEPLNAWARLIIEHNGDPRGSGVSGAWAVRVWRCETLRLLPTPELEGLLWRVGDAAARLVNMENYRRRQRFFGGKGIDYSWRSAWDMRKTEYAEIYRLLGSANFHEACRLIGEQWKSFAELLKAEREGGLPPWMNPRPPGYRKRSGERVPIIVVRFDNYRVDLGKRVLHLGYWNMDIPFKGKPRWLIKPNVRQGRLIITYDPIERRWYAHISVRVPLERGHSGSGFMGVDLGREVLVAAVTSDGTALLYKGKALRSDYFYFEKRIAEIDKALSDPRAEEADRAVLWEERKRLYEKRRRRRGQTFANTASHLENEAVRRDVGVVFIGYPWNISQDKPGKGNTNMWGQRRLMLRLATTLENAGIPAFAVSEDGTSRECAYHKVEVQRKPRGLVHCPHGHTMHADVNGGLGIMLRGMEALGIKAELPRQIRVLSFLATPGGVKPINP

SEQ ID NO: 15664 - protein, 412 aa, unknown
  TnpB Polypeptide
MEEGEGGLRGGFRVFKLHVSSENLPRLRQLFRDFVNGRTRVKGALCYREEWLEEWGNVLKMREEAGRRTMPSPPAVLLLVRFVMPDGSARGNTAAPCIIDLRRLELRIPSYNVRVPLRRSLAKALIEENALEPRPDFVLQVTRRGFLRVVARREVQAALALPLRVITLDENSSYGFALTAWDVSTDGTKVSLRFFEKLRPPNHGYRRGVAKLLQSYAAKPSGEVRQRLAEILPQEVLERLTAERARELAGATRARERRLNEAFVQRLAARVRRLVREARKRGMNVLMLVDPIDPDSLRGTKLQGTLLRARRRLRNLAVYEGAMLRLLRASGRHCPRCGCWGREVGHTRRSRVYGCPRCGLRWDRDKGVLYNLAYAYFARMIREESDDDTAMAARVLEAMREWLEKHPSILQY

SEQ ID NO: 15665 - protein, 445 aa, unknown
  TnpB Polypeptide
MSRSEGKGNWRGGFRVFKLHADGENTERLRQLFRDFADGRTRVKGALYYRDVWLEEWKNVLKMREEAGKRTMPNPPAALLPARFTMPDGTTRGDKNAPCVIDLRRGELRIPSYGVVVPLRERVCRALVGENGLEPRPDFVLQVTRKGFVRIIARREAYSALGRGGRLRLVCVDENSSYGFVVAVFDYDGKWRLTHFRIYRPPNHGYREGVVSLLQSFADKPSREAREALARIPLAMTPERARELSALAKHRERRENDEFIRRLVGDLRKVVREARERNMHVVVLVDPIDSDTLRGTPLQRTLLRARKHLRNLARYEGAEFRLLRASGKQCPICGSWGVEVAPRTYRCPSCGITWDRDRCAVLRLPLLYLERLEEEREECDDAKYEVGRLATEFRGFLKRHLGFLNPVPQGRGNRNHGPRATGAPARGTEEAVRVKPLPQGRWTSP

SEQ ID NO: 15666 - protein, 334 aa, unknown
  TnpB Polypeptide
VDSAIKTAYSILNSWRKNYVKGDRKRRRPTARRLFTRAKQTLAKMEGEKLRLTVKTGEYVYLDLSKRYFSLPGEVSSAGLGEPIITPEKIHLPIHYEEDAQNSKPSVAWDFNLLSLDGFSPETGWIRIDTSKLASIHIASFEKRCSAQRKASRSKKARRVLSKYSNRERNRARKHQLEITRVIQSLCGPVGLEELKKQGMYTRSRIWNRRISRSDWRSITRILVEKMGEAGVKELDPYGSSSYCSRCGWENKDLNGADVFVCKECGLRIDRQLNAAINLYMRMRLGCTVSWVGGRKRVELCMEGASQRREWWDRVVLPSLLLGGCVLTRGGGAE

SEQ ID NO: 15667 - protein, 322 aa, unknown
  TnpB Polypeptide
VPVTFKETGASWLTGGGRALALSLSNATRRELGAAQVRKLASVKVVKDPRGRRAAKLIRDGRGQVQEVTFSFSGGYWWASLRLRVMPAAATQPTRGPARPRAAAVGVDAGMGRHFATLDKPLPGVTDDAGHIDAPLFLRRALSDLAVAQRALTRTLPGSKRHAKALARVQKLHGRVASRRETWQQHLAIALAEHAHVVGVETLNLRGMARKTKGFRFSRSVADNGYGLFVEILTRQADKRGSAVVKAGRFYPSSKTCSDCGAVKTKLPLSEREYACATCGLRLDRDVNAARNLAALARTGLTRPEGSGIPPGPVGADLVLAA

SEQ ID NO: 15668 - protein, 336 aa, Methylobacterium sp.
MGRWTLKRVEDAFTGFFGRVKRGLKPGFPRFKPASRWSSFGLLEATGLRHEGDRIRLKGFGRPIRLNHDRPLPSDAKILGVTFTRKGRHWFVCITVKTSEVVATTPPAGEAVGGDLGVEALLTLSTGERIPNVRPSSRREREIRVSRRALARCRKGSNRRRKIKARLARQLQAVANTRDQYLHRVSARLTREHSLVMLEDLRIRNMTRSAAGTVDEPGANVRQKRGLNRSILDAGWGKLVQFVRYKATRAGGELICVDARGTSQECRQCGAVVPKPLSLRRHVCPCGLNEHRDVNSAGVIRDRGLAVKAASEGGQPLGGANVGRRAVRRPGTLLAA

SEQ ID NO: 15669 - protein, 372 aa, unknown
  TnpB Polypeptide
MILGKKVRLKPTEEQEHQLWRSSGTARWAYNWALERQEKTYASGGKFLSDNDLRKELTQLKQTEEFFWLYDVSNNITKQAIKDACEAYKKFFKKLADKPRFKSRKRSKPSFYNDNVKLKVKKLSVLIEKVGWVQTSEQIPTGVKYTNPRISFDGKYWYLSVGIEQEQTVGQLTSEVVGIDVGVKELAVCSNGMIFKNINKSQSVKKLEKRLRRLQRKVSSKYEMNREESRFVKTCNIIKVEKQIRMLHRKLNGIRNNHIHQTTNAIVKTKPCKVVMETLNIKGMMKNRHLSKAIAKQKLYDFKSKLQYKCKIQGIELIEADKWYPSSRLCSSCGAIKENLKLSDRVYRCGCGLVIDRDLNASINLSRYKLVV

SEQ ID NO: 15670 - protein, 437 aa, Nonomuraea sp.
LEFDLGQRLFAERLGGICRSVWNTGLEQRRAYRRRGAFIGYAEQCRQLAEAKKDPDCAWLAEASAQVIQQTLKDLDRACREHGTWKVRWKSKARWRPSFRFPTAQQIPVEKISRKWGRVFLPKFGWVKFRMSRPLGGSVKSATVARDGRHWFISFLVDDGLAEVSEHARPERHAGVDRGVATAAVTSDGEFFDRRHAGESSVSSMAPPAETDGDAGGTGFLTAGEARRYLRLQRRLARSKKGSNRRRRVVRAMGDLMRRARWRRADFNAQAAHRLTRDYAIVTLERLNVRAMTASVAPRPDPGAPGAYLPNGRAAKAGLNRSILDKGWYGLEAALRSKARSAAPAIQETCHTPGPTPPTPAGRSPARTAVASACRDGPTDSATAPRRCAAAPASSPPSPTAGRSPTCSAASAVFAVPLTGDDPAAVRVVLVDEAALA

SEQ ID NO: 15671 - protein, 400 aa, unknown
  TnpB Polypeptide
VYKAYKFRLYPNIEQQELLEKHFGSCRFVYNKVLSHFKDAYAASKEPWNRNMAIKMITELKKSEEYVWLNEVNSQSLQQSVMDLDSAFRRFFSHNSGFPKYKSKRSSGASFRIPQHIKVLIDEGLVRFPKFKEGIKVQIHRPLTGAIKFATISKNPAGKYYIALVCSIESPDKSTMIPTEDNAVGIDLGIKDFAVLSDGRKYNLPNTDAIDKRVKRLCRRLSRKKIGSKNRDKARVALSKKYEKLANIRHDFLHKLSRSLVDENQIDFYFLEDLNIKGMVKNRKLARSIQNSCWATFATFLTYKAVWAGKEVCKIDRWYPSSKTCSGCGFKKEDLSISDREWTCPSCGSTHDRDINAAINIRNIGITTAGTAESNACGEDVRPATTGAIFYETGSSALQC

SEQ ID NO: 15672 - protein, 368 aa, unknown
  TnpB Polypeptide
MKAHRALLIRLPKDKCDTNYIRRLMAFTSLAYHNFGVWEPDIPKTIQHQLYGFKDYIESLVFGTEPKRWFAKTWVPLTTLRVYADGSMRGGRGAPVVLDFRSSVIKIHYVCKNEPRFVVEVPMPGWVVERVGEGGDVRFAMIGLKDDKPYLALVAERVVEPYVPSGYRLVVDVNAWNNGVAYGIINPNNKIAEYSSLRPNLRLIDTWYHKAENLHKRLGKLKRLGLDSTPEAKRLWREIKALRRKVYAYLRDFAQKRAHELAMKTLRLRAEVLIDDMIEESRRELLEVKLPKGLKKLYLTYTRRFVKLLTTQLQWYGVPYEFKRLPSKVCPVCNHELTQLPGRTMVCENCGFKAPRDKVPMHWAMKLS

SEQ ID NO: 15673 - protein, 381 aa, unknown
  TnpB Polypeptide
MLIRKAYKFKLMPNGEQRHKLSSFVGCKRFVFNMALEKQIALHGENSTFLTNYFQMTNWLIAWKKEFPWLRDCHSQVLQQGLKDLHQACQNFLAKRACFPKFKCKGNGDGACFPQGGKVDEANSRVYLPKIDWVRYRKSREIEGTIKNITVSKAGDDWFVSIQTEFEVDNPVPTGGELGIDVGIARIVTCSDGTFFAPLDPYKHCMDRLARLQQELEKKVRFSKNWQRVREQINKLYTKIANIRKNYLHQISSAISKNHAIVFVEDLKIKNLTKSAKGTVEEPGKNVKAKSGLNRAILDQGWGMFFRFLNYKLAWKGGHMIAVPPQNTSRTCPRCGHVSKESRPIQAKFLCTHCGLSGNADVFATMNILERGRQMLATEHL

SEQ ID NO: 15674 - protein, 401 aa, Streptomyces sp.
MQHVKRAFRYRFYPTDEQAAELSRTFGCVRLVYNKALEERTRAWYGEQCRISYVQSSAALTEWKKTGELSFLAEVSSVPLQQALRHLQTAFGNFFAKRAKYPRYKSRKKSRASAEYTRSAFTWRDGKLTLAKMSEPLDIRWSRPLPQGAEPTTVTVSRDAAGRWFASLLCEDTITPAPATTAAVGIDAGITSLVTLSTGEKIANPRHERRDRTRLARAQRELSRKAKGSNNRAKARVKAAKVHARIADRRRDFLHKLTTRLVRENQTVVIEDLTVRNLLKNGRLARAISDAAWTELRSMLEYKCAWYGRELIVIDRWFPSSKLCGACGTVAAKLPLNVREWTCECGAVHDRDVNAARTILAAGLAVSACGDGVRPQRESSRTGRSSVKQETQRATAEIPRL

SEQ ID NO: 15675 - protein, 376 aa, unknown
  TnpB Polypeptide
MDQIQIINKTIGTCRYVYNFYLAYNKESYEKEKKFISGMDFSKWLNNVYLKENPEYSWIKEVSSKSVKQSIMDADRAFKRFFKRQSKFPNFKKKGKSDVKMYFVKTDVKVIIPCERHRIKIPTLGWVRIKEKGYLPTNPDTHTIKSGTVSCKAGRYYVSILVEEQEKPQSELNNFGIGIDLGVKDFAVLSNGIVCKNINKTNRVKKLEKQLKREQRCLSRKYEDDKMRKKKGEATRQNIQKQIAKIQKLHHRIDNARTDYVNKCVNEIVKTKPSYITMEDLNISGMMKNRHLSKAVASQKFYEFRRKMEAKCRETGTQLRIVDRWYPSSKLCHKCGCIKSDLKLSDREYICECGYRVDRDYNASLNLRDAKTYKVA

SEQ ID NO: 15676 - protein, 458 aa, Megamonas sp.
MIKRQVIVVKTYCFKLYKAKRNKKLHKVINIAGIIYNHCIALHKRYYRLFKKSLNIYKLQKHLTKLKKIGKFSYFKEVGSQAIQDITQRIDRAYKLFFRNLKHKIRTAPPSFKKIRKYKSFTLKQAGWKLLKGNIIEINKQKYKYFKSRDIEGIVKTITIKRDTLGDIYLYFVCETNENKVLARTGKSVGYDFGLKQFLTASDNKDIKAPLFFKQNAIEINKQKYKYFKSRDIEGIVKTITIKRDTLGDIYLYFVCETNENKVLARTGKSVGYDFGLKQFLTASDNEDIKAPLFFKQNANVIKKANRILSRKKKGSNHRRLAKIALARLHKKIANQRKDFQFKLANAICKKYALICIEDLNIKGMQKRWGRKISDYGFSEFIKILEYKAREIGSIVQKIDRYYPSSQICHVCGTKNPETKNLAVREWICAKCKTSHDRDRNAAINIWKVGASTFFGEI

SEQ ID NO: 15677 - protein, 367 aa, unknown
  TnpB Polypeptide
MEVTKYASQQPFIFLKRALSQFFDDLKSDKSSSKRKGFPVFKKKRYSSGSFYIGGDLAVVKKGSEIKDKRFEASDDKTYLYIPKFGWVMLREEIRFPGKINSVTISQDGDKFFASFSIETSEIVYEGTHKENAQEALCGCDWGVKDLLTLSNGIKIKGSKHLKRRQRQLARQQKTLAKKQHPRTKGDKTPTSKNYIKQSRKVGKLYRRIKAQRLDENEKLSTVLVRHFRVICLETLNVKGMMSNHRLAKAVADNSPYALKEMIKRKSSLRERTVVEADQFYASSKTCRRCGEVNKDLKLSDRIFVCPKCGFTEDRDVQAAKNLTEVYINRVGLASPELLKLKPVDLTALLDDLAINGLATSRVEAGI

SEQ ID NO: 15678 - protein, 431 aa, unknown
  TnpB Polypeptide
LKNRANLIERRKIMLLSHKTSVKLNINYSNIIGHMCYAAYKLWNVCNYERIHYKELELDTYPDWYYQKKSHKDDLWYKNLPSQTAQEVCKLLDKSWKSFYRLTKTHGVENPHPPKFKHSKMPVTYMQKGIVHTAGSDTVRLSVSKQMKDYMFDTYNISENYIYLKNQIFKSTDDIKQIKIYPPVNGNCDIIVIYEIEDTIVLPDNGRYLSIDLGVHNLMTCYNSVSGETFIIGRKYLSLCHYYNKEIARVQSQWSRIQSSKGVKYPKSSKHINKLYVKKNNAINDYLHKITRYIANYCRDNNVNTVIIGDITNIRENKDYGHVTNQKFHSLPYKKIYIMLKYKLALYGINFIMQKEAYSSQTSPLMNTVCKQNANKKNRVERGLYIDGSYNWNADSVGAFNILRLYFQAQKIDTRLDPISISSPEVTKVAA

SEQ ID NO: 15679 - protein, 257 aa, unknown
  TnpB Polypeptide
VSKIKTVTVQYRHGKWECSITQEVECKTAKQVLETITGFDINSKQTVVGSNGFVADNPKFLKQAIEKLNQLQRQLARRTKGSNRWLKTKQRINKLHGKISRQRLDFAHKTSRQITNENDILVFEDLNVKAMQKFNGSMVADNVMGLITQLSKYKAELEGKLYHEIGRFEKSTGICSECGQRHVLTLNDRRFTCTACGAYQSRDLAAAKSIASTGELDIIAAGIVARVTPASQQKQSVKTKVFELSKLDFGSEKKEAA

SEQ ID NO: 15680 - protein, 369 aa, unknown
  TnpB Polypeptide
MRKTFKYRLYPTKAQRTAMQKSLDACRWVYNKALESRKDAWEQEQRSVSHYDTMKMLPGWKSGHSFLLDAYSQSLQNACTRVDLAFQAFFRRVKAGQKPGYPRFRGKRRYDSFTYPQSGFSLLDNGYLRLSKIGHVKIKLHRSIKGKIKTLTIRRDALGNWYACFSCLVEPQPLPPSPKVVGIDVGLTHFATLSTGEHIPNPRFFRRDEKALAKAQHRLSKCKKGTPEYRKRKRVVQHIHQRVANRRRNFAHQLSRRLINEFQIIAFENLNIPDMQNGNWRSMNKSIADVAWRQFADFTAYKAEGAGRLSPRVDPCGTTQMCSGCGLIVPKDLSVRVHNCSRCGLILDRDHNAALNILARGLASVGLDP

SEQ ID NO: 15681 - protein, 458 aa, unknown
  TnpB Polypeptide
VAFCCPIYSCNTWCDHRHNSQRNAMVTKEAPSNASFRGRVAPGRSNRGKPPGFAGMAGLGTAFHRRASLDYRRIKGEHKQALCPARSLRMARRTFKYHLYPNRRQREKLQATLEVCRELYNAALQERREAWSSQRKGIYYAEQAKQLPGIKAVREDVRAFHSQVLQDALRRIDKAFRAFFLRCQRGQVSGFPRFRSASRYDSFTYPQAGFKLSGRLSLSKIGDIKIKLHRAIQGQIKTLNLKRENGMWYACFSCMVEPEPLPANDKAVGLDVGLLSFVTRSDGRRMGNPRLFQKAQKRLRRAQRRVARREKFSKRWKKAVRLVAKVHRKVFNQRNDFQHQLSRKIVNSYGIIFVEDLNVKGLSRGRLAKSVQDAGWAAFFQKLSYKAESAGRRFLSVDPRGTSQRCPCGEANPKRLSDREHVRLDCGLVTTRDHASALEVLRLGLSLQPLTAVQECCG

SEQ ID NO: 15682 - protein, 475 aa, Aulosira sp.
LLLNYQYRVYPNTNQKLELNYWLRICQYWYNKQLGDRFDWWENNRNNINACPLICPLPQLRDNPSYYSQKKQLPSIKEDLIKVFHSGELLDFSRVPSQTLQDVCKRVDLAFGRFIKGDSNGNRSGKPRFKNAARYRTMRIDGQTITIEQVEKNWLFVSFSKLEGWVKVRLHRPLPEGFTLKNALLTRKADGWYLTICLEDPNVPEFTPDEIVPTWENTIGLDAVLHEDDYLATSENTKLPALKSFRKLEKLLAKVSRRKSAKNKGSRARRKLAKREAREHQRIARARKDHAFKTAHSLVRTGKKVFVHEDLNLKALSKRNKPKQDEDGKYLPNGQSAKSGLNKSWNDAAFGSFFKILEYIAGKAGARKIAVKPAYTSQLLAYRDEFVFTDCSIREYWDEYESLLVDRDVNAAVNIKRVGLGLFPTIKRRSGNLVVTQSTTHSTAKEVLVVLRNARSLHRPQAVGVSSSPSQKRAA

SEQ ID NO: 15683 - protein, 391 aa, unknown
  TnpB Polypeptide
VFPCKELHIIWKQWLAAYRWIYNKAIELLVGGFKSAKGNSLDQQLQAIQPEWTKCLGKTRQEAVCEAQSAYRQARKAQAIKPKKERGAFKMRFRSCRDKSQVIQFKNDAYRDGTWFPSKVKGLLYCTAWGYQVPYNCEYGTELVYQRGQWFACFPRYVPVNGTGSDKVIAFDPGNRIFLTGYDGENILEIGKGDIGLMTRLCLHLDRMIGRKIKAKGKVNKNLRYKLNGAIHRLRFRIRCLVDDLHKKVSSLLVNSYKLIFLPTYETSQMVLKATRKINRKSVRNMLTWSFGRFANHLEQAAKRNGVLVIRTNESYTSKTCPHCGKIHHKLGGAKTFKCPHCGFIAPRDWVGAVNNMLAALQAIAFSLKDGVISILEGDVTVAQFRENCEA

SEQ ID NO: 15684 - protein, 411 aa, unknown
  TnpB Polypeptide
MIRSSAFALKFATRKKRNILDGVFDEYARVVNLYIDALNQLKELPKFTSFKVNTWLSARLQQCAGKQASEIVKSTRKKDREIRFKKYKQIYKYFLNEQRQSKFIGKKFCELKMNYKIKPRFDGKSINLDNRFWSLNDSINSFDRWVKLGSIGNNVRLLLPLKNHKHNKKFSNWKPSGSCRLLRNNGKFKIELIYETETPKLSKPRGVLAIDVGINCLMSCSDGRQIGSNLKKLLNELNQKQQKSKSFNRKLNQIHNYIRWCVNQLDWSSLSDLVIENLKYIQIGTKQKVNKATRELLSKWNLGLWHRAIEQKCEENCVYLHSVEPKYTSQTCPRCGNVDKGNRNGVLFRCVTCGYEANADLNASINILNRFRQEKLNLSADIVPDMTKADFVEISNYSSGSSNKHRILSRR

SEQ ID NO: 15685 - protein, 338 aa, Escherichia sp.
ATETQWLKDAPSQPLQQSLKELERAYKNFFRKRAAFPRFKKRGQNDAFRYPQGVKLDQENSRIFLPKLGWMRYLNSRQVTGVVKNVTVSQSCGKWYISIQTESEVSTPVHPSASMVGLDAGVAKLATLSDGTVFEPVNSFQKNQKKLARLQRQLSRKVKFSNNWQKQKRKIQRLHSCTANIRRDYLHKVTTTVSKNHAMIVIEDLKVSNMSKSAAGTVSQPGRNVRAKSGLNRSILDQGWYEMRRQLEYKQLWRGGQVLAVPPAYTSQRCACCGHTAKENRLSQSKFRCQVCGYTANADVNGARNILAAGHAVLACGEMVQSGRSLKQEPTEMIQATA

SEQ ID NO: 15686 - protein, 380 aa, Actinobacteria sp.
MENFISKFGYKHDIVDEKELTMCLTFKVVVPHNLTPILDGLYQKAGVCVDRMLEDRTKSSSKYYKEIPCVLAKSLISKYQRNKKLKQVKNLVLPVCGDKGKQVKIVEGGIRVPAFFKKSILPVVFPKPISGFIRQVEFFKRDNKWFMSYSYNVPILPEQEIQGFIGVDRNSVGNVAVCADVMTGKVRKFGPDTAGITKNFRNRRKNLQKKGAKNALIKIRRKQSRRTKDINHKVSRSIVDLAEKHRSAIVLEDLGKISKKGKAKRYVQKSQWSFYQLETFIKYKAALLGIPIFYVNPAYTSQVCSRCGNINKPNGKLYKCSCGNLTHRDVNAAFNISANAWFLYGQTARHNASVVGYIGDSPLNQSFKKVIQLESSGGAR

SEQ ID NO: 15687 - protein, 278 aa, Okeania sp.
LSFVVEIQPEVLPKTDNSVGIDLGIKTFATFSDGTKVDAPKPLKKRIKKYQKLSKSLSHKTKGSKRYEKARIRVAKFHGKLKDTRTDFLHKLSTKIIRENQTVVLEDLNVSGMVKNRKLSRAISDLGWRQFRTFLEGKAEKYGRDFRVISRWEPTSQICSNCGFKGGKLDLQVREWECLNCGAKHDRDENAAINILVAGGQSETKKRTEPEPPKGARERGARNGRGGKRKTTAKVVAVNVSGAMRQQSVNPPRSLGSVGIPVPLGRGGCQCRRHIYGN

SEQ ID NO: 15688 - protein, 375 aa, unknown
  TnpB Polypeptide
MYLTYRYRIKDSSHLNFLKDKANKANFIWNYYNEISKKYWRESRKWVTEKELNQLTTGSSQDLDLNAQVIQAILKEFCKKRKQHKKLSWRSSKRKLGWIPFTNQNIRHIKNGSFQFMGRKFKFWKHRKLQGKIKSGSFNQNSLGYWFVNFVCELPNVPQVKGTKKVGIDLGLKSQITTSDGVSYQQTITKDYAVKLAKAQRAQKKKQVRKIHTRIKNKRKDWNHQITTEIVKNYDQVYVGDVKSNKIKSLKNLAKSVYNASWYQIKTFFSHKAKKLGKVFQEVSESHSTVTCSVCLSRTGPSGLGTLGVRAWNCSNCNAEHHRDVNAAQNILQFALGRESRLAETRQERVGGTIRKRFQTEIIESKIGDYNAVED

SEQ ID NO: 15689 - protein, 430 aa, Dehalococcoidia sp.
MRVNQAFRFELDPNRSQRASLAKHVGAARFAYNWGLSRSLEALERGERIPTAAELHRQWNVWKRANAPWWAEVSKCAPQEAFRDLERAFRNWRERRAKQPRFKRKKNFEDNRARLTGSIRVFPRHVQLPRMGKVRTKEQTDKLLVLLETGKARILSATVSREADRWFVSLTCEVERPDPEPRQGEPVGVDLGLDCFAVLSDGTRIEAPRPLKKSLKLLRRRSRQLSRKQKESKNHAKAVLKLARLHRRIRNIRRDFLHKITTWLAKTKPAIVVEDLSVRGLMGGRQSRSVADVGWGTFRRMLEYKSSWYGARLITAPRSFPSTRSCSRCGALGPKLSLSQRMFRCSACQFEADRDFNAALNLRFYGLAAAAPFGGARRAGCGPTGSSPGSYACGDPSGGGTGRSGIAPVYEPRVDEAGSDRSSMTPARVK

SEQ ID NO: 15690 - protein, 381 aa, Nocardia sp.
VQLRYNYRVYPTPGQQVSLARAFGCARVVYNDALRARRDAYVSGEKISDTEVQRRVVTEAKRTPERAWLGEVASVALVQACQDARTAYRNWFDSISGKRKGRRIGAPRFRSRKDNRQAIRLTRNGFTLRENGRLYAAKIGELEVRWSRELPSVPSSVTLIKDAAGRYFVSFVVQVDERPLSLVESEVGIDLGLTTFAVLSSGKIIASPRFLRQAERRLRKAQQSLSRKEKGSKNRVKAPVRVAKAHARVADTRRDWAHKHSTAIIRDNQAVFVEDLCVSGLARTRLAKSVHDAGWGMFTRMLEEKAARYGRTFAKVDRWFPSTRMCSVCWVLSGKKPLHVRKWTCTCGTVHDRDLNAAENILAAGRAERVNACGGAVSPAA

SEQ ID NO: 15691 - protein, 376 aa, unknown
  TnpB Polypeptide
MIKTQKYRIYPTKSQTKTLEAWLEECRWLYNYLLEQRKNTWEQEQKSISYSKQSCEITKLKDKRPNLKQVYSQVLLNVARRLDNAFQNFFRRVKRNQNPGYPRFKGKNRFHSITYPQFGFAIKDCRLELAKIGSLKIKMHRPIKGNIKTCTITRKPTGKWYASFVVEYEPQPLPESKEVVGIDVGIKKFATLSTGEQISNPHFFKKEEKVLAKAQRKLAKITKEKGRDTPEYRKAKKVVSRIHERIYFKRHDFIHQIARQIVDRFGVICVEDLRIKNMMRNNHLAKSIGEVAWGNFIQELGIKAEEAGRKFIRVKPNNTSQMCSRCHHIVPKDLSVRVHVCPHCGLVLDRDLNAAYNILALGLQSLGNQSLEAHVF

SEQ ID NO: 15692 - protein, 308 aa, unknown
  TnpB Polypeptide
LTRRSRRSSRNEPGSPASRARSGMSLVSASPSGSKSKTPKSMSPRSAGSGFARANPLTAPKRDGEGHWHVTLTAEFEMPEVPLPPANPERVVGIDLGLRDFAVLSDGTRIAPPKFYRKGLSKLRRAQRALSRKQKGSKNRDKARQRLNKVHARIRNQRQDWLHKLTTDLVTRYDGLCIEDLNLKGMARTKLSTSVLDAALGEFRRQLEYKAVWHRKHLAVIDRYFPSSRLCRECGTINTALTLSERVWICGCGAVHDRDLNAAQNIRAEGIRRIPVAVGHTETLNAWGEGVRPAHCRQSSLNQESHAL

SEQ ID NO: 15693 - protein, 405 aa, Moorea sp.
MIILELKAYGKKNQYSAIDEAIRTVRFIRNSCIRLWLDKKGTGKYDLSKYCKVLSKQFPFANELNSSARQAASERAWSSIARFYDNCKKKVPGKKGFPKFQKKGRSVEYKQSGWKLSSDKKSITFTDNKGIGKLKLKGKWDLWRFDKKPIKRVRIVRRADGYYVQFCIAVDIKEELESTGKTVGLDVGLKDFYTDSNGNTEPNPRFYRTGEKRLTFYQRRVSRKKKGSSNRRKAVNKLAKTHLRISRQRVGVACAKRIEHAKRLARCVIRSNDLIAYEDLRVRNLVKNPCLAKSINDAGWYQFRKWMEYFGTKFGRVTVAVNPAYTSQNCSNCGEVVKKSLSTRTHRCKCGCELDRDHNAAINIRNRAVGTVGHIGTWVVDLNAYGDLASTLSGSDLIEQVESTK

SEQ ID NO: 15694 - protein, 404 aa, Thermoplasma sp.
MITAAKVKLYPNERQKILLEKHFGSCRFVYNYFLAKRDEYYITHRDAEKSSLSYLDTQNMLIELKKEYPWLYEINSQSLQMSLRFLDNAFKNFFHKNTEHPKFKKKGINEYFAVPQHIKIQGNRIYFPKFSEGIYFKGSEKKLSEIKDINEIVITKDSGYYYCSIIYEIPEELPEKKPLSAENSVGIDLGIEKFATLSPGIAIENPGFIKKLEKRIKKLQKQLSRKQNGSKNRRKHILKLQKEYMKLRNMREDFDDKISTAIAKQYDTIIIEDLNVKGMMQNHHISKSLNDVSFYSFKQRLEWKAEKYGKNIIGIGRFDPSSKICSSCGNIKHDLKLSDRIYHCDVCGLIIDRDHNASKNIRKIGLIRVGSVRSEFTPMEIATSGLYGCPERQRSLRRKEAPML

SEQ ID NO: 15695 - protein, 409 aa, Thermoplasma sp.
MITAARVKLYPNEGQKILLEKHFGSCRFVYNYFLAKRDEYYITHKNAKKSSLNYLDTANMLIELKEKYPWLYEVNSQSLQMSLRFLDNAFKNFFHKNADHPRFKRKGINEYFAVPQHIKIQGNRIYFPKFSEGIYFKGSREKLSKIKDVNEIIITKDSGYYYCSIIYEIPEEFPEKKPLSSENSVGIDLGIEKFATLSNGIAIENPGFIKKIEKRIKRLQKQLSKKEKTSNNRRKHILKSQKEYMKLRNMREDFDDKISTAIAKQYDTIVIEDLNVHGMMQNHHISKSLSDVSFYYFKQKLEWKAEKYGKNMIEIGRFDPSSKICSRCGNIKHDLKLSDRIYRCDVCGLIIDRDHNASKNIRKIGLIKVGSVRSEFTPVEIATSGLYGIYPYRQRSVGEAGSSEALAEE

SEQ ID NO: 15696 - protein, 405 aa, Thermoplasma sp.
VITAARVKLYPNEGPKILLEKHFGSCRFVYNHFLAKRDEYYITHKNNEKSSLNYFDTANMLIELKKEKPWLYEINSQSLQMSLRFLDNAFRNFFHKNAEHPKFRIKGRNEYFAVPQHIKIQGNRIYFPKFSEGIYFMGSKEKLSEIKDINQIIITKDSGYYYCSIIYENEEELPEKKPLSEDNSVGIDLGIEKFATLSNGIAIENPGFIKKVEKRIKRLQKQLSKKENGSKNRRKHILKLQKEYMKLRNMREDFDDKISTAIAKRYNTIVIEDLNVHGMMQNHHISKSLNDVSFYSFKQKLLYKSDKYGKNMIEIGRFDPSSKICPSCGNIKHDLKLSDRIYHCNVCGLTIDRDHNASKNIRKIGLIKVGLVRSELTPVEIATSGLYGIYPYRQRSLRWKEAPML

SEQ ID NO: 15697 - protein, 389 aa, unknown
  TnpB Polypeptide
MRVFEYRLVATKPQAQKMSEAIKVAQFIRNKALRLWMDTGVKHYDLNKYCAVLAKEYPFAAALNSQARQSSSERAAYAITRHLKPDKNGRRLKGPQFQKDNRSVEYKTTGWKLSLDRRRITFTDGLGIGTMRMLGTQDLCAYDIALIKRVRIVRKADRFFVQFCIDADRSEPQEATGRTLGLDMGLASFYTDSDGQKVDCPKFLRRAEKRLKREQRRLSRKKGGSNNRRKARVKVARRHLKVQRQRKDFAVKLARCVVRSNDLVALEDLQVRNLVRNRHLAKSIHDAAWSLFGNWLSYFGSVFGRPVIKVSPAYTSQDCWACGNRVRKALSERTHICRCGCVLDRDENAARNILRLGLASLEETYRRADGNVGPFGSETLAEMAPLLPA

SEQ ID NO: 15698 - protein, 424 aa, Okeania sp.
MYLTQKNKIRNLSSQEFKALRQLCRLSKNMYNVGLYSVRQFYFAEGGYLRYESNYHYCKDNENYRLLQTDIAQQTLKVVDRSFQSFFNLIQKTQEGLYRFEQIQLPRYLNKEGYFPLIIPRIKVKDGYFNIPMSRKFKAEYGLVKIPFPARLADKNLKEVRIIPRFNARFFEVEFITEEEPRPVVKSNNALAIDLGVDNLATCVSNTGSSFILDGRKLKSINQWYNKENARLQSLKDKQGIKTLTKKQVSITVNRNNKVRDYLNKAARYLINWCIDNSISNIVVGVNPGMKKNIKLGQKTNQKFVQIPHNVFRFKLKAMCDRYGLTYTELEESYTSKASFLDKDEMPVYNADNPREYSFSGQRIVRGLYKTKQGKLINADANGAANIGVKSNLNGFIPDRLEASLAMPLRVKFDVRKVRQIYST

SEQ ID NO: 15699 - protein, 455 aa, unknown
  TnpB Polypeptide
VKVNAASKTRLIVPKPLEPTLFQYFGCQRFIYNKALEQRIESYEDTGKTLSYNAQSATLKAWKEEFPWLKDAPAPSLQQTLLHLDQGYKNFFTGTANKPTFKKKFKSAASVSFPQASHFSIQRLNRKYGEVDLPKLGKLRFYWLTNHPDEIKSCVVSHDGKNFHISFQGYKHLTKTADPFKPIGIDMGINVSAATSKPVADTDSQLFYLDVKKIKSLENRIANKQRLQATKTRRSHRWCKLQNQIKTLHRKIRNIRQEFAHQLTAKIAKNHGLVFVEDLDVKHMMESASGTKENPGTDVAKKSGLNRAIGRQGWGGFRTFLIYKVGWYGDGIFPQNPAYSSQKCSRCKYVSEENRDTGTIGFHCQRCGFVAHADVNAATNLEEDGLASLVAKYGSITTTPSALRNSDKTRILGKRSSLGASRRKPSSNLPTRGQASNGNKAGKNSGSSGDSTKNE

SEQ ID NO: 15700 - protein, 514 aa, unknown
  TnpB Polypeptide
LLADHPRGVGLDRQDQGGDRDLRWVVEQQVDVVVLAVEGCHGGVVACTDLAGGRFQQLAHPVGDGAASVLGHQHYVYMQSVDHMPPGAYIMPIISHKCYYRLMLTGRRYLARLTPAQEVLVEQFAGTARTVWNTGLDQRRAYRQRRAWINYHQQAAELVDAKNDPDLTWLADVPGHCLQQTLMDLDKACRTHGTFRVHWRAKHRWSPSFRFPEGHHMRLVRLSAHVEQVNLPKLGQVRFRWSRPPGGQVRSATLTRDGVHGGWYLSFLVEDGLPDLTPSVEDVPAPDVSALGVDRGVVVALACSDGAMLDRAFTTPAEQASIAALQVRAARQHGPRAPGARTRRAPSKRWLRTQATITRKLARQRRRRDDFTAKAAHDLARDHGLVAVERLRVAQMTTKAAPKPDPDKPGAFLPNGARAKSGLNRAILAKGWGKFLLALHHQARYTGTFVVTVPAAYTSQRCHECSHTHTDTDNRNSQAEFRCTRCGWHDNADTNAARNIMAAGLAAAGCVSPS

SEQ ID NO: 15701 - protein, 437 aa, unknown
  TnpB Polypeptide
MLVVRTVRVPVHYGITKRKLSILDSLTARTTYGVWLWSKLFKEHKLKGSYADRRRFYEQVKVDAKLGSLTQCCFDTASWMWRSYREAHKAWRRNVAIARREGRHGWLRKLLRREPQEPFTNGMNGKVPIWFDSRFGAIEQSEHMKLCGYVARVSTLRRGIKLTIPLNPAKYHLDPLEQGTLKSFQLVKRHGKYFVHVKVESAVPDQPVYAVRGIDLGVKRSIASVMLKPNQPLRSNDFSIQTDGLKRDRLNRLEKRVAELRRAKKWAPLKQIRHKRLHVSEYYDRLAAKQVATTSQNCLVAVGYPKGIKYTNPTGNGKPRQRRMLAHWTYGRMIRYIQEECAKVGVPAEAPDERWSSRTCHRCGSRHTERITQSIFHCWNCKLIYNADFNSSINIGSRFLPKATTRQATDDLAYTGDEQAREIVACKPRSPHPLMGG

SEQ ID NO: 15702 - protein, 344 aa, Streptomyces sp.
VSRKLPLAEGMFRAAGVLVKQHRLRRHSEYLHAKADRYQRLINADGQHALNGRYAVLAEEISAVSARRSNRNEALAWAAARWAVDQAIAAGASVIYLEDLRSMEAKGMGRTLNTRLSQAVRGQIVHRIRHLAAEVGIAVVTVPARHTSKHCPQCLAPLRHRKAPDRPTIPGWKWALCPGCGWQGDRDMGAWRRIAARGLTHQTKTVTDRTSGAMIIRSVIDTLEAKAVITPAAVKTSRKDRSKTGPTRRRTTRPAPRRRRAPSPTGPSGPAGKRPEGHAHTDQTRLPRAAHRHQGVTTISTPITSRHRPRGAALGAGFHLHAHATPPRWADPPPDTTSDMGSLS

SEQ ID NO: 15703 - protein, 408 aa, unknown
  TnpB Polypeptide
MYYLTAKIKLTPTVEQTELLWQISDEARRLYNLALEQQRTVYNHRKVGISFYDQKKELKHIRKEYFPNLHSQVAQEVIFDLKEAYISFFRLIKTDETARPPRFRGKKYFYTLTYPQASYHLEDNKIILHNPNNWLVINFADGYKDIANIKALKQVEISYQDNNYYACITCEVLPERQITTGKIIAFDPGVKTLLTGYDGERIVTVESKAHHKTAKYFDKSLDKVKSKLDCAKNGSKRHSRLAKAKKRIQKKRNRRMKQINHSIAKELTNLNYDVYYVGDWSKKSTLAKTNSKKTNKRINRAVQNQLPVSQFIGYLKYKSELKGNQVSKVNEANSTKTCSSCNHINPKLSPSVRTFTCNSCGYSIGRDENAAINLYKWYAAQVTGLVKDQMNIKFVFGHYNKCLMQTSV

SEQ ID NO: 15704 - protein, 547 aa, unknown
  TnpB Polypeptide
MIIQSKYTKIFHSKDLTRLKYDELHNFAVLIQCHKNTVSQYVNNNLLHFLEYNKFKFLKEMREHFKDVIPSSFDAQLYTQVFTCYQNKFDAIQRKLTFETKTFNGFEFYKRDTKKHKKGDLKKVIIDKKQTPLSNCLTYLARYGNENTINYIGSNISKCDKNKREFYNNILRCCEKYGFERLYSLALSNRNRAVKHYSEHPIEFKSLMFSGRCRKKRIIDYNSRFGSVINSFVSLSGIGRKSFDIPVTFNKWWYGNMNDYRKKNPDYEYAITFNEKEHQVNINLYKDGERYIPQVNGNTVGIDVNCKHNLFSLSDETTYDYDRKLVNDFCKLSLEIDKLKEKNKEYKIGKRKQQKLDTLKSKMIKSEQQLIANMCKVLQSQGVGHIVMEDLDNGFGRCYVKDKDNEDINYNRKVKFLGLSSLKQEVEHIARKYNIAVSRVQASYTSKMCPICGCIEDKNRPNQETFECVECGYKDNADFNAAKNIRNRVLVTVLRESLLKQLDNGAFEPRKLKREKVKEALLSFRRNLQETARCEHNRIKINTFDYV

SEQ ID NO: 15705 - protein, 442 aa, unknown
  TnpB Polypeptide
MQTVSSYGVELRKQNIPIRQTLEIYRSAVCYLTEIYEQMWEELAEIPDAKRRFNAAEHLVHTTKKNPARFDFDLRFPKMPSYLRRAAIQHALGSVFSYETRMDLWEKSGEKAGKPRLAYENHAMPVFYRDVMYREEKEGKDEAYLKLYDGHDWKWFCVRLNHTDMEYLRRNWSGKKASAPTLEKRHHKYFLRFSYTEEVTLTKTPVKEQIICSVDLGINTDAVCTIMRADGTVLGRKFINHPSEKDRMYRTLGRIRRFQREHSSAQSRGRWAYTKRLNIELGRKIAGAIVKNAEENHADVIVFEYLEMQGKISGKKKQKLHLWRKRDIQKRCEHQAHRKGMRVSRVCAWNTSRLAYDGSGSVSRDPKNHSLCVFQTGKRYNCDLSASYNIGARYFIRELLKPLPVTERSLLEAKVPSVKRRTSCVYADLKELHLQMEILKAA

SEQ ID NO: 15706 - protein, 449 aa, unknown
  TnpB Polypeptide
MNIENKVTLCEKIKISKINSPVDNWSEFHRLYKSLQTETIKASNRVMSLCNIYNSFTRKDEGDLWLESNYNTSKLQNILYGVARTKCSKAYSKNVNALSNDIYKKYFKGKNSYKSKIDCGDGNPPMTFTDSIPLFIVAQGGNVKCVDLNKGYYEMDLPFLSQEWKKGISYVAGGKNKEEKQFNLIGSHINFGICVGRNIRQKEILDKIINGEYKLGDSKLQRVKKSGYGYEYYYLMSYTKPVSIKPELDIINVLGVDVGITIPAYCAVNYCDYKRKGMGDNTIIRQNLAQEQINRKMQKRITYNLHDGHGRKHKLDGYNGQNNKIANRNKTYNFNLAREVIDSAVKWNCGTIHMEKLTGFSASKVENRFLKNWTYYDLQQKIENKAKENGIEVKYIDPYHTSQTCSRCSHWEEGQRLNQSTFECKECGYKVNADFNAARNIAMSTKFVK

SEQ ID NO: 15707 - protein, 554 aa, unknown
  TnpB Polypeptide
MREALRPIDAPFLAAAPTGARVRTRLRVSAQDEAVLWAVGRHLGSLAGADLAARCAQRHLDTKGRNDSRATRKRALTAQCSSRWAGAITRTSEDQYQRAEQNLHDERASLQARIRRIEARLAVQAGGKAGRTRGYATAAERHAKTIRLKTLSARLSRVQRRLDGGVVSVVRGGKNLLRKRSNLADAGLTEQQWRREWESARLFLTADGEKDAPWGNYTIQWDPDTEWLEVNLPTPLAHLANQPRGRYRLSCPAAFSYRGDEVAAQAATGAVRYDISCDPARGRWYIDASWTTTPVFAPSLDEVRQAGPVVAVDVNVGHLAAAVVTADGNVLGIPVTIGLDLVGLPATARDGRLRAAISTLIATAQRHGARAIVIEDLDFAEARAEGRERHGVRPSHGRRGRKFRQVVAGIPTGKFRDRLVQMTHNAGLSLIVVDPAYTSRWGAEHWLGPLREHHPKTTGHHAAALVIGRRGLSHRARRRANGNQSAPVEAVRPAPARPRTKTAARPAPRKPATPRDLRQPPGTKTGRPHRMLVDDQAAHDRSGLPVEQRSLYAQ

SEQ ID NO: 15708 - protein, 468 aa, unknown
  TnpB Polypeptide
MRHILHGEMYVEAFEEIKALFEHFNSCKRFCFVRAGRDGIKDPRSVATKRYGSTLNSRWISDAACEAKALVERLKETPETKVIFGGRDAWNSYKNGTLSKDAWLALRSRNIYSRGDKTKKGNPNLRIDGSTLRITLSVGSTKKYKTYPFHISNRKRPTKASDTQNDYLSDYEKLDALLRSGMHYNVRLSRKDDDPKHLRVTIDYETDDTPATYGFENGVLGIDANPDRMALALVDAAGNLVENHVLINNRLLYGSSHKRLHDLGLLVKQIILIAKTHRVGIVFENLKFSKDLSAYPKKLRRIFSNFVWKKFLEILERACQKNLIPYERVNPAYTSYIGRLKYQEMHRITIHEAAAYVIGRRGLGFNESLSVFGFPRKPVKQLLLRTLEGKYQEKRIHSWRLWKALKDNETAVLTELRDCKLSGLKEFDGYLRGKSRDVGVNPTGKTSTTTGRRGEVAKATLVGEERRP

SEQ ID NO: 15709 - protein, 415 aa, Frankia sp.
MLGSLAIDQCTNMIVQLRYSFRLYPTPGQVQALARTFGCARVVYNDALRARETARAAGLPFPKTGDLSKLLITEAKKTPERVWLGEVSAVVLQQSLRDLDTAYRNFFDGLKGKRPRMGPPRYKSKRDSRQSVRFTANARWAIAPGGKLRLPKIGDVDVRWSRRLPSTPSTVTVIRDSSGRYFASFVVETGPEPALAQTERVIGIDLGLTHFAVLSDGTKIASPRLLRRAEKRLKKTQRDLSCKKKGSNNRAKARLEVARAHAWVADARRAFHQQLSTRLIREDQAVAVEDLAVKGLARTRLAKSVHDAGWSAFVAMLEYKAARYGRTLLRIGRFEPTSRVCSACGVKDGPKPLDVRKWTCTSCGTVHDRDVNAAVNVAKAAGPAVSARGAQVRPGSVPAPRGEAGTHPKITPTGA

SEQ ID NO: 15710 - protein, 414 aa, unknown
  TnpB Polypeptide
MFTSEKIQLVLVTDKNIKGIKFQFSTEDNLDLLLKRNSKAINMFIEKIFLERVTSLSKLNKFRKEICVKTKLTSFATTVAMRSAIAIYRSWKRNKRKETPRVKSKFIQLQPEYNCKLIENKLRITFEKRKYIWLELRIGKYQKLFLDLIGNGKIKLGQITVGKDFVVLSVKKDYLPFQYKGMLALDVNEKSINGVVIKKNELKSVEWDLTKIYELNQKFFGYRRKLQIKYPNRFALWKKLSNSKNYRNRMRWYLDNVSKQITDLAEKEKLMIVMEDLKNIKKGISKRKLKKNKYNNKEQMMRTKSLSLLGRLNRTNFRRVQFMIDYKGRWNNIPIQYVNPKNTSRTCSRCGHINGSLKEKRVLECENCGLKIDRDLNASINIGMALCGSESRLPKVEDIRNQISEVSLTNKLLS

SEQ ID NO: 15711 - protein, 416 aa, unknown
  TnpB Polypeptide
MKVHRTIRYRLHPGSSRKHQLLHGTAGACRFVWNHMVGKLKDEYEYGIKPDFRHYSLCNVFTIMRRDDGTTKWLQDYPSKVVRISLKPIETAYREYFKDRRADGKLNRQPPRFHGRYTTEPSFPIDYQSAKVSGDSLYVQKIGWMKLAGHNPYPDGEFKSGQIRYECGHWYAYLSYEVEAQASLPHTIREVGIDRNVSEGRWAVLSDGTRHPGPDLEEKVARRKRYQRKLARQVKGSNRRKVTKVRLQKAFQAERFARLNWAHHVSKNIAGQYDLAYMEALNIRGMTKSAKGTVEKPGKHVKAKSGLNRKILASAWGTLELCLNYKAEVRKVPPAYTSQTCHQCGHVDKKNRNGTDFKCTECGHADDADVNAALNILAFGNGAAGRGGGDTGGASRHSRPGKRQKMGNASLADFAT

SEQ ID NO: 15712 - protein, 226 aa, unknown
  TnpB Polypeptide
MIRYCVKPISENEGYIVLEDFDLKIKYVGGIRWEGKQGRLEIIYVNGRWFAHIPIEAGADPLKSNKKGYVKPIYGDEGKKKRQRIINPRSIRRRDPIGDKEAFMYMGLNNLFAVVISDGSALLVKGRKIKSEYYWWKREIATYQSIRDMLRRLGISTWIYLYYHEKYLDAMYKRDERLRHLYITAIRFLADELYRRGVRKLYIGYPYMLSQDNGMSITLTYGGSGR

SEQ ID NO: 15713 - protein, 857 aa, unknown
  TnpB Polypeptide
MVRGLRAYTVTKSELVSRLVAAENVPKFEISEEAPLPSLLGYAIYYGLLSCEEIAETVPRKETTLPCYLATVIPNKRDQEQLDSYVIASSDAFRRGTFILNRIAQTVCGPRLPGGKVSSFDVPVFRPRFEDGPELQSMQSFIKLFGYVHGIEDCSLKHAFMPERFATLNPQVADAIATDVLLPGPPTGWREVMIDGLSGWDNAINRMMTRFYGNVKVQAMKNVKGAIEGYLNVVPLHTPEVRTALIDSTLYRLRPLIIDADDWAMAMAFRLPLITEPDFFMPKDAQWSDDVFLIHLFLTRFGVKERSYLPVGSMGRQYTYLDSKIASHLLEGAKVKYTASEKIAKQARLANNPDNPDKLENERAKVAERRVKEDVRRSLLKKVNATEALRREKFDKKEAESLANLDYVEVPKTPTLGDLIGMTPNEFNARRKKIVQDIRKRNIEKVTSKGFLSEKARKRFRKAAKHRKRIGYGKMCTDTRFDSLETDSFGVRLVLKTRINMNAWIVPITGPVIKAPIVKKPKKEKISKKERQIKAMNASEEPQVTDPVLKKGIVVGIDEGRAKLFTAVSLKRSGTPSIEKKASCIVTEPQDNCDYKSDKWVTTLLTRNKYHAYTKLKIRRKWEANRIKSNPELRVAYDALSLGSLHSCDPDSWDTRFRTESVHKSVLRTDLFEDKERERWKMIAFRKKKTCLDRAVGEFISVALKGEPKTRPLVVGIGDAAFPPNGPRGEIAVPTSKLATAYKRAFERVRKTGRRVAVFPISEHYTTKACCECGSITEPPLVKRTWCTRDGTRMIVDGESRRLRCCRTCETIGKLRDRDVQAARNMHRATIALVNGRARPAHLCRAAHVVDEPIVNV

SEQ ID NO: 15714 - protein, 248 aa, Pantoea sp.
MAKSKAPLDVRWSRPLPSVPSTVTVSKDSAGRYFVSCLCEFEPVSLPITAKTVGIDVGLTDLFVTDNGYKTGNPRHTAKYAKCLALLQRRLSKKKKGSKNRAKARVKVARIHAKIADCRMDNLHKLSRKLINDNQVVCIESLKVKNMIRNSKLSKAIADASWGEFVRQLEYKGEWSGRSVVAIDRFFPSSKRCSGCGYTLPKMALNVRSWTCAECGAHHDRDVNAAKNIKAVGLAALAHGATVNPKAA

SEQ ID NO: 15715 - protein, 402 aa, Escherichia sp.
VERLQAFKFQLRPGGQQEREMRRFAGACRFVFNRALARQNENHEAGNKYIPYGKMASWLVEWKNATETQWLKDSPSQPLQQSLKDLERAYKNFFQNRAAFPRFKKRGQNDAFRYPQGVKLDQENSRIFLPKLGWMRYRNSRQVTGVVKNVTVSQSCGKWYISIQTESEVSTPVHPSASMVGLDAGVAKLATLSDGTVFEPVNSFQKNQKTLARLQRQLSRRVKFSNNWQKQKRKIQRLHSRIANIRRDYLHKVTTTVSKNHAMIVIEDLKVSNMSKSAAGTVSQLGRNVRAKSGLNRSILDQGWYEMRRQLEYKQLWRGGQVLAVPPAYTSQRCACCGHTAKENRLSQSKFRCQVCGYTANADVNGARNILAAGHAVLACGEMVQSGRSLKQEPTEMIQATA

SEQ ID NO: 15716 - protein, 412 aa, unknown
  TnpB Polypeptide
MKTYTIRLFPTKEQISQLNKLSDVRMDIWNTLIDIQQKEYQEKKKIYRKFDLINLLPGLKNTIKPEWKELNSKAIQTISTEVSQSYLSFFTLIKKDKTAKPPKQKELGKYHTLTFNQSGWIFRDNRIVINQTPFDYKTNLKNISELNIKEIRVKNKNNKWLCDIVVNDKNEYLDEKLIKTKVLSIDLGLKNLGTGVDNKGNVIILKNKSKKINQYFSKQIDKVKSKLSKKEKGSKNYFKLNQVKKKLYSKKNSQIKQTLHIQSKKLVNMNYKTIVVGELTIKSLMNAEGINKNKKGIRKSFSESNINMFLQFLKYKSQYNLMDVIKIDEKYTTQLNSLTGKMFKEKVELKDRIVKLSDNVEIDRDLNSAINIMKRYYDNHLASMTEPLDYSSVIMNNNVCNNRSLIRKPIVL

SEQ ID NO: 15717 - protein, 430 aa, Acidilobales sp.
VGEVVRTVVVKSTPLPRKLFRVFAELEGMYRNMVEQLTLFAARNNIASFTRIKALKYRELRALYPQLPSHYAYTSCQDASTRAKSFLRLKKGLTSREYPEVKSVSIWLDDHLWKPNVLTAIEVATHKGWVRVELEPRKQYWKYINGGWKLASEARVKLDKKSGRLIIYLTFKKNVEAYEPIGFVAVDVNENHVAVLVGGKVYLFETGFRGVVLGYYYRRKRVQEKYDKLFGVNCRVKREILRELKEKKLKNDLRWKLANIIVRAAKEKQYAIVLEKLGKNPAREMINHVRDDQLRHRIYQASFRGVQRAIEEKAREYEVPVVYVNPKNTSRMCPVHSAPIVYSNGSRVGKCSVGGELWHRDAVACLNLLLRARLGNGSCAPSLGGSTVDGSPVPLGSTATHEPTGVPKSLWARWKTLDATNKHELMRISI

SEQ ID NO: 15718 - protein, 433 aa, Microcoleus sp.
VLKRQKGYSIATKSAKAKLIRNGFDLQETKSAYNEVVHFYFLLVDEDPTGLSIPVTENGGWRYYELKTQGNPFVGGFPSPLKRAAIRQAIGAWESWHSNYQRWLNRPKKHRHHKPPVRSRSFNFNPQYDAGMWKNDDGSSLMLKLLVNGAWKWVKHQYQCWDIPPEWVKGSPRVQVTGSSLWLVFPLEKYVAATGGIKTIMSSSTFRTCGIDMDLDRHIAICSILETNDRGETIEVARHFINQSRHVARRKRDLGRIAVKMGQTGAIERGFSRRYWERLSAREREYSRAVSREIVEFARHWKARVISFEHLGNLRPKRGKYSRRSNQKRAYWLKSKIYEQVKRIAYQDYSILTTRVNPRDTSRLTPWGEPVWRGTVFPSKVEDFAVYEPGTPLVATASGYKSHSGLNAARNIAQKAIKRHLEKATLDLKSLKQ

SEQ ID NO: 15719 - protein, 388 aa, unknown
  TnpB Polypeptide
MKSTVTLKLKIRKNPALLQTMEAYSKVVAYIAEQGYTNKISNHYQLHHLCYYPAKQHFHLPSQFIINANRVASQTLRSIKKSKGRQPLFKAYLPLDFDKRTFTFSFDKVRLTTIHGRIDIPLNIPEYYWKYLDWSWQTAQVMMHHEQLFIHITFTRTIALVANGGKTLGIDLGIRHLAVTSSKRFFSSKQVKRKRIMFKRLKARLQAKGTKSAKKLLKKISGREQRFMAWVNHNVSKEIISTAEPGDTIALENIKGIRRKHLGKNINFWLHGWSFYQLQSFITYKATIKGIQVVKVNPCYTSQICSHCMSLGSRTGNFFRCTQCDYSLNADLNASINLAKRGSMSDSVLVAVNQPHISGDDSKATRVSSYRTADELRDNVPRMERSAL

SEQ ID NO: 15720 - protein, 358 aa, Lysinibacillus sp.
MLRSVEGKSNKAGIRFKENMVYWNGLTLPVRFRKQDLFVKESLALHTIKYCRLVKKMIRGNHTFYVQLVMDGIPPAKRIPSTGAFRHAYQKQKRIGIDIGPSTIAVVSGETVFIQQLAPEEPLLEKQKRRLLRKLDRSRRSTNPNNFNKDDTLKHGVKLRWTSSKNYQKTKKQLKELYRKKASYIKETHGALANKILSLGDEVYIETMHFKGLARRTKETKTNIQGKFQSKKRFGKSIGHHAPAMLVEIINQKLGYTKQTIQKVNTITFRASQYNHVTDRYEKKKLHQRWCQIGSHLVQRDLYSAFLLMNSEPNLQNTNQDLCNKTFTTFLALHNQHIEDLRQVKKTFPLSMGIKQIK

SEQ ID NO: 15721 - protein, 358 aa, Streptomyces sp.
MGMQLRYSFRVYPTASQCSSLARAFGCARVVFNDALRVREEARAAGLPFVTAADLSKRLTAAKKTPDRAWLGEVSSVVLQQSLRDLETSYRNFFDGLKGKRPKMGAPRFKSRRDNRQSIRFTANAGWKITMGGKLRLPKVGDVSVKWSRALPSTPSTVTVVKDASGRYFASFVVETDPAADLLPQRTGAVGIDLGLTRFAILSDGTKIDSPKFLRRAEKKLKRAQQSLSRKAKGSSNRDKARLKVARQHARVADARREFHHQLSTWIHRAVFGECGSVIFGADSAVLLLVGMGDCRVAVPVAGSPWSLVVGGRVGSSVRFAVGGRRLSTDRRTPPASASAREGARSGSGLRWPTAPGR

SEQ ID NO: 15722 - protein, 419 aa, Halobacterium sp.
MHYAYRFRLKPTADQRELLDYHRDTCRQLYNHALTEFNKIPESAGTLNQRVRQVRGQLTDLKDWWDELNDLYSTVAQATVMRIEDSVTALSELKEKGYNVGSLNWKAPRDFRSFTYVQSGFEFDKKNGQTVLSLSKLADIPIECHRQIPDDETVKEVTLKKEPTGEWYASLAVDDKEEPSKPSLAEINDDDMVGIDVGILKYAHDTDGTAVGSLDLVDERDRLEREQRNLSRKEHRSNNWEKQRRRVAECHQEIKRKRRDFLHKLSNYYAREYDLVAVEDLDVKGMLASPGNSRNTASAAWNTFTDLLEYKCKREGTHFVEVDPEGTTKECASCGVKTDKPLWVREHSCPACGFEADRDENAAWNILSRGLTDLGVGHSEGTPVETALPTGTAVVPAKRVLEAGSPCLKEPPKAASRQG

SEQ ID NO: 15723 - protein, 413 aa, Halobacterium sp.
MEHSHRYHAYPTGEVAERLERHLNVHRQLYNHVRWDYTNSSEDDKPSEYDQNNKLPGWKRKWPVFSELHSKAAQATVARFHRNLSNLRKKKEKGYNVGRLKRQSPTEYRSVTYNQSGFDLDEKRGRDKYVYVRFSKIGWVKIRYHRPIPDYASIKEVTFKKETTGEWFVSFGLETNDSDLPEKPDVESLNASNSVGIDLGIQNYIHTSDGKTVDWLDFEDEFDRLRREQRKLSRKEKASNNYEKQRREVAKVNRHIRRKVLDYQHKITTWLVREYDAVFVEDLNVKGMLEQSHNARNKQDAAWRQFITLLEYKADLYGCHVKQVEARGTTKECASCGVETAKPIWVREHSCPACGFKTDRDANAAMNVLQRGFSELGLGWPEDTPVETVTATDTTQFESVSASHVVETGSLGA

SEQ ID NO: 15724 - protein, 407 aa, Paenisporosarcina sp.
MAKRTNDLPKKAYKFRVFDHTAPKPFFAQSFGCTRWTFNQALGYVNHAWEKTGSFPTKNEVVKQIPQWKVAFSFLEEVDSIILQKAVEDLFEGFDCFKKTKGKQMKKSFIKQVKMIPSLSPKVWDFKGYPRFKSKRHSKKSFTTKMTNENIKLVQIDNKHYVKLPKCNHLIRFKKTREIEGDIKTVQVETDNLGKTYITFTCELLSSKIVPKATNDALGIDVGLTSLITDSNGNHLPVPVRYSSYKKRLTFLQRKFSRQQKGSSSREKTRRKMAKLHQKIYNTRLDHLHKLTYRLVRDNQTIAMEDLDVKQMLEARKYSNSIAHASWGKLKELLTYKCKSYGRTLIKVDRYFPSTQMCSACSDINPALKGNTTIRKWTCSTCSASHDRDHNAAINILNEAKKMVSAT

SEQ ID NO: 15725 - protein, 138 aa, unknown
  TnpB Polypeptide
MEKAYKFRIYPNKTQECLLQKTFGCVRFIYNHFLDRRIKAYEQNKKTISYNECSKELTQLKKEKKWLKEPDKSSLQNALKNLDTAYKNFFNRQKAGFPKFKSKKNRYKSYKTNMTNNNIGFLGNKIKLPSIWQDYNKR

SEQ ID NO: 15726 - protein, 506 aa, Mycobacterium sp.
MSQRVKITRARVHGSSVYLGEVTQPDGTVAPVWSADPDEVLGWLCDGFRFRFNQRRSTRCRYLTCEDRAGEQVVVCDPAREPVLVPIGNTVTDITDAQARRQHSFLAAMPGYVLEATLKTEATEWFSAIKRRKTNVANGRKAGAMPGFRRRDGDQRFVCWFNGGRNAVFTKTGRRSGMVTISGANPGAHRAPGLGPDGQPHRLAWRITLHVRLSQPIRPYTSVRVNWTRRQLVFVNEPSPVADKVRTGEVIGLDRGVVHTAADDRGGFYDAPDTAAPDKQRKFHQRRMAKCKQVAARQGRRFWESKRYQAHKTAAAGLGAKQVRVREDFAHKLSTQLVRDHDFIGIEKLSLHRMTRRGKGKGAAAKRGLNRVLQNAALGRLARCIEYKAELAGVAFVEVPPAYTSQRCHRCGHTCKENRESQAVFRCLACSWTGNADTNAAVNVREEALARWWAVHTEQLAGTSGAKPGGINPVSQAGSKSKTDPHPGPAHGPAASAMNREPPNAA

SEQ ID NO: 15727 - protein, 438 aa, unknown
  TnpB Polypeptide
MNITSSYGIEIRNMNRIFRETVGIYRKALAFLVDVYDSEWDCLSAILQKQKRFNTAEHLIHSTKTNTAVYDFDDRFYKIPSYLRRDLVNTALGIVSSYKSSLKNWEASGRVGSRPRLQTNHFQMPVFFRDNMYQETESDTVCRLKLFHENDWIWFTVNLKKTDVNYLRKYWSHAAASAPRLEKRHKRYFLRFSYEENVTLSKAPVKDQTICAVDLGINTDAVCSIMRPDGTVAARRFINLAAEKDHLYHVLNRIRKFQRQHGSKNSHGFWEYAKRLNEEQAKTTANKIVSFAAAHFADVIVFEYLDTKGKKHGSKKQKLHMWRKNYIQKAAEHKAHRAGIRIARVNARYTSRLAYDGSGEVDRDVHDSRWGTFKNGKRYNCDLSASYNIGARYFIRELLKPVSARKQSLLLAKVPEAGRRTTCTLDTLRKVSDFLAGS

SEQ ID NO: 15728 - protein, 267 aa, Okeania sp.
MAQHAGYSRWCYNWGLSLWNAAYSAGYKPNIRKLRPVFTNHTKPLYPWMKNLSSRVYQYAFISLGEAFKRFFQGLGKRPRFKKKGKSDSFPSECYANTIDNCGKPIELNGWNHKLPFIGMVKTYEPIEATTKKITISRQAGDWYISCSYEWNATTTPKKTDVVGVDLGVKTLATLSDGKVFESVRAYQRFEAKLSRLQYLNRHKEVGSANWKKAQLKIARLHRKVANIRKDALHKLTTYLAKNHGIVSIEDLNVSGMLRNHKLAKIS

SEQ ID NO: 15729 - protein, 318 aa, unknown
  TnpB Polypeptide
LTLARPSVPFLKSAATYTRFKKKGVHERFCAANETGTFRTDGKRIKLPVIGWVRMREAVRFEGPLKRATISREADRWFVSVTVDAPDGVAPRPPQEVVGVDLGVLTLATPSRGEPITGPKAHTALLKNLRRTSRRLSRKQRGSQNRAKAKKSLRRLHVRIANLRKDAMHKATTKLAKTFQRIGIEDLNVGGMARNRYLARAIMDGGFFEFRRQLDYKARRYGAVVVVADRWFASSKTCSCCGSLKAELDLSQRRFRCFECGFEADRDWNAAKNLEKLAASSAVSTCGEERSDAVRKPRVKRASKKQEPNGIGDELCAA

SEQ ID NO: 15730 - protein, 368 aa, Nocardia sp.
MRTAYKVRAYPDAEQAAILRRTFGCVRLVWNKTLADRQRRYTTERKPTSYRETDAALSEWKKTEELVFLSEVSSVPLQQALRHQHAAFAAFFKGNARYPRFKNRHGRQSAHFTRSAFRIKDGALWLAKTITPLRVAWSWPGTDLGALDPTMVIVSRESNGRWFVTFAIDMDDPAPLPSVGESVGVDLGIKDFAVLSTGEKIANPRHMARHERGLRRQQRRLARMQKGSANRAKQRQKVARKYRRVRDARRDFLHKTSTELVRRFDTIAMEGLATRNMVRNRRLAKSISEAAWGEFRSMLEYKTERAGRRLTVISRWYPSTKTCSVCGHLLATLSLGTRHWTCPDCSTRHDRDINAAKNILVAAGLAET

SEQ ID NO: 15731 - protein, 367 aa, unknown
  TnpB Polypeptide
MLKAYKYRIYPNNEQKVQIAKTFGCCRFVYNQTLAYRKNAYEKEKKSVSRTDCNNYCNRELKKEYEWLKEADKFALTNAIYNMDAAFQKFFREHAGYPKFKSKHDNHKSYTANFTNGNIAADFEDGKIKLPKLKQVKAKFHREFDGQIKSAAISQVPSGKYYVSILVETEHGELPQTGKNIGLDLGIKDLCITSGGKKYENPKTIKKYEKKLAKLQRQLAHKEKRSRNYYKQKRKIARCHEKITNTRKDYLHKVSHKIISENQVIVSENLQIKNMVKNHQLAKTISDVSWYELTRQLGYKAEWNGRQYIKIDTFYAGSQICSACGYQNTDIKDLSVREWICPKCRAEHDRDINAAKNILAEGLRQIA

SEQ ID NO: 15732 - protein, 455 aa, unknown
  TnpB Polypeptide
MQQIINAKLKLITTPEQFAQLRQTQLAYRDALNAVSRYAFEHGKTSSADKLQKGMYNEIRIRYKLPSQMACNVPRQVGATYKGLWTKLKQNLEHCRMKRTKKRFKGLDQAPKYVSPTLTYNYGRDYGFKAGQQVSVLTLQGRILLDYKGYDPHVVLIQHGATIGAAKLWYDKPHKQFYLLVSLEVEVADPTPTVQQHVVGVDVGQRYLATVATLDNQSTFFSGKVVRAKADHYARIRKRLQHKGTRSAKRRMLALSGRERRFTLNTNHVIAKTIVNAHPNTLLGLEDLSGIRDRTKRPKRRRKGKEILPLTVKQRRANHHASKWAFAELHTFIAYKAALSKTSFAVKVDADYTSKACPMCGHTDKHNRPNNGLMFECQNKECGYRVRTGRVYRLHADLVGARNIAMRTFLIRQDWVRTGQLSVVPDVSDSEAKAARLKRYAEVRWSPDTSFLREQ

SEQ ID NO: 15733 - protein, 406 aa, Cyanobacteria sp.
MLVLEFKTYGKSRQFNAVDEALRTVQFIRNKALRFFLDGLGKTQYDLNKYCAVLAKEFPFVNELNSMARQASAERAWSAIANARCSTWGNPKTAQARFYDNCKKQIPLKKGFPQFQKDNRSVEYKSTGWKLALDRKSITFTDKKGIGTLKLKGTRDLHFYQPEQIKRVRLVKRADGYYVQFCVSVNRAESIEVTGSAIGLDVGLNDFYTDSNGETIENPRFLAQGERRLKMAQRRVSKRVKGSNNRRKARQILGKRHLKISRQRKDHAVKLARCVIASNDVVAYEDLRIKNMVRNHCLAKSINDASWYQFRVWLEYFGKVFGKIAIAVTPNGTSQECSSCGATVKKGLSTRTHICQCGCVLDRDHNAARNILSRGLSTTGHVGTFGLDPSKAWGEDTSTHAGACPA

SEQ ID NO: 15734 - protein, 302 aa, unknown
  TnpB Polypeptide
MKNQPCWKDLNAQSSQNVIEELSDAFQSWFDLRQRFSEENPPDYRKHGDTRPRSTVTFKEDGFKHDPENNRVRLSKGSNLKEHFSDFLLCEYQTRPDVDLSEVNAIQNVRAVWNGDEWELHFVCKVELETADSPGNGVAGIDLGITNIATIAFPDEYVLYPGNSLKEDKHYFTRAEYDTEGENGPSEQSMWARRKLSDRETHYYHTLTDAIITECVERGVGTLAVSWPEDVRESDWGKTGNKKLHSWAFDRLYQYLEYKGEMRGVEVLKENEWNTSKTCSRCGDDTKSNRVERGLYVCSSCE

SEQ ID NO: 15735 - protein, 391 aa, unknown
  TnpB Polypeptide
MEKAYRYRIYPSKEQEDFIIRISGCCRFVYNYYLNKQILEYQENGVILAYRECSADMKRLKEIYIWLKEADSISLQASLKNLDRAFQKFFKEHAGFPKFKSRKNRRQSYITKMTNGNIQIKAGKIRLPKLGWIKAHTSRMPEGRILNATVTKEASGTYVVSICCTEVETPKLKATGVSAGIDLGLHTFAALCEAKTLISESGGKNLGNFAFNLSKKGSAKIENHHFFSKNEKRLARLQRKLSRKSKGSRNWEKARIKVARQQVKTANQRRDFEQKLSTEIIRRYDVICIEDLAVKNMGKNRRLSKAIADASWSEFVRELEYKAVWYGRKVISVGRTYASSQICGSCGYQNKELKDLMIRRWECPECGSVHDRDLNAAGNILREGLRILWAA

SEQ ID NO: 15736 - protein, 419 aa, Cyanobacteria sp.
MLTLVQEGSYMRTAYQYKLRPTKHQAAELDRWLSMLCSQYNYLLADRFNWYEQNRTQVNSCPLICHLPELRDNPDYYSQKKTLPQLKKTHPWYAEIYSQVLQDVVKRVKVTFDRFLKGDSNGKRSGKPRFKGRNRYRTFTYPQMKEGCLQGNLISLPMFGKVKVVLHRLIPDGFKVKTASVTKKADGYYLTLSLEDKTVPEIKPDFNPDKIAGIDVGLKEFLTTSEGETMAIPQHYRQAQKRLRVIQKRVSRRKKGSSRRQKAVKQLGKQHQKVTDKRKDFHFKTANWLLSKYDVIAHEDLNVKGLARTRLAKSVLDAGWSSFLSILTNKAENAGLLVVPVSAHNTSQDCSNCGEKVPKKLHIRWHDCPHCGCSKDRDQNAAINIRNRAEGHPVLKAQHLLSDSRIGCEAYTIPVLRLV

SEQ ID NO: 15737 - protein, 408 aa, Shewanella sp.
MKKTLRYNFRIKPTPEQEAKLIEFGSYARGLWNLLLSENLRRYRYDKTFFFYPEMAKLIKELKVFEEFSWLKSFDSAAAQQVARDLDMALKNSFSKSRLQKFPTFKVSFKQKKLHNDSFRCVNNSNCIRIENGAVSIPKIGKVPIVLHRKLVSEIKTVTVQLSHGKWNVSLTQEVDCKTAKRVLHSIVGYDINSQHTVVGSNGWYVKNPKAFKCSSTKLKQIQVQLSRREKGSNRWHKTKSRLNTLHGKISRQRLAFAHEVSCSIAKASDIIVFEDLNVKGMQQFNGHMVNDNVMGMITSQTQYKVELNGGIYHEIGRYVKSSGICYECKHPHKFGLSVREFACESCGLVQCRDLAAAKSIENTGENDLMATGRVTRVIPKSQKKSSTKTKVFELSKFGVGTEKKEAA

SEQ ID NO: 15738 - protein, 327 aa, Shewanella sp.
VARDLDMALKNSFSKSRLQKFPTFKVSFKQKKLHNDSFRCVNNSNCIRIENGAVSIPKIGKVPIVLHRKLVSEIKTVTVQLSHGKWNVSLTQEVECKTAKRILSSIVGYDINSQHTVVGSNGWYVKNPKALKRSSTKLKQIQVQLSRRKKGSRRWYKTKSRLNTLHGKISRQRLAFAHEVSCSIAKTSDIIVFEDLNVKGMQQFNGHMVNDNVMGMITSLTQYKVELNGGIYHEIGRYVKSSGICYECKHTHKFGLRVREFACKSCGLVQCRDLAAAKSIENTGENDLMAAGIVARVIPKSQKKSSTKTKVFELSKFGVGTDKKEAA

SEQ ID NO: 15739 - protein, 383 aa, Shewanella sp.
MKKTLRYNYRLKPTLEQEAKLVEFGSYARGVWNLLLSENMRRYQYDKTFLFYNEMAALIKDLKQFEEFAWLKAFDSAASQQVARDLDAALKNSFNKKRLQKFPTFKVSFKQKKRHDDSFRCVNNANCIRIEKGAMSLPKIGKVPLVLHRKLASAIKTATIQMRHGKWYVSLTQEVKCKSAKKILSTLIGYDINSQLTVVGSNGWYVKNPKAFKKASGKLKQIQVQLSRRKKGSNRWHKTKSRLNTLHGKISRQRLAFAHEISCTIAKSSDIIVFEDLNVKGMQQFNGAMVNDNVMGMLTELVKYKAEVNGAVYHEIGRYVKSSGICSCCTHEHKLGLGIREFECEKCGLVQCRDLAAAKSVANTGEKELIANGILVRALPKSQ

SEQ ID NO: 15740 - protein, 459 aa, Shewanella sp.
MLTGIKLRANPTSNQKLILSQWMGCARLIWNAKVDEERYFRTFARKYHSIGTYAPIDQKASQFKSKELTPWLSACPSQIIRNSAVNWYQTYQKFMKGACGRPKRKPKTDRGSIYLTCEVFRFDRCEDGNIRLFIGTKTNNIGYLSFKAHSKFKIPNSLYVRKERGQYTVSFCYENGKSEVELSSNAEHLAFLQCSTKEYLEEHTIGVDRGVAIPVHAGLMTFDFSDNQKNHMTKAERYIKRLQRRLAKQTKGSNHRNKTKHRIATHHAKKANIRNDFAHKTSRSLVDSNAKIIVFEALRISNMTKKPKAKQNESGQFISNKAKQKAGLNKAILNVGWHVIETYTKYKANQAGKVVCKVSPAYTSQECAKCDYTHPDNRKSQEPFVCGKCGNTDNADHNASLVIKKRAINLILDTGTVLSDEGVLRLKSDSGRGGNRKSSRAKSSTRSTLRSVKKEKLAA

SEQ ID NO: 15741 - protein, 475 aa, Shewanella sp.
VVVFAIEFNQFSPKIRAYSCKDGFKLIEYFLGEYFAPILSHKDQVNVHIEYTMSTVSNIVVCLHRPNYTLAMERLQAFKFELQPNGEQVRNMRRFAGTCRFVYNKALALQKDNHETGNKFIGYVPMAADLPKWKREAGFDWIKNSPSQALQHALKDLEKAFKGFFEKRTDFPRFKKKGSGDSFRYPEPKQIKLDQANDRIFLPKLGWLKYRKSRDVLGEVRNATVSQSGGKWFVSIQTRRDVEIVPVATSAIGIDVGIARFAAMNDGSYIEPKNSFKTQMQRLAKYQRRMSKKVKFSANWKKAKAKVTQIHVDIGNVRKDFLHKHTHTLSKNHALVCVEDLQIKNMSKSSKGTAEKHGKKVAQKSGLNRAILDQGWGEFRRQLEYKTAWNGGVLLAVPAQYTSQTCPCCGHVSKDNRKTQAQFLCVDCNYENNADVVGAINILERGQRLLACGETAALGRSVKQEPIEATKLKTA

SEQ ID NO: 15742 - protein, 562 aa, Clostridia sp.
MPKKQEKDKFSFTVCGEFFPEVYPAHRSSKWSRGEEDPLATEMRLFCACVRWAFNRLLEGASRDEIKKLGQELFGLNSRYADDARLKAQALLDSQKELLELEIEETEKKLGRARQKLGLAMRKLVEAEKKDVTPDIAEKLKLAVKGRNSRVTSLEKKLAELEAHQENGTIPKVVFGGGKLWKKVCKGRATREEWRAARKNRLYSRGDETKGGNPNIKGFFDGQAFRLEVSISHLSEQTGTDKLGRPKMSRAPRVEGRLWLPEKHRGLVRIWLAMKLPYTVELVRTLEGRYLVHLTFDLGKIREPDFAKGCLALDANPDGVALCNVNASGQPEPWPEGFSVSYPSNLGKYEGEFQVITYPNGFLYIRVPDLAYTSGFRRDYLIGVLAKVVVDIAFFLGKPIALEDLDFGKDRLDTNKKFNRMASNFPFAKMVEAVCWRVAKEWVPFKLVPSRHTSTIGHWKYVRRYAVPVHCAAALSIGRRAMGFKERMTKELKRLIMQIKQNLTREVDPDTPREGEGMTRGVRACLRRLDRKLPVYSGLARWQQEAYYSVWHDLRLLALSLR

SEQ ID NO: 15743 - protein, 418 aa, Thermoanaerobacterium sp.
MECIKTVKFKIKVSDKSFNDTISIYNKALSYIIKVINDEWNNISTLPTVKSQLNFIEKLIHNTKKNKAKYDFDNRFYKFPSYLRRAATAEALGAVKSYHSNLENYIKKKAQYEAKGKILKDKLPVLGTKRYSYPVFYKDNMFERTGNNTAKIKVYKNNDWVWHDIEFNTKNLKHRDMTNFKEMNPMLVKSGRKYYLHFTCKKTAKLNNTPLEDRTVISVDLGLTNSAVCSAMKYDGTVIGRLFINQPIEKDCLFHKINKLAKAQRISGIGRKPNIWRKINNIKNQIINDTVHQIIKFAVDYKADVIVFEYLGKLKSKGNYARRMRIKLQYWAKQKIQEKVYDMAHSYGIRVSWINPKNSSSLAFDGTGKVIRNNKKDICEFTTGKKYHADLNASYNIGARYFIREILNPLSEKERLQY

SEQ ID NO: 15744 - protein, 770 aa, Acrocarpospora sp.
MTVTGVTHEVTGSPDNGLPGGLSSSSLSSGRRFRGKNKQPAWKRDKDGPVSVIRLPLSVTRPADRRRLEQLFSAMWQIKRALRRDAANMVVAYWHGDRRRVADEPAWRRELGLSRTGLEQRGYAHLDAAGHLKAHVTKALVMHQADEVWTGVERHLFRDAAGRRAGAPRRRLPWWDYTRIPGRARSHTSPRKWETFRLHGTLEGHLAAYRAPGTPADTTIDRVADVMGDGESVLAQPLRMPVPPASSPTGRTAGSWWDHVGPLVVVFSGGAASRKGDLVLPVRLPQGAGRWPYLAHYLNDPARWHKIDLVRVADPGAPGGWRYEAHLLVLGAGYAAPATRARRARAAGLDRIGGVDANVSNLSVVSFPATGTAAGNATASNAAASSGFVAGGPHQGDSIGDGPSADGGALIGVDDIGETIPGAPAAAGSGNAPVTATRLTLTPAQQNELARDRKKAAGRRKALDRSRRAANPAQYRPSARQQARAARRARAGLPVKQIHLPGGERLTQARGKRPARPYRQDRLSASYRRLRARDKAAGARRTVARRARARQAAATIISLHGTNLVVEDCHIATWHRRWGRTCMAFTPGQLVTALAAECTAAGGALLRAATRPTALSQHCLCGAKVTKTLAVRVHVCSACGLNGDRDLVSAALAALVVFSDPADPGTAQVDYDRAAALLTHDFKGLQEALSESTVVSPVPAPTGQRTGGTAARPGARRRWRRARGRASARRSAGTCGMSTPNELRPAFAVQGPRRSGMPVTPDCPDLRGRS

SEQ ID NO: 15745 - protein, 373 aa, unknown
  TnpB Polypeptide
MKLGKTEQLDSLSLAAGELYTKTLVGFWRVVRKKNIWLKPSSLTRLYNSDKLHAHSADAVVQSFCNSLKSWKERRKQDKNAKPPYKKRKYYKIQWKSSAIKIKDNKLILSNGKGNKPLIINWEYNLPKLVEIGWDGKQYELRAIYQEEQNNKPLDNKVAGVDLGEIHLAVAYDGNTSYIINGRLLRSKRQYQNKLQAKLSSMLDKKKKGSKRWKKILKSKQKQLIKIQNQINDILHKQTTKLVSTLYKSGVQTVVIGDVRNIRQNIDYGTTTNQRLHQWVFGKVKQMIKYKAERLGMKVVLQDEKYTSQTCPMCNNKHKPNNRNYKCKCGFEYHRDAVGAINIRKKYLGENQVVGVMASPIGIRYEPNMQCSL

SEQ ID NO: 15746 - protein, 377 aa, unknown
  TnpB Polypeptide
MMTYKFRLYPTEGQERKLLETLEICRWTYNYFLSKIRESNKVPSRLELQAELPKLKRERPELNKVYSKVLQMVLYQLYSNLKALAKLKKNGKKVGKLRYKGKWFKTFVYNQSGFKIIRTGKRLDRLHLSKIGEIPIRIHRKIEGKVKQVIIKRYNSGKWFALICVEKIEKQKPKTGKTIGIDVGIKFFLTDSEGRQIENPKFYEKTLKRIRIEQRRLSKKKRGSKNWEKQRIKLAKKYEKLVNQRDDFLHKLSRFYVENYDVICVEALNIRSMVRNHNLAQKILDASWGKFLHYLAYKAENAGKQVVKVNPRGTSKGLSYKNKLRDYISACRILMRGWDSPDSLLERRPLPRTISWKEVVSGQVFSMNQEAPCVSGE

SEQ ID NO: 15747 - protein, 362 aa, unknown
  TnpB Polypeptide
MKLSMKLKLITNETQKQALLDTMQRFNSACDYISDVAFENKVFGQINLHHLTYYKIREQFGLASQMAIRAIGKVVESYKVERKVKHTFYPFGAIVYDSRILKFKFPDKISISTLEGRQVIPFIFKNYRDIELRRASGQSDLVYHDGIFYLVVCVDLPEPPKDDTKEFLGVDMGIINISSDSQGTQYAGNKLNSIRNRYYKLRKKLQKKRTKSAKRLLAKRKRKEKRFAKDVNHVISKKIVDKAKALGLGIALENLQGIRDRVTVSKSYRLRHSNWSFYDLRTKIEYKAQLAGVKVVLVDPRNTSRMCSVCGYISKKNRPNQSTFLCKSCGFACNADLNAATNIGCRATVNAPNVVCDETKAA

SEQ ID NO: 15748 - protein, 542 aa, unknown
  TnpB Polypeptide
VETAGGAFRASRPSPSASWGATALPREAPAFRPEVNCVVGLALLLDVGAEHVQGCTVDRPGEVGPRPQPPCPPVVPGQVGELLPQPSGGGALQGVDHPPQRDGGGGNEQQVGVQRENAVTASVDILFLSYAPSILQAVRLRYRYRLDPTPAQRQSLARAFGCARVVYNDGLQLREAAYRARQPFIGDTELSRRVVTLAKQTPQRAWLGEVSAVVLQQSLADLGRAYRNYFADLKRVKAARAHSEQAKLKVRKPRFKSHHHQQAVRFTANSRFRVTPAGRLSLPKVGEVRVRWSRPLPAEPSSVTVTLDGAGRFHASFVVEVAEAPLPTADTAVGVDLGLSSFAALSTGEKVDNPRWLRQREKALRRSQRNMARKRKGSKNREKARRRVARLHVRVADARRDFHHQLSTRLVREYRMVCVETLNVAGLGRSKLAKSVHDAGWGQFTAMLEYKAGLYGRTLIKVDHWYPSSQVCSGCGRRGGHKPLTVRVWTCPGCGTTHDRDLNAAKNVLAEGLSVAACGPDVRPGSRRAVGDEAGTTLAGAR

SEQ ID NO: 15749 - protein, 434 aa, unknown
  TnpB Polypeptide
VAEAVRTVVVRSEQLPRRAFKVFVELEGMYRNLVEQLVLYAVNNGITKFTRLKAERYHEVRSLYPQLPSHYVYTACQDAAERAHSFLRLRRMGRARKPYPEVRGVSIWLDDHLWRAEGLTSISMTTHRGRVRVSVELNKHFLRYVNRGWRLASEAKVKLDRRDRRLVFYLTFKKEVSEYRPKGYITVDVNEDAEAVLIDGLVYLLETDLSRVTLGYYYRRKRVQERYDRVYGLGSRPERKIFKRLSNNEGALKKEIRWKLAALIAREAARRQAAIVLERLGKEPANHMIEHIKDPQLRHRVFQAAFKGMQRAIEEKAREYGVPVIYIDPRNTSRTCPIHGAEIIYGRDRHGTCSKGGETWHRDVVACYNLLLRALSGDGGHAPSRMRALVTVDGGPVPLGPTAAHEPAGVPRALWARWRSLGATSDHKLVRVST

SEQ ID NO: 15750 - protein, 464 aa, unknown
  TnpB Polypeptide
VRGLELRALEQEIVPLNAWARLLLEQGGDPRTSGGRWAQALKARVQRTDTLRLLTTPELDDFLRRVGDATARLINMENYRRRRLFFEGRGIDCSWMSAWSRRFAEYFDIYKLLGSKNFAEACRLIGEQWKSFLGLLKAAKEGRLEPWQKVRPPGYRKDRDGQRVPIVIVRADNYRIDLEKRVLHLGYWNVSIPFRGKPRWLTKPGAKRGRLIIVYDPVKKRWYARVSVEVTLESRLNGGLRAGIDLGRERLIALVTEPVNESGEGVALLYRGGPLKSDYFYFERKIAEIDRMLSDPKLEEVDRAVLKEVRRRLYEKRRKRRDQVFANAAAHLVKMCEELGVAVLLLGYPRGIAQDKPGKGNTSMWSYRRFKQRLAVTAENHGIPAFEIPEDNTSKTCARHGCEVERGPRGLVRCPHGHTMHADVNAAMNILARGGGKVPMRVRVLSFIPTASKVIAANEKKKKP

SEQ ID NO: 15751 - protein, 447 aa, Caldilineaceae sp.
MDPLKQTDPVQRSPCPTPPADGARGLVKAHRIALCPNDRQASLLAEHAGWARVASNWSIDRFAEAWFTGEGEDNEWLSDMDLRKQFNAVKRDLFPWSKPLSQNVAKNAIIHTGKGLDAWGAYRKALKKGKRPRRVGFPRYRKRGKHMAFTPTNGRNTIRVDGNRVRIPAIGWVRMREPLRFAGDDILSATVSLEADRWHIAFQVDTGEPEPSKRPGPTVGIDMGIQTLATLWDGDKRTILNPRPLQEALAELRRIDKAISRSIKIHGKHRTSHRREALYARRRRQYARVSHLRNDHHHQTTTAIAKRGGTVKVETLHIAGMQRNRRLGRGFSDAGLGEFVRQLEYKCAWYGTAFEKVDRWYPSSKTCSACGAVKQSLLLSERTYRCLQCGFECDRDENAARNLQAFDPAARSAVADVETRKSGPTVGLQGRRSVNRTGSPLPLHAGS

SEQ ID NO: 15752 - protein, 130 aa, unknown
  TnpB Polypeptide
VYEKVTNQRNDFLQKQSTMLVRENQTICIEDLNVKGMIRNHKLSKSIASVSWAKFFEMLEYKAGWYGNEIHRVPTMYPSSQTCSCCGYRNPRIKNLGIRIWECPKCHAVHDRDTNASINILKKGLQMQSA

SEQ ID NO: 15753 - protein, 322 aa, unknown
  TnpB Polypeptide
MFILFDLPDWCKSTPYQIKKIAVKDACDALTTNKFKVKQAGGKFKLHFKSRKDHHQSCFIPKSAISDKGIYYTLSGNLHFSEQLPENIKDSRLVKHNGRYYLTVPYKITTIRSENQGRIAAIDPGVRSFISFFSTTGMFGHIGKHDIGRIQRLCEYLDKLTGKMSKAKSNQRQRLKKASQRLRWKIKDLVDELHWKTAKFLVNNFDVILLPRFETAKMSKRATRKIYKTSVRQMLTWSHYRFAERLKYKAAEYGKTVLRVSEAFTSKTNSWTGEIIENLGAKKFITVSKNRIDRDINGARNILLRALGDAPIILKKGEWCIC

SEQ ID NO: 15754 - protein, 356 aa, unknown
  TnpB Polypeptide
MVNQIETTMCLTFKCVIPHNLTSRLEKLYNASLAVTKRMLEDRTKTSSKFFKEIPCVLAKSLISKYQRNKKLKSIKNLVLPVCGDKGKQVKIEANGIRVPAFFKKQIIPCVFPKPIVGFIRQVEFFKRNKVWYMSYSYNVAKDTDIITNSCIGVDRNSVGNTATIANLETGKVKKLGVSTADTSREFRNRRAKLQRQNKKRALCQLSKKQARRTKDNNHKVSRSIVNYAKLHCKAIALEKLGKIAKNGKAKRYVQKSQWPFYQLETFIRYKASLLGIPVLEINPKNTSKMCSKCGQINNPNGKFFVCKKCGHVDHRDTNAAFNIAQLGNLALEQRGSSVGLNGNPLNLEVEANAVR

SEQ ID NO: 15755 - protein, 312 aa, unknown
  TnpB Polypeptide
LENLADYAAAKAEALASGKPLDMERKEPEWHEWNLPELRVPCIQANANVVVVEKSEDTTFDYWLRISTLDKGNPLRVPVKLASYHKQALEGRTLNGSTTLHKRNGVWWLTLSFDEDVPLQTATSAPCVGVDVGIANFITTSTGKQYGTFHGKLARRQKRDREKRRRKAKLRACLKKKGVENLPSTSSATGQRLSRYVRQEINRAVNLLLEEHPDARIIYEDLSVASMRFKARSMNAYFYASNLAHIPEQLAWATAKRGRAAHTVKAAYSSQECSRCHFVDRTNRPNQQTFCCGVCGYRDHADHNASVNLARR

SEQ ID NO: 15756 - protein, 437 aa, unknown
  TnpB Polypeptide
MKVTSSYAIEIKHIDKLFRDTVCLYRKALSFLIDAYEKEWEYLSVLSNKLQKQTAAENLIHNTKSNKAKYGFDEEFYKFPSYLRRDVRNAALGILYSYHSNLNNWESSGKKGNKPVLQKNNYAMPVFFRGNMYQTAESDTSCKLKIFKDNDWIWVTVNLKKTDVDYLKKYWLHLQPSAPKLEKKHKKWFLRFSYEEDVELSKEPVEGQIVCTVDLGINTDAVCSIMTADGTVAARKFINFAAEKDHLYLALNKIREFQRLHGSQSTKSYWAYATRLNDELSKKIAREIVSFADDHYADVIVFEHLDMKKKNSGPKKQKLHMWRKNGIQKLVAHRAHRLGIRIAHINARNTSKLAFDGSGEVIRDEKNYRLCKFQTGKQYNCDLSASYNIGSRYFIRELLKSVSEKKLSLLWAEVPESEHRTTCTLSTLWKVYDFLHV

SEQ ID NO: 15757 - protein, 385 aa, unknown
  TnpB Polypeptide
MEKSNSIDRGSNSIKDGFAYKYRIYPNKVQRQILAQTFGCVRYIYNYYLDMRIKTYEEDKTTLGYTKCSADLTKLKKQPGYEWLNAVDSTALQSSLKNLDTAFKNFFEQPKSGFPKFKSKKTHQYTYTTKYTNGNIALFDKYIKLPKLGAVKTKVSRPATGRILSATVSQSPSGKYFVSVCCTEAEVMSIPKTSKSVGCDLGIKDFLIFSDETESIKNPKYLQQDLKKLARLQRSLSRKTIGSSRYHKARIKVARQQEKISNKRKDFLHKLSTQMIRDYDIICIEDLNVSGMMKNHKLSRNIADVSWSEFVRQLTYKAEWYGKQIVKVGRFFSSSQICSSCGYKNPKLKDLSIRNWTCPECGTRHNRDKNSAINILAEGSRLVTI

SEQ ID NO: 15758 - protein, 336 aa, unknown
  TnpB Polypeptide
MNLYIKAVNDTVQEAFTGTSIKKYSSKDIKAELPSAVRAQVAQDARSVLTKYRKDCHKAVLHNRKHPETIHKRNAPVLKRPVCYWNNQNFKIQGNILRFPLIESGKSTVQHVEMIHTKRQDELFKNKLGTLRIVEKQNKLYAQITYEADIPETETGSSMGVDLGLKVPAVAVTDTGKTRFFGNGRKNKYLKRFYRYQRKKLQSEKKMSVVKRIEHKETRVFRDIDHKVSRKIVDFAVENNVKVIKLERLTNIRSTARTSRKNERNLHTWSFYRLACYIVYKARLLGIQVLYVNPKNTSKRCPSCGKLNKASDRKYKCSCGFHKHRDIVGAYNICCA

SEQ ID NO: 15759 - protein, 528 aa, Thermus sp.
VKAKPKATRKRTSQKRAKAFTGAHALLVFPSGEDHKATLDLMRRFSAAVRYAYNRLLEGWSREALKRENGPLRIFFGLNTRYADDAVMKAQALLDSAQERGEDPRKVVFGGRRLFETLKRGHLSGKPLKELKREWKEKRQGLLYSRGDKTKGGNLNLRLFVKDGALWLRINLGDGGYAHALIQTKHPNLSTLLQRAYASLPYNVELSLKDGKVYATFTWEEEPAPLVATKENGVLALDVNSDPYHLALALVSPDGNLRRHLTLSLEEVDRAPNKGAKELVLWKIAHEVVSLALEHGVAVATERLRYLRKSRRGDGSGRAFRRKQHRFAYASLLRKVHSLAGKRGVQVVEVNPQDTSTIGMLKYAPQLSLSKDVAAAYVIGRRALGFAEKLPRGYGRLLRDKTFLAQAQEFYQARVRELHAQKKAEHDRSRRNRLSRELKRAHGALSLLSSLQGSSGSQREVTDGRNSPGVNPWRVLRVGTFLPLLGREVPRDLSPLKPILFGGSWEGWRGGLGPHPGGGPECANVRST

SEQ ID NO: 15760 - protein, 345 aa, Geobacillus sp.
MAQQILKKVNEAFKSFFGLISLAKQGKYDHKAISIPKYLKKDGFHSLIIGQIRIDGNKFTIPYSRLFKKTHKPITITIPPVLLDKKIKQIEIIPKHHARFFEIQYKYEMPEDQRELNDQKALAIDLGLNNFATCVTSDGRSFIIDGRRLKSINQWFNKENARLQSIKDKQKIKGTTRKQALLAMNRNNKVNDYINKTCRYIINYCIENQIGKLVIGYAETWQRNMNLGKKTNQNFVNIPLGNIKEKLEYLCEFYGIEFLKQEESYTSQASFFDGDEIPEYNADNPKEYKFSGKRIKRGLYRTKSGKLINADVNGALNILKKSKAVDLSVLCSSGEVDTPQRIRIA

SEQ ID NO: 15761 - protein, 368 aa, Geobacillus sp.
VPYCQEHVQRRIVHVRQYYFEHKEFLNYEKNDHLAKTNENYKLLNSNMAQQILKKVNEAFTSFFGLISLAKQGKYDHKSISIPKYLKKDGFHSLIIGQIRIDGNKFTIPYSRLFKKTHKPITITIPPVLLDKKIKQIEIIPKHHARFFEIQYKYEMPEDQRELNDQKALAIDLGLNNLATCVTSDGRSFIIDGRRLKSINQWFNKENARLQSIKDKQKIKGTTRKQALLAMNRNNKVNDYINKTCRYIINYCIENQIGKLVIGYAETWQRNMNLGKKTNQNFVNIPLGNIKEKLEYLCKFYGIEFLKQEESYTSQASFFDGDEIPEYNADNPKEYKFSGKRIKRGLYRTHISHPNKVKTKDFLFSFSE

SEQ ID NO: 15762 - protein, 437 aa, Natronolimnobius sp.
MLEVHRTYRAKIRNHSQVAESLDRHGWSASKLWNVANYHSREVWEETGEIPDHEELKDELKTHPKYKGLHSQSSQRVLEELAEAFNSWYSSDDDRDNPPGYRKENYYDDEGRRVHEEHPRSTVTWKQHGIRHDTKNNRVRLSKGANHKEHPKAWEYILVEYKTRPGVEVENLQQVRSVYDQAKERWELHLVCKDEIETPDAPGPETAGIDLGISNFAAVAYSTEDADLYPGNRLKQDGYYFPKEIANCDNSGGDRATRLHHKWSERRTHFFHSLAKHIVQRCVEKDVGRINVGDLEGVREDEDGASKNWGKHGNLDLHGWAFDRFTSILEYKAKVEGIEVVEVSERDTSKTCCVCGKEDESQRVERGLYVCEDCDAAFNADVNGAENIRLDLNQSNSESSANLGEDRSTGWLAQPGVYLHDLSHGFSPREQVVDCKP

SEQ ID NO: 15763 - protein, 407 aa, Natronolimnobius sp.
VATDYLRRTAITRLSLGDDQQTLLDRTIAEWKQACNTASRIGRATGETQTAALQQLAYDDIREQTSLGSQHTILAVRQAAAALDGIEALDSTDAEYTTSRPSFTSDTITYDPRSMTLFDDDTVSLATVDERIRCELVLPDDDGGHQYRYLDAASWEVTESTLSKRDGEYYLHIGFRKPTPASETETEADTADRTVLGVDLGIVNIATTSTAYFASGRELRHRHREFERVRNSLYQRGTQSAYRTIRRMSGRESRYVRDVMHQVANDILEEATVHGCTHIVFEDLKHIRENAPPGKQFHQWAHRQLVELVEYKARAIGIDVEFVSPANTSRRCPDCGYTSDRNRTSQSQFECKRCGTTANADYVGAKNVGMRFVRHGRQSSGRTGDGQLALKSGTVTPNGTVRPYATG

SEQ ID NO: 15764 - protein, 1031 aa, Synechococcus sp.
LHGERRSRDQTSAIRETGSGSPQPWGGKRGIRIFRHILSCGNSATGSCLAPPVRHGNSSAWLEQVDSSGITSWPSTNPGQAPRGLPTPSGESRAAGQAVRQLLLPGQGLRRHNGNPYPEGRPVKAAVVHGCGKWYAAVCYKVELPPRVEPERVAAMDRNCGQVAAVYSDGTSEIHRQPDTTLLQIKLKRGQRKPGRQQKGSNRRQRTRTRLRKLHRRIRNMANTWRHRLTRHVADKARLLVLEKLNTQAMTRSAQGTVASPGRNVQQKAGLNRSILATGWGEIDRCSATKPGLCTSTAPTPPGGAQAVDRWTRHKTESVHFPLHKLRLPGQCRPERSAEHPGLQGWGCCTGRGVLALRPLRSVNRLRFPSALGMEKLPHLMGHPRANPLHLGNLLRRGQLNGVQGVKMAQQRAAPFGSQTRHLAEARALHAIPTLLPVVGDGKAMGLIPQATQQQDAQLVRFTVQGLPGAGQKHLLPPFGQGANMEILRQSKLVQGSHHGGELAFAPVNHHQIRPVTEADGIQWVRTMAAVLAHVLSRGFRPGPAPEAPPHHLRHGHEIIAVAGGNAAGLQLVATVVLACRQTLDKHHLTGHSVTTLNVTDVIALNAARGMIQVQKLGQILKGQLLLLGTALGPLQGKAGVALHQLHQLGFLLPLWREDAHLALPLPAQPFRQRIRLWQGMLHTDFLGNLAGFNRTVVFLQHPLQQITRRRRLGVKVKAKASHQLAGPHLKQLHTGQLIVGGHGNGIPAETVVRQGHLLMDGQLIQTLQLIPNPRRLLEIQAFGITNHLLLQACPQLFVAPLKHHGHVLDGGAIVLGADALLAHARAAADVEIQTGSIPVQGLGALTQGEGPLHQGQGGAQKTHVHVGTVEAILGRAPSPSPRNKNAGIVFAPGDTKIGVAGVVLEEYVVIGLMLFNEIGFQHKRLDFAIRHDEVNVMDLPHHELNSGAEQFMATEIASQTGPQLFGFADIEDTGIPVPHQIAPWLQGNLPQPGLPFLRILQQAARHGAGRVTDTGVCGFSPHRSSGCGPG

SEQ ID NO: 15765 - protein, 463 aa, Bifidobacterium sp.
MSQKVRIDGVKHVGASVFLGVDHCGNPRWTRNLERIMVWLCDGWRTRFNQRREQRPRNVPVKDEAGGIVDWRKEPLGGFDVADLLSDKEARLRYSWMAGIPAPILSSTDRIEDTEWSAGLKRRKTVGGRVPGFKSRHRGLGFVCWRNASKTGNALFHQTGRKSGVVVIAGMNPTRWRKPGEKLHWRVIIHVRVSRPIRPYTSVHVDWTHKSLTFTNMPLPLPRIGDGVIGLDRGCVHTLASSDGTFMDMPKPSKAELKRLKYLQRQMARQDRVNEARGGRTAKLASKRRRKTLNQFNALQGRIVRRRNDWIEKTTTRLAQESVLIAMEDLDVKAMTRRPKPRPDPANPGHYLPNGAKAKAGLNRSILSNNWSRLMKRLDDKMDANGGNLVIVPAAYTSQTCHQCGHIAKENRDSQAAFKCVECGYEANADVNAAMNILDRALTKTGGGTALDVEGRVGGPMKR

SEQ ID NO: 15766 - protein, 258 aa, Methylotenera sp.
VFPALTDKLNSIPLPDPIKAPVGNRIAVPYLKDVRFHKQALPEGKIKCGRIVKRASGWYLCLFIDAEPNVILQLASNSIGIDSGFKHLLSLSNGEKVDHPRELEQSAKRLAQAQRGINRKLVARINERIANQRKDRNHKISRKLVSENSLIAFSADNHKGIASKFGTSVASSGHAQLRQMLAYKSIASGRLYVEVDNRNSTRTCSACGALTGPRGWAGLSVRHWTCGCGASHDRDTNAAINTLMLGMERASNLEKRYA

SEQ ID NO: 15767 - protein, 413 aa, Natrialba sp.
MEYSHRYYVYPTQEVAVRLEHHIDVHRQLYNHIRWDYENSPEDDKPSEYDQNNKLPEWKQRWPVFSELHSKAAQATVARFHRNLSNLCKKKEKGHKVGRLKRQAPTEYRSVTYNQSGFDLDEKRGHDKYAHVRFSKIGWVKIRYSRPIPDHATIKEATFKKETTGEWFVSYGLETDDADLPAKPDVGSLNASNSVGIDLGILNYIHTSDGKTVDWLNLENDYERLRREQRKLSRKEHGSNNWEKQRREVAKVTRRIQRKVLDYQHKLTTWLVHEYDVVFVEDLNVSGMFQGDGNARNKQDAAWRQFITLLEYKADLYGTHVKQVEPEGTTKECASCGVETAKPIWVREHSCPSCGFETDRDANAAMNVLKRGFSELGKGWPEDTPVETVTATDTTQFESVSASHVVKTGSLPS

SEQ ID NO: 15768 - protein, 495 aa, unknown
  TnpB Polypeptide
MAQLASEVRGISAYSTYVTRNDAQLGNELAHITATAPAEAGRRAGVTMPEFLVTGKSGRSRKEKLVQYNAVTAFRSWQERINAVNGESDKYVSRGWKRTMNAAPPSYGEDYINLGATDRNYALIENKPFADGEITLKMVIQGVWYRLIFSFDNKRFTEGKVTLPVVKVEDNRPAFIFSVVTDNPVVQFSGDYTIGVDVGINDYATVAVRDTKTGKIVHHTTLSQRVHSLWNSVKASEKQVRQLREKAARLLNDRPYERQAIMAALDEADLHRKAASRKKRELAILAAQEIAYLSYCYDNAVVAIEDLSWITNTMQNGRWNRGAFVQWLTHYVSQNGGWVVSVSAFNTSQVCHVCGAEVAHPEYKVSRCPVHGDMDRDVNAAANIAARAVPKVEKAYKKRSKNSKLQPQAPLKTPVARRSLKYLGRDRTKNVPTPKRKKKCQGVKTLSSPARAQAHRLEARVLADCNTCSVKVAETSKAAIKQGETICKCRLCSLN

SEQ ID NO: 15769 - protein, 179 aa, Microcystis sp.
LRDLETAYSNFFAFCQAERKGKKVKPPKFKKRKSQQSARFTDNGFTVNQHHVTLAKIGDLKVVWSRPLPSKPSSVTVIKDAADRYFLSFVVEIRPETLPDNKQTVGIDLGIATFATLSTGEKFNAPKPLKKRLKRLKKAQRNLSRKQKGSNRREKARKQVAKIHAKIKDTRTDFLHRVC

SEQ ID NO: 15770 - protein, 403 aa, unknown
  TnpB Polypeptide
MRTAYKCRAYPDIEQVSMLNRTFGCVRVVWNRTLAWRHARHHSEQARTNFVQANAYLTAMKATEDLGWLNEVSSVPLQQALRHQQVAFSNFFAGRAQYPRYKSRTGRQSAEYTRSGFRYRDGRLFLAKTDTPLAFTWSWPDVDAASIDPTTVTVSKDPCGRWYVSFAVDVADPAQLPATGAVVGVDLGIKDFAVTSDGEKIPNPRRLARRERNLARYQRRMARKVKGSANRAKARAKVARAHRKVRASRADFLHRASARLVRDHDVIVIEDLAVKNMIRNRPLAKAISDCGWGGFRRMIEYKAATAGRHLIVTGRWYPSSKTCSACGHLLADLSLKTRTWQCPSCGTRHDRDINAAKNILAAGLAVSACGADVRHSGSSRVRSAVKQEPRPVTAGIPVHQGGE

SEQ ID NO: 15771 - protein, 391 aa, Okeania sp.
MLLKYKYKLKPHKSQALIIANWLELARKQYNYRLSERLNWFEATRTPVNACPLNVSVVPLERIYQNIPEFRIQTRDGRKKDSNGNPITKKGDKHPNIINGYVAWETVQLADLAQTKKLFSEYKSIHSQVLQDVIQRVQTTMDNFTKPNKNGKTSGRPKFKGKHYYNSFSYPQLSNAHIAKNANGLTSVNLPKIGLVPLVYNRPIPVGFKVKAGTVIREADGWYIGFTIEDKTVPLRCAEIQPTEDNSKGIDLGLLHYAVTSDGEFIEVPKFFRFSEHRLSKLQVRLAKKSKHSKPWKILKGKIARLHQLIAPTQPLDWQFKLAYHLFSDVSVIFLEDLQIANLVRRCKAKLSNNGQFLPNGQSVKSGLNKSLQDAATINFLIFRVCCLETW

SEQ ID NO: 15772 - protein, 368 aa, unknown
  TnpB Polypeptide
MIKQKAYKFRLCPNFEQRVLFEKTFGCARFIWNQMLADRITHYEKTGTSLNNTPAQYKKDFPWLKEVDSLSLCNVQLNLNKAFKSFYQSGFGFPNFKTKKTAQSYKTNSQKGLITILDGRVKLPKVGWVKLKLHRQVRGLIKSATISKTATGKYFISILCEEEMSLLPKTDSNLGIDLGLENFAILSTGEKIENPRCLVSLSKKLAKEQKDLSRRGLLAKKKGVKLSESSNYQKQKLKVARLHEKIANQRKDFLHKLSTNLIKNHDVICIEDLASKNLMKNHHLARAIGDASWSEFVRQLHYKADWYGKKIVTISRWFPSSQLCSSCGESSGKKALPIREWTCESCGTHHDRDINASLNILKEGLSLA

SEQ ID NO: 15773 - protein, 404 aa, unknown
  TnpB Polypeptide
MRKEVLITKLVEKHKIYKSHPSYAKLYEMSRKSNNLYNQCVYFAKHSENLLEDLKNLDKMMKSFPDEHDNYRSFGYTRCAQQVLRLFHQNLRSYFASIKDYKKNPSKYTGRPHFPKFRKSGERFQVIFTNQSTRLINNVIIIAPKTFENKLSIKLRTRSVNKICQVVFAPRNNYFLVYVIYEADPITSKNTNKIAAIDVGLSNLATVTFSEEDDPILYRSDLTKINHDFNRITSNYVSILKKTQNKHTSKRRKRYSEKYSGLAEDRLHKISREIINDLSHRGVSTVIVGKNTGQKINNKLKNFVQVPLFRLITMIKYKAELAGITCIQVNESYTSGTSFLDNELPTKEYYDKSRRKYRGLFLSNTSKRINADVNASFQIMKKIYKEFVYDDFIKYANPIVKTIC

SEQ ID NO: 15774 - protein, 174 aa, unknown
  TnpB Polypeptide
MRFFNKLSKKLAREQKILSRKALVAKKDRRKLSDSKNYQKQRIKVAKIHEKIANQRKDFLNKLSTTLIKNHDVICIEDLASKNLMKNHHLARAIGDASWTEFVRQLRYKADWYGKKIVTISRWFPSSQICSTCGVNSGKKALSIREWTCESCGIHHDRDINASLNILKEGLSLA

SEQ ID NO: 15775 - protein, 371 aa, unknown
  TnpB Polypeptide
VRKTYEYRLRPTPAQERRLVATLDACRHVYNWAIEDRKVLWQYAKCGTSFYDQSAYLKHLKAERPWLKEVHAHPLQDALRRVDRAFAAFFRRVKANQSPGYPRFHGRGWYDSFTMKDWENGVAFDGKRLALSKVGRLRIVLHRPIAGTIKTCTIKRRADGWYALFSVECADVPRRIETNPVGVDVGLTTFAALSTGELIANPRHAKAAAQDVARAQRIVSKRTRGSERRGKAREILARRHLRLARTRRDFHFKTAHALAARFSPIVVEDLHIAGMARHPTLAASIHDAGWGQFLGILARSAESAGAAYMAVEARGTSATCSACGEYVPKTLAERTHRCAACGLVLDRDVNAARVILKRGWASPSARRLRAS

SEQ ID NO: 15776 - protein, 405 aa, Pseudomonas sp.
MSACILKAYKYRLYPNTEQQEFFAKSFGCARFVWNKMLHDKIEHYEKTKTTLKNTPAQYKKEFEWLKEVGSLALANVQLDLQKAFQSFFKSSFGFPKFKRKGIKDSYTTNNQKGTVAVTSRSIKLPKIGLIKAKIDREINGLIKSATVSKTPAGRYFVSVLVETIAQPLPKTNSSVGIDLGITDFIVLSDKTEVVNPKFLAKYEKKLAREQKILAKRREVAKAANRKLSESRNYQKQRLKVAKVYEKIANCRKNFLHKTSFNLIKNHDVIVIEDLNVKGMVKNRRLAKAISDSSWSEFATMLTYKADWYGKQLVKIDRWFPSSKTCSGCGHVLGRGELTLAIRQWQCPSCNAVLDRDYNASINILNEGLRYLLSITKTLGARELAQSICITSDGVQRTPSSLCIT

SEQ ID NO: 15777 - protein, 255 aa, unknown
  TnpB Polypeptide
MRMRCRFGQWKGASAFGFRHAPTTPDSCKYQQGESDLVYRNGRFFLLATCEVPKEDEEAVDSMLGVDLGIKMLATDGDGAHFSGEVVEAKRLWYSQRRAVLQSVGTESAKRRLKKLSGRERRFRRDINHQISKRIVEKAKDTGRAIALEDLSGIRDRVTVRKSQRARHHSWSFFQLRSFIEYKAKRAGVPVILVDPRNTSRTCSVCGHCEKKNRKTQSEFVCQACGHSMNADYNAALNIGAKGAFNLPMVSGLAA

SEQ ID NO: 15778 - protein, 384 aa, unknown
  TnpB Polypeptide
MYTTLYKLFRAPRNRNLKRKTWIAHTIWNYFLGWQRTRYSLGLPYLSYKEMSREFTILRKSHPEVFSDWRELDSWAARQVLKRLDESYQRFFKKIAKRPPKFRSFRKPYSFTMCPSGYKFAAPVAGDKGFGIYSDRVTIMGRTYRFNLSRPIFGTIKTVTIKEDALGDFYMSVVTAYVPSHLKPMTGNAAGFDMGVKTMLTCSNGRQYKSPQFYTESIDKVRTANRQLSTKKRGSNNRERARQHSARMHRKVTRRRKDHHWKLALELVRRFDVLFFETLNLDGMKRLWGRKVSDIGFYGFLQKLKWQAKKRGKRVELIDQWQPTTSVCYICNTSVSLDLSDRTWTCEHCNTHHDRDINAAINILKVGASTFGVGNVRLAIASSS

SEQ ID NO: 15779 - protein, 498 aa, Anaerostipes sp.
MATYSLELKLNTKKASDCRYLENYFREVAKISNTVRRFAMRRIECLKRDKNYRDLLAQYIKLIKLDKGEEKEAVSKKLSAVVWSYGLTKFHLQKTALNLRKNLRYVHSDVYQKICDQVWRGVEKVLYADGKRLHFKKWDDFLSFEGKKNTTGIIYQDGKVYINCTPKRPKGGIILSVKLPNNKNSDHWNYETRCLCDPTKYCRIVRKKFSSGWHYYVQLIQEGIPPQKHVRGTGRIGIDIGTSTVATVSETACHLDVLGDSVKTKEKEVKRLQRKMDRSRRATNPQYYNEDGTIKKGKKRWSYSHHYKRLRDQLKAMRRKRAAALKQWQEIYANRLLEEGDEVYVEDMRFKALQKRKKKTEKKKNGRFKSKKRFGKSIGNHAPAQFLTIVKRKLDQTGGKYHEVNTRKFKASQYDHVTDTYTRKKLTKRHHRSNGEWVQRDLYSAFLLMNSDKNLKHADRNLCLLHYPSFKKLHDQCIEEIIASDRHIPASFGFYRAA

SEQ ID NO: 15780 - protein, 409 aa, Anaerostipes sp.
HRTENEIGVFEEIAMLQKAYPTIHVRKVISYYHLEKLMRVTDNPDFFAGLPKQTAQQMTKQAVTDFKNWLASFREYKEHPEKYLGKPRMPHYKKQDLATVIITNQDAVLYPEQNGVSLKLPITKERLHFSNISEDAFLKDVKIKPYHGRFLLCLTFEEPEPVIETSMPNTCAIDFGTDNFAAIVCDDGSSAIYKGGAVLSDTQWFHKQKAKYVSILTRGHKNRYITSKRLSDLSYRHANFVKDQCHKISRSIIDFCVEHQAGTLILGVNPLWKQNSRIGRVNNQKFVSMPIAFLRTMITYKALNAGIKIVEQEESYTSKADITAKDYIPTYGVDDENAKFSGVRIKRGLYRCANGAILNADCHAAANIMRKAVPDIWDKTTDFSFLANPKVYGFHELNPKSIPVKGIAA

SEQ ID NO: 15781 - protein, 273 aa, Kribbella sp.
VAATIRFERGRWFVSFTVEQDTTVRAPARPDAVVGVDLGIKNLAMLAEPDRALAPVPNPKHLNAALRKLGRLSRRVSRRIGPDRRTGRVPSKRWKRANAQRNRLHHTVAYQRADALHKFTTAIAAEYGTVVVEDLNVAGMLKNRRLARRIGDAGFGEIRRQLAYKIEWNGGRLIVADRWFPSSKTCSGCGVVKAKLLLSERDYRCESCGLVMDRDENAARNLAALAVAVSGAETLNGRGADQKTRTTGQVAVKRPPGSPACETGTASPEAVSV

SEQ ID NO: 15782 - protein, 489 aa, Nostocaceae sp.
MPGSTLKQTGSLAKGCLLINPNLFFLWNGIAFGLLCWYTNYNITLQVETVSKAKKSMGVQQVLLSPNDETKALLEYLCQQSGKLYNNAVYFARQIFFKTGKLLTNKFDLIYETSVSKSLVAQSMPSTPMQQTLMSVTEGFKSFKELKSLFLKGQLHFKPKVPNYLAGSKLFKVAYPNSGGQKPTLINGELRFSLGLTVKRWFGISEFFLPMPSNIDCCKVKEFTILPKNGAFYLEISYEVEKPKHDLDINQALSIDLGTADNLAACVDTLGNSLLVDARAMKAMNQLWNKKVSTRKENKPEGYWDNWLDRVTRKRNHQMRDGINKAAKLIVDHCLKYCIGTLVVGWNEGFKSNANMGRLNNQKFVQMPLGKLKERLKQLCDLHGIRFQETEESYTSKASYLDGDSLPVYGSKPDGWKASGKRVNRGLYQSANGLIVNADLNGAANILRKVASNLSLDLGLLGRRTLTSVARVRLWVLPKFTLSAESQCL

SEQ ID NO: 15783 - protein, 360 aa, unknown
  TnpB Polypeptide
MAEKQLVKTLKVRVRDKHAKRLQEMSRSVNLVWNYVNELSSRIIREKGYFPNYNELEKYTKGCNKELGLHSQTVQNIVKEYVLRRKQFKKNRLNWRVSNPNNAKYSLGWVPVNTGQASWKGCRVYHNGDYFKVWDSYGLDEYKFKTASFNQDNRGRWYFNVCVPIDANKTYSKGQGAIGIDLGLHDTATTSEGDVLEAFRFYRNEEEQIAKLQRANKKIELKNAHAKVKNKRKDAYHKFTRWLVENYGEIYVGDVNSSKLAKTNMAKSVYDASWYLLKTMLEYKCDNAGIVYREVDERYTTVTCSECFTRNKNFPKGLSGLQIREWTCVECGSTHERDINAARNILAVGHGRLVGGIPAL

SEQ ID NO: 15784 - protein, 408 aa, unknown
  TnpB Polypeptide
MKIRRTEQTQIKKNHSMWKVIDDLCFKSKNLYNYANYIIRQEFINNHKYIKYNKLTYNIKHDEPFIDLGSNSAQQTLRLLDKSWKSFFEASKRYKKCSEGFLGRPKLPKYKKKDGKFIFMLCNNQFKIIDNCIYFCWKPLKAFNNTFKTNINPDKNKLIQLRFIPRNNIYIMELVYEKEAPDIKDNEINNICGIDLGINNFATLTNNIGIKPVIINGKIIKSINQYYNKKLAYYKSILKKTNNKDWSNKLNKLTIKRNNKIKNYMHKASKQVIEYCKCLNLDTIIIGNNPEWKQNSKLNKKVNQTFVQIPYENFIDMIQYKAQDVGIKVIITEENYTSGTSFLDNELPIKENYNKNRRIFRGLFRSNTGRLINSDVNGSLQIIKKVIPNTFDGYGIEGLDLTPLVVNL

SEQ ID NO: 15785 - protein, 402 aa, Escherichia sp.
VKRLQAFKFQLRPGGQQECEMRRFAGACRFVFNRALARQNENHEAGNKYIPYGKMASWLVEWKNATETQWLKDSPSQPLQQSLKDLERAYKNFFQKRAAFPRFKKRGQNDAFRYPQGVKLDQENSRIFLPKLGWMRYRNSRQVTGVVKNVTVSQSSGKWYISIQTENEVSTPVHPSASMVGLDAGVAKLATLSDGTVFEPVNSLQKNQKKLARLQRQLSRKVKFSNNWQKQKCKIQRLHSRIANIRRDYLHKVTTTVSKNHAMIVIEDLKVSNMSKSAAGTVSQPGRNVRAKSGLNRPILDQGWYEIRRQLEYKQLWSGGQVLAVPPAYTSQRCAYCGHTAKENRLSQSKFRCQVCGYTANADVNGARNILAAGHAVLACGEMVQSGRPLKQEPTEMIQATA

SEQ ID NO: 15786 - protein, 306 aa, unknown
  TnpB Polypeptide
MIKTYKVKLLPNNKQRTKLFECASVARWAYNFALATQQENYKNGGKFLGDCELRKRLTELKKQKEYAWLNNYSNNITKQAIKDACIAYKNFFEGRANFPKFKSKKKSKPSFYLATISTGQKYKNINKTSKVKKLEKRQKRLQKKLSKKYELNKIQMNGGEYRYRKTNNIKKLEFLVLKMRRRLKNIRHNYIHQITTSLVKAKPEYVFMENLNTCGMLKNKRLSKSIQEQLFYEFKRQMEYKCALNDIKFILADTFYPSSKTCSRCGALKNKLSLSERTFICDECGYEIDRDLNASINLKNYGRSIA

SEQ ID NO: 15787 - protein, 170 aa, unknown
  TnpB Polypeptide
MTGSSKAPRWNISRAVDTRRRYCSSTRPKHPNPSDPCISSDWITPPTACTCPRDGEQADYPRFYRQMEPRLMREQRRLSHMVKGSGNWVKQKRRIAKLAAKVRNQRADFLHKTANRLAARYDCVGVEDLDMKDMSQSLALGKSTMDNGYGMFRTMLAYKLERQGKQAGAR

SEQ ID NO: 15788 - protein, 333 aa, Lactobacillus sp.
LNDKDLDSLMKANAIKNYRRAWKMFRTVHQAGTPVFHRKRTEQKYQTSCLYPAKVKHPGMTNGSVRLLDHQHIQLPKLGRLRFRGMPAKLLARKPGIRIGTVTISMDATGRYYVSLQLASQHSFVVQTASKAQTSIGIDLNTDNFLTDSNGNVIANPRYYRSVKGKLARAQRKLSRRGLLAKKEHRQLRDAKNYQKQRAVVAAIQRQIANRRNNFLHLVSTTLIKNHDLVVAEELRSKNLLRNHALAMSISDVGWRTFLGMLTYKAALYGKRFVTVNPRNTTQTCYNCDFIMGSGDTQKLSLADREWTCPACDSHHMRDHNAAQNILAKGITA

SEQ ID NO: 15789 - protein, 410 aa, unknown
  TnpB Polypeptide
MRLTEQHKIRKGHKYYDVLDSETYKSKNLYNATLYAVRQYFFNNGKYLSYYSLQNTFQNEKQTDYYALPTKVAQQTMKKVDGNFKSFFKALASYKKNPSKFNGRPKIPKYLDKTEGRFMLVYTVQAVSKKRFDEANVIKLSGIDVEIPTEVTYDSLCEVRVVKRPNAYVVEVVYDNGQDEVGHVDNGRYASIDLGVSNFATVTSNVKGFQPFVVDGRHIKSVNRYYNKELSYYRSVLDTRNKGRKVSNRIYRLTEKRNNRMNDFVHKASRMIVNQLVSYDIRTLIVGYNKGWKQDISIGRRNNQTFVQIPYERFLKVLAYKCNMEGINVVTIDESYTSKCSFLDWEEICKHETYVGRRVMRGLFKSTDGTLINADVNGSYNILRKCMPNAFDADGVVGVLVHPVVIKITN

SEQ ID NO: 15790 - protein, 221 aa, unknown
  TnpB Polypeptide
VDFENNTIMLPKIGEVKVVLHRYFEGTLKTATISKSITGRYFISILVDDRKEIPDEQEIFESSTIGIDVGIEDFAVISTGEKIENPKYLKNSLQRLKCLQKRVSSKIKGSNNRNKAKLHLSKIHETISNQRNDFQHKLSFRLVSENQAISLETLNVKEMQKNHCLAQSISDAGWHSFVTKLTYKAEWLGKTIIKIGQFKPSSKICNVCGYHNSNLTLKDRE

SEQ ID NO: 15791 - protein, 359 aa, unknown
  TnpB Polypeptide
MQRACKVTLKHITAKKQRQLTALLQSYRSAVNFYIKYFWHNQGKRNAESLAVLQNSRLSERYKQAALKQAFDIVIATKKSAKALGKPCSIPVFHGKIILDQRHISIEDGHGSFDLVLKLSALHKGHRITLPTKHTAMTRKWLSKPNAKFIQGCALSETGITLWVNIPEQPLKTQGRVIGIDLGVNKLISDSDGNHYGKDFKAIRDKIRRKKPCSSAKYRALKERENYICRIVNQLPWQDLKVVGFEDLTGIKTGKQKNRGKNFRKAMAPWIVRRVAGRIECKAQENRVRPAKNDPADTSRTCPPCGKVSRENRKGEKFQCIACGYKGDADYIGALNILAKTLVTLGSLQSPRLENKKVV

SEQ ID NO: 15792 - protein, 359 aa, unknown
  TnpB Polypeptide
MKTTLKIKLCPSREQHIVLKNTMMCFNETCNYISEIVYREKCYSKFKIQAMSYKNIREKFNLTAQMAIRAIGKVIDAYKRDRAKLISFRPLGAVIYDERIMSFKKLQAVSLWTTSGRQLIPMILGGYQTSRMRHIKGQADLVLIDNVFYLLATVETPEPPTEKPLDYLGVDMGIVNLATDSTGEVFTGQKTEQVRQRYFKLRQSFQERGTKSAKRHLKKIRRKESKFRADVNHRISKKLVEKAKDTHFAIVLEDLKGIRNRTTVRKSQRAKHAGWAFYQLMQFIIYKAKRDGVLIIVVNPKNTSRECFVCWHIEKANRKSQAVFQCKKCGHTDNADFNAAKVIARRAAVNQPIVPSKAA

SEQ ID NO: 15793 - protein, 638 aa, Streptomyces sp.
VLRAGVVEKTGEVLSAAVLAQRVGWAADLVSGMAADLLSLHWNTADVDLLASGVDGAGHGLSSNAWMALRRLGWSTAPAEGVRVNDRIVRMAQEQAGRLLRSVKWRADMTTGVIRTWPAEPDKRTCDEWDAVREAVPDGWALPSSVIRSRTRQIAVFADGHSRMPVDVFDLEAAPRAARMLLLSACDGQQASIARCDDLGRALLRVQLPARPDPRSYADWIWVACPITLPPTVPTGAVLHLPTLRVCSGQVHADLAYTHTVPKARRTGHTIALGVDWGLNTLLSAGSLRLDDNGTITALGSGAQFRAAGVLARQHRLRRQGEELHAKTDQYQRLIGDADNHRLTGKHAVLAEEVRHVSNRRSNLNDALAWAAARWTVDQAVTARASVIYVEDLRSLEARGMGRVLNTRLSQQIRGRIVERVRHLAAEAGIAVVTVPARGTSRYCPHCLVPLRHCKAPDRPTTPGWKWALCPNPDCGWQGDRDTGAWQRIAARGLTHQTKTVVDRTSGTMVIHSVVDKLETAAAVASATTEICRDRSKSGPTRRTTPRPVPRRRRAPSPAAPWGPAGKRPEGHAHMGPRRLPRAAHRHQGVATISTPTIRRHRPTGAALGAGFHLHAHATPPRWAEPIRNRMVRTGLLS

SEQ ID NO: 15794 - protein, 401 aa, Corynebacterium sp.
LWQRDHGKRWSPQHQERLDAVWSPDTKGARPFLHLVNRRCPVSGIKNAAEAMKNYYASKTGRRKGRAMGKPQRKTHRSRKSVTIHPDSRMGPKGCPPPRGQPQITGYKHLYLANLFSHASKPDKKDRILRVRVHGSTRRLVKALQNHPDAKISNFTISQKGGYWYVAVMVKSAQRQPSLTRRQKQADTLGIDIGIHNYLSLSDGSTVIQLPPLLQRNIKRSKNLRKKLARSQKGSNRRRKLIATIKRVDHELKLQRDGFVHQITAELARNYALIGIEDLNVKGMTRSARGTVDAPGTNVRAKSSLNRRMLEGIPGEFRRQLEYKTKRTGAALEVIDRFYPSSKTCSRCGWKNENLSLSNRQFTCLECGLSLDRDHNAALNIAAEAERKHLKDTKSPKPSHD

SEQ ID NO: 15795 - protein, 368 aa, unknown
  TnpB Polypeptide
MQKGVKFRIDPNKEQQTIINQTLGCCRLIYNKALAMRNEAYQNGNKIGYSQTSAMLTGLKKSDDFAFLKAVDSIALQQSLRDLDRGFVNFFQKRAKHPQFKSKHSHHQSYRTINQSNNIRIVGKYIKLPKLGYVKVRQSMEVGKINNVTIEHTPTGKYFAVLNIEFEPQPMNNKGGKVGIDVGIKEFYSDSNGNVVSNPKYLEKSMRKLMREQRKLSRKEKGSKNHNKQRVKVALVHEKITNQRNDFLQNESTKLIRENQTICIEDLKVKNMMRNHKLAQHIGSASWSKFFDMLTYKSVWYGNDIVKVPTMYPSSQTCSCCGFKNPLVKNLAIRKWECPECHTKHDRDTNASINILDKGLQMQSASLH

SEQ ID NO: 15796 - protein, 407 aa, Desulfurococcales sp.
MIGGALEIIVRNDARSRRKAHELCYRVLRERYPHLHNKFIQEAYKRALAMYRSYRKLLNKWKRLQEKKKKKISPPSPPTIEGNRVIELHVDTYKLERKHGFLLLTVSKGNGVYLRFLVMEYDYARKELEGAKLGNSRILIDGNRIYLLLTIRRNVEVNEHKNKLFIDINEDSIDCLLVNYDKNEAVLFSIRHDIRKIRTNYRRIRKSIQMKVENPRLRNKLLAKYGQRERSRVEDRLKKITTLLAEIAREYNAYLARENLKDLKLNGRRKNKQLNHRLSTFPYHKFIEHIDYKFYKRGLSVEEIDAKKTSITCPICGYVDRRNRIDKETFKCRRCSFSFNAQYVACLNLFSRSNDGSVAIRSGEICLISRKAAHVVAVNVAPNEPPTEMRWLREKPMPKTIISTPSI

SEQ ID NO: 15797 - protein, 365 aa, Archaeoglobaceae sp.
MMVRKVIKAKIIDETNKGKLESLEREYTNFQKALRGEDVKLYSATKQQAERLLRKIRKQNGGKLKQKEYPLILRRDVYNVWVIDNKISKYWIKIPVYGVRGGIKLPIKPHCEIDMDWKFREAKVFKKRNGWFVHITVEKEVKIRQEYDNILAIDLGIRRIATVVSTADKRPKFYGKEIRKVRGHYFYLRRKLGKLKKFKAIKKIGRREKRVVDDLLHKISREIVNRAKEENAVIVLGDLKGIRKQSKGRKFNRKLNSFPYYRLSKFIEYKALWEGITVIKVNEANTSKLCSRCGSQGLRHSGKFVCPKCGIELNADYNGATNILKRVLGYISRAGAALTQPELGRMKLCRQTQNLPTLVVESVNL

SEQ ID NO: 15798 - protein, 429 aa, unknown
  TnpB Polypeptide
MLHVIVMANTPSIIDAWMLVKGVAFRLSSELPPEAISLLCDFRLAVNKAVRAGLDARVSSRNGITKLLYRAFREEHPGMYSQHLVSSFEVAAGILKNHRKRLRHGRRCETPFVKRLMMKAENQAYKLDRTEGMIDLPIRAGCHVKLGLVVSRYHRRYLNDETLSLGSLTILPDRVIIAFRKEAPKPSAVSSVLSLDTNERSLDGIFVEGGQKGNGRSIQVEAAFPDVAAIQQLHHVRRRRLQKKKAHDRRLARALCRREGAREHHRIDYRLHRAANAVIEFAEGCESAIVLEDPRGMRPNRSKDLNRRLSLWPRRKLHQIIEYKAAWKGIPVIKVDPSYSSRRCSACGRIPDSRMGTRAEFVCECGWHLNRHVNASMNLLQTAISKGLEVAGGLRFSPGAFQHDVMMTLYEPAMAARSELNGTSHVGMT

SEQ ID NO: 15799 - protein, 499 aa, unknown
  TnpB Polypeptide
MRAKISTSNYVVSIKLKLTESVENRLEKTFRIVASAYNEALSFGLRRFEALKQNSRYQELLELRRNNKHRVREYDKELFELHKKYGLTEFGLSTRLSQQRKKPNSPYQQLNSGELQVIAGRAYKTLEKVLFYQIKSSRVRFRSKYDLKVGYRNRVNITGTRIIPSDRKGYVYRLYIHKSSTFVDIPIKAFNKHQQISLLKSEKIKYVQIIRKTIRGKHVYILQIVCQGFPLTKVERGVGIMGIDPGISTVAYVSKNSLALIDLVPKDVNGKEKLMRYLDKAIERSKRVNNPNCYHSNGTIKKGSKFKHPSNRQMKLQVRRLKSYRSLSEERKKIQGQLVNYLVSQASLIKIEDLNVKGLQRRSKEIRINPKTNRPFSKKRYGKSVFRAAPSSFRQKLQTRASQLGVDIEIIQPKDLKPSQYNHITQTFGKKSISTRLYDLSEKWTSVQRDLYSAFLIGHIENGSYQQEQLTQDFPDFYKQMKDFLQQPRKTNRLDWYLN

SEQ ID NO: 15800 - protein, 455 aa, unknown
  TnpB Polypeptide
MKGEIVVLKQKYTTVTQLHEVNNKDIIEYFENASVYFCKLKRKAFHIFKNKNRTGNKTKHTKFIQIFMKEHSISRRTASSILRYAQGEVKSLEESKKYEISQKEQKIKKLKENIERLDDKILKFQEKMRNKIKVNHLKYWNLKKSRAFKKMKLNKFQLRLKQLKWQVETGNYKLCFGTKDLLKGNKEKFVSRRDSQITYIGSQDETGRNSMFQLSYNNQNNQFEIKIRKDFGLDDEEKYVSGKCYFNHHKNKLIEALSNKNSTPLTYSIIRKNGRYYLYCTFEYRVESESCFLTRKTHGIIGIDFNKGFLAVSEIDRSGNLIGTDILKYRFGKGNKTQSDLESCISRVLKKALETGKDVCFEDLNFKSKKFKTMKGTTDKGKKYNSMLHSLAYSLYNKLITNIAFRNKIGIIKVNPAWTSWIAKNKFCERMKLNIHIGASFVIARRGLGIKDTVK

SEQ ID NO: 15801 - protein, 405 aa, unknown
  TnpB Polypeptide
LSFIVLAVKSVWQYYVPVGDVLRLLDVFRQMVNDSVRIGLANDASSLRRLSLLSYNQLARYDSPSCYKLCAISRAAGILSARKKSARRGFPTGTPYAVRQQLVSCYGFKIENGGLKIPVSRGKRFSIPLTKHVLEVISQPGLEVRSFTLTQNRLIFCIARDAPLLECNSTVGVDRNLRNLTVGNDDQTRHYDLSKCVRIANTTVRVVASFTRDDDRIKTRIASKYGRRRTSRSGHLLHNATKTIVAVAVQRRTAIVLENIENIRSLYRKGNGQARKYRGRMNGWSFYEAQRQLEYKARWIGLPVIRLSRRETRGSSLTCPRCGERLQSDKRLKRKLWCGKCRVVMDRDQVAAVNLARRGRVRFARSRPPIVREAQGRAVEAMKGNPTPTVIPGVDAPKLTQPTKS

SEQ ID NO: 15802 - protein, 221 aa, unknown
  TnpB Polypeptide
LIKTQKGVFINVVFSKEVEVREPETFVGIDLNENNITLSLPNGKFVQIITHEREIRTGYFVKRRKIQRKLKAGKRRKELLEKYGERERNRLTDLYHKLANRIVELAKKYGGIALEDLTEIRDSIHYSVKMNGRLHRWSFRKLQSIIEYKAKLKGIKVVFVNPAYTSSLCPICGSRLSPNGHRVLRCSNCGLEVDRDVVGSWNIRLKVLKMWGVTVPPKATR

SEQ ID NO: 15803 - protein, 432 aa, Firmicutes sp.
MRRANVVRVLSGKQQKQILEIIGDRCAALWNAVQYRCRQAFFEGESVPSYGRLCSEFKEHESYKALPAHIGQEVIKKARKAWDSFFALLRLYRKGELKKPPRIPRYWKDRRTGKRFFRIVPVKASTSYSLNTRYLSLTLPQDLRAKRGDRLVLPVRGILRFAGVPKTLELWYDPAKKRWYAHQVVKVPEPERKKKPEKQAALNLGARVLAALAVEGWHHQLLFSGREVWKDFVYWTKKIAAEQARLNKAGRKTSRRLKKLYQIRARRLKHAFVALAAELVRILKRHRVTVLFVEDLTGIRDDMDFGPKNILVHNFWAFGMLRRLVAAACARVGIGVVASAPRGTSSGCAVCGSSVLRPVRYKAVCETCGCVWHADANAALNILLQGSSKGHGVEVAPRKPLSLRWNYHRWESRFASAAGTPTGAASGVPKVA

SEQ ID NO: 15804 - protein, 377 aa, Salmonella sp.
MWLRPFCLEFRSCGDKAHPWLRRKVTFGFRVEQDAYSVEKMPEHIFLQDAYTDNLQQKLKDLHAAWKRCFDKKLAAKAPVWKRKNKGRDSIRFVNFEKYCRLENRRVKLPSGLGWVKFRQSQRVNGKIKNATISQLAGQWYISFQVEVETAEPNHTSTTIVGLDAGVTKLATLSDGTVYQPVNSFKASQRKLATLQRQLSRKVKFSSNWQKQKRKVQRLHSHIANIRRDYLHKVTSEISKNHAMIVIEDLKVSNMSKSAKGTAEQHGRNVKAKSGLNRSILDQGWYEMRRQLEYKQLWRGGQVLAVPPAYTSQRCACCGHTAKENRLSQSKFVCQACGYTANADVNGARNILAAGHAVLACGGMVQSGCPSETGTRR

SEQ ID NO: 15805 - protein, 404 aa, Microcoleus sp.
MLNMTYEYKLEPTSSQSQTFDHWLEVCRKVWNYALRERKDWYNSRSCGINACSLKSEYIIPADSPRPNFAVQCKSLTTARQSNSELKTVHSQVLQQVLKQLEKAFTSMWESGFGFPRFKKKGRMRSFLFPTPNKTVVIGNRINLPSIGLVKFRDSRPIPDGFVVKQIRIVKRASGYFAMLALALDVSIPTTMPHGYALGIDLGLEKFLATSDNELVARPKFFVDAQRKLKSLQKVVSRKRIGSKNWQKAQKKVARYHQHISDSRKDFHFKTAHHLCNQAGMIFAEDLNVKAMAKGMLCKHTLDGGFGQFLSILEYVCFKKDVFFLKVDKNGTSQTCPQCQTHTGKKPLSLRIHQCPECGYEADRDVAAAQVVVQRGLAAVGHTVKMLSEGKATRLPVMKESPSL

SEQ ID NO: 15806 - protein, 431 aa, Microcoleus sp.
MYAVQRDVWHLTGLDKTIVEQLLKWSNNLFNVGTYESRQRYFKDKGAIKYPDLYKIAKGNENYGLLYSQVAQQSLKSVAESFSSFRTLQKLAKKGELNQKPRLPKYRTKGAMYQVSYPGQALKIVGNRVRLPLGTKGKEHFGKDALWVTLPERLKDCQIKELRLIPRNGEVWLEYVYESLTEQAASCSLEVTGVLGIDHGINNWLTCVSSNSKPFIIDGRKLKSWNQWFNKEKARVQSAHAQYKLPKGFSSKRLQQLSETRARRMRDAVNKAVRTIIGYCENHQINVIVFGWNKRPKQEVNMGVVTNQNFVQIPTAKVKDRLQQECALKGWRFVEQDESYTSKASFLDRDLLPVKVGEKPDNWQPSGKRIKRGLYRSGQKLILNADVNGAANIIRKSKVAIDSITERVGSGLLTNPLRIKLWADSSPKVGP

SEQ ID NO: 15807 - protein, 405 aa, Microcoleus sp.
MMKAVKVRIYPSDEQKKALSKAFGCARWFWNNSLTQTNRLYKETGKGLSQQGMNDRLPGLKKEFEWLAQAYSQVLQSVSLNLSRAFINFFEGRAKFPNFKSKFDKQSIQYPQNVKITDEGLKLPKLGVIPAKIHRVLDGQLKTVTVSMTPSGKYFASLLFDDGVPELAKSSDGKAVGIDLGLTHFAITSDGSKFDNPRVLKKRAKNLKRKQKKLSRKVKGSNTRLKAKRIVARVHERIANTRKDFLHKLSRKMVNENQVICVENLAVKNMVKNHNLAKAISDASWSEFTRMLEYKAKEEGKCYVEVDRFFPSSKTCSVCLNRVGNLPLNVRSWQCQSCETKHDRDVNAAVNIRDEGLRILALGTSATAKGGKVSPKSGRRKSSVSKALPVEVGSSALNDRSAQGA

SEQ ID NO: 15808 - protein, 363 aa, Pantoea sp.
MSIQTKTLSVRVKDKHAAVLRQMAFEVNQVFNLANEITRAAYSNAGDFGAQVPKWLSVFDVQKLTAGIQKERGYTIGSATVQEVIAEHGKARKQFKRSSLRWRVSGGARRSLGWVPFKSRAAQWQNGCVKFAGHFFKVWDSYGLSGYKFRAGSFSEDSRGRWYFNVCVAVETAPTAGTTAVGVDLGLKDYATPSEGEKLEAGRFYRDLEPALGKAQRAGKKARVRAIHAKIKHRRKDALHKYSTALVNRHAAIFVGDVSSSQLAKTRMAKSVLDAGWAMLKTQLKYKAIARSVVFEVVNERYSTQACSCCGAISANSPKGRAGLRIRAWTCCECGITHDRDVNAAKNILAAGHCRLAAEIPAV

SEQ ID NO: 15809 - protein, 434 aa, Nonomuraea sp.
VEQGKQILNAQVSVEDENQRLLVLTCRALDQWQDHGVQLRYSFRLYPTAGQRVALARAFGCARVVFNDGLRARQEAHKQGLPYISDAELSKRVVTEAKRTGQRCWLSEVSAVVLQQALADLNKAYRNFFDSIIGERKGVKAAPPRFRSKKDGRQAIRFTKNARFSITVSGKLRLPKIGDVPVRWSRALPTEPSSVTVVKDAAGRYFASFVVEAVEQPLPAVEAETGIDLGLRHFAVLSNGRKIDAPRFLRRAERRLKKLQRALSRKQQRSNNRAKARLKVARQHAKVADARREFHHQLSTRLIRENQAVVVEDLAVKGLARTRLAKSVHDAGWSQFVAMLEYKAALYGRAFHRVDRWFPSSKLCSTCGAPATSMPLNVLEWACPCGAVHDRDLNAAINILAAGRADRLNACGARVRPGPAPAQREEAGSRRGAA

SEQ ID NO: 15810 - protein, 152 aa, Candidate division WPS-2 bacterium
KKQDFQHKLSDKVCRENKLIAIEDLNIKGIVKNHCLAKSISNQSWYSFITKLEYKSKRYGGRVEKTNRFYPSSKTCSSCGYINQNLTLKDREWNCPQCKIKLDRDVCASQNILAQVQRELNLKGCWNASLKPVEPSSIDEAVKQEAIGSLAR

SEQ ID NO: 15811 - protein, 237 aa, Oscillatoriales sp.
LAIRGVAIGKLNQYAAIDEAIRTAQFVRNKCVRFWIDNRGVGQKDLYRHSTALREEFAFVKDLNSSACQASVERAYSAIARFYDNCKKAVPGKKGYPTFKKNRRSVEYKVSGWKLSETRKRVPLIHRADGYYVQFAISADNKVDAAPAGKTVGLDVGLKEFYTDSDRRTEPNPKFYRTSEKQLKFRQRRVSRKKKRVHLKISRQREEHAKKLARCVIQSKCDSFWRNLIGRFQASVE

SEQ ID NO: 15812 - protein, 485 aa, unknown
  TnpB Polypeptide
MFGRLERKLFVDIYVRGEPVNEAKKRYIEEYKVTARQFNSLNNSLAGKIKSIRENRKYLERDLEGRIASTEKVIKKKEKERDRILKSLRKIKPRTEKWQKKIDKLKKVKFFLHHKKRRLRNLRQRLGNLRKDMERGTFRICFGTSKLFKAQYNLEANGFKSHTEWLGAWRKARSSSFFILGSKDETCGNQTCTYSRDNTLRIRVATKFIKQFGKYIKLTNVVFPYGQEHLDRARAVRRIVKSRKEYAAAISYRFLRRGDNWYVHATTELEGPPLKTSRWLGAVGIDLNDGFLQAGEIDRFGNPLKEFKIPAPMRDRSRDQVKAALGEAVKKVVLYAKEKGKPIAVEDLDFAKKKQALRELGTKRARVLSGLTYKQFREMVESCAFREGVEVLKPGGKNVDPFATSIIGQLKFMARYGLASHGSAACVIARRGLGFGLESSVQSSVLHLPERKRTSRRNYWLRVSNSLKKETYFTDRIALLYADRF

SEQ ID NO: 15813 - protein, 443 aa, Halomonas sp.
MAIIRSDTLILQVINADQQQALADTLRLYRRLVRDLMTVAYTHWPMVGAGKGNEVVKVIEGLIHPTRQRPQVRYPYFAKRYYKFPSYLRRVAIMDAVGQVRSFGTRFDQWRCGKRKHPHAKPPRLTTRTHTFPSLYGSQCAKVNAEATHAFIKVRWQNDWIWMGFQLKSQCRFHGKGQAKSPLLTYNGRHWQLSLPEQFNPPTPTKGTPNRVLAVDVGINTAATWAVVDAQGTVHARGFISRTDKDRECRLMQRIRRAARKHTRHGCRLPVGFCRWGHQRLTHLADNQAHQISRQLVNQALNHDCQAMAVEDLKGWRPKAGKKRTPMKARFHRWFHRQLVNRIDSKAEEVGLKRVHVYARGTSRQAFDGSGPVKRDVANYSQCTFSSDKRYHADLNAAYNIAARGHVYFQGGQRKQTARVRSQTSTHAPRTPVTLSTLWQQSA

SEQ ID NO: 15814 - protein, 310 aa, unknown
  TnpB Polypeptide
MDVAKRKKKDAACELVAYRFYGIPSELDAAQEDKTFGCCRYLWNRMLGDHNTLYAEIGHVPNNTPADHKDLDECLFLNEVDSLALANTALNLDAAFERFFKKTGGYPRFKAKKHTKRSCTTNAVYGNRKGRPTCNIQLNTSNGFLKLPKHWDPVRLKLHRPIKPGEKLKSVTITQEPDGKRYYSILMEYPKMQAATQTAIQDSIGLDYSMPNLYVDSNGASPVFPKPYRTMEPKLSRERKKLSRKKPGSKRYEKQRMKAAKLYAKSKHQREDILHKLSCTLTDTYDLIAIEDMSAMKQALRFGKAVSDNG

SEQ ID NO: 15815 - protein, 441 aa, Micromonospora sp.
VSTRANVCEIDHYQNGKFVIVQLRYQFRVYPTPGQQIELARAFGCARVVFNDGLRLRQQAREQGIAYVSDGELSRRVITEAKATPQRAWLGEVSAVVLQQALADLNTAYRNFFDSLSGKRKGRKVAPPRFRSRKDNRQAIRFTRNARFKVLDNGRLRLPKIGDLHVRWSRTLPSDPSSVAIIKDAAGRYCASFVVTTAEDEALPPVASEVGIDLGLTHFAVLCDGTKVAAPKFLRRAARKLKRLQQALSRKQRGSQNRRKAVIKVARAHARVADTRRDWQHKLSTAIIRDNQAVYVEDLAVAGLGRTRLARSVHDAGWAGFTSMLEYKAARYGRTFARVDRFFPSTRMCSDCGRINEKMTLDVRAWDCPCGSHHDRDVNAAKNIRAAGQADLNDRGAHVRPGPVPAARREAVTHPNAACPTRSVEGISVLQGGEDVKTTGC

SEQ ID NO: 15816 - protein, 566 aa, unknown
  TnpB Polypeptide
MITLHTRIRNLTPEQDAALSAYAEHFNRVAHHLAADMAREKRTGSSFKNDYLRRFNLTARQFNAVRQHVEGLANNRLENLKNQEDLLSDKIIALEKLLPRMARQIEKAEAERKPSEVIQRLKNRLHQKKRKLKNLLERQSQAIQELHRPFGAGICFGGRKLFHAQHHLQENGYKNHAEWLTDWKLARSRQFFVLGSNDENAGCQGCVARIQRDGTFLLDVRLPGTEEKRVTIGPIQFPYEAEKLRNVVALHAQLSKQNLPKITKQPKAGKPYSRFVYPEELSALSWRFYWDNNGWRVMVSFQEPAIDVQTRIQTGAIGVDLNADHLAWAELDRFGNPVKTGNISCVTYGKTTEQANAIIEAVAIALTERARQSGKPLVLEKLDFSQRKAQITEVDGQRYARMLSSLSYKKIHDAIFARAAKDGVEVKTVNPKFTSVLGRINYASRYGLTVHQGAAVVIGRRAFDRFAKNQHTGKNFKEFGLRETPIGRTGRDGVKTITAPDGRGAQVTFPYPEWNTRKHVWTLLGKVSRKMKAALAAQRVAERSDPPDRKAKSARMEPEIPVAVAV

SEQ ID NO: 15817 - protein, 414 aa, unknown
  TnpB Polypeptide
MRLSHKVEIQPTPTQRQAFLQHAGNARWAYNWGLAQHKSAYAAWVKAGKPKGWDWPTAIGLHKELNALKKKSPEEGGVSWMYEASKCAPQEALRNLDRAFKHFFRRCRNGNKRPGFPRFKSRHRGIGGFRLTGVIKADEKTVTLPVIGRVRIKPGDHGYLRFGRYSQVTVTERAGRWFVSIVGPEIEDGAPNGGPSVGIDVGVARLVTLSDGTIVENPRALRSSQRKLRRCHKDLSRKKKGSANRNKARLRLARVFARVANLRSDALHKATTLIAKRYGRCCIEDLKVANMTRSGGSRKRGLNRVVLDASFGEFRRMLEYKGRLYGCEVVAVPAQYTSQRCSVCGHVDAGNRTSQARFCCLSCGFEANADLNAAINILVSGSCPETQNACGEDGPGRAFGPWTASMKQESAAAI

SEQ ID NO: 15818 - protein, 510 aa, unknown
  TnpB Polypeptide
MWFVKVFMGGGCMECVRRAVAVEVENPLPELYAMEEPYRRIVEEVAAYVAERGTLEREKYKELYRRFRKLYPLSAQLIQQAINQGVETGKSFLEAKRDGRVHKPHPEVRHVSIRFAKDSWSYRKTAASVAPVKIAVSLPSGRREVWIKPHRRFWFYWWKVLRKEAELASTLVLKRRRGKWYAIFVFDVAPKKETPAEVVAFDVNENYVATAKVSLLSTADAVAQWNRQYLDPAVYSIRTDFGRLAKRYEAVRNAKLKELKRKYPFVGRDEEERRQNVADTREFRKFVRRLRERRRKEGRVRQIARQMTRSPAVIITEELGKNPQEEMIGLEKKRVKKRELRHRVKQTPFKKLIRAVEEKTAEAGSVVVYVSPYRNSKVCPIHFSLLKNGSGWHTLHCPHGHDVDRDHAAVLNMLWKITPEGAAKGMWWDLKDVKRRLEKGRGLVPKEAVMRRNPLVMWPIACAVWTSLKTLKASPQWPAVLARAAPMTPAQGADEGRARAPPRGAGTPAL

SEQ ID NO: 15819 - protein, 304 aa, Gloeobacter sp.
MLMNFKYRLEPTTEQASTLQCWFETSRRVWNFVLAERKDWINSRKAPLNACSIRSEFIIAADAPWPTYARQCKALTLARKHNPHLQAVHSQVLQQVLQQLEKAFISMREGGLGFPRFKKPGRLRSICFPQFASAPVRGERLKVPTIGYVRMRLSRSIPEGFRVKQVRVLRRASGWYAVMAIQSDAALSEAQPHGEAIGIDLGLHHFAAFSDGELVHRPKFFVDAQSKLKLLQRRVSRKKRGSNNWRKVQQKVARLHERIGNLRKEFHRQPAHRLCDRAGTIFAEDLGCQALAASMLAKHVLDAG

SEQ ID NO: 15820 - protein, 453 aa, Gloeobacter sp.
MLMTYQYRLKPTAAQSESMERWLQLLCKQYNYRLAQRFDWMEHHRCSLNACSIRSCSIATPADAPDYSSQKRDLRETKKRFPEYAQIYSQVLQDCIGRVKKTFDRFVKNDTSGNRSGRPRFKSQSRYRSFTYPQILAGWLEGNRIRLPKLGCLKIWMHRPLPPDFAVKTATITRKADHWYIAFVLENKDASTAEPVITPTVQNTTGFDLGLESFLVTDKADRVEIPHFHRRAEARLARLHKRQSRTRKGSSARRKANRKLSRAYQKVVNQRKDFHYKTAWQLIRTSEVIAHEDLTVQNMARTNLAKSIYDAGWSTFIAILTRKAANAGVRTIAVNPAGTTLRCSRCDRDVPKQLSDRWHECACGIRLHRDHNAAINIRNFAIARAVGHHDLVKNARRSPLRRETCAELSEASAKGRCHEPRALYCTGRFSKFVAGRCHETYALYSQKDVRTIE

SEQ ID NO: 15821 - protein, 387 aa, unknown
  TnpB Polypeptide
MRRLLKSFQTEINPAEEQKIKIHKTIGTCRYIYNFYLFHNKERYNAGEKFMSGKSFSIWLNNEYLPKHPEYSWIREVSSKSVKNAIENACTAFSRFFHHQSGFPRYKKKGRSDVKMYFVRNNPKDCLCERHRIKLPTLGWVRLKEKGYIPTSKDGYVIRSGTVSMKACRYYVSVLVEISAPEVNGNFSDGIGIDLGLKDFAVVSNGTVYRNINKTVQIRKLEKQLTRAQRKLSRKYENLRKGEFTQKANIQKQRLKVQKLHHKIDNIRTDHINKTIAEIVKTKPSYITIEDLNISGMMKNKHLSKAVASQKFYEFRIKLQAKCNENGIELRVVDRWYPSSKTCHCCGAIKKDLKLSDRIFKCDCGYSEDRDFNAALNLRDATTYEIA

SEQ ID NO: 15822 - protein, 155 aa, Mycolicibacterium sp.
TKSAKRLLRQRARKEARFAADVNHQISKRIVAEAERTGRGIAVEELTGIREVRKPQRATHSSWAFAQLGEFLTYKAARAGVPMVQVDPTYTSQRCTVCGHIDRRNRTSQPRFVCRDSGYTAEHADILGADNIAHRATSQRPPARNTSHPLTSSRD

SEQ ID NO: 15823 - protein, 564 aa, Mycolicibacterium sp.
MAAMGGQLRRIGDPVVAAAPVGVRVRTRLHLTADEAAVLGEVGQFLGSVYRCELAGRIMLGGLDRKAHAVWRAERKRAVTAVASSRWAGAITRAVEDQYQLGMRALDVEVSDLRAAIAVLESRCALRPGEVGAPDRDVAGGPRRRSRRTVRGYRTAAERFCKTRRLAALRARLAGAQAALAVGRPSITVGGNKLWRTRQNLDAADMGEWQWRDRWEASRMFLTADGESGKTGGNETIRVDQSGHLRVKVPAALVDRFGTHLRIAEPVRFNHRGQEWAARVDSRLAVRYDITFNPAKSRWYLDASWTTTPQPVADLATLRAGNVVGVDLNADHLAACALDASGNPIGEPITIAVETAGLRASHRDGRVRAAITALLDHAQRQRCAAIMVENLNFADARATGRETLGRGKRGKRLRRTVAGIPTAKFRSRLTGMAARRGIAVIGVDPAYTSRWGRQHWRKPLQQQTSDPDVVTVHHGASAAIGRRGLGVPIRRRPAGPRTQQRMRAGTPPARPDQPASTTRRCRSSGSPPRPPRRRGMPVHQITPTASGQHRSGRNTKQNSVSLSA

SEQ ID NO: 15824 - protein, 530 aa, Clostridiales sp.
MFPVWYGGISNGGIGMEWNMAYKTLMLQLYRPSKRKCAWMDRALLRYSRALQMLLTRFEYQVDTLVESGTKISQRKLLTLIDKKTGKDLNEFHVQPFKDSLKIEFASLAASYIEQKRKNPRARYPLAYLDPADYHAAVSRCIKRFEKEETSRGKFESDCSKVIERAGRPRSLYFGRYAVNRDYCLLYDKFKDRFYAKLYLLNSLDGYFSKTVTSSLSLRYVAKGMPAVSNQAGKKRYVIVPLAFGKRQYEDLKKALENPGLLHTARLTKKKGRYYLMVNMQCGPAPVLSTTSTMGVSRSPFGGLNYTVFDRGGKFLKHGRIAEQAAPNQILYSLCNRIVKTAWENRSQVILEANGGKNDRMPLQDGRCLSNGQYAALAGILKYKLPEKRLPPPVEVSANGLFFTCPRCANRTFRNRISSELFACIECGYASEAEWIGSENLAGRLIKYQRDKVPLTVIKQKDSLLFYNRTLGFECTLPQNMTDYQPMYDELSRYLRDLGGAFQNDPKKYAVWKKLCQSPDLRSAVRLILK

SEQ ID NO: 15825 - protein, 376 aa, Clostridiales sp.
VNNVEKSYKYRIYPNKQQEILIQKTFGCCRFVYNQYLAKRIELYKQDKSTMNYNTCSNDLKNLKIQYEWLKEVDAIALQSSLKDLDIAYQNFFRRVKQGDKKAGFPKFKSKKNNKKSYKTKYTNGNIQTLEKQIKLPKLGLVKCKVSKQIEGRILNATISQNPSGKYFVSICCTDVKIPQYLSTSAVVGIDLGIKEFAITSDGQHINNPKYLAKSEKKLNKLQKQLSRKTIGSSNRNKARIKVARQHEKIANQRNNFLQKLSTQLIKDYDVICLEDLKVKNMIKNHKLAKSISDVSWSEFVRQLKYKADWQHKIIQKIDTYFPSSQLCSNCGYQFTSTKDLSVREWVCPQCHTHHDRDENASINILNEGLRLLNIA

SEQ ID NO: 15826 - protein, 422 aa, Clostridiales sp.
MLILYGSAKIHLKHPTPDMKRNLVCLLQLSRDLYNASIMEISDSYKRFHALPSYDELTENLKSRKEYQAIGRKYSAVIIEALSNCKKYFRITQYRTDKSKQLLDKKNLNKIKPPCKSKIIFPVLLKNPEIENGFLLLPATNQTPVLKIRLPSAYAHHQIMRIHLHTSCNFRNWELIIEYPLQVIENPNLNVHKVLGIDLGVSNFCTCVTNAGDSFIVDGRRLKSIIQGYCKYEKKFHSHGKGTVRQASLQRKTAYRIRDYLNKSVKYIINYCINQHVHKIVVGWGIHFQTFELGHQNNQIFSYFPYAVFVKALKTKCHQNGILFLKTDESFTSQASAIDLDQIPAYVTPTEQRFSGHRRYRGLYITKDKIKINADINGAFNILRKCNAITDPDMIRLSSRGLAQPQRIHILSSETAPSFPNK

SEQ ID NO: 15827 - protein, 215 aa, Pseudomonas sp.
MAKRAYKYRFYPTTEQAELLARTFGCVRFVYNSLLNWRTEEFQKKQRRIGYCAASAQLSALKKQPELAFLNEVSCVPLQQCLRHQQVALKNFFEGRARYPTFRKKRIHQSAEFTASAFKYRDGELFLAKSSEPLNIRWSRALPSAPSTVTVSRDATGRYFVSCLCEFEPHALPVTPKMVGIDMGLKDLFVTSDGVHTRNARHTAKYASRLALAQR

SEQ ID NO: 15828 - protein, 265 aa, Pseudomonas sp.
MAKRAYKYRFYPTTEQAELLARTFGCVRFVYNSLLNWRTEEFQKKQRRIGYCAASAQLSALKKQPELAFLNEVSCVPLQQCLRHQQVALKNFFEGRARYPTFRKKRIHQSAEFTASAFKYRDGELFLAKSSEPLNIRWSRALPSAPSTVTVSRDATGRYFVSCLCEFEPHALPVTPKMVGIDMGLKDLFVTSDGVHTRNARHTAKYASRLALAQRSKTALLERLESDPDDAWDRVMEELGDTDNVTLAFRDDGNVQIFWTVPQEG

SEQ ID NO: 15829 - protein, 378 aa, unknown
  TnpB Polypeptide
MVNEAIRICIEEGIHGRLRLRDRIYKEFKERYQIVSVYAYSVAEVAWSIAKKCRNWHRKPYAKRLMMKMDVQNYSLYYSILSLPFRRGERLLIPLRYGDYQRAFLSDDTLRRGSVTLTESNVIVAFKKHVPLYDPKSRLGIDLNEKSAVCSDGIRYDLAEVARLHAEYGNRRSEFSRNHRDNRVEKRFARTRREKNRVRQLLHKIGKEVVEEAKSKSQSIVLEKLKGIRITHLRGNGEGKGRRRRVSQWPFRMFQAFVLYKANWEGVPVEFVSAAFTSQTCHKCGLVNRKLKLTEREWRCPNCGAILDRDLNAAINIERRGKIACLGEVRPGAQGTDEALKGNPTTPVILRAEALKLTRSTAKAESNRTLNQSLSLVL

SEQ ID NO: 15830 - protein, 375 aa, unknown
  TnpB Polypeptide
MTRRVKAIRATVSMKIAPSEPLLTLINNYVKALRFARPILVEGKCTEPKREGSARESPRGVVREVKGGRNIIYLPRSPRTVTGTPISIYKGWYNNPKKGRFPRVYKPTVWLTPKASYNVDFGTMTVRIASVGELSILGYPRNLKDYMSWRMKESRLVVRGGKAFLKLVFEKPLENVEPKSSIAVDINMSEIVVGKDDKNYVRIPTRLEEAHHRKSLTENLQKKYPRRWKESKTILNRVHTFHQKAKMIMEDFARKVGKWVVEVARMMGANVIKLESLKNLIKNVDRLPKEFRDKLYLMQYHRLQYWICWQAKKHGMIVEFVNPRYSSVSCPKCGRKMREVSHRWFKCNCGYENDRDIIAITNLNGRGSLTLSTLK

SEQ ID NO: 15831 - protein, 411 aa, unknown
  TnpB Polypeptide
MLRAIKMRIYPNEQQSTFIKQQLGCCRLVYNYSLDYKKSCPKASQTDVVNNLLSLKQQFPFLKDVHSKVLQQSVRDLNTAYTNFFKHKQGYPNFKSKHDNKQSCRFPIDAFIGINGNRISLVKALKDILFKCSVRDEKYINKNQDKVRYITLTRTCSDKYYLSILIDGDLARTMKPSDNTVGIDLGIKDFVITSTGEVFSNMHYKKNDIDKLKRLQRSLSRKVVGSKNRNKARIRLARAYEKISNRKEWYIHNVVNRLLDENQIIVMEDLNVKGMQRNHNLAEAISEMNWGEFRRILEYKASWYGKEVILINRYYPSSKRCNHCGYINRDLKLSDREWICPQCGEVIERDYNASCNILEEGIRMLEEGIIGLSSPKYKPVDHPTMDDQLGNKVLKSSDGEKQEKKEFHIFL

SEQ ID NO: 15832 - protein, 387 aa, unknown
  TnpB Polypeptide
MIVTYNIQLNMNQKAFDFWYNQLLTAQQAFNDCTSYIHCNDIPLSIKSVHDNVYHWMRNKYPSLSAQAIIKIYKDAIASLQSIKSNKHYNAKVPERNNLIMRMDKRLYTSLRLDGITISTGQPHKRELIPFILYPKASFMFKNYITHDPTMFERNGKLWLSVPFEVPEKPQQNDTCIGVDLGMRQLFVTSEGNSFRDAKYLENRRKVRHLKKQLQSKSTKSSKRHLKKVRRKERNQCKDMCYRASKTLINSTEASIIVMEDLKKIKKNTSRTEEGYKRKRHNNAQSQVPYYMFRQIVGYKAQLAGKQVETVSPMYTSQTDSRTNKRDGERKGRRYICSDRTILDADWNAAINIAKRSKHPTSSSIPLDGTLNPLMGRVQVNHPNVEQ

SEQ ID NO: 15833 - protein, 394 aa, Streptomyces sp.
MQLRYNYRLSPTPSQRLALARAFGCARVVFNDGLRARQEAHEAGLPYIKDTELQKQVITAAKRTQERAWLGEVSSVVLVQSLRDLHTAYRNFFASVSGKRRGPKTQPPRFKSKRDRRQPIRLTANGFSLRGNGRLYIAKVGDLRVTWSRPLHVPPTSVTVSLDAAGRYWASFVIDTAPDILPPIENEAGIDLGLGHFAVLSDGRNTWVSVIPLSRHHVGGVVYNRAHGSRQRQHQGGRQRRQRPHQPVQASRRSQDRQPRRPRSGLPQVHGRNHRQHAALPLDTPAPQLRRRKQGRASESPPGAAVRGQHRADLRPGRGSPVRTGVRHSEGGRPHEGLGWKLRPRQRTVRDRHAGGDQRPDRLPERRAPRPGLQPEVVAVPCPPQGARLPQEAK

SEQ ID NO: 15834 - protein, 454 aa, unknown
  TnpB Polypeptide
MVLQVVKKSYKLNICPLTNAKIKRLEDLENRYRTVLNVIKTGLEYWDALPGSDDLPFKKFNLQKLLYNGISKDSDLQSQQIIDAMSDAWSNRKAPCARFKHPAIPYNCPRSGKLGRTAKGNPVMAIATDDSGSKRMAIPIAMDGAWDRFRKEIDNGWTFTYFELHYRRSKGIDRWCVIVTLRKEFFVKDLELSRTVLGIDTGSGTLAAGSVIDKDGRVVRQRYFGRDIAHRQRDIGLRRSKLQGFADKGSRKARKKLNALKGYEENLVKTRCYQVAHELVDWALEHGSMIAIEDLKGLHKPRKKTKNKDGKRKGIPRFIEKKINRKVHRMPTDIFPTALTSVAHQNCTGVGKVDPSYSSQTCSRCHTVNRNYRKGRIFVCGNCGLVMNADRNASVVIAGRLLSERPKVPLTEGQISGRGDRVNGHDWDHEGVRDTGRGPAQTPESNPVNLFTGG

SEQ ID NO: 15835 - protein, 385 aa, unknown
  TnpB Polypeptide
MLKGGEGELTVTVRMKVSPEPENQQALLDLMRRYRDALNYSIRAIIANKALSLSKAHRLLYNDLRERFGLPARTAQDCYREAIAIAKSWLKNPRRGNKPMARSLSMWLTHELGYRVKGDHVELAGSYRLRVIGWDRRYDDFPSREARLVFRDGKFTLYISKRVPRPAKYAPKGVLAVDVNERQVVVGNSSVEVRIETPVERALRYRRLAERLEEKYSSSRYRAWRRRSGVRRRVRHFHRKARNIIEDWARRTAHIIVSLAKQSQLAVAREDLTGLIESLRKLPKGHRTALIALGYRRLAFWVDWQAEKNGVPLFIVDPADTSSMCPRCGSELVEVGHRRLRCPRCGFEGDRDAIAILNIEGRALSKMGGNSDLPDCPPNDRCKPK

SEQ ID NO: 15836 - protein, 403 aa, unknown
  TnpB Polypeptide
MRNTKHKLFRDKTLRHLHDDLNIIGVVRNHFIALCMRYYRRYGKGLSYKQMSKHLTKLKKLEKYEHWNIPYSWALQNMLKRLAQSFREMKTLGRGHPKFKSCKKHKGMTFDGGQAPLEKVLDKQKQERNHPTYKIRLNGRWYHFALHRAIEGEILRVQVTRDALGDVYITLTEDFTEVRYEPKTGKAEGFDFGIKDFLTGSDGEPYPSPMFYKQNAEHLAAAQKEHSRKVKGSHNRERSRKQVARIQKKTVNQRTDHHWKLAIDLCRSFDILFFEDLNLAGMKRLWGKQVSDLAFGEFYQKLRHQAKKRIRAVLKIRQWTPTTKCCSVCNHKNENLTLADRNWTCPDCHTYLDRDQNAAVNILKEGVASFALGEVNPIVLFNRIVGVSVEASSPLLKTTNASA

SEQ ID NO: 15837 - protein, 554 aa, Rhodococcus sp.
MAGRVVRRAFKYRFYPTAVQAEQLARTFGCTRYVYNRALAERTRAWSQERRRVTYADTSKMLTDWKRDAETEWLSEPSKGPLQESLRQLQGAFDRFWRKQTGYPQFKKKGRSKESATYFSNCFTYRCGQIRLAKQTEPLDVRWRPLPEGAVPSQVTVSRNARGQYHVSILVEDTIPELEPADRVVGLDAGITSLYTLSTGEKITNPRHERRDRARLAKAQRVLARKEKGSRNRAKARLKVAKIFGRIADRRRDYLHKLSTRLVRENQVIAIEDLSVRNMVKNRSLSRAISDAGWSEFRSMLEYKADWYGRRVVVIDRFYPSSKTCSVCGGARVDDAADRAGVGVPMRRRPRPGCERGEEHFGRRTDGGSLRRWCETAPRLGCGEATVGETGTSGREFRGDSRSFTAERKSTSEANAMTLSASAITESVADRLGHEAIVWLTTIGRKDTPVPTPVWFSWSGTEFLIFSRPATAKLANIGRNPQVALNFNSSPTGGDVSVFTGKAHVDTDGPTAEEWETYVEKYREHMAGLDYTPEKFRQDYSTLVRVTPDRLRGW

SEQ ID NO: 15838 - protein, 490 aa, Frankia sp.
VVVVPVELDQEGAEVVADVSHDLFAAFGHLGVEHAPPVLRHEDQVDVKRGYHVSATAISVVCRHETKCMMMIVPIVRYRYRLNPTPGQQQMLARTFGCCRVVYNDAIRCRDEAYKAGEKLSASQVQTRVITEAKRAKVREWLGEVASVALVQSVGDAHKAHRNWRNSLSGKRKGPKAGRPRRKSRKDHRQSFRLTRNGFSLRDGGVYLARIGVVDVVWSRELPAPPSSVSVIKEPDGRYYASFVVERVDTALPTTDRECGVDMGLDMFASIAYSDGTDEKVSNPRYLRAAERRLARAQRALSRKAKGSKNRQKARHRVAVEHRKVREKRADAQNKLAHRLARDNQAVYVETLGIKGLARTRLAKSVNDAAWGRFLGKVKNKADQYGRLFHPLPRQFPSSQICSVCGHRDGPKPLKIREWDCPHCGTHHDRDLNAARNLLFEGQRQVAAGRKGVAEMPRQAETENARGAGVSQGGSSAVGVEAGTHRGDRA

SEQ ID NO: 15839 - protein, 286 aa, Okeania sp.
MKYLNVHQGQALRDLERAFKNFLNIPRCGFPKFKKKGRKDSFYLEGSIKITQGNYIQLPRIGVVKTYEILPSVPVKNVTISKRADSWYISFKYDFEPYPTQKQREIIGVDIGINTLATCSDGSKFANVKAYRKAKKQLVRHQRAVSKKVIGSKNRLKAVKKLAKVHKKVADIRADTLHKLTTWLAKNHSTIVIEDLNVSGMLKKRCDPATTPVARERAPRHHKLASAIADCGFYEFKRQLTYKCEWYGSELVIADRFYPSSQICSNCGHQQKMPLHLRTYVSAALR

SEQ ID NO: 15840 - protein, 298 aa, Okeania sp.
MLIYEMKLQGTQGQYNQLDSAIRTGRFVRNRIIRAWIDREIHSRNDAYKYCTKLAHNREFPWTKQLNSMARQAHAERAWAAIERFYRNCKANVAGKKGFPKFKKYLVRDSVEYKTSGWKLSEDRRYLTFTDGFQAGTFKLWGSRNLHFYQINQIKRVRVVRRHDGYYAQFSIDHTREEKKNLTGKQLGIDLGLNHFYTDSAGEKVDNPRFLRQGERKIKKLQRRLSRTQKGSQNRSKARNRLGRAHLKVSRRRNDWAVKLAQRVIQSNDLVAIENLKVRNMMKNHKLAKSIADAAWYR

SEQ ID NO: 15841 - protein, 336 aa, Bacillus sp.
  misc_feature (243)..(322): Xaa can be any naturally occurring amino acid
MYVCCTIDIYRKGGEMMMINKAYKFRIYPNKTQATLINKTIGCSRFVFNRFLSLWDHAYKETGKGLTYGTCSAKLPAMKKEFVWLKEVDSIAIQSSVRNLADAYTRFFKKQNSAPRFKSKKNNVQSYTTKQTNENIAVIGNKIKLPKLGLVRFAKRREVKGRILNATVRRNPSDRYFVSLLVETEVQELPKTHSHIGIDVGLKDFAILSDGKPYENPKFFRSLEEKLAKAQRVLSRRTKGSSXXXXXXXXXXXXXXXXXXXXXXXXXXXXXXXXXXXXXXXXXXXXXXXXXXXXXXXXXXXXXXXXXXXXXXXXXXXXXXXXICFKPIMFLFWISK

SEQ ID NO: 15842 - protein, 357 aa, Deinococcus sp.
MNQDTTHTHHVIRVDRSAYAQLRQAVASGQLQPTQEDLDVMTGGQVYRPAAQLLSVQQLVHDRELQLGHLAITGEFYRLPEQEYTSIIRASLGTYRQYPGVYPLLTGLLAPMTQADETTWLAGVRLAAAQGRQLASGADMVDDLWTPTAWLRDRTRLIELGGEWFVVLYVAQPPRRPVLAGRAVIGVDIGLAPLATAAWGQQHAVTWRLAEPAVPAGEPVEVRALAEILTYAAARAALEDLTRQVLRQANTLVLETIGYARFRGNFTANARRRAVADWHQSWGPQRAYARGIRVVRVPAAFTSQICSACQTHTLGIRQGATFTCPNGHRLDAHVNAALNLVRRYWGLQARARRRRVA

SEQ ID NO: 15843 - protein, 552 aa, unknown
  TnpB Polypeptide
MKKKSKDIVFRMYKTKGPDLLLPLYNILQGELDRILATPTYVEALSKIEFKYKNEKGEEHSKLNGMLWKEIHEIIGDSLKDKVPDAWYIRILYHNIISLLKSRQEQIKIYEILKSNQYKIDSTLRNKLVEEKLYPTNSYLKNLAAAKDMPALPKRKTFILDFSVSDKQMFRVGENSNVYEIKIHSRKEVKDYNLETGWILFEMFLPTYIRESFTGKTAKPQFYWDHNKDEFICAIPCEIKKLPHEYENVMGVDLGKIKVYSATVVRKDGSISDEYVPTEELQKLVDKLKRMNQHINSVYEKRKRSSKYGNFTERQARRKLDYKRSRNKRTKLQFAIARLVAVEVVNIAIKEQCKEIHLENLSWVKSSVGKWNFAQVQACIGEVAELFSIKIVKVSAKNSSKTNPVTLEVGKISNRDVTFKDGQRIDRDQLAGLNLALRDPKKQKQRKIKTLNIRDSVVIQRQSRRFKNYLMKKSFTEMKSKRKIHKEYLRAKQESSIPNLIKKENKKIVMFSHDKAKSDFAIVSVYKSSNFKLEYYFTNNLQFKNIYTDLLQ

SEQ ID NO: 15844 - protein, 471 aa, unknown
  TnpB Polypeptide
VYRFRIYPNKSQRELFAKTFGCVRFVYNRMLAEKKAYYEKTGKNLSVTPARYKSEFPWLKEADSLALCNAQLHLQTAYKNFFRDASVGFPKFKSKKKPVRSYTTNCVNGNIVLQNGRLKLPKAGWVRIRQHRKIEEGYQLKGATITQEADERYYVALLYSCEEPVNEIRKAVNKIDPTICIYGEGWAAEAPQYPADSLAMKGNVARMPDIAVFSDELRDGLCGPVWKKEKGAFLAGVPGAEMSVKFGIVGAIEHPQVRCDSVNYSQKPWAEQPTQMISYVSCHDGLCLVDRLKASMPGATPEQQVRLDKLAQTVVFTSQGIPFIYAGEEVMRDKQGVDNSYKSPDAVNAIDWRRKTTNGDVFMYYKRLIDLRKSHPAFRMGDAEKVRKHLEFLPVEGQNLIAFRLKDHANGDSWEDIIVAFNSRMTPARLEVPVGKYTVVCKDGVIDVRGLGTQIGPEVIIPGQSALIMYK

SEQ ID NO: 15845 - protein, 440 aa, Kitasatospora sp.
VAQQVITDALSVAGSSVCVVATTHVKRAFKYRCYPTDAQAAELSRTFGCVRLVYNLALAARAQAWAERGERVGYGATSAMLTGWKRTAELAFLSEVSCVPLQQALRHLQAAFAGFFAGRSGHPRFKSRKRSRATAEYTRSAFRYRDGQLTLAKTAGPLEVRWSRPLPEGAVPSTVTVSRDAAGRWFVSLLCEDPDVRPLPVSHTAVGVDLGIAHLAVLSTGEKIANPRHERRDRERLARAQRELARKAKGSANREKARRKVARIHTRIADRRRDFLHQLSTRLVRENQAVVVEDLLVRGMLRNRRLARAIADAGWAELRSMLAYKCAWYGRELVVVDRWFPSSKLCGACGTVRDHLPLHVRTWECACGAVHDRDVNAARNVLAAGLAVAACGDGVGPQRSTPGGQSSTKQEVVPATALAHGGPAARPKGLPGQSVIVPRR

SEQ ID NO: 15846 - protein, 459 aa, Kitasatospora sp.
VFEPGGVPAGGHFVAVFGHEGRVRGRVLTGRVVVASCRGSGGYGAVVQLRYSFRVYPTTGQRAALARAFGCARVVYNDALRAREAARAAGLPFPRVGDLSKALITGAKKTPERAWLGEVSAVVLQQSLRDLEAAYRNFFDGLKGKRPCTGAPRFKSRKDTRQAVRFTANARWRITSCGKLSLPKVGDLTVKWSRTLPSTPSTVTVVKDSAGRYFASFIVETDPAADLARMPDTDHVVGIDLGLVHFAVLSDGTKIDSPRFLRRAEKKLKRAQQTLSRKEKGSKNRDKARCKVARAHAQVADARREFHHRLSTKVVRENQAVAVEALSVKGLARTRMAKSVYDAGWSAFVTVLEYKAARYGRRFVRIGRFEPTSQVCSHCGVKDGPKPLHVRMWTCGACGAVLDRDVNAAVNVAKAAGLAVTACGAQVRRAPVPAPREEAGTHPKRPTLPVREQAGIPGL

SEQ ID NO: 15847 - protein, 375 aa, unknown
  TnpB Polypeptide
MLKAYKYKIKPNQQQEELLQKFFGCCRYIYNWGLNKRTSAYKENGTKVSYVELARELTAIKKTEECIWLNEAPNESLQQSLRCLDNAFTNFFRKKGKYPRFKSKKHTKDSAKFISSVHFDFEDWKVKLPKLGWIKLCKNKAFDQSICKQGTCTVSRDHCGTYWCVITVDDLQPKPTKAKLVKDNAVGIDLGIKDYAILSDGTKFTNPKHLEKAQRKLAWLQRDFARTKKDSKNHERMRIKVAKCYKSITNQRNDFLHKLSAHLVKNYDVICLEDLNVKGMEQNHHLARAIQGAAWGEFVRQLEYKSEWYGKNVLFIGRFEPSSKLCHKCGYINKDLKLSDREWICPVCGEHHDRDVNAAINIREIAFDKQNLVRV

SEQ ID NO: 15848 - protein, 363 aa, Pantoea sp.
MSIQTKTLSVRVKDKHAALLRQMAFEVNQVFNLANEITRAAYSNAGAFGPQVPKWLTAYDVQKQTAGLRKEKGYQIDSASIQEVIAVHGKARRQFKRSKLRWRISGGARRSLGWIPFKVGFAKWQNGQVKFAGRLFKVWDSYGLSACKFRAGSFSEDSRGRWYFNVAVDYEEQPTEGVSAVGIDLGLKDIATTSDGDKLAAGRFYRDLEPALGKAQRANKKRRVKAIHAKIKNRRKDTLHKFSTAMVKANAVIFVGDVSASKLIKTKMAKSVLDAGWSMLKTQLKYKAIARSVMFEVVNESYSTQACSCCGSISDNSPKRRAGLRIRDWTCCECGTAHDRDVNAAKNILAAGHCRLAVGIPAL

SEQ ID NO: 15849 - protein, 491 aa, Pantoea sp.
MSRLAITCFQFRPEVTTHFSHALTDARKVSVPKNQSTICRDKNAVNMQQKADMSVFLKTSSTLDFRLNTWLFIQHLFTGHCMHMLIVKAFKYRLEPTNAQAQRLRQMCGCARFIWNYGLAETQRMLDAGQKLPTAFALNKMLTAWKGLPELAFLSEAYTDNLQQKLKDLHEAWKRCFDKRLAAKKPVFKHKSKGNDSIRFVNFDKYCQLDRKRVKLPSGLGWVKFRQSRAVVGKIKNATVSQHAGGWYISFQVETEVEMPVHPSTSAIGLDAGISKLATLSDGTVFEPVNSFKNNQAKLARLQRQLARKVKFSANWKKQKAKISRLHVHIANIRRDYLHKVTTTISKNHAMIVIEDLKVSSMSKSAKGTKEKHGRNVNAKSGLNRSILDQGWYELRRQLEYKQSWLGGQVLAINPAYTSQKCACCGHTHKDNRQSQSRFICITCGYQENADINGARNILAAGHAVLACEVNGALMPSAAGTRRLSNQVATL

SEQ ID NO: 15850 - protein, 363 aa, unknown
  TnpB Polypeptide
MEFTTYVYNLLPTNEQKDLLQQMLNQQDEVYNSLIEFAAMQRAAGRQDGEVKAQVMGAVLAPWLSAKSVKTIKMRVCRQIDRMACGQIRVLCKSGPYQKNRTIEFPTVNLYGQYVEIPFVGRVLMNMHRPLLGYARIYSVVIREYLYGSAYEISFRLAYEMEEPVPGRISGGRAIGLDYKQDGLFVDSNGNSGEYPGFIRAGRTKVNDLYRTAARFKVGSSRWLRFMRRAAKLELHMQNQRKDWQFKQAARLANENDVVCVETLDLREMREKNASLALKIYDNNWPGFKAKLKRKLDQQGKPLVEVPKYYPSSQICHNCGYRFGKIPLAQRYIWCPNCGCGMDRDINAACNIRDEGIRMLPAA

SEQ ID NO: 15851 - protein, 442 aa, Leptospirillum sp.
VTKTKWTCIKKTQCLPCLSSIDLSIRPSVMNDMKTRQAFKFRLGPTSEQDSVLSRHAGGVRFVWNKALDLQTKRRDAGMPLLSYGDLAKLLTLWRSSEEYGFLSLGPVHPQQQALKTLDRALWEALDRRNPKRFPRFKRKGEGDSLRYPDPLQIGLDLSTRDKDGRIVLPRIFLPKVGWVKVRLSRQIAGEIKNATVTCKAGRWAVSIQTETDVPEPEMRTSREIGLDLGVVSFATRSDGTRLHPDPAILSAMKRAEDRLRREQRRLSRKYRKGPKSRNFAQQKLRVARAHEKLSDMRRDFLQKTSTAMSETQAVVYIEDLKIRNMTRSARGTKDAPGKNVRQKSGLNRSILSQGWGTFLSLLESKLARRGGRLVRVDPRNTSRTCAACGHVSPENRPDQATFRCVVCDHADHADVNAAKNILRAGHARCACSEAQTSESAA

SEQ ID NO: 15852 - protein, 404 aa, unknown
  TnpB Polypeptide
MKRTFKYRAYPMVAQERWLFDELKHQKKLYNYMLQMRSQMWEYGSISVSMYDQINHLAKLRESNLHYSEHPQDMQVSTIKRVNAAHQNFFGRCKDPKAKKKGSPKFKRSVRSVAWNLRKHKLKTGERVRQNPIRGTGARLNRLKVPKLGEVKIRQHRPLIGDPKEVTLKKTARGWYCFIVCEVPDTLRCVPKSACGVDVGTHDFLTTSDGETTPNPRFYRTAERKLAKLQRVLSRRQRGSNRWYKARVALAKQSDIVACQRLDFIAKTAYSLFHHKGFDAVVAEKLKPSNMIKNRYLAKSISDAAWGMFFDWCDWVAKRDRKHFHQVPSHQTSQTCSQCCQKSKVKLGLAQRVFHCPSCGLKLDRDHNAALNILHRAACALRGEVWDTILYETRNPLLQQACWG

SEQ ID NO: 15853 - protein, 492 aa, unknown
  TnpB Polypeptide
MKLRNLDKRAYKILKLITKFSKNLYNEAIFLERSAYKELSNLNSNRENKLTNMEMVQIVSDINMPNKAPIELSEKERIYLSWRYKLNNLPPDQSNKPFSSFINYNILDKVVLSANYFFLHSASSQAILQQVDKNYLSYFKINKIQTKKPPYYLPKDEHFQVTYKSIPKKNCEKGIFKIPFSTDFKEYAFKKSLLTDIQIKLPDKFKDINKYKINQIKLIPKNKARYFELCIIYTTSCNKIEDLDKSQYLGVDLGLNNLMSCVSTTGSPFIINGRKLKSYNQWYNKEISRLKSISDKNTKSPKITKKMDNIIQKRNNREEDCMRKSARIVINYCIKNKIGNIVVGYNKDFKRNINIGKKNNQNFVQIPIFKIRQKLKYLCKYYGINYKEQEESYTSKSSFLSQDSIPDYKDIPKKGTLDYIIYNSVTNQDNQTKFSGKRISRGLYKDYNQNLILNADINGAANILRKSTFNDKEVYDKVRNTILEYPNMLKVS

SEQ ID NO: 15854 - protein, 438 aa, unknown
  TnpB Polypeptide
MAQILSDVVLPNLMPIKLTDTQRIYLAWKYKLINFPPDKMDEPFSSFVNYNILDKVVLSSNYFLLYSASSQAILQQVEKNYLSYFRINKIQIKKPLYYLPKDGHFQVTYKYIPKKNSEKGIFKVSFSRDFKKYTYKKRLLTDIQIKLPDKFKDTDKYQINQIKIIPKSNARYFELCIIYTTFCEIIKDLDKTQYLGIDLGLNNLMSCISTTGSPFIINGRKLKSYNQWYNKETARLKSISDLNPKSPRITKKMDNIIQKRNNRVEDYIRKSARIVVDYCIENKIGNIVVGYNKDFKRNINIGKKNNQSFVQIPLYKLRQKLKYLCEYYGINYKEQEESYTSKSSFLSQDPIPDYNDIPKKGTIEYIIYNSATNKNNQTLFSGTRISRGLYKDHKQNILLNADINGAANILRKSTYNNKEVYDNIRKTILEYPKVLKVA

SEQ ID NO: 15855 - protein, 367 aa, unknown
  TnpB Polypeptide
MPNNNILIEVFNVTVCILVRHDILMIFEEFDEGLIAQCIRIEPESIHANLYKTSQELLHLCNDILCRKSLLHIDSVVEYREVLNVHTTRFEVLTQLIDAHPKFKSKKSAKQSYRTLNIDNGIRISNKRIHLPKIGWVKVHQSMEIGAIHNATVVRTATGKYFVVLNVEYDHQPMPNNGCVVGVDVGLKEFYSDSNGTVVNNPKYLEKKAKKLAREQRRLARKQKGSHNREKQRIRVAAAHEKIANQRNDFLQKQSTMLVRENQTICIEDLNVKGMLRNHKLARAISSVSWSSFFGMLEYKAYWYGCTVVRVPTFYPSSQTCSCCGYKNVAVKNLSIRQWECPSCHTVHDRDKNAAINILRKGLEKSA

SEQ ID NO: 15856 - protein, 393 aa, unknown
  TnpB Polypeptide
MKKLLTTRNFRLYPTKEQKCLLDREFKFYRHYFNALKLAIAKKRDESLLPLVEQDILDVLKSTKEKILSLDFDFKKYYYRCHIKFASDNMMNAFKYPRKKGLKRYRLNKTTIKIDDPSCYVMLNHLYFKNTEKIKIRPKVETLSGVSFYTITKNRDKYYLTAVSFVEEIKARKTGKGCGIDVGFRNGLVLYNTDGAVEEYKFQNVKVDRLFKQVEFYKKTIEHLEEKNKDYLKSKNYQKVTNKLARTYERITNIRNHEFNLVSEALALKYDLIVFEDLEIEDIYKGNVKRYEISKASFGRFFDYVKNKCQKYGKYFIKTPRLFPSSQICSECGVIHREMKDYRDMKMMVCECGYKEDRDINAAKNILRYGLEEIRRRNQNSKNKFKKSKNMEV

SEQ ID NO: 15857 - protein, 492 aa, unknown
  TnpB Polypeptide
LVFLLLLLRRAVAVELEVARGLNRLLYSVEAMYLNIVREVVAYAVKHNITNPTQLHRLFYSKYRQEYPSLNSQLVIQAIRQSSEITKSFIEKRRRGLVGKSYPEVKAVSIRFTEMAWSYGKFINSTAPVRLELSLPGGRTEVWLRPHKRFWLYWWRVLNGEARLASTLIVKRKVNKWYAIFVFELKPREEEPKSIVAFDINENTVAVSRVDLPSTVDKVASWNRRYTTPELYTIRTDFGRLAKRYGRIRNAIIEKLKPGFALPSGKYVNITNTREFRKCVKHLRERGRKVGRVRHVANELTRIPAIIVTEELGSNPQESMINGIEKDELRHRIKQTPFKALERAVEGKALERGSRIFRVPAYRNSKTCPVHFTKLKSTNDWHTLQCPLGHYVDRDYASVMNMAWKITPESWTKGVWWDLRKNMNWRKHESESNPLIPHPIVKYLHVTLKEFTASEEWPAVLARGDPMNPTGEANEGGGEETSHALSRQGGGQ

SEQ ID NO: 15858 - protein, 327 aa, unknown
  TnpB Polypeptide
MKHIAKLKKRSKYAHWNLLGSQAIQDIAQRIEKAYQLFYRNLKHGIKTSPPGFKKVKKYKSYTLKQAGWKLLDGNKIKIGNKIYKYSKSRELPEKIKTVTIKRDPLGHIYLYFSIQEEIEVPDRQDNISIGFDFGLQTFLVGSDGTRYDAPMYYHRLQKDLAKTQKSLSSKQKGSNNRNKARQAVYRVHRRISNLRRDYYFKLSHELTNKYDYIFLEDLNLKGMQQLWGKKISDLGYAAFVNILQHIALIKGTKVVFIDRYYPSSKTCHVCGAVNHNLTLSDRTWTCTSCDTSHDRDENAAINIHMEGTSSIGLGNVRPASVETVSA

SEQ ID NO: 15859 - protein, 473 aa, Haloterrigena sp.
MAATNEEERTRTNTFALAPKAEWKKVCLIELLDSAAALVNIVTYHRRQTYFDDDQTRSDVWNAITKTEIRNRFRPVLGRAITDKMLDKCDEQWDAFFEQLDDYYDGEREDKPGVPGYWKDDGKRVLKACIRNDAYTVEWGEHSRIELALGSELKEKYGIPLNQRIRVPIKGNPQYDGHGGRLELVYDRSTESFTAKQPVTFLHDTTRATDSSDEGCVAAVDVGANNFVAVTTTQGHQRVFHARPLFDRFNHYTERIAELQSQLPENADSSQLIEKLYDKRTSHRNHAQDALVRHLARLFSEWGVEAVYVGKLDDVREKHWSATVNEKTDLFWAHGRFRRRMQTVLEEECGVSVEEKSEAGTSSQCPRCDEGTHVSRNGDVFQCGGCGFEGHSDVVGSENFLQSVVDGDVDLTGERPMARPVDSGQNGPERGHRKVPRLEWNDHCWRQRGHATKEEPTNRSTRKGNLASESGTA

SEQ ID NO: 15860 - protein, 378 aa, Nocardiopsis sp.
MSSQNRRVSLTDADAAIRQARKDLPWLAALPAQAGQQVLKTYFRAWRNCWAGRAGPPAFKARLRTRMCVDIPQGRDLNIQRLTRRWGIVQIPKVGVVRFRWTKNLPVGKHADAANRVTGARLVREAHGWHVVLRLRTDVKEPAPHTGPGVGIDRGIAQPLALSDGTFREHGPWLSPGEQERLRRLEHKAARQRRQRTPGQPSSNRLRRTYDQIARVRAKAKRRALDWQHKVTHTLAQEFGVVGVEDLHITSMVRSARGTVDAPGTNVAQKRGLNRAIATQAWGRTITLLAYKLADRGGHLVRVPAPNTSRRCSRCQTITEGSRESRDRFVCKAPGCGHIAHADTNAACNIEHAVKQQAPQDIVGARTWSPRRQAGCEA

SEQ ID NO: 15861 - protein, 431 aa, Okeania sp.
MVEKAYQFRFYPTPEQENLLRRTLGCVRLIYNKALAARTQAWYENKERVGYKQTSAMLTHWKKQEDLDFLTEVSSVPLQQGLRHLQTAFTNFFSGRAKYPNFKKKRNGGSAEFTKSAFRWKDRQVYLAKCAEPLPIRWSRQLPQNCVPSTITVKLDPSGRWSVSLRVNDPRDLKLDPATKQVGIDLGITSLVTTSDGEKIANPKNINKLHKKLRLAQKSLSRKTKGSHNYQKARLKVARIHAKIKDSRLDYTHKLTTQLIKENQTIVVEDLAVKNMVKKRCDPATTPVARERAPRDHKLARAISDANWSELVRQLEYKADWYGRELIKIDRYFPSSKRCSNCGHVVEKLPLNIREWDCPECAAHHDRDINASINILAAGGAVSVCGATVRPYESKSQRAGALKQKVSNSDARESRAVTQVQRREDVKNPVS

SEQ ID NO: 15862 - protein, 482 aa, unknown
  TnpB Polypeptide
MAKAKTPSYVLELELQVNKRQRDFLEKKMRIAKAIYNTCLGEALKRLKAVRADKTYRELVAEKGGVDRVKALRGIELAYGYSEYQLHAFVVASKHHFGSLGIDECQKLATRAFQAVEKINYGQADRVHFKSQLDNISIEGKSNNSTIKRKEGYITFGRGNVFDYLLKPNDVYAHLALMDRTKYCRIIRREIRGKQRYFVQFVQEGYPPQKRNRKLIAEDNLRVGLDIGTSTIAIVSDERVTLRELAPEINEDAKELRRIERAMDRSKRATNPDNFKENGVAKIGARWIFSKRYLKLKAKRKDRHRKIARKRKQAHEQLANDILALGSDIRVETMRFQSLQKRAKKTTRNKQNGKINKKKRFGKSIQVHGPALLLEIVARKLGYQNRPLQKIDTCATKASQFNHATGEYTKKQLNERWNADILGVPIQRDLYSGFLIGNTTDSLDSVDVDLCNRKWENFVKLHNQEVERLRCSQSKTLRWFVA

SEQ ID NO: 15863 - protein, 491 aa, Cyanobacteria sp.
MAVRSTQKRKSSKKSAVDSTTADKNLKPFWGELCQEMSNDLWSLTKIDWQDLVSTYSSSYVSPTLANSWFATTQVSLLKEKWWKTYWQSFTSSLADYTDYASTKSKSRKIQVYPQKELRTVWREWLSASRYCYNKAMATLRDKYVAKEKLPSAYDLRKMVMKDLPEWVNNSPYNLRGASVIDAHRAFKTTDGYNKKTPKFRSCRSPVKSFKLQKPNWKQGVTYPTHKTLDGIKLATLAVNSSEELPLEMPSDFSIVLDRGRWFITYTLKEKTEHIKSCEKPIFSDSGVRCFQTLFDGNNIIEIGKDSISRIIVLCKRLDSILSQVAKATGRKEKRNRFNLRKKAERLRIKIRNLVDECHKKTACWLTKNYTDIFIPTFESSQMVKKTKRKLNSKTARNMLTWSHYRFEQTLKFHCQKRGVRLHLITEEYTSKTCSKCGHIHSKLGSNKHFKCPDCGHSIPRDFNGAINIALKTLSFEKGRLDNAELHDACS

SEQ ID NO: 15864 - protein, 337 aa, unknown
  TnpB Polypeptide
MEVSKTVQAGVVNLTNQKRTDLETEYRNFQKYIQGEEDVELYSAIKQDATRYYENIKEDKEYPISVRGQLIDIQECSSDIADYFVRVPTAQRYGGLNLPVKTDTEIRDDWEIGESKVIKEDGEFYIHISVSYEVEPVSNLHGVYGIDLGLRNPAVGVALVGGEGSCPKVEAVDFHAQRIQKIQSRYSYLRRNTSTGKSWNSREHDKVNDALHKATTEIADYCQEHKLAVAVGDLEGIQDQDKGREMNRKLHRFPHYRFKQLLRYKLKERGLPLIEVDEAYTSQTCAKCGEEGDRYRGRFRCSGTETNSDVNGAWNIAKRAASKADISSLDDAGATVA

SEQ ID NO: 15865 - protein, 418 aa, Snowella sp.
MITLTYEYKLIPDDAQVQVIEDTLSVCRSVWNFALRERKDWLSSRKCDINACSLEKEYIIPVDAPYPNYHVQAKYLTEAKKTSERLRSVNAQVLQQVLRTLDRAFLDMKSKKLGFPRFKNKYRMRSFVYPQMLKDCVKGNLIKLPQLGWMKFRKSRDIPEGFEIKQARIIRRASGYFVMLSLQLDVNVPDVPFRGHPLGIDLGLDKFLATSDGQLVNRPRFLDRLQRELKLLQRGLRNKKKGSNNRHKLNRRIARLHQRISDTRKDWHFKLAHSLCDQAQSIFIEDINFISWAKGMLGKHTLDAAFGQFVNILKWVAWKRDVFVAEVDKNYTSQICPNCESHTGKKLLSEREHNCPECGYKAHRDIAAAQVIRNRGIENALGHGVSKNVCGDGLAGAAMSSKESAKQKLLSVSLRIPR

SEQ ID NO: 15866 - protein, 388 aa, Methanobacterium sp.
MLRAYRYRMYPTKNQEEMVNKHFGGCRYVYNWGLEYKVRTYYETGKSISRFALNKEITLLKQSEVWLKEINSQSLQGATLNLDNAFARFYREKKGFPHFKSKKNRVQSFNVPQNYKVDFNNNEIYLPKIGWVKTKLHRQFKGKTQTATISKTNTGKYYISILIDDEQSLPEKVKFNQKTTVGLDMGLTHFLITSNGVKVNNPRPLKTKLRKLKREQRKLSRKQKGSNNLNKQRIKVSKIHERIRNIREDFQHKLSKSIVCENLAIAIEKLNIKGMLRNHNLAQSISDVGWAGFIDKLKYKTEWYGKTLHQIGQFEPSSKICSNCGYPNCNLKLHHREWICPNCEKRHDRDVNAAVNIRDFALDKQNLISTVGTTEFKASLRNPQKWIQ

SEQ ID NO: 15867 - protein, 204 aa, Methanobacterium sp.
MGLTHFLITSNGDKVNNPRPLKQQLKRLKREQGKLSHKQKGSKNRNKQRIKISKIHERIQNIREDFQHKLSKSIICENQAITKENLNIKGMLRNHNLAQSISDVGGAGFIDKLKYKSEWYGKTLIQIGQFEPSSKICNHCGYHNCNLKLHHREWICPKCEKRHDRDVNAAVNIRDFALDKQNLISTVGTTEIKASLRKPQKWIQ

SEQ ID NO: 15868 - protein, 379 aa, Methanobacterium sp.
MFRAYKYRMYPKREQKDIFTKFFGAIRFVYNWGLEQKIRTYKENDKAISRFALNNELVTLKKENTWLNEVYSQSLQGATLNLEDAFKRFYRKQNDFPGFKSKKNRVQSFNVPQHYKVDFDNNMIRLPKIGWVKTKLHRTFKGKLKTATVSMTNTDKYYISILVDDGEEPPVKMGFSKGTTIGLDMGLTQFLTTSDGVKVDNPRPLKQQLKRLKCEQRKLSRKERGSNNWNKQKLKISKIHERICNVREDFQHKLSKSIVCENQVIAIEKLNIKGMIRNHYLAQSISDVGWSSFMKKLKYKCEWYGKTLLQLGLFEPSTKICSNCGYHNNGIKLHQREWICPNCEKRHDRDINAAVNIRDFALDKQNLISTVGTTEIKLL

SEQ ID NO: 15869 - protein, 417 aa, Methanobacterium sp.
MLTQKIRIFPDKEEVLWFLSEHCRLLYNFALSERKTAWKENNESITYTMQQNQLPELKKKYSKYGMVYSKVLQMTLCTLDANFKSFFSLYKKGHKDARPPKYKGKKYFTTLKYNQSGFKLKKGYIQFSHKYKDTPLIFKIPEKFSFKKVKEVQIFQKKNQYYISITHKPTQKQYNDNGKYQAIDLGITKIVTAVNSKGRFLEVRTPLPDKYSNPTISKLQSRRDHCKKYSRNWYKLNKVINKLKQKQSNQIKDFQHKTSRKIIDNTRANTIIVGDLNVKGMAKSKNKGLNRATQNTGYLARFTKFLTYKAKLVGKKVIRIDERNTSKTCCNCGKIHDMKLYNRNMICECGNNLDRDKNSSINIMLRFLSQNGLWTAYQQFVDNLRQTVPSLDGALAGNPNAIAWGNSLHTNNCRFTN

SEQ ID NO: 15870 - protein, 257 aa, Methanobacterium sp.
VKTKLHRQFKGKTQTATISMTNTGKYYISILIDDEQSLPEKVKFNHKTTVGLDMGLTHFLITSNGVKVNNPRPLKQQLKRLKREQRKLSRKKRGSNNRNKQRLKISKIHERIMNIREDFQHKLSKTIVCENQAIAIEKLNIKGMLRNHNLAQSISDVSWARFMEKLKYKSEWYGKTLIQIGQFEPSSKICSNCGHHNSNLKLHHRMWICPDCGSIHDRDVNAVVNIRDFALDKQNLTSTVGTTGFKASLRKPQKWIQ

SEQ ID NO: 15871 - protein, 379 aa, unknown
  TnpB Polypeptide
MAATEKRSLTYKFRLYPSKAQETKLNETLAVCRLVYNSLLHERTALHEQGLKPPTYYTQAPAITRWKKDHAELKTVHSQVLQNVAVRVELAFQAFFRRVKKNDGKVGETPGYPRLKGNRQYDSITYPGSGFKIGESSVWLSLFGKQVQVKAKIHRPVTGKVKTCTVRRYGFKWFACFSVEQECDFLPPCTEAIGLDAGLNSFLALSNGEGDNFFIDNPRFFRRDEKALAKAGRKQAKTPKRSKSRRKANKVLSRIHERIRNRRHDFVHQTARRLVNRFGVLAVEKLNVKGMVKNHCLAKSISDASWSMFRTVLTQKAESAGREIYAVDPRYTSQDCHACGFRGKKKLSERWHFCPNCSVSLDRDTNAAINILALATSCA

SEQ ID NO: 15872 - protein, 444 aa, unknown
  TnpB Polypeptide
MELTQKFRIFPTEEQEIVLWILSEKCRLLYNFALGHRNDTYKKTGASITYNMQQDELPKIKKKYPEYEWVYSKVLQMVLKGLDGDFKSFIMLKKNSKDGNGKGDKNANTPGYKGRDYFFTMNYNQSGFKIENDKIILSHYYNDGKKNYVKLEFDIPIELRDNTDVCLQTIFDFGKIKQIVIYIDEPNKNKEGEYYLSVVYEIPDIPSKDNNLYQAIDLGINKTVTAINTEGKFFEVGNPRQDKYWNPIIDSIQSRRDHCLKGSTRWIRLHDTLRKCKKKLHNQIKDNQHKWTTKMTKNTKSNTIIVGDLNVKEMAQSEIGRRNYGNKLNRSTQNQGYLSRFVGFLTYKAQKIGKRVIEINERGTSRGCYVCGKTHDMPLSKRIMHCDCGNIIDRDRNSAINIIIRFLSQNGLWTTYQQFVDNLRKTGLLVPLGTNGTHVGSACL

SEQ ID NO: 15873 - protein, 352 aa, Acinetobacter sp.
MKTLKLRIKDKHCKVLNQLATEVNFVWNYVNDLCFKHLQQKQQFLSAYDVAKYTKGTSKECNLHSQTIQAVTEELVTRRKQFKKAKLKWRVSNKKSAKRSLGWIPFKKVAVKYADGYVQYGKHQFKLWDSYGLSKYNVKTGSFVEDSRGRWYACLAVDNAVQIKSQGTSSIGIDLGLKDLATCSNGVKLTAPRIYRQYEQKLGIAQRAKNKKRVRAIHAKIKNIRQNMLHQFSHQLVTEHAVIIVGNVNAKALAQTKLAKSVLDASWTTLRTMLKYKCENAGVCYEEVNEAYTTQTCSSCGSRCSSPKGRAGLGIREWQCMECGTLHDRDLNAALNILALGHERLAGGIPIL

SEQ ID NO: 15874 - protein, 561 aa, unknown
  TnpB Polypeptide
LAGRSSVSGSGSPATRTRNVSGWWMWCRGAVIATSGTGRRCFRAAVCGRGRRTRRLISRMIRERGGPDENGWAYRRTPRGRYRDRDTLRRLPVQVPVGAMRSRAKFTIPDGWVSRGFEFEAEWPDGADAAARIRSHFGARRKAYNWALAQVKADMDARKTDSAHVAVPWNLNALRKRFNQVKDEVAPWWAENSKEAYATGINDLCQGLTNWSDSKTGKRKGRKVGFPRFKSKRKDRARVRFTTGPMRAESDRHTITLPVIGSLRSKENTRRLERLTGCGKARILNATLSERWGRLFVSFGCIVEQQREAPAGGRAGVDLGLRTLATIADTDGNITKVPNPAPLRAAITGRRRAGRQMSRRIPGSRGYGEAKAKLARLDRRCVYLRKQASHQLTTMLAETYREVVIEDLDLAAMNKGMGRRAFRRSVADAALGRIRPQLTYKMAWRGTGPTVAGRWFASSKIHHGCGCRLFEPRKLAQRLVCAVTGELADRDVNAAFNLRDWPDHASCSTVGAAAPLASVSSDGQDAGLPGAVGGNVRPGPSARAVPDEAKTREGTPRRGAA

SEQ ID NO: 15875 - protein, 295 aa, unknown
  TnpB Polypeptide
MEMRRTVPVALDVDSDDAALLEDTVDTFLWCAQYVTDHAFHGESVTTSKPTLDDETYDDVREATDGFNGGLVQAARNKAAEACKSVVARWKNGNKASKPRFTSPHVVYDHRTATFHNEYVSLATVDGRIEADYVLPDEDSNTPHAEYVFSDEYETTGAELHYTNGNWMLHIHCKRDVESDTAEQATPENGPVLGVDLGVNQLAVTSTGTFWTGNEFDHWRREYEKRRGDLQEHGTRWAHKNIQSIGRKKSRFKMTPVDGLADPRERPAFAQSRRVHDSCAASESRAARIGGDARI

SEQ ID NO: 15876 - protein, 477 aa, unknown
  TnpB Polypeptide
MDEAMDRYARALQYMLDFAESQPDRLEGIGKSQKSLRKQAGELVDKELLRSLNKFHVQPFKDSLRIDFMNLIESYVKRREKNPRARYPRIRIDADELMNRLEKPGVSMAEFNKLYEKLDSQKTVYFCRYSDHRDYSLLFNPYKKRLYAKLYLLSQHDEFKLIPHKNPGSIFQVVGKNKLLTTSGRPERFIIVPLSFGKKQEQLLLEALEKPGMLKTARLLKKNDEYYLSVNIAIEPEKIFEVNGYAGFSMADECTMVYTVCGLEGEMLKHGEIEIRSGEGIPPSDRDGLHILANSMTRICLQYKAQAVLETFPRYNALTDILDYKMPLKGLQKPVRVSPFGLWQTCPRCGYNRKKNKVVGDVFLCACCGFGIKRKFLPPYNLAKRLIKYQNDKVHFYCEQHGNRRIIRNALLDISYPLGPSEGIHDFFEYIEKKTDELRGVLSDRENEWTRQEKKLYSVWNKLLTAGDIKDVIVIES

SEQ ID NO: 15877 - protein, 369 aa, unknown
  TnpB Polypeptide
MHFDKWLTRAKKDKISLILKEYASIVNYFIATYEDKIPELTNFDLNYAKYTKVCADETKTWLSARMIKNAFSEGYGMVLSVREKADKDNPYTRPVHRGKRATLSSTINTQSEDVTTVDFDFSVTLGCIGNKMKISIPLKKHKHWNKLDVLGKRSNSIILTRKYIQFSFEIKTEKKKESGKLLGIDIGINKLFAASDGSFFGKGYKLLLEKLLRKERCSKGYYRTKNEIVTFINGAINEIFKEDLQLIVVEKLKGLKNKMKERRRLSKNIRRFVSVWEYRYILNRIEQVCEINRVSFRSVSAYNTSITCPRCNHADEGNRKTQEIFRCLNCGYAGNADFVASQNILVRFLTGPYCARFKPDDYLVYLSIV

SEQ ID NO: 15878 - protein, 335 aa, unknown
  TnpB Polypeptide
VIAHALAARVKYVRLVRRKLRGQDRFYAQLVCEGIPYCKPQHVPSPGEVGLDIGPSTVAAVGEEAAFLEVFCEEVVRKHRTIRRLQRKLDRQRRANNPDNFLPNGRVRPGPKRWNKSRRQRRTEDALAELFRREAAHRKTLHGTVANRLLALGRVIKMERLSYRALQRRYGRSVSVRAPGMFVSILRRKAASAGGRVIEFPTPFTKLSQVCHGCGNVQKKPLSQRIHACTCGITMQRDLYSAFLARCVGEDGLLHVGLARTRWPGAEPLLRAAWSRATQPASGRAFRPSSFGASPRSRSRSPAEEGIAQAEVPDVVAAGESREEVAVVPLRTPRL

SEQ ID NO: 15879 - protein, 353 aa, Microcystis sp.
MRVIEFKLKTNSHQEIAIQEAIRVGQFIRNKCLRFWMDSTKEAQVNYATLCRLTTELSNNPEFSFVGKLNSMARQASAERAWFSISRFYDNCKKRTARAESTSASGRSKKGLAKKGYPKFKKFSRSVEYKTSGWKLTEDKKFIHITDKTGIGKLKLIGTFNREILDNPRFLRKAERRLKKAQRKLSKKKKGSQKRLKQKSKVARLHLKVSRQRKDFAVKTAKALIQSNDLVVYEDLKVSDMVKNPQLAKSISDASWSMFTDWLDYLGKIHGKFVVAVNPKYTSQECSSCGNIVKKTLSVRTHVCSCGCVLDRDENAAINILARANTVGRTEIQALGQTIHCLLGESLVDKVTG

SEQ ID NO: 15880 - protein, 272 aa, unknown
  TnpB Polypeptide
MYFVKNNPKDCRCQRHRINIPSLGWVRIKEKGYIPTTKDGYVIKSGHVSIKAGRYYVSALVEIPNNKIANNSNEGIGIDLGIKDLAVVSNGKTYKNINRSARLKKLEKQLIREQRSLSRRYENLKKGESTQKANIQKQRLKVQKLHHRIDNIRTDHINKTIAEIVKTKPSYITIEDLNISGMMKNRYLSKAVASQKFYEFRIKLQAKCNENGIELRVVDRWYPSSKTCHCCGAIKKDLKLSDRIFKCDCGYSEDRDFNAALNLRDAMTYEVA

SEQ ID NO: 15881 - protein, 403 aa, unknown
  TnpB Polypeptide
MIVNRVEQIQINRNHNIYNYCDELSFASKNIYNYGNYIIRQEFINNNKWVRYNDLHKLLKTHETYKALPAQTAQQILRLLDKNWKSFMFSIKDWSKNKDKYLGRPRIPTYKKKDGRNIVIFTYQQCKIVKEYITFPKTDLTLKTSINDNLKQVRIIPKGSIYLIEVVYEKEIEIDPKPTKNIAGIDLGLDNFVTLTNNIGIKPIVINGKSIKSINQYYNKRKAEFMSFVGSYGTSKRIERLTLKRNNKIKDFLHKTSRFIVNWCITEKIDTLIIGNNKNWKQEINLGKRNNQQFIGIPYEIFINQMKYKCEEAGINFFVTEESYTSKASFIDMDELPIYKKDNDNLYSFSGKRIKRGLYRSINGILTNADVNGSYNIIRKVFPKAFVDGIEGVGLHPVRLNIA

SEQ ID NO: 15882 - protein, 216 aa, unknown
  TnpB Polypeptide
LCALPVPVGENQARMVALDPGVRNFLAFFSSQSAGILGEHDFGRLVRLCQHLDNLISRRTKSKNKKQRYRMRKAEYRLRWRSKDLRDELHAKAARFLVDHFDIILVPRFETGQMVARKGRKLRAKTVRSLLTWAHGEFKKKLQAVALQSGKLVVEVSEAYTSKTCSWSGELVRVGSREWIQGSDGISMHRMAHAEFFCVLWQNCPGCWTCSGNLHW

SEQ ID NO: 15883 - protein, 512 aa, unknown
  TnpB Polypeptide
MNTTRADTFIHELPLRVLPAQERKLNVRFDCARQLYNACLDTALKRLKSMRESRCYRKARSMKRGRERSSEFRKLDAKFGFREYDLHAVAIRTKNACHIGDHLDAHVAQKTASRAFAAVREYAFGRRGRPRFKGRRGLHSLESKTNASGIRWRDGAVHWIGLVLPAILDSRDKWGVEAHALACRVKYVRLVRRMLRGRVRWYAQLVLEGTPLWKEKNPVGTDVVGLDLGPSTIACVGEDTAFLEAFCPEIERDERAIRRIRRRMDRSRRATNPDHYNPDRTPKKGVRSKIRSNRYIRLQNELAELERREAATRKTKHGRLANKIIAIGNIVKTEKISYRAWQRSFGRSVAKRAPRLFVSMFRRKAENAGGELMEFSTFATKLSQTCVCGAVHKKPLSQRRHECSVCGAAAQRDLFSAFLARFVVSERDEVYVDVRRALEAWQGSELLLSRTTSALQHQTASGGEVPASFGLTARSRSRSSVEENLGTTNAADDTACPIGQCESRGETVSLCS

SEQ ID NO: 15884 - protein, 477 aa, Caldilineaceae sp.
MAKSVKVTRILHSWGLNRSKYDRLSEIAVLCGRVRSDAWRRCSGVSAVLQSPYDVRDAWMADGYDWHGLPARLGKAMLSDALGDIAAAREATKVKVKRAIRHRTRNDDAERERLYSLLKQNRWTEDPFLHRQMRNRWKGGRSHVTNQIVADSGSYTTKVWNNRAWVYLQGMERGQRIAIPLKGTHLPSGTLRILLRDNGQVEVHHAVDEEQVCSTRPCGDAAVGVDKGYTEAYTDSDGDRHGEGLGDLLSAESDHRKVKGTRRNHLRDTEQKHRAKGNHRKADTIRKNNLGNQKWNRRRTRHHKQVRDHLCQAAHTVVDKAGTIACEDLSAHMKSAPYRHRDTNRRLSGWVKGVMADTFTSISRRRGSAPALVNPAYTSQIDSRTGLLQGRRRWDRFHCIDGVVLDADTNAACNILARLYDEEITLYTPFREVKALLVERTRTAVGTAPPGLELRGRATEPPSTESELPASVPKCAD

SEQ ID NO: 15885 - protein, 141 aa, unknown
  TnpB Polypeptide
MRILLKSYKTEINPTLEQIQKINQTIGTCVNEIVKTKPSYITIEDLNVSGMMKNRHLSKAVASQKFYEFRTKLETKCKENGIELRVADRWYPSSKLCHECGCIKKDLKLSDREYICDCGYHTDRDYNAALNLRDAKTYKIA

SEQ ID NO: 15886 - protein, 436 aa, unknown
  TnpB Polypeptide
VGNLVDEPKERIYLVRKEIIVPTEEQALVLSHMSYAAAKLWNIANYERKHWKELGLTVYPDWYDQKKRLKTHLFYKNLPSQTAQRVLKKLDESWASFFALQKSGGVENPNPPRYKQDKMYVTFVQNGIKMIDKSTLRLSVPKQLKVYLHTKNGLEVRYLFLKIGRLSGLRNVKEVQVSFDDGQLKLLLVHEVKLPDERGNNGRYLSIDLGLKNNFTCYDSANVETFVLSGLLAKTHWFDKEIARLQSISDAQQAAKGEQYPKKSKRVLRLYKRKNDVQADFLHKSTRFLVNYCVHHNINTIVVGDWTNIRENKDGSTKNWGTKGNAKLHGFPYRKFYKLMRYKCALAGIRFVVRSEAWTSQCPPDSLGIAREFAEKAKRVFRDMYCHNGVLYNADAVGAFNILRKFLFDEKLALDKTNTTEHKLFSLRTPRRVHVA

SEQ ID NO: 15887 - protein, 317 aa, unknown
  TnpB Polypeptide
  misc_feature (50)..(85): Xaa can be any naturally occurring amino acid
MDDALELCRWTYNEVIAIRMNAYEQESKSLSYYDTKKLLPGWKEEKPELXXXXXXXXXXXXXXXXXXXXXXXXXXXXXXXXXXXXIKIKLHRAVDGEIQRLNIRRMPTGKWFVSFLVEVEPDEPLPKTGLSIGVDVGLKSFITLSNGEQVDNPRFFVHEENALAKAQRKLSNAEKGTPERARALKVVHRVHERITNKRDDFVQKLSISLVKSYDLIAFEDLNIKGMVKNHCLAKHITDAAWNKLITTTSYKAEWAGKRVELVNPNGTSQICSGCGQVVQKDLSERVHRCSFCGLTLDRDHNAAINILRLGLQSVAKA

SEQ ID NO: 15888 - protein, 256 aa, unknown
  TnpB Polypeptide
MNYYRKLRGTPKAITVKREGKKWWLSVRCVDAPAEPLSSTGREVGIDLGVVNLVATSDGELLVSERFGSRAKAQLARSQRQLAMKERNSNRRRRPVDVVARRHRKVANQRRNAAHQLSRQLVNEFDFIALEALAIKQMTRAPKAKADPDNPGGYLPNGAAQKAALNRSVHDVGWGQLVTMILYKAECAGREVVLVNPRHTSQRCADCGHCVASNRVSQAEFRCGNCGHEGHADRNAARNILRAGRAQRELSRAGSK

SEQ ID NO: 15889 - protein, 409 aa, unknown
  TnpB Polypeptide
MYRTLQTRIDQFVDVEQRLQIDVLMKNIGKFYRYCVNNFFHANGKDVLDLKKTEFCKQFGIHSQYANSIAREAKKQVKLFLEARKQKVSELKYKIYRLEKKTYDLNGKSYKERKKIRTQYFLDKREISVLLHQIDKIKKSGMTCGGRGLQRKDVIAFQQKRNNFVFSSHDGYASYGSHHFKFKHVRHNQFVLELEVSDGVKINIDINMDLAVRKKEKWRTMLVNALAAGNSSFRLVKHVTQKKTKLFLQVMTPMPKLEHKKHGKKAGVDFNNGHLDFCITKNNKPIHFQTVNFLHKDANSNQRKNSLLSAIKTFIQQALNMGVVEIKMENLNFGKLKSEKSQIRAMNRMIHSLPYGKYEKMMEMECAKAKILLTKVNPAYTSQDVKKLSQELQEKYTNHQLAAFNIALK

SEQ ID NO: 15890 - protein, 467 aa, unknown
  TnpB Polypeptide
MKFYSIKFKLKHITNNVNVKTLENYLRNLLFHMKQQSNLYFQSSGYDSVVETLKNHKPNGSLNQFGRSLGIQPQTPYHHQAYNFAEMFRNNVLQATMGYVQKLCVSELENIELKKAYDEFKEKFPNVKRPTTVSLRKMLQYRDKAVKPSCNVPILTFHAADNHYASTSIDLERNVLIFKLNVPKTDTAIRGEQVNIEFKIPTGKRFKNILKLCKPTVYLNEQDEIIFNFAVEVEDNKLPQGQNVLAVDSGLVEPFVATPVVDGVVLTPFFANHNINRYRKQIEHLYENHAIPLLAKAEECERCNHKEKADVLWLERKRILSTITRLKNEMATQTAVLLSSIADQFDATIVFENLKWLEHKGGKWNHSVIQSKTEYIAKRKVMRVSAANTSQNCSKCEAKKSMSFTGRIGTCTKCGNQLDRDINASRNIAQRAIKKLAKNAISENRQLGNQPVKEVKILCSCNKNTGF

SEQ ID NO: 15891 - protein, 288 aa, unknown
  TnpB Polypeptide
LQQSLKDLEASFKNFFSKRSNFPKFKRKGEKDSFRFPQGCKLEQQNNRIYLPKIGWVRYRNSRKVLGEVKNVTVSQKCGKWYVSIQTEYEIETPKPNGVEVGIDMGIVRFATLSNGEYFEPINAFKNLKGKLAKLQRRFKRKTKFSKNWQKLKAKISQLHHKISNIRKNYLHQISSKISKNHAIVYVEDLKVANMSKSANTGLNRAILDQSWSEFRRQLEYKLAWKGGYLFAVPPQNTSRCCPNCGHTAKDNRQTQAEFRCVECGYQNNADVVGAINVLKRGQQIQAA

SEQ ID NO: 15892 - protein, 406 aa, unknown
  TnpB Polypeptide
VWHATAVQAPYLPRCRPAAGARPGVGCARVVYNDGLRLREDAYRTGLPYPSDGELSHRLTLAKLTPERAWLGEVSSVVLQQSLADLHRAYRNYFRALKEYKAARARGEKAKLKVRKPRFKNRRHDQAARFTANSRFRVLPDGRLSLPKVGDLKVRWSRPLPPAPSSVTVTLDGAGRYHASFVVEVQAAPLPAVDAAVGIDLGLSAFAALSDGRKVDNPRWLRARERALRRSQRNMARKRKGSRNQEKARRKVARLHARVTDTRRDFHHQLSTRLVREHQTVCVETLNVVALGRSNLAKSIHDAGWSTFVGMLEYKARLYGRTLVKVDRWYPSSQYCSACGRRDGPKPLKVRAWTCPGCGTTHDRDLNAARNILAAGLAVAACGPGGRPGSRRAVGDEAGTALAGAA

SEQ ID NO: 15893 - protein, 386 aa, Bacillales sp.
MIINRSFIYRIYLTKKQKENFRKIFEKNVFLFNLLLKIRKKQMNNENYENIFIKDLVKEYKELSNGNLLAYISTYHNVDIIIKKYKNGYINGFPKDKNIDKYPKKLHFNIKTTFYLNENKTRIFISKIGNFKIRYHRKIPNNSYIRNIIIEEKLDNEFYLNIGISENHIKTDTEVKKLVGLDYSSTSLFVTSDNERGDQYLVREFLTNKIVNIQKKMQNCVLNSKNYLKLKHKLRKLHQKIANKREFYLHRACNDLLIKYDLIATETLSLTNIASHHKLGKHTYSNAYNKFLSFLNYKSILNDKIFIKIPQFYPSTKICSNCGKIKKIMYLDDRMYQCECGFICNRDLNAAINIRNKGLDIFHNNIKKDKIKAFNNKNDFLNQIIP

SEQ ID NO: 15894 - protein, 531 aa, unknown
  TnpB Polypeptide
MQHTVKAKLIYESPQERAAVNAALDEMCLRFNNAERGLYRDIRHLVGRGVPYPLPAENQNAIKSHFQIKYNINARFYNAVKIGLDGKIDSVLTVADEKLLVTEYRITKATNDLKYYQHVLKEHKNQVLKNEKLIRKYQRKLHYINQRLQRLSSRREKLTETINNQDPHLCFGSKALFMAQFKPGMDFVKWKEDWLFQRNRQFTMVGAKCESQGNQICQITSLKDSRYQLQINPCFNQANREKPFHVQIEVHHDRNNYLKNLPQDDEDRRIAITYRFMKQAITGDYEVHLSFETTRYQPAKITCDTHGAIGVDMNADHLAICNIDAAGNLLHAFNLPYQLKGMTSEQRASVLGDVVKALTDYAQAEKKNIVIEDLDFSKKKSNLKPGVGKAYNEMISSFAYKKMRTLIQSRCFDKGLSFITVDPAYTSVIGRIKYHARFRLTSHQSASLVIARRGFFQQNRTGGFLEKPIRPQCSTKNAASLLTLPVGNGIVEGCMKSRKQNDAYWRELNEQIKAATPEYWAKTYHLTGTVQ

SEQ ID NO: 15895 - protein, 310 aa, Halorubrum sp.
MPADYRSVTYNQSGLDLDEKRGRDRFANVRFSKIGWVKIRYHRPIPDRATIKEVTFKKETIGEWFVSFGLKTDDANLSEKPDVNTLDASNSVGIDLGILNYIHTSDGEIVDWLDLEDKCERLQREQRELSRKEKGSNNYEKQRRVVAKVKRHIERKVLDYQHKITTWLVREYDAVFVEELNVKGMLEQSHNARNKQDASWRQFITLLEYKAALYGTHVVQVEGRGTTKECASCGVETAKPIWVREHSCPSCGFETDRDANAAMNVLQRGFAELGLGWPEDTPVETVTATDTTQFESVSASHVVETGSLGA

SEQ ID NO: 15896 - protein, 416 aa, unknown
  TnpB Polypeptide
MLGCQQVLIKSDQDTQAVIEYLCSESAKLSNCGIYYSRQLYFKTGRIPHRAELHKVLGTENQNLHYKAFYSDTAQQILTGVAESFKSFLGLLKGIKKGTVTQHPKLPGYRQSGMALVTFTGRSVKLKDGILRFPLGSKVKAWFGLDSFFLPMPSNLDFKAIREYRILPRNGCFYLELVYKTENIQTNVDTAKCLAIDHGIDNWLTCISNIGTSLIIDGKHLKSINQGYNKRVAFLMEGKANGYWSKRLAGLTERRNRQMRDATNKAAKKVIQHCLDNQIGTVVFGWNKGQKECANMGKKTNQKFVQIPTGRLKDRIAQLREQYGIKFIETEESYSSKASFVDHDFLPTFGEKPEGWKASGKRVKRGLYSSAQGWLINADCNGAANIARKVAIMLGLDLSGISRGDLSAPLRLKLWS

SEQ ID NO: 15897 - protein, 166 aa, unknown
  TnpB Polypeptide
LSINRRDGKLSDHRKQSAFSDGFKAGTFKLIGTRDLNFSQPNQIKRVRVVNHGRWILQSISVERSEPQSPTGKAVGIDLGLEFFYTESEGNQVENPRFLRKSEKSLKRLQRRVSQKKNGSKNRKKAIKMARKHLKVSRQRREFAVRTARALVTSNEGDSFNPKIRI

SEQ ID NO: 15898 - protein, 383 aa, unknown
  TnpB Polypeptide
MYDIILIMKKTFKYRLYPTKNQKTLLSQQLEECRWLYNYMLEHRKNAWKWYGVSLFYHEQQNMLPCLKKIRPSLRFVHSQVLQDVVKRVDLAFQSFFRRLKEGAKDPGYPRFKGKDRYDSLTFPQNNVGFSLQGNVLKLFGVGKVSVLAHRSLEGKIKTCTIKRTSTGKWFVCFSCDNVEPKRLSNSPLSVGIDMGIKEFLTTSEDEDPIVQNPKFLKKSAKRLAQEQRRLNLQKNNPGKDKEKKKKIVAKIHEKVFNQRQDFFHKTAKALVGKYGIIVVEDLVPSEMVSEYSSINNAQYDTAWGTFLSILSNKAAEAGREFVKVDPAYTSQDCSTPGCGHRQKMPLNVRVYKCPKCGKKQDRNRNAATNIKRLGLESLARSA

SEQ ID NO: 15899 - protein, 429 aa, Streptosporangium sp.
MLTGRKYRLDLTAEQTAFAERIGGACRSVWNTALEQRRTYRRRDAWIGYHEQAQQLVEAKTEFGWLAEVPGHCLQQTLIDLDQACSRHGTWKVRWKSRARTAPSFRFPEGGKITIERLNRRWARAKLPKLGWVRFRITRPLGGKVKNATVSRDGAHWHISFLVEDDISPPERHAHPGSAAGIDRGVVKVVTRSDGVFHHQVFATDREVEHAAVLQRRLARTRKGSARRKKAAATLGRALAKVRRRRADFAAKTACVLATSFELIVFEKLAIRNMTATAKPKPDADQPGSYLPNGAAAKSGLNKAILDKGWHRIELAARSKARQTGSHVITVNPAYTSITCRVCSVVDPKSRESQAVFRCTSCGHTEHADVHAANNILTAGRAEFAQPRPGARAGARKPRNRVGRKANRQATAAQATAQTEAELAGIPRL

SEQ ID NO: 15900 - protein, 235 aa, unknown
  TnpB Polypeptide
MLVFEFKAKGKTTQYSAIDEAIQTAQFVRNKCIRYWMDNQNIGQKDLYRYNTSLRAEFPFVKDLNSHACQTAVERAYSSIARFYSNCKKQIPGKKGYPQFKKNCRSVEYKTSGWKLSETRKQITFTDKKGIGKLKLKGTWDLNFYQLAQIKRVRLVRRADGYYVQFLVQFLVNAENKVESQPTGKAIGLDVGLKEFYTDSNGHQEPNPRFYREGEKRLRFLARRVSRKKKGSSEQ

SEQ ID NO: 15901 - protein, 430 aa, Actinomadura sp.
MEKACGMDGHGAFLVLSVAVRIVARVSRYRLRPTPVQERGLLEHCKQARFVWNLAVEQHTHWRPGREGAPGFAEQCRQLTEARAAFPWLRCGSVIVQQQALKDFAQAMANFFAGTHRHPTWRKAGRHEGFRIVAVRPGDARRLSRHVGEVKIPKVGWVRFRWSRPVPAEVKSYRVTLDHAGRWHVAFAAIPDPVPAPGNGHAVGVDRGVAVSAALSTGELLHAPGLTSGEAGRLLRLQRRLARARRGSNRRARLKAAIARLKAREADRRRDWVDKTTTSLARDFDVIAVEDMDVRSMTRSARGTIGEPGRRVAQKAGLNRGILAHGWGAVLQRLEHKAPGRVVKVRSAYTSQRCSACGIVNRDSRESQAVFRCRSCGHADNTDVNAAINIRTAAGHAVAARGALQPLGGARKREPQPDLLCVGRTVGIPF

SEQ ID NO: 15902 - protein, 290 aa, unknown
  TnpB Polypeptide
  misc_feature (244)..(277): Xaa can be any naturally occurring amino acid
VRKINRAVKIRIYPNKEQITQIEKTIGCSRFLYNRMLADKIRYYQEEKKMLKNTPAGYKKEYPWLKEVDSLALANVQLNLEGAFRKFFREPGVGFPHYKSKKHSRKSYTTNMVNGNICLQDRFLKLPKMQPVKIKLHRMIPEGWKLKSVTVSREPSGKYFASLLFDCENQTAEKRQAEKFLGMDFAMHGMCVFSTGERAGYPMFYRNAEKKLAREQRKLSRCEKGSRNYQKQKKKVALYHEKIXXXXXXXXXXXXXXXXXXXXXXXXXXXXXXXXXXDGRRPAFRKRDTG

SEQ ID NO: 15903 - protein, 543 aa, unknown
  TnpB Polypeptide
MNKEVLKMLTENKSNSDFVTVGCLLAFDKDEDKQQVLTLMRTFSSMFRFAYKRLLDGVERKELKKLLSRKYGINTRYSGDAILLAQQNLDSCIEREQNPKKLVFGSRELFEQLKKKHLTGRRRDELRQKWEERRYGVLYSRGEKSLQGNLNLRLVNLNNQWHLRINLGNSEYVWARVIRSATRKTDKWIDFISSIEQAERTNEWFPYTVRLKLRNGKVYAQFSREEKFLEASITKYNGVIGIDINAYPFHLALVRTTKEGNLEKYEKINLDKILEGSSEKREYLSWQIAHQVVEIAKRERKAIVIENLDKLPKGKRGDGLPKLRQKLQKWVYKGLLQKIEIVARRSGIQVIKVNPAYTSIIGKLKYSPLYNIDKDTAGAYVIARRGLGFKERLPKNYRGLLKDADFLSYTIAKIEDKIAKLKQEVREEKNEYKRNRLKSVLWKTRNELDTLLIYLRESGESESATQQTVNRKMERVRGLTHVRQKSWQVLSVALAFSCLESLRDFSPLKRVIFARDWVGVAKRNGLVPLTGQGTTVLNMYSFV

SEQ ID NO: 15904 - protein, 238 aa, Bacillus sp.
MLCQTSCYEKKFVWLKEVDNIAIQSSVRNLADAYTRFFKKQNSAPRFKSKKNNVQSYTTKQTNENIAVVGNKIKLPKLGLIRFAKSCEVKGRIVNATVRRNPSGSYFVSLLVETEIQELPKTHSYIGIDVGLKDFAILSDGKTYKNPKFFRLLEDKLAKAQRVLSRRTKGSTRWNKQRVKVARLHEYMENARKDYLDKISTEIIKNHDVIGIEDLQVSNMLKNHKLAKAISEVSWSQF

SEQ ID NO: 15905 - protein, 368 aa, Nonomuraea sp.
VAQIMKRAYKYRFHPTPEQAAELVRTFGCVRLVYNKALEERTRAYTVEGRGVSYAESSAALTAWKKTPELAFLREVSSVPLQQTLRHLQAAFANFFARRAKYPTFKSRKRSRASAEYTRSGFRWRDGRLTLAKMGAPLDIVWSRPLPEGAVPSTVTISRDPAGRWFVSLLVEEKIAPLPPVERSIGVDAGLTALLTLSSGEQIANPRHERRERRRLARAQRALARKEKGSKNRAKARLRVAKVYARIADRRRDHLHKVTTRLVRDNQVIAVEDLSVRNLVRNRRLARAVSDAGWRELRRMLEYKATWYGRTLVVADRWFPSSKLCSACGTLRNDLPLSVRAWACACGTVHDREVNAARNLLAAGLAES

SEQ ID NO: 15906 - protein, 181 aa, unknown
  TnpB Polypeptide
MQELYISSDGETAAYPRYYRQSLDKLKREQRKLSRCQKGSKNRSKQRLKVAQLHEKVTNQRKDFLHKQSRQITNAVDAVCIEDLNMKGMSQALNFGKSVSDTAFGTFVRMLDYKLKEQGKQLIKIDKWYPSSKLCSSCGEAKKTLDLSERTYHCEACGAVINRDYNASINIRREGMRLLLA

SEQ ID NO: 15907 - protein, 269 aa, unknown
  TnpB Polypeptide
MYLIKIIGWDRRYDYYENREARLVYREGEMVLWISKRIPKPEQYKPRDVIAIDINERKIVYGNHEINKDIGTAVDRAYKWKVLAESLQRKYSSPRYPAWKRRRGVLNRIRSYHRKARNILEDWARKSPLKIARLAVKLQHAVAREDLTGLINSLRKIKNKDHRTKLIIMGYSRFVKWIDWQAMKLGAPIVIVDPRDTSSECPNCDSKLEENGYRRLKCPRCGFEADRDVMGKLNIRKRALKILGISGRSLAPLTAPQMTDVNPNRWGNL

SEQ ID NO: 15908 - protein, 221 aa, unknown
  TnpB Polypeptide
LLLQFRTDQQCLSKEERSNPNTTGGREIATYQAIRDLLRNAGISTWKEYHEKYLKAMYKRDERLRHLYITAIRFLADELHRRGVRKLYIGYPIMLSQNNGDEYNTNIWWFRKIVLWIVDIFREYGIEVEIVPEDYTSKQSSICGIRHKNGRKYRGLYICKKTGKKINADINAALNIARRLGYMIRIARKIESYLVTHNGVKPLIPHQRATTRDLSIENPAP

SEQ ID NO: 15909 - protein, 575 aa, unknown
  TnpB Polypeptide
MSDRLGVEDGQQTSVLGFALKPAADRQGDAIPLLDKVDNDSAAALRVQRLMAFVNATQVQIPLGIDRELRHFAAIRALLTPAPRRHGLRPVLAKPAGQLVDITHAGVGLAVQGREVLDRASVLALLVADGQRARVVAFMPPENEKVPRPSGRGWSKSEASGRIRLVMETIRRYNYRAYPTRGQRMALSCLFGACRYAWNWYLDQRKVAWWLHLPIPSYAELSRRFTEFKKEPGSKWLWKVSSGPMAQALRHAETAYSRAYARKAGYPRFKSRHCGEQSATFTRSDRYHIRHERNSRWMFLRLPKIGEVKLRWSRDLPSAPSGVTIMWHADGTYEASFVVKTEPKAPPKPRHDACGIDMGLESLASIVYSDGTREKVAPLRALRKAERRLRRLDKELSRRRRGSNNYSKTRLAKARLYARIGAQRRDLAYQLASRVAGENQAVAMETLCVKGLMRTRMGKSVADAAWSMFTDRVDALCAQWGRRVIHIDRWCPSSQVCSQCGRRDGPKPLNVREWECPDCGTLLDRDYNAALNIMDAAGFAESLNARGGDARRRLASAGRNAIAREAGTHRTAMPH

SEQ ID NO: 15910 - protein, 378 aa, unknown
  TnpB Polypeptide
MISIIHKLYPTEKQKAYLNDCLFSAVGIENWCITQIKKEHEYGFPLARMKPLQIRSILSKKIEGHSKKSGLPSKLLNDCIAAVCESFKRHKNIHKLGFKSIRKKKSFYFNGDIKISKEGRLKLPNIKTTFKMSEMNKFQGQLKKVTLIRKFNGWCACCVYDESRKPIEITDSKEAGIDPGLKTSMTFSDGTEIQFPKFYQKSQQLQAKLQRKSKNSKKVKRLQAQTANKRKDHHHKLSTTIAKEYQKIYWSNDSFKGLIQMFGKSYANLALGKFRDLLTNKLASRIDGFGELIKVSNRKSTLTCSACLSLTGPTGWSGLGVRNWVCSSCGAAHDRDVNAAINTLISGQGLSAVKGNQVNRNFTGTDADLSVSRVPVAC

SEQ ID NO: 15911 - protein, 379 aa, unknown
  TnpB Polypeptide
MANKAIKYRIYPTTEQSIMFAKTFGCCRKVYNLMLSDKIDGYKTTGKFPAVTPAKYKKVYPYLKEVDSLALANKQMDLQAAFRNTFSKSRKKKNGFPKFKSAKHCRKAYTTNNQKGTVAIIENKYIKLPKIGKVKTVIHRIPADHWIIKSATVSQESDGRYYISVLFEFDKVENTYVADKTNAIGLDYASDGLYMDSNGNVGTNHKYYRESHDKLAKAQRKLSRMQGSKKHEDKSKNYIKQLCKVNKIHRHIANQRLDNLHKLSTGIANRYDVVCVESLNMKSISNRGFGNGKATMDNGYGMFLSMLEYKLSDRNKYLVKIDKWFPSSQICHCCGTLHPEMKDLSNRKMVCDCGLTINRDQNAAINILNEGLRLLSEAA

SEQ ID NO: 15912 - protein, 376 aa, Pseudomonas sp.
MSKRAYKFRFYPTKEQKLLMEKTFGCVRFVYNHILDFRSKAYADDKVRIGFKEANAALTLLKKDPERAWLNEVSCVPLQQVLRHQQTAFINFFEKRAGYPSFKKKHHRQSAEFTRSAFKYVGGQLFLAKSKVPLDVRWSRDLPSDPSTVTVSRDWAGRYFVSCLCEFTPEKLPVSPVMVGIDLGLTNLFTRCNGEREPNPRHTAKYGARLALLQRRLSKKKLGSANRLKAKRKVARLHAKISDSRQDNLHQVSRRLINENQVICVESLKVKNMVKNRRLAKAISDAGWGELVRQLDYKGEWAGREVVKIDQWYPSSKTCSGCGYVLEKLALSVRSWTCPVCGEEHNRDTNAAKNIRAVGLTVLACGERVRPMAKVA

SEQ ID NO: 15913 - protein, 391 aa, Chloroflexi sp.
MYVDVRRIYKFRMYRNDKRDGHLHQQINVAGLVWNHALALQRRYYRLTGKYIGLGRLKKHIAKLRMKTQRYAFWKDLGSQAVQDVLERLDKAYQRFFVKQSGLPRFKKVKKYRSFTLKQAGWKLLDSDDKRYGKIQIGKREYKFVQHRQINGVIKTVTVKRDSAGRLWLCFSVFEKLWIPEGVSAGEIGGFDFGLQTFLTDHTGHKYLSPEFFKQELHRVKTHNRAVSRKVKGSNNRRKAGWMLARTHIRVGDKRRDFHFQLAHDLCDKYDLLVFETLNMDAMKRLWGRKVSDLGFAQFVKIVEWVAFKRGKRVIFLDRWTPTTQICSNCGERQKLDLKQRIFACGHCGLVLDRDHNAAINIRAGASAHTARGEVRLPSDSIAVDGRSPRL

SEQ ID NO: 15914 - protein, 410 aa, unknown
  TnpB Polypeptide
MSTQTITIKIKILPDEEQSKLLHAFREKYSLACNYVSEYVYESHVYSKKRLQPLFYRDIREKFNLNSQIVCSVFRTVSSKYVSLKSNHMDWTKIQFKPQCELVRNKDYSLTKDNCFSISTLQGRIKVPYINKHFEKYFDSDVYKFGTAVLFYKKGKWFLLIPITYEVEGCKEVTNIVGIDRGINFVVTTYDSKGKSKFIKGRSIKHRRKHFKNLREKLQRKHTAAARRRLKRIGKRENRWMNDVNHCISKALIQQNPQNTLFVFEDLTNIKEASKQICKKERSSHMSWAYYDLEKKLEYKAREKQDAVIKVDPSYTSQRCPICGHTEKSNRNKKKHTFICKSCGYTSNDDRIGAMNLYYLGKRILEKIKRDNVPLDGVLSITPNVGLSNINDVTNPLRVQLQASGFAGGS

SEQ ID NO: 15915 - protein, 176 aa, unknown
  TnpB Polypeptide
MTANISPDLLVVKLLNRNGLIIPGFVKNFKAIGQRENRWMQDINHQVSKALATGNPKHTLFVLEDLTGIRNATERVKTKDRYVSVSWSFYDLEQKLIYKAKQNQSSVIKVDPRYTSQCCPACGHTEKSNRNKKIHLFTCKNCGYTSNDDRIGAMNLYRMGINYLADSQVPDTVVTE

SEQ ID NO: 15916 - protein, 527 aa, unknown
  TnpB Polypeptide
MKKCLASRYIKKADLQPEENERILQDLFAFNSMKRTSFLWQTQGRKFLKDDGKELSHQLKLKEVFACNDYFANSARMTAAGMIKSGQELAKLYIEDAKEDIKAIRKVLRKKKKYRKKLLKIKTSIIKHTKDPKKPLKGSVNIRYGKDGSVTVQFFQKVWTYETLYLFEHQWLDRKLRQLKAQIANMEHKLKRLEIKQQRLKDHPLKVRFGGKKLTKNRTIPERHRALEKRRNRRMQISGRKDCRYGNWVFRYDIETKTLEYRSMTDWGGNRICFQDVTFPYGQEWIESWLHERKGAIAWEIIDCGTAWQIRCILTKESTDMNNYYGDGTIGIDINYDHIAMTETDQSGNLLHHKIFRYGMEGKTSGQIKHQISEILEKVFEYADQQHKPITAENIKSIQRKKFYDKHRKRHRHISMFASACIRELLTSKAVKYHIGVKFVHPAYTSKAGKMRYLRRYGLSVHEAAALCIARRGQGFKESIPSYLKPYLKDEKVRVLIPQQWGSLTKLINKVTTQDLLLYMDPVLHRN

SEQ ID NO: 15917 - protein, 378 aa, unknown
  TnpB Polypeptide
MASGSEGALTLSIGMRVSPEPEAIELLRRYNVALNYAINRILRLGLRSIGRVHNALYRELKEWFDLPSRVAIDCYRDALANANAWRNNPRRGRRPRVRKPSMLLHQGSGYRVKEGYVEIIGGIRLKIIGWDRRYDGYENGEARLVYRDGKMILWISKKAPKLKPYKPRDVIAVDVNERKIVYGDDKIIKERDTEIDEAHRWKLLAESLQKKYSSPRYPAWRRRKAILNRIRSYHRKARNILEDWARKTSLRIVKFAKKLGYAVAREDLTGLINSLRKIKNKDHRTKLIIMGYKRLGKWIDWNAKKHGVPLAIVNPNGTSSESSKRDSKLEENGYRRLRCPRCGFEADRDIIGKLNIRKRDLKILRISGGALTTPTAPK

SEQ ID NO: 15918 - protein, 228 aa, unknown
  TnpB Polypeptide
LLLQFRTDQQCLSKEERSNPNTIGGREIATYQAIRDLLRNAGLPTWKEYHEKYLKAMYKRDERLRHLYITAIRFLADELHRRGVRKLYIGYPYILSQDNGNEYITNIWWFRKIVLWIVDIFMEYGIDVEIVPEDNTSRECSICGNKHKNGRIYRGLYECKKTGKKINADINAALNIARKLGHRIRIARKIESYHVTRNGIKPLIPHQRANTRDPSIKTPPLKGGEGVI

SEQ ID NO: 15919 - protein, 322 aa, unknown
  TnpB Polypeptide
MENATERVHGRRIVRMTVSRHAGFWYAALTVERPTESVPAKNRKQKNRNRQVGVDLGVRTLATLSDGTTFPNPRNYVRMQRKLRHAQQALSRRDRGANHGYGSKRYNRALERVRRIHARIAAQRADNISKLTTWLADNYSDISIEDLNVQGMSHNRRLAKHVLDADFREFRRQLEYKTARAGARLHVIDRWYPSSKTCSNCGTVKAKLPLSERVYHCDKCGLDMDRDLNAAINIQVAGSAPETLNARGEDVRQTGSSRTMPTPVKHEPSGGASRVRLGAGLGNETMQARTNQIATEHHPRNLRGAVASQLLWAWPDRAANTR

SEQ ID NO: 15920 - protein, 427 aa, unknown
  TnpB Polypeptide
MIGKTVRKCIVLNNLDLTFKKSDILDSFVSEYLRVLDNTSLQLPNADSSNELHHLTYSNIRKTSFLPSDIVQEARKDIWKSRKDILNGHKFTNCSIRLNKRWFKYIQSNRGNPCFKITYSQKKTFVIPIQTNKQFKRFETFLRDMWVFDNISLLQDGRISVVLEKEFPEHEAQEQFVVGIDIGSSTLASATVFDIKNSKVVKQLYFGRDVAKIQRKFMQRRAYLKSLADKGSHRAKKSIERLKHKQLNFVKTRSGQISKEIVNLAKSYNAYISIEKLKNLRGRRGQFNKKANRKINRIPYEKFKEFLKSNCEMFQVHLHEVDAYHTSKWCTRCGALSSGHISGNYAIFKCKCGQIVNSDRKASLAIAIKSVLERNKTHSLTNLSSIQISKIRVPVNGLLRSDAVGSNQIVVQHIQSTYGMPTPFRGG

SEQ ID NO: 15921 - protein, 243 aa, unknown
  TnpB Polypeptide
MQNITVGKDENNFVKINTSINEIHRYKSLAERLQIKYPKIWKSNRNIEKRILSFHSKAKRIAEDFARKVSKRVINEAIRMNANVIKLENLRNLIKNVKRLPKKFRNKLYLMQYRKIQYWIDWQAKKNGLLVKYVYAAYSSIKCPKCNNKMNEVSYRWFKCNCGYENDRDIIAIINLNGRGSLSLLTAPHMRDVATNQLRGILAIHSGEKSELLYCRAHGSRKERTLRDFNSVALNEEERLSYS

SEQ ID NO: 15922 - protein, 414 aa, Dictyobacter sp.
MQMMEKSGHFLGLDREEYLFYATVHDRLLTRLGREGMIRAHKIRLHPTAEQQTYFARAAGVSRFSWNWALAEWNRQFEAGEKPTALKLKKQFNAIRRAQFPWTWDVTKNASDQPFFDLGKAFTAYFEKKARRPKFKSKKKSKPSFYLANDQFELKDHAVWIPKLGWVNLAEDLRFKGKITGARVTKKADWWFISITVELPDEVPQKRPAAVGVDVGLNRLATLSTGEGYENQAFLKASLQKLRHANKRLHRRVKGSKNREKARRQVARLHYRITCLRDDVLQKLTTRLADCYGIIGIEDLYLKGLLKNRTLARSFSDAALGKLLDLLISKVDQRGGQVVKVGRFFPSTKLCHGCQWTWDEITLANRVFVCQNPDCAYYLFSQDRDHNAGQNILQEALRLIGLIDQAVSGTGSDE

SEQ ID NO: 15923 - protein, 413 aa, Dictyobacter sp.
MLLCTKIRIEVSDQDAATLEFMQGKCRGLYNWLVMQQRNGVRWNLYEAKKSLQESKRYDPELCSVYGKLLQEVYFRLDKAMKAFFTRAKAGETPGFPRVRPRHDFFTLCYPAMYLKVNDGTMELPTGGKGKHKRFPNILASLTEEPPMAFQEVAISRDARGYYYASFVSEHQEASSEDTGVIAFDLGIKILATGINEHGRIYTIGGFKGSRWYNKQLDRIRSKRDKCTKKSRRYTYLSHVHKRVSAKKRQKQRDSLHKASHLISHKLVESTVVVGDLSQRQMVMKEHQQKNKRLNRMVYNDWGLFTFLEMLTYKCQLFGKELQILDERDTSKMCSQCHTLKPMPLWKRTYCCVECGLVMDRDENSAINILTRFLARLGPHTDSSDPCGVLQRDQNSGEVMEASCPILMQEQRL

SEQ ID NO: 15924 - protein, 393 aa, Oscillatoriales sp.
MYAVQKDVWHLKGFHKIIVEQLLRWSNNLFNVGTYESRQRYFKDQGAIKYPDLYKIAKTNENYGLLYSQVAQQSLKSVAESFSSFRALEKLAKKGELNQKPRLPKYRTPGGMYQISYPGQALKIVGNQVRLPLGNKGKEHFGTDALWIPLPERLKDCQIKELRLIPRNGQVWVEYVHKSLTEQAPSCSLEVTGVLGIDHGINNWLTCVSSNGKSFIIDGHKLKSWNQGFNKEKARVQSEHARHKSQINVMVFGWNKGQKQEVNMGGVTNQNFVQIPTAKVKDRLQQECDLRGWRFFEQDESYTSKASFLDQDLLPVKVGEKPDNWQPSGQRIKRGLYRSSTGLLINADVNGAANIIRKSKVATDSIIERLGRGLLTNPLRIKLWVDSSPKVCP

SEQ ID NO: 15925 - protein, 324 aa, Bacillus sp.
  misc_feature (273)..(273): Xaa can be any naturally occurring amino acid
MEVNQIMMNKAYKFRIYPNQAQAILINKTIGCSRFVFNYFLSLWDHAYKETGKGLTYGTCSAKLPAMKKELVWLKEVDSIAIQSSVRNLADAYTRFFKKQNSAPRFKSKKNNLQSYTTKQTNENIAIIGNKIKLPKLGLVRFAKSREVEGRIVNATVRRNPSGRYFVSLLVETEIQELPKTHSYIGIDVGLKDFAILSNGTHYKNPKFFRSLEDKLAKAQRVLSRRMKGSSRWNKQRVKIARIHEYISNARKDYLDKISTEIIKNHDVIGIEXCGYQNKDVKNLNLREWDCPSCRTHHDRDINASINLKHEAIRLLTARTAGLA

SEQ ID NO: 15926 - protein, 367 aa, unknown
  TnpB Polypeptide
MESCRRAAVLVAAGPGKRAGLGGAVPPADGGAARARVAGWGQRGGPAAGAARLRPGDGGLFPWQPLQTQLAQGGPGRGFRIVALRPGQVRRLNRHWGQVFIPKAGWVRFRWSRAVPESRSFRVKLDRAGRWHVAFATIPAPINGPGTGQVLGVDRGVTVSAALSTGEMLTCPRLSVGRQRRLKRLQRRLARARLGSNRRSQVKSAIARLRACEADARKDWAEKLSTDLAGWFDVICVEDLRITGMVRSAKGSIDKPGRGVRAKAGLNREILASGWGILALRLEEKAPGRVQKVHPMYTSQRCSACGHVAGENRKSQAVFACTACRYIANADVNAARNIAAGHAVTARGGSPLGRPVNREPQPALLST

SEQ ID NO: 15927 - protein, 427 aa, unknown
  TnpB Polypeptide
MIIQKAFKFRLYPTEKQAAALRQQGGNARFLYNLLLERKERMYWEERESWTRNDMILALPRIKEEFPFLKESFSQSLQQVAIHLAVAYTNFFEKRAEHPSVKTKRHRNDSFTIPQCWRIDLRFVFLPKIGKVSWRMHRPIEGTPKHLTVTQDGDRWFCSVQCEVEIQDPAPAEGPLVGIDLGLKSFAVLSDGTVVENPRHLQKMERKLRREQRKLSRRIKGSNNREKQKRRLQAIHRKVRDSRRDFLHKTTHWLVENYGGFAVESLNVAGMLKNHHLAKSISDAGWGEFGRQLTYKSLWNGNLLVEIGTFFPSSKTCSDCGAVNQQLKLSDREWVCDACGTIHDRDFNASMNIEAEGIRLLSCQGSEIVATGCPLGSETTVGLTGSNACGEGGSGRRHADGETTFGETGKVHLACQQLAKPTAHAVR

SEQ ID NO: 15928 - protein, 405 aa, unknown
  TnpB Polypeptide
MSNETTCRKTYKYRLDPTPEQTQAMQQVIGQCRMLYNNALEQRKTWWQRGQGIGATYYQQKAELPEVKAAFPELAGVHSQVLQDVLLRLETAFKRFFARVKNGEKPGYPRFQGRNRYHSFTYPQYGNGAVLDGGVLSLSKIGRIRIRLHRPLEGTPKTVIISKEADGWYACISCEQVPTQPLPKTGRVTGIDMGLKVFYVTAHNEVCENPRHFRKAEAALRRKQRKLARCEQGSKNREQVKQQVAKHHQKVKRQRCDFHHKEALHLLRHYDTIYLEDLQVANMVRNHHLAKSISDAGWAQFRAILACKAVWASKRVVAVPPHYTSQVCSRCGAYAQKSLSVRTHVCPECGLVLDRDHNGARNVLQVGLELDRQQQHSGEENQAGAPPSGGNVAGCRMRSPRSPAR

SEQ ID NO: 15929 - protein, 362 aa, unknown
  TnpB Polypeptide
MTLTYKYRLKGKRAARTLRRYAFAVNQVWNFCTATQRQTQRRWREGVVTKWKSFYDLKTLTGGASKDLGIHAQTVQNVCEQFTKSRDRRKRCPRFRHSGGARRSLGWVPFQQQSRQFTSSSVIYLGREYRFFGAKHRPLPPTATGGCFVEDALGHWWVCFYVKLAQDNSAGTGTIGIDLGLRTLVTTSTGEKIEAPQYFRREEEKLAVAQRAGNKRRSKALYAKIANARRDHLHKASARLVRKNSFIAVGNINASKLAKTRMAKSVFDAGWSTFRDMLRYKASRHGATYLEVDESFTTQTCSSCGALPPERPIGIAGLGIRVWRCSACGVSHDRDVNAARNILALGLSAQPRGDESRVAYGR

SEQ ID NO: 15930 - protein, 429 aa, Clostridia sp.
MKRTNVVRLIPDQEARSVLRTLGDRCAALWNSAQYRMRQAFFSGLPVPSYARLCKEFQDHDAYRALPSDMAQEILKKARQSWNAFFACLRLYRDGRLDSRPRVAGYWKDRRSGQRLLRVIPVKSPRSYSLTANTLSVTLPADLRSGGRLAIPTRGILRFSGAPRTLELSYDPARRRWYASQVVEMPEPERNPRPTQAAGIDLGARTLVALAVEGVERQVLFSGREVWKDFLYWTRKISAEQSRLAGAGRRTSWRLKLLYRRRARRLAHAFRALAKELARTLRASRVGTLYLEDLTGIRKDMDFGPGNLLVHNFWAFRMLRKAVEAACLRAGIEVVPVEADGTSSRCSACSGAVQRPKRNRAYCPRCGLAWHADANAALNIMSKGSSKGHGAKAKAPAPAALRWNRHRWVARAKPAAGMSRKTASRNLAA

SEQ ID NO: 15931 - protein, 372 aa, unknown
  TnpB Polypeptide
LRWQDGRSNIAFTRIAGNEKNCRPPSRCVENCTTRPCKSVVRPGRLTASASTTYSRRSNSDIKAVREDVRAVHSQVLQDALRRIDKAFQAFFLRCQRGQVPGFPRFRSESRYDSFTYPQAGFKLSGRLSLSKIGDIKIKLHRAIQGQIKTLSLKRENGMWYACFSCMVEPEPLPANDRAVGLDVGLLSFVTWSDGQRMGNPRLFQKAQKRHRRAQRRVARREKFSKRWKKAVRLVAKIHRKVFNQRNDFQHQLSRKIVNNYGIIFVEDLNVKGLSRGRLAKSVQDAGWAAFFQKLSYKAESAGRRFASVDPRGTSQRCPCGEANPKRLSDREHVYLDCGLVTTRDHASAMEVLRLGLSLQPLTRGAVMLRLD

SEQ ID NO: 15932 - protein, 402 aa, Escherichia sp.
VKRLQAFKFQLRPGGQQECEMRRFAGACRFVFNRALARQNENHEAGNKYIPYGKMASWLVEWKNATETQWLKDSPSQPLQQSLKDLERAYKNFFRKRAAFPRFKKRGQNDAFRYPQGVKLDQENSRIFLPKLGWMRYRNSRQVTGVVKNVTVSQSCGTWYISIQTESEVSTPAHPSASMVGLDAGVAKLATLSDGTVFEPVNSFQKNQKTLARLQRQLSRKVKFSNNWQKQKRKIQRLHSCIANIRRDYLHKVTTAVSKNHAMIVIEDLKVSNMSKSAAGTVSQPGRHVRAKSGLNRSILDQGWYEMHRQLEYKQLWRGGQVLAVPPAYTSQRCAYCGHTAKENRLSQSKFRCQVCGYTANADVNGARNILAAGHAVLACGEMVQSGRPLKQEPTEMIQATA

SEQ ID NO: 15933 - protein, 383 aa, unknown
  TnpB Polypeptide
MHTVQLLLRPTAYECSELDRRFHAISHIHNVCVSHADKLLVRLEHDNEYQAWRKEYLSIPKESKGAPAKHRKKLSSLMADRRKELGLSKTGFESRLKVCGKRYSRLLSSQQVQAEADRVWASVEKYLFGNGKKVHFKKHMDFQTIGGKSNRNGAKFDRDTMTVSWNGLEMKCYLPKKESSREYILESMEHKISYCVVKRLMFSSGWRYYLELVLDGPAPGERRKSGDKVMGIDPGVSTIAGVSDKGCILTELAPDADIYEKGIRKLQDSMDRSRRHSNPQNYDPNGTVKKGRKKWKYSKNYLRMRKQLKNLYRKKSAYILTIHRELCNRLIRDSGHFLVERMQYKALQKKAKKTEREEKVSEVKAKNGTIRQVHKYKKKKRRF

SEQ ID NO: 15934 - protein, 411 aa, unknown
  TnpB Polypeptide
MLKGYKYRIYPKPKQVELLEKHFGCSRYIYNWALEAKNESYAKTGKSQTFCHLANELPRMKEKFPWLAEVNSQALQKSLLNLETAFTNFFRKVKEGNKDPGYPTFKKKRGRQSFQCPQHVRVDFDGKCIWIPKVHKIKTVFSRRFKGEARTVTISKNPSGKYFVSILVEDGKSLPEKKPIDKDKAVGIDLGISHFAVLSDGTKIANPRFGKMIGTRLARLNRRVSRKVKGSKNKGKARIRLSRMYEQITNKRRDFLHKLSSRLVDENQTICLEDLNVAGMVRNRCLAKSIMDSAWSEFVSMLEYKSTWKGNNLIRIGRFDPSSKMCSKCGHIKDNLSLKDRDWTCEKCRAKHDRDVNAAVNIKNFALNRQNLIKQIPMDNREFTLGETGPLLDAEEACRQGRSLIQESTGL

SEQ ID NO: 15935 - protein, 402 aa, Streptomyces sp.
VIRAYKFLLRPTVRQEQALREMLRDHCSLYNGALQERRDAWRHTSKTTVRYGDQSAQLSEIRAFDPERQGRWSFSSQQTTLRRLDKAFQAFFRRVKAGQAPGYPRFKGAGHFDTVTFPRDGDGCRWDSTPHNPHTRVRLQGVGHVRVHQHRPVRGRVKTVSVKREGHRWYVVLSCAEALTEDLPATGAVVGIDMGVAHFLTTSNGEHVANPRFLQAAAEELAEAQRHLATFPKRTKHRTKAHRAAARKVAKIHAKIRRQRLDHAHKTALALVRDHDVIAHERLNTAGMTRSPRPKPDPEREGIFLPNQRAAKAGLNRSILDAGWGVFLAILANKAESAGRTVVAVDPRNTSRTCPSCGHVAKENRVTQATFQCTACGMTANADHVGATNVLNRAGLALCVAA

SEQ ID NO: 15936 - protein, 372 aa, Gemmatimonadetes sp.
MKRVIQIKLLPTAEQAAALEETMRCFNAACTWVAKRAFERQLANSYALQKLYYYEVRETFDLPADIAILTFKQVASCYKRDKSKQVSFRPLAAIPYRKGSFRYKGLEQINLKTADGVRHDIPMVMGDYQAAQFGNVKLFAELVRRKDGKWFLMATVEHDPEPPCDPDDFLGVDLGVENLATDSDGDLHTGEDVEEVRVKCQTLKPSLQSAADLAANHRRRKRIRKKLKRLADREARFRRNTNHCISKRLVAKAKDTGRGIALEDLKGIRDRIRFRKPQRNRMGSWGFDQLRAFIAYKAQQAGVLLKIVDPQYTSQMCSQCGHVERGNRSCQSRFCCKQCGHQAHADCNAARNIRARALVNEPIVSAYAAAAG

SEQ ID NO: 15937 - protein, 398 aa, Nonomuraea sp.
LDSQAHTARALWNLLHEYFTFRQGLFPTSAECDRAIRQARHEIDWVGRLPAQAAQSVLKNYRQAWTNFFNPDHPAKRPTFKSRRTRLAVDVPQARDLQVRRLNRRWGAVNLPKIGRTRFRWTKDLPGVTKGGPAGRITGARLVKDAYGWNIMFRAEMLTTPRSAEHPGPQVGIDRGINVALALSDGTMREHGPWLSDGEREHLRRLEKKSARQRRSHVHGGPISRRLARTYAKIAKVRAKAKRRTLDWQHQTTTELAGTFSKIMVEELKITSMLRSAKGTTGRPGVNVAQKSGLNRAIAAEAWGRTVAFLEYKSADRAGRVVKVPAPGTSLTCHRCGHCEPDNRAGVMFSCRNPGCGWGGHADTNAAINIRNAAGTAVPGRGDLGVTRSTKRQPPHAA

SEQ ID NO: 15938 - protein, 334 aa, Nonomuraea sp.
VPGRPPGAVQRGSRTPPYGLPQSWGDGALRRAGRTPGFPRFKGRGWFDTVEWPKDGDGCRWDSQPHHPSASYVRLQGVGHVRVHQHRRVLGTVKTISIKREGARWFVVLSCDDVPVQTLPAAGAVAAIDMGVASLATTSDGDHIENQRHLAASADRLAAAQRDLAGKKRGSKRRRKAVAQVAALHAKVRRQRLDSAHKAALALVRGYDVIVHEALNVAGMTRRAAPKPDGEGGYLPNGAAAKSGLNRSILDAGWGVFLTILAHKAESAGRELIAVSPANTSRTCSRCGHCARENRLTQAVFRCTACGFSAHADVNAAINILRAGLALRDAAQAA

SEQ ID NO: 15939 - protein, 325 aa, Nonomuraea sp.
MAVDIPQGRDLCVTRAHRRWGMVTVPKVGRVRFRWTKDVPVGKQADAGNRITGARLVKDALGWHIAFRIQTIVTKPEPHQGPDVGIDAGVAVPLALSDGNHHTHEKWKVTKDKPNAWLTGKEQATLLALERRAAHRKSLRKPGERTSRRLRATYDQIARLRARAKRRAIDWQHQTTTEIARTYGVIVVEDLLITNMTKSARGTVENPGTNVAQKAGLNRSISQEAWGRTVTMLTYKAERYGGALHKVAAAGTSLRCSACGFTIPGSRESQAVFVCKNPGCGWSGNADHNAARNTLHRYRMGLALVPAAGRAVVRRAGRVKPATVR

SEQ ID NO: 15940 - protein, 257 aa, Nonomuraea sp.
VLACRVAFTHRGTEWADRIEANRAVAYRIHLDTQRGRWYITASWQIPAPPAVPLSAALAAGVIGVDTNADHLAAWRLDVHGNPIGNPRRFCYDLSSNAMHRDAQVRHALTRLLHWARTCGVKAIAIEDLDFAAEKTREKHGRRKRFRRLISGLPTSKLRARLTSMADATGIAVAIGRRAQGHPIRRRTAPPPVHRSDEQGHRTIQAEPETRGREGPPRIPGPRTRSVPPGHGAYAGDQNAQHRSERSAEHVPLVLSP

SEQ ID NO: 15941 - protein, 389 aa, Nonomuraea sp.
MGYTVMCSIVRLMVQVKLLPTPEQAAALEATLRAANKAADLVSRVAFQQQCFRNFDLRKHTYEHVKAAFGLAAQAAQHVIKKVCDAYRTLHANLAAGHLGKPGSARRVKAEGKPISFRPQAAQPYDDRCLSWQHGDRTVSIWTTAGRLRSLAFTGSDQQLTLLSKHRKGESDLVWREDMWFLHATVDVPDVPIIAPDGFLGVDLGIANIATTSTGVRHSGKGLNAVRHRNRELRRRLQTKATESAKRLLKRRHRKESRFAANVNHVIAKQVVTEAERTGQGIALEDLQGIRDRVRLRKPQRVTLHSWSFQQLGAFIGYKAARAGVAVIHVDPSYTSQQCSHCGHVDKNNRLDQETFSCTSCGFAEHADVNAARNIASRGAAGWAVSHAA

SEQ ID NO: 15942 - protein, 402 aa, Nonomuraea sp.
VRTAYKVRAYPTPEQAAVLNRTFGCVRLVWNRVLAWRHQRYHREGVKTSYAQTDRYLTELKRGGEHDFLYEVSSVPLQQALRHQYTAFANFFAGRAKYPRFKSRHGRQSATYTRSAFRWKDGRLHLGKMEGPLEFVWSWPGIDPASVEATTVTISRAPDGRWYISLSVEADDKGMRLPSTGEAVGVDLGVRDFAVTSAGERIANPRHLERKARNLARYQRRMARKQLGSANRAKAKLKVARAHTKVRDARADFLHKTSTRLVRDNDVIVIEDLAVTNMVRNRSLARVISDCGWGEFRRQLEYKTAAYGRRLIVIDRWYPSSKTCSCCGHLLVELKLGVRHWRCPACRTWHDRDVNAAKNILAAGRAVTACGADVRHSGSPRVRSAVKQETRPARAGTPALAF

SEQ ID NO: 15943 - protein, 378 aa, unknown
  TnpB Polypeptide
MKLTETIKLHMTKEQKNIIIKAMNEYINTVNSLVSIATNGISIAKYTTADIDAPLPSALKNQCIRDAKSIVKKYNKNCHEASAKNSKLAKQKSTSTIKEPSIPVLKKPCCYINNQNYKIKDDHIEFPALIDGKVKRIAVRTSMTDRQELILSDAKLGILRIVYKGKKIVAQIVYEAKEQQYLEEGNIMGVDLGIKCPAVSYISDGHIKFYGNGRKNKYMRRHYKCLRQNYSKAKNIDAVKRINNKEQRIMKDIDHKLSREIIETAISHNVKIIKLERLANIRSTTRKSRENNHSLHTWSFYRLAQFIEYKARLAGIKVEYVNPAYTSQTCPVCGHVHHANDRNYTCKCGFHIHRDILGAMNICNSTEYVGDSNIRHTA

SEQ ID NO: 15944 - protein, 337 aa, unknown
  TnpB Polypeptide
MGMKIHKGYKYRLRTNRTIAHQFVRFAGACRFVWNKILAINEGRYLAGVPRLTYADSTRLLTLWKQSEEYGWLTTVHSQVLQQCLKDLDRAYTNLYEGRAQPPTYRKKFLADAFRYPQGFEVNGNHVYVQKIGWGRFWQSRPIDGSIKHITVLPPLNALRTHEHKLVRAQQALAQKVKFSQNWQKQQARIRRIHTKIANCRYDFLHKHSTEISKNHAVVIVEDLQVRNMSRLARGTPEAPGRNVKAKSGLNKAILDQGWGMFRCLLTYKQAWRGGKVIAVPPRYTSQQCPVWGHVDAKNRVQQALFSCQACALAYARVTTRMWWPPAIASLSGRERG

SEQ ID NO: 15945 - protein, 411 aa, unknown
  TnpB Polypeptide
MLTFRAYKSFNLYRREVPIVHGGDESRNVISRWIIAIFMRAVLSQKFRLYPSKQTGEVLFQHVDLCRWLYNRLLEELNKAKVEGRKLSQKDTQALIVKLKTEKTELEQVYSKVLQMVNYQLWSNIRALSAIKKKGRKIGRLRFKGKWFKTLNFNQSGFRLEEKKLYLSKVGAVSIKLHRSIEGKVKGVFVKRELSGKWFAVFQCENRVEVLERTNNAIGLDVGVKHFLSDSDGRQIESPKFYEHSLERLRKAHKVFSRKKKGSKNGAKAKVKLARAYEKVVNQRDDFLHKLSRFYINSYGVIIVEDLSVSGMVKNHNFAKRILDASWSKFFSMLSYKAENAGRILVKVNPRATSQEYKHGELDRDYNASLNILERGLAGLGRPFEPVEVKPLLVKIPASVIVEAGSPHPSG

SEQ ID NO: 15946 - protein, 391 aa, Lentibacillus sp.
MLVQKAFKFRIYPNEKQVELINKTIGCSRFVFNFFRGKQKEKDTYWQIVEEMKQNGQLPVNEWKGPFFDKYESIKGVRHLKEHYPFLKEVDSISLQKSVENLADSYQRYYRKQNKKPRFKSKKNKVQSYSTKQTNGNIHVLDKHIKLPKLGLVRFAKSREVEGRIISVTIRRNASGKHFVSIQTETEVQAFAKTNSAVGVDLGLKDFATLSDGTVFSNPKWLRTLEKKLTKAQIILSRRTIGGSNWNKQRVKVARIHEAIANARKDYLDKISTYLIKNHDVIGLEDLSVSNMLKNGNLSKAISEASWSEFRTMCEYKAKWYGKKVIIVGKNFASSQLCSGCGHKNKDVKNLALREWTCISCGSHHQRDINAGLNLRDEAIRLLTAGAVGIA

SEQ ID NO: 15947 - protein, 403 aa, unknown
  TnpB Polypeptide
MIRSFEYRLYTTTEQDKKLMGCLRESRILYNEMLEVAVNEYKRSSHHLGKYELDAIFRGRGKECIPASTVQCLADRLSKSFKQFFNRKDYNFRMGFPRFKSVRQWRSIHLRQYGSPDKQLDVSLSKDGMFLNVPKKIGGRIKIKLHRPIGETPKTVHLVLRADRHWYAIIVCDCALTPTDQGCGQVGIDLGISSFITDSNANKVSNPKHLIASQCILRRKQRALARSQRYSHRRGLAVESVAKTHLKVSRQRRDFLHKVSQSYANKYQNIIVEKLNMAGMLKNHHVAKSILDASWSTFIILLTYKAESAGHQVIAVPAQYTSQKCSNCGEIVPKSLSVRTHICSHCGYIEDRDVNAAKNILQAGARPSEDNVVGYHMRPPISLQQELEGVVTTFPRCLSSAVL

SEQ ID NO: 15948 - protein, 381 aa, Cyanothece sp.
MTLTLNYTYRIYPDSKQEEMLSEWLEICRRSYNYALRELKDWIASRKCPIDRCSLESEYIMSADYPFPSYHFQQNQLPKAKKVFPSLSKIPSQVLQTNIRRLHDAWDFFRNRGFGFPRFKKYGQMKSLLFPQFRSNPLTGWQIKLPKLGNVQINLHRPIPNGFVIKQVRVIKKASGWFAVINIQSDLNLPEIETPFGHFLGIDVGLSSYLATSDNHVEKGRKFFKTEHRRLKVLQRRLARKQKRSKNYEKARLKVEKQHNHIAFKRKDYQFKLAHKCCDMGDSIFMEDIDFRIMAKGFLGKHSLDAGFGQFRDILKYVCKVRGKYFGLVDHRGTSQTCPNCRAQVRKTLSDRFHVCHECGYGVDNFVDRDVSAAQEICFKG

SEQ ID NO: 15949 - protein, 402 aa, unknown
  TnpB Polypeptide
MKVNCAYRYEMKPNAKQRILFSQHVGAARFAYNWGLQQRIALYEQEKKSTNAMEQHRQLNSLKENTFPWMYEVSKCSPQEALRDLDRAFQNFFRGIRKGQSIGFPSFKKRGRHDSCRFTGTIKVGSKEIQLPRLGVIRLKEKTKVRGRILSATIVREADRWFVCLPVEMEKPDPSPIEGAPIGIDVGLTCFAALSNGDKIHSPKPLAKNLKRLKRASRQHSKKVKGSNNRKKSALKLAHIHRNNRNIRKDFLHKQTTMLAKTKSVIVLEDLDVKGMMSKKCLSRCISDAGWREFRCMLEYKTKWYGSSLIIAPRFYPSSKTCSNCGHLIDKLPLEIREWRCEVCQSIHDRDLNAAKNLLRFNTGSSPGIYACGDTSYGANRKFASNVSMKQEVMNGIFVHKL

SEQ ID NO: 15950 - protein, 374 aa, Acaryochloris sp.
MKTLKFKLYSHKRNRYLKRSINAAGVIYNYCIALHRRYYRMFKKHLNCAKLQAHIAKLRKRNPFWQQVGSQAVQDICQRIEKAYQLFFKHHKKGVRPPNFKKVKKYKSFTLKQAGYKFLGDNRVKIGSRVYQFWKSREIERTVKTLTIKRTPLGELFMVVVVDDVELPEVKFETGEAAGFDFGLKTFLTCSEGFTIDSPLFLKQALNAIRKASRQHSKKQKGSANRERARKNLVRKHEDVANRRSDWFWKLAHKLTDQFDTLYFETLSLKGMQRLWGRKIGDLALREFLQILEWVAKKKGKTVAYIDRWFPSSKTCSCCGHVLESLDLSVRRWRCPSCHAENDRDENAAVNIKMVGVSTIGLGDVRQAQLAIPA

SEQ ID NO: 15951 - protein, 455 aa, unknown
  TnpB Polypeptide
LKGERLMIRKKMKTFSTVLEEENAKEIIKYFNETVADYNVLKRVTLHILRNDPDISVSKLNTLLQERFGITKRTAGSAIIEAKGAIASALALIPLNIEKLETRIDSKIKLIEKKRKEIDKIHSSRKTNTKRLTRLKFHIYSIHNSINRLEQKIKSFKKQLENRKPNICFGGKKLVKKNKKAFIEHRDSQINYTGTASEVKGNQNFQFQYIKKGNFFVMKVRRDFGNWKNSKSKERFVYGKCYFKYGSADLREALCGKNTPVSTSIIKRNNRYYLYVTITLTLESNGIVTRKEYGVIGLDFNKGFINICETDEKGNLIYKEKIKYPFGKSGVTKAGLHKAIAIVKKRAIQNGKSIIVEDITLEKKKRKLKKAVTPVEKRKMKTLHSMPYSIYLRILDDVTFNNKIELIKINPAYTSKIAEQKFCDRMKLNIHDGAAYVIARRGMGIKDKFIKTKAS

SEQ ID NO: 15952 - protein, 407 aa, unknown
  TnpB Polypeptide
MMLTEIHQVNKGNPLYDVFDDLCFKSKNLYNAALYTFRQSFFDNDAKTLSWMEISTMFSKSKQSDYASLQSRVANNVIKMLGANISSFWELLKLKKKGEYDRKVSLPKYLHKTEGRFALDFRSGTISKKKGERGEAILCPRSYNIKIPTKVKGKINCIRVVPCRDYYKIEVIYEIKDTVPKTGGCMAGIDPGGENLLAIAFSDKEKRPAIISGKKIKSGNCYFNKVIGEAQSKLRPGTYRSSWLDRLWTKRENKLSYEMHVISKFVADFLDESGCSKVVIGNNKNQKQEIKLGRKNNRKFVQIPHQKLFQMIEYKCKRKGIEVIFREESYTSKASFIDNDFIPEFSIENHGKYKFSGKRVKRGIYKTSAGKKINADINGAYNIMAKQFSEELSDRTGRKYSPVKFNI

SEQ ID NO: 15953 - protein, 449 aa, unknown
  TnpB Polypeptide
VNTLKSFKTFSTVLEEDNAKEIIEYFEETAGSYGYLKRCALHILRNCPEISKNDLNKLLQKRFSVTARTADSAIYEVEGVINSALALIPLNIEKLEARIDNKMKVIEKKRKEIVKIHASRKTNTKRLRKLKMHIYNICNSVNRIRQKIGNLEKQLNEKKPNICMGTKKLARNDIETFKRYRDSQISYIGRACEKQGNANFQLQYVKKGNFFSMKVRKDFGKWKEDRSPERFAYGKCHFKYGGRQLRDAMRNNASPVTVSVIRRNDRYYLFVTIVISYESSAIVTRKEHGVIGIDFNKGFINICETDEKGNIVSIEKIKYPFGKAGVTDAGLSDVINRACDKATDTGKSIVAEDLSFERKKRKTKKAVTPSEKERMRMLHSLPYSRYKQILENLTFNRRIELIKVNPAYTSRTAEQKFCSRMKLNIHDGAAYVIARKGMRIRDKYLKKTG

SEQ ID NO: 15954 - protein, 449 aa, unknown
  TnpB Polypeptide
MLKQKYTTVTQLHEVNNKDIIEYFENASVYFCKLQRKAFHIFKNENIKGNKVEYNKLRQDFMKEHNISKRTAGSILKDIQGKLKTLMGLKKYEVSQKEQKIKNLKEEIEKLDKKISEFQEKIKNKIKVNHLKYWNLKKSRAFKKMKLNKFKMRLEQLKWEIETGHYKLCFGTKKFLQSNKTEFYLQRDSQMLYIGSQDETRRNQMFQMEYNNKINQFEIKIRKDFGFDAEEKYVFGKCYFNNHKNKLIEALGNKNSTPLTYSIIRKNGRYYLHCTFEYRIENKDLFLTRKNYGTIGIDFNKGFLTVSEIDRNGNLVKTDIFKYRFGKGNKTQSDLENCISKILNRAFETGKDVCFEDLNFKAIKSKATKGKTDKGKKYNNMLHTLAYSLYDKLITNMAFRNKIGIIKVNPAWTSWIAKNKFCERMKLNIHIGAAFVIARRGLGIKDTIK

SEQ ID NO: 15955 - protein, 446 aa, unknown
  TnpB Polypeptide
LKSFKTFSTILEEDNAKEIIEYFEETAGNYGFLKRCTLHILRNNPEISRNDLNKLLQERFSVTSRTADSAIYEVEEIISSALALIPLNIEKLEARIDGKMKIIEKKKKEMAKIHASRKTNTKRLGKLKLHIYNICNSINRIKQKIENFERQLNERKPNICKGTKKLARNDTKAFKQYRDSQINYIGRACEKQGNTNFQMQYIKKGNFFAIKVRRDFGKWKDDRSPERFAYGKCHFKYGGRQLRDAMRNNASPVTVSVIRRNNRYYLFATVAVSYESSSIVTRKEHGVIGIDFNKGFINICETDEKGNIVNIEKMKYPFGKAGITNAGLADVISKVCEKSIETGKSIVAEDLSFERKKRKSKKAVTPTEKERMRMLHSLPYSRYAKILENITFNRRIELIKVNPAYTSRTAEQKFCNRMKLNIHNGAAYVIARKGMGIKDKYLRKTG

SEQ ID NO: 15956 - protein, 418 aa, Arthrospira sp.
MIVREAKLLNGTSGQYSALDDAIRTAQFIRNKCVRHWMDNQGVGKPALYVRSKDLAKEFEFAKKLNSSARQASAERAWTSISSFYSRCHKGEKKKGYPQFKKHCRSVEYKQSGWKLSDDCLQITFTDGFKAGRFSVFCNGETREDLHRLKINRVRVVRRADGYYAQFLFDADRKEEGNFTGNVIGLDLGLKYFYKDQNDNAVEYPKFLRKSEKRLKRQQRKLSKKFVKGAKPQSNNYHKQRKRLGKIHLKVQRQRKDWAIKLARCVVAFNDVVVYEYLKIANMVKNHHLAKSISDSAWYQFTQWLDYYGKIWDKAVVAVNPAYTSQDCPNCGHRVKKTLSTRTHSCPSCGFEACRDTAAAINILKRGMRILGIEWQNSTFGQKETASKDGTTGEMIASTLESKVNNASDVAEPVTRIP

SEQ ID NO: 15957 - protein, 362 aa, Okeania sp.
MVEKAYKFRFYPTPEQEDLLRRTLGCVRLIYNKALAARNQAWYERQERVGYAQTSAMLTNWKKHKDLGFLKEVSCVPLQQGLRHLETAFTNFFSGRAKYPNFKKKRDGGSAEFTKSAFKWKDGQVYLAKCAEPLPIRWSRQLPKNCVPSTITVKLDPSARWSISLRVNDTRNLKLKPVTKQVGIDLGITSLLTTSDGEKVANPKHLQKLHKKLRLAQKSLTRKTKGSNNYQKARLKVARIHAKIKDSRIDYTHKLTTQIIRENQTIVVEDLAVKNMVKNHKLARAISDANWGELVRQLEYKAEWYGRELIKIDRFFPSSKRCSNCGYVIEKLPLSIREWDCPKCAAHHDRDINASINILRMG

SEQ ID NO: 15958 - protein, 406 aa, Agathobacter sp.
MPHISQTYSFRYFNTIVFHKDENNFYLCGKDIIKYQTMQAYKYKLYKTKRTKHIDDMLREAAFTWNKALAMQKRYYSLFGKYINKYQLIKWFDKRIKRYYLGSQVRQEIIVRLDSSYNRFFNKIAQRPPKFKKSVDFASIVYSQCGYKIYDNEIILNQKFIFKFSKSREFGGGEVKRVIIKHSRVNEYYLIVVTDAIPQKYRKTHNGASVGIDFGLKTYLTMSDGSEYYNPLFFKQNLKTIRKESRNLSKCVKGSNNRKRKRLQLSRLHESLHNKREDYQYKLAHELCRKYDYIFIEDLNLKGMTKMWGSKINDLAHSDFVDKLEYIASKYGVVVHKIDRWYASSKTCECGYVNKFLKLSDRQWVCPECGCINHRDLNAAKNILLKGISELESIGKTSSEALCVCI

SEQ ID NO: 15959 - protein, 374 aa, unknown
  TnpB Polypeptide
VNKAYKYRLYPNKEQAVLINKTFGCVRFVYNQMLAHRKAIYEQYKDDKEALKQQKYALPADYKKEFPWLKEVDSLALANAQLNLNKAYNNFFRDKTAGFPKFKSKHHNRKAYTTNNQKGSIRLIDSKTIRLPKLKDVRIKMHRQLPSNVIIKSATISRTPTRKYYISILVEYEAGIKPIKPTAEKAIGLDYSSQALFVDSETNSPDYPKFYRQAEAKLKREQRKLSKRKKGGKNREKQRRKVAKLHEKAANQRKDFLHQLSRQIANAYDVVAIEDLNMRGMAQSLNLAKSTNDNGFGMLKTFLAYKLMEKGKHLVIIDKWYPSSKLCHLCKHENKELTLADRTWTCPRCGAELDRDINAAINIKNEGCRILGIA

SEQ ID NO: 15960 - protein, 424 aa, unknown
  TnpB Polypeptide
MPESSEKTRNIKFRLYPNRGQAQTLVGWLGLHCELYNAALQERRDAWKKSKVSVGYIDQQNSLPEVKEYRPELVPLGSHALQETVRRVDRAFKAFFRRIKSGDKPGHPRFKSSKRFDSFTYPDPAGWKVRKNKKRSFKLSIKNFGVLDMRGCPRVELENGEPRTLTVCRKNRKWFATITVRYEFTALARARAEEGRDVGLDAGCLALVATSDGERIDNPKYLSQSLARLRKAQRELSRKQKGSRNRERARQGVARLHEKVANQRKDFHHKLSAKIAAKYSLIAIEDLNLRNLSRSARGTVEEPGKNVRQKSGLNRSLMDAGIGQLYSMIAYKAEEAGGRLEAVPSWGTSQRCSECGEHVAKTLSERVHECPHCGYVEDRDVNAARNILILGQTQAGREPAEVWRGSKIPCEARNRHYTGASTHG

SEQ ID NO: 15961 - protein, 392 aa, unknown
  TnpB Polypeptide
MKYKFRFYPGTTQQQSLAKTFGCCRFVYNWALRVRTDSFKAGKTINYNASSAALTQLKKSPEHQWLNDVSCVPEQQALRHLQTAYKNFFEKRTGYPSFKKKTGKQAAEYTRSAFTWNAANKSLVLSKIGRLRIRWSRSFTSDPSTVTITKDAAGRYFVTLTLDEPVQRYPKTGEVVGVDLGISRLATLSNGERIPNPQHIRKDQRKLARAQRVLARRKKGSNRRKQAQLRVAKIHARIADARNDYTNKVTTNLVRRFDVICIEDLHVRGMVKNHCLARSLSDAALGMFRTQLEYKAKWYGKEIRVVDRFFPSSKRCNSCGHILESLPLSVREWDCPECKAHHDRDENAAKNILAAGYAVSARGGSVRPVRALARKGAIRRTVNQLGRGKQQC

SEQ ID NO: 15962 - protein, 402 aa, unknown
  TnpB Polypeptide
VKRLQAFKFQLRPSGQQECEMRRFAGACRFVFNRALARQNENHEAGNKYIPYGKMASWLVEWKNATETQWLKDAPSQPLQQSLKDLERAYKNFFQKRAAFPRFKKRGQNDAFRYPQGVKLDQENSRIFLPKLGWMRYRNSRQVTGVVKNVTVSQSCGKWYISIQTESEVSTPAHPSASMVGLDAGVAKLATLSDGTVFEPVNSFQKNQKTLARLQRQLSRKVKFSNNWQKQKRKIQRLHSRIANIRRDYLHKVTTTVSKNHAMIVIEDLKVSNMSKSAAGTVSQPGRNVRAKSGLNRSILDQGWYEMRRQLEYKQLWRGGQVLAVPPAYTSQRCACCGHTAKENRLSQSKFRCQVCGYTANADVNGARNILAAGHAVLACGEMVQSGRPLKQEPTEMIQATA

SEQ ID NO: 15963 - protein, 515 aa, unknown
  TnpB Polypeptide
MGKSRSPSFIHELKLKVNPRQERVLNTRLEIARHFYNACLGEGLKRLRLMRESKTYQKACKLPKQIKNRQGKWVANQERQKLFKAAREYAIFDEYGLHDYVKVVRGKTWLSQHIDASVAQKLATRAFQAVEVYAYGQRGRPRFRAKQRFSSVEGKRNDTGICFVDDKIRWFGFSCELHFDAKDKHGLEAHALACRTKYVRLVRRMEKGSYCWYAQLVQEGMPYRKPKNRLSEGVVGLDLGPSGIAMVQEEQAVLQGFCHELIDVSAHIRRLQRKMSRSLRQMNTDNFEVDKYIANSNGRCRKKQGKVKRGAKQWIKSKRYQRDQKQLIEWHRKMRASRKCAHGRLVNDILRAGSCIKTEKLSYKAWQKKFGKSIGRCAPGLFMEKLRYKAANAGGEVIEFKTSTTALSQRCHCGERKKKPLKQRWHMCSCGVRAQRDLYSAFLARFVKEDRLDRSQAVAAWPGAGIFLEQALSDYKKTTSSKLRLACFGLGQRQSGSSAKEESIPHKALDVVAIA

SEQ ID NO: 15964 - protein, 389 aa, Eubacterium sp.
  misc_feature (290)..(368): Xaa can be any naturally occurring amino acid
MLKAYRYRIYPNKEQEIQLVKTFGCCRFVYNQTLAYRKDAYEKEKKSVSKTDCNNYCNRELKKVYEWLKEVDKFALTNAIYDMDNAYQKFFKEHAGYPKFKSKHSNRKSYTTNFTNGNITVDFDRERIKLPKLKRVKIKLHRKFSGQIKAATISKVPSGKYYVSVLVETEHSPLVKTNGKIGLDLGIKDLCITSDGKKYENPKTIKKYEKKLTKLQRQLANKTKGSRNYQKKRKQTALYYEKITNTRKDYLHKISSEIINENQVIVSENLQIKNMVKNHNLAKSISDVSXXXXXXXXXXXXXXXXXXXXXXXXXXXXXXXXXXXXXXXXXXXXXXXXXXXXXXXXXXXXXXXXXXXXXXXXXXXXXXXKHDRDINAAKNILAEGLKQVV

SEQ ID NO: 15965 - protein, 367 aa, Eubacterium sp.
MLKAYRYRIYPNKEQEIQLAKTFGCCRFVYNQTLAYRKDAYEKEKKSVSKTDCNNYCNRELKKVYEWLKEVDKFALTNAIYNMDSAYQKFFKEHAGYPKFKSKHSNRQSYTTNFTNGNITVDFDRGRIKLPKLKMVKIKLHRKFSGWIKAATISKVPSGKYYVSVLVETEHSPLVKINGKIGLDLGIKDLCITSDGKKYENPKTIKKYEKKLVKLQRQLANKIKGSGNYQKKRKQIALCHEKITNTRRDYLHKISSEIINENQVIVSENLQIKNMVKNYNLAKSINDVSWYELTRQLEYKSKWNGRNYIKIDRFYASSQLCFSCGYKNKNVKDLKVRDWICPFCNTKHDRDINAAKNILEEGLRQVV

SEQ ID NO: 15966 - protein, 486 aa, unknown
  TnpB Polypeptide
MSRWPRLMVLRPIVFAIHLHPRCLRIRADVSEEAAQDVDRTRAEYTAAILCDEDPMHGYAKTQCRPRRILLSWLLDQRYRRWVKCLQAFKFELRPNGRQRQQMRCFAGSCRYVYNKGLALQKARFYAGESKLNYAGLCKLLTQWRSQTETLWLKEAPTHSLQQALKDLERAYMNFFAKRADLPRFKKKGRHESFRYPDPMQIKLDPMNSRLFLPKLGWLRYRNSRAILGLVKNVTVSRSCGRWFVSIQTERELEQPLPRGGAVGIDLGVVRFATLSDGTFYAPLNSFKRHAAALRKGQQAMCRKQKFSNNWRKAKERIQRIHARIGNARRDYLHKTSTAISQNHAMVCLEDLQVRNMSRSAAGTSENPGKHVRAKAGLNRSILDQGWFEFRRQLEYKLAWNGGSLILVPPQNTSRRCPQCNCVSARNRRTQERFHCIACGFEANADRVGAINILRAGHARCACGVSDSDRQQQEPTEAIQEQLRAA

SEQ ID NO: 15967 - protein, 367 aa, Plesiomonas sp.
MKEIAIKQRFYPTPEQAQLLAQTFGCVRFVFNKILKWRTDAFYNDAQKINYNAASSKLTEIKKLPEFEWLNAVSCVPLQQSLRHQQTAFKNFFEGRAKYPTFKKKRSNQSAEFTKSAFKYKDGKIYIAKSQQPLDIRWSRDLPSEPTTITITKDSADRYFVSMLCRFEPKPLPVSKRTTGIDLGLTDLVITADGFKSGNPHHTANHARKLALAQRRLSKKKKGSANFHKARQKVARIQAKIADCRRDFTHKLTTKLINENQVISCESLSVKNMVKNKRLAKAISDANWGELVRQLTYKADWYGRALVQIDKWYPSSKRCNCCGHVVESLPLHIRHWSCPACKTRLDRDVNAAMNIKAAGQAVLACGA

SEQ ID NO: 15968 - protein, 399 aa, Caldicellulosiruptor sp.
LKIIVKRVERIQIKRNHELWRYCDEICFAAKNLYNYANYITRQEFIKNNKWVRYKELNRILKEHETYKNLPAQTAQQTLRLLDRNWKSFFRAMEEWRRDSSKFNGRPKLPKYKKKDGKAISVFTNQQCKIKDGYLTFPKTDLRLKTRVAGNLREVRIIPKGCVYVVEIVYEKEIAEIKRLPKRIAGIDLGLNNFVTLVNNIGIKPIVINGRVIKSINQYFNKKRAEFMSYVGNRGISRRIEKLTLKRNNKIKDFMHKTSRFIVNWCNENNIDTLVIGYNSGWKQEIELGKVNNQNFVSIPFYDFVNMLKYKCEEEEGINFIVVEESYTSGCSFLDREEINKTSYNPQRRIKRGLFKSNKGILINADVNSAYNIIRKVFPEAFAEGIEGVGLHPVRLNIA

SEQ ID NO: 15969 - protein, 405 aa, Caldicellulosiruptor sp.
MYKTQKNHIRCDKQTYKLWRVLCHISKNLYNYALYHIRQHYFNTRQYLRYESVYHIVKENENYRLLPSQIAQQTLVCVDEAFKSFFKLIVAKKEGKAVKKVSMPKYLPRDGMFLLSFPKDQFKAEDDKLRLSLGRDFAKEFGVRYLYFDLPATVLGKKIKEVRIIPRFHGRWFEIEYVYEEEEKCYSLDRSKFLAIDLGLDNFAAVVDTIGTAFLIEGRYIKSVNRWYNKEKARLQSVYSKQGIKCGSKLAKISLKRQHILDNFLNQAVSFIIKHCLGNRIGTVVVGKMDNIKQGIELGRVNNQNFVGIPYEKFKRKLKSKCEEYGIEYVEVDESYTSQKCSRCGVLRKSNRKHRRLYVCRECGSVMNADINGAVNILAKVAGEFAAEQITSSGCVNHPVKIRVA

SEQ ID NO: 15970 - protein, 388 aa, Caldicellulosiruptor sp.
MIITYRYRLYPTKEQERQLKKTFGCVRFAWNYFLAYQKEVYRQQKKSPNAFAWIRHLQQHLKREYPWLKEVDKFALENEIKSLEQAFERFFRNQAKYPKFKRKKSNYFSYTTNFTNNNIQVDFGKLATDTELNRCWGRIKLPKLGWVKARIHRTFNGKIKTATVKLLPSGKYYVSITVEQDKVDNPKIKETPANFATALDLGVKDFFVDSNSRHVENPKILAKYERRIKKVQRELSRKRPGSKNFERTRRKLAKLYEKVTNIRMDFLHKWSSRVICENQAIICEDLKVKNLVRNHHLAKSIMDVSWSKFVEMLEYKSKWYNRIFLKIPSSFPSSQICSSCGYRNEELKDLKIRTWQCPCCRQKHDRDENAAKNILKQGLLQLGMVVSV

SEQ ID NO: 15971 - protein, 410 aa, Caldicellulosiruptor sp.
MDKTYILPVPEEYQVLARELSKQSGKIYSKAVSFLKRMNKKGIKISRKTFDRYMEWWIHQKDFVLHSQSKQAAYQQVWTNYVATLRKIQKAKKKGKDISRIRLPYRNKRYNKVVFKESAVHLKGNVLIFSNKKGYKAIVLKDVMIRTTPKYAELIYHHSKKKYYFHVVVEVEGKKNEKDKGVLAIDLGVIHPMVCFDGQNVLLYNGGVLNSKLRYRNKKIAEFQEKLSKCQKNSQRYRKLTRAKRRILTKINHQIRDVLEKYTSHLMGYCVKNGIGIIVLGDLKGIRNGAKHGKVANQEVHQWMFKKVAKRIEQKAQFAGIKVVYVRENGTSQVCPLCGSKNRPQNRNYECKKCGFRYYRDGVGAINIYRKYTGGNLLVVGLLACPTGVRFKEHLCCPTEWNIHPVGKTA

SEQ ID NO: 15972 - protein, 351 aa, Euryarchaeota sp.
  misc_feature (169)..(169): Xaa can be any naturally occurring amino acid
  misc_feature (173)..(173): Xaa can be any naturally occurring amino acid
  misc_feature (189)..(189): Xaa can be any naturally occurring amino acid
MRLTIQCGIVKLTQRKKQILDREYDNLQKFLHGEDVPLYSANKQQALRYYRRNKRKEYPLSLRKDLINLRKAKSFWFLKIPVYGVRGGIKVPVKPHREFPNGELCESKIVRKRGKYIAMLTFKIDAPPLRKCSSILAVDLGERFVATTVLWQQGVMKAQFYGKEIRGIXRHYXWLRRRLQERGLLKVVXRIGSKERRCVNAVLHRVSKEIVSLADSTDSYIVLGDLKGIRQRCRKGKRLNRIVSNMPYYKLTKMIEYKAMLKGIPVITTSEAYTSRTCHRCGSEGKRKSQGLFVCSHCGEYNADLNAAINIAKKFERWMGYMPIHGAVSEPALNRFGSHLEPPEAPCESVE

SEQ ID NO: 15973 - protein, 352 aa, unknown
  TnpB Polypeptide
MKALKTKIRGLDKSQFKRLRELTSVAKNLYNQTLWTLREAYDATGKYFTYPQMDKAMKQVHNLEGEINYRLLKSAVSQQSLRRLDKNFKSFFLANEDFKKNPNKYKGQPKPPRFKKNQYDNLIYNYQAFQIQNLEVVLDTRKGKELKIPLPKRLIGKTIKQVEIIPKPHSFQAVFVYEDQTTYRQVASNDNVMSIDLGLNNLATCVTNSVIKPFIVDGRRIKSVNAYYNKRKALIQSELEKSRGKRWSNRLQSLTDWRNARVNDYLHKATAQVVKTCLTHNISKVVVGDVAKSLNHINLGKKNNQNFVNLSLGQFVDKLRYKLGQHSIKLIVANESYTSKASFKDGDGMPKK

SEQ ID NO: 15974 - protein, 311 aa, unknown
  TnpB Polypeptide
MQIVSSYGVEIKKKNIPLRSTLDIFRKAVSYLIPVYAETWEELSEIRNPQKRFNEAEHLVHETKKNHARFLFDRHFPKMPSYLRRAAIQHALGAVSSYQTRLSLWEKGELRGKPKLVCENHAMPVFYRDVMYKEAEPGEDAAHLKLFDGREWKWFQVKLLHTDMEYLRKKWSGKKASAPTLERKHHKYFLRFSYTEEVSLSKTDVKEQVICSVDLGINTDAVCSIMRADGTILGRKFINFSSDKDHLYHVLGRIRRFQREHSSRQVQSRWDYAKRLNMELTRKIAAEITKYAAEYQADVIVFEYLEMQGGL

SEQ ID NO: 15975 - protein, 386 aa, unknown
  TnpB Polypeptide
MYKTRIVPLKCNKTDYEYMLTLNKISADVWNYCIQIDEENRKKTKKDLTLSELEFETKQKFLLHAKGVHHIVFKYYYARNNMWKSRKANHKNSRKVELPYKEKRFLPTGWDIQALTCNYDKNQIRLTCIKGRGRITCFVKSIPLNVVEIELIYKDKYYLAIKYKEEIDEKIIMSGNTASIDLGEIHAVASINSIGGAIIITNRKIRSLVRLKDKRKAEILSLRSSCKKGSNKYFVYTKAISKIKFEFDKKINDVIHKQSKIYANWCKDNSIQTVYYGDLDSATRNSNGRLRKSTNQKLNMWRFGQIKNHLTYKLASEGISMIKINEAYTSQICPHCNRKNKTTTRNYACHCGYSQHRDIVGAINILNNNSNSHMESYSKKEYLQIR

SEQ ID NO: 15976 - protein, 191 aa, Terribacillus sp.
MDVGIKDFAILSDGTVYKNHRHFRKLEKKLAKAQRILSRRKKGSSNWHKQRMKVARLHEKISHARADYLHKISTEIIKSHDVIGMEDLQVFNMLKNHKLAKAINEVSWSQFRTMLEYKAKWYGKQVVTVAKNFPSSQLCSSCGYRNKDVKNLAIREWTCKECGSHHDRDINASINIRNEAIRLTAGTAGIA

SEQ ID NO: 15977 - protein, 400 aa, Burkholderia sp.
MQRLQAFKFELMPTGEQRCDMCRFAGACRFVFNKALALQQTNHEAGGKFIGYVAMAKHLTAWRNGTETPWLRDSPVHPLQHALKNLERAYKNFFAGRTAYPRFKKRGRCDSFRYPDAKQIKLDQVNNRIFLPKLGWLRYRNSRDVLGEVRNATVSLSAGRWFVSIQTAREVEQPVPQASSAVGIDLGIARFATMSDGSYLAPLNSFKRHEARLRRVQQAMSRKTKFSNNWKKAKARIQRIHARIGNARRDYLHKATTTISQNHAMVCIEDLQVRNMSRSAAGSRDAPGKNVRAKSGLNNAILDQGWFEFRRQLDYKLAWRGGWLIAVPPQHTSRTCPACDHVSAENRQTQARFACVACGFEENADVVGAINILARGHCVAACGEPARSGRSVKQEPAEAI

SEQ ID NO: 15978 - protein, 404 aa, Streptomyces sp.
MIRAYKFLMRPTVGQQVALGEILRDHCSLYNGALQERRDAYRHPSKTSVKYGTQSAQLKDIRAFDPERQGRWSFSSQQATLRRLDKAMQAFFRRVKSGDTPGYPRFRGVNWFDTVEFPKDGDGCRWDSTPHDPVTRVRFQGVGHVKVNQHRAVTGKVKTVSVKREGRRWFVVLTAEQDRPEPLPPTGSVVGIDLGIASFLADSHGGFVPNPRHGRTAAAKLETAQRALSRFPRVRRDKRTGNHRRAVEKVTKLHGRVRRQRLDHAHKTALGLVRVHDFIAHEDLKIRNMGKAPAPKPDPDQAGAFLPNGAAAKAGLNRSIADAGWGVFLTILHAKAVSAGREVIAVDPRNTSRECPECGHTAKENRPTQEKFHCVACGHTAHADTVGATNVLRAGLVRRDANPA

SEQ ID NO: 15979 - protein, 355 aa, unknown
  TnpB Polypeptide
LWGQASKVKIQAQLKLRLNTKDTATLDGWLWNLTGVWNWAVRKIELDAKGEIYYSPKDFQNLLANHGERMGIPSHTLQGMLAMAHTAWKRCFQKIAKKPRLKGKHNRLASIPFPDPFRAPKAGRITIPGLGRIRFHKQDIPEGKIQCGRIVQRASGWYLCLFLDAQPNAIERTAHGQIGLDPGFTNLLATSDGEVFDHPRELEAGAQRLAQAQRGHDKRLAARLQERIGNRRKDRNHKLSRRLVADNTLIAFSADNHKGVAHKFGKSVASSSHYQLRQMLSYKSPTSGAKYVEVDSKFSTMTCSHCGAHSGPTGLGGLAVRHWTCTQCGTAHQRDVNAARNTLIAALGSSVERAA

SEQ ID NO: 15980 - protein, 257 aa, unknown
  TnpB Polypeptide
MAVSAPAFRPVVEGGWSGRTLVLFDVLAQDRDGRRRPILRRGRYMTNEHQTENMASASVYIPIFCHDARYALSVQLRAQRSLSRKQDGSANQDKARIKVARAHARVADTRRDLHHQLCTRLIRENQAVAVEGLAVSALGRTRMAKSVHDAGWSAFVTMLEYKARLRCRAFHRIGRFEPTTWTCSACGRKDGPKCRRDPRLKQDRRSSVPASTIGQPAVRWAASRHPYRRDSNVKPGAPGAALITGESPESPAAMSVR

SEQ ID NO: 15981 - protein, 356 aa, Thermus sp.
MSLLSVKCKLIPDASTAEKLSRTVNQFTQACNYALQVARRDNVWNTFALQRAVYRELRERFGLSANLAVRAIARVGKRKGHKVGGFKATSVDYDQRILSVNLDTEVVSLSTVDGRVKVPMRIAGYQRHLLRSARSIQGGQLVRGRDSWYIHLWCEYDDPPPITPKGFLGVDLGIVNIATDSDGETYSGKHLNSVRHRYRRLRRKLQKKGTKSAKRLLKKLSGKEHRFANDVNHRISKRLVVKAQRTGRGLALEDLRGIRERVRLRKPQRATLHSWAFRDLVRKLQYKAERAGVPLVFVDPRNTSRQCPACGHTDKANRPTQALFRCVVCGYSGLADHFAAVNIGRRAAVIQPNAGA

SEQ ID NO: 15982 - protein, 380 aa, unknown
  TnpB Polypeptide
MFRAIKVRLYPNKAQEQELNKVLGCYRFVYNHMLAKRKTAYETDKTNLSAAYLSKWFHGTLRNDEQYAWLKEQNTKVMAQAIRQMDVAYQRFFKQKNGFPKFKSKKDKQSALFPQGAVSKRNTFETKHITLINSLKNLRFRCSDLHHKRLQKYKDSIRSATLSKTKSGKFFLSILMDIPESELVKFKKTDKQVGLDLGVKDFVITSDGVVFENKHFFKREEKKITKLQRQLSRKKKGSNNRDKQRFRLAKAYERLSSKKENYIHYVVNEILKSYDVVFMEDLNVQGLLRNHSLAKAIQEVGFYRFKEVLQSKALANGKQVVLIDRFYPSSKICSCCGYKKQDLKLSERSWTCPECGEHHDRDINAARNILLEGQRKLQVV

SEQ ID NO: 15983 - protein, 405 aa, unknown
  TnpB Polypeptide
MLVYEAKLKGNQHQYERLNEAIRTGLFVRNSCLRFWEDGNAKSRNDLYKYVTRLAKNKDFPWTNKLNSQARQAMAERAWAAISRFFDNCKKRISGKKGYPKYKKNRPNHGSVEYKVTGWKLSENRDRITFTDGFKAGELKLYGSRNLNYYQIEQIKRVRVVRRADGFYAQFCIDYDRTEERQPTGKTVGLDVGISAFYTDSDGNKVNNPKYLRRSEKALKRLQKQVSRKFKKGQPQSNNYKKAKQKLARKHLKVSRKRKDFAVKTALCVVRSNDLVAYEDLKVRNMVKNHKLAKSISDASWTMFRIWLEYFGKIFGTVTIAVPPQYTSQNCSNCGAIVKKSLSTRTHKCKCGTVLDRDENAAKNILKLGLSTAGHTGTFLEYWINASGQMSLFCIDENQYSKFAG

SEQ ID NO: 15984 - protein, 424 aa, unknown
  TnpB Polypeptide
MSSIRAYRFQLRLKPTQQHQLQRWAGGLRWVWNQALAEQRARHARGEKYAGYAQMCKWLTAWRSAPGTAWLASGPIHPQQQVLKRLDEAYKRFFAKAGGFPSFKRRGEEPGMRFPDPKQFALDPANGRIKCPKLGWVRLRLSEPVVGTLRNVSLTREGAGRSARWYASIQVQVAQTLPALGVAPTLGIDLGLTVFAALSEGACIAPLRALACQQVRLRRYQRSVSRKKKGSANRRKAVARLANLHRRITRQRNDWLHKLSTELADRHPVIALEDLRVKNMSASARGTVAAPGQRVRQKAGLNRSIQDAAWGAFTRQLGDKTRWRGGQVILVNPAYTSRTCRCCGHEAPENRKTQSAFLCVACGHTEHADVHAAKNILAAGHAAWAKEQAPSPDACGGAVRRAAPARARRAAPTKQEPSEAVGLV

SEQ ID NO: 15985 - protein, 382 aa, Rubrivivax sp.
VKAYRYKLRPSKRITQVFEETLNVCRELYNGALQERRDAWRINRVSLNYHDQRAQLPEIKLIRPDLNALYSQVPQDVLRRLSKTFDAFFRRVKQGQIPGFPRFKGKSRYNSFTYPQSGFSLSGDKLTLSKIGSVRLRLSRPIEGKIKICTIRREADGWFVIFTVEENQCRYFPKTNDTCGNDTCGIDVGIENFATFSTGAIIENPQYLRRALTQMKIQHRKASKKKRGGSNRGKAARILAKTHLHVAQQRKDFFHKRSLDLIREFDEIAVEELNIRGMVKNHHLAKSISDAAWGSFVLILTSKAENAGRRVWRVPPQFTSQDCSKCGERVKKSLSMREHRCPGCGYLAHRDVNAAQNIKARIAPFARVKVTSPDDQRIPVHL

SEQ ID NO: 15986 - protein, 374 aa, Cyanobacteria sp.
VYPEVELHKKWKTWLSASRYCYNRAISVLRQGEKITSGYQLRDFILSSDLPDWVKESPVHPKENAVFDAWDAWNQAKSNNGKASFRSCRQPRQAIKFHSRNFNGKNWFPSLVKGLSYHASEPIPSTDYATQLVRDKKRWFACIPVIEEAGETKKLIKVIALDPGVRTFLTGYDGDSFQEFGKADIGRIQRLCSHLDNLMGRASKASRKQKRRMYLAADRLRIRIRNLIDECHKQVANYLANNYKVILLPTFETSQMVVKSKRKLCTKTARQILTWGHYRFEGHLKQVAKKRGVVVIDVNESYTSKTCTKCGYKHNKLGGSKIFKCPSCGHEHDRDWGGARNIMIRALRDGSFSLAFRSEGIAIAHDLFVQRCAA

SEQ ID NO: 15987 - protein, 382 aa, Bacilli sp.
MEIYKAYKFRLYPTEKQKIFINKTLGCKRFVYNYYLNYLKDNTSINRFDLHKDLPKLKEKNEFLKEVDSTVLCSAVDDLSKAFNDYYDKRKGYPKFKSKFSRQSYRTSCIRGTYKEKKYSNIEVDLLTRNIKLPKLGKVEIRGYRNKDKIEGKILNATITKESTGKYYVSVVVEEDILIEKVTPNNIVGIDLGIKDLVITSDGIKYSNEKVLMKFEKRLKRLQKELSRREKGSKNYLKTKEKIARIHAKIKNYRKHYLNSIANEIVDEHDIIVTEDLKVKDMFKDKKKAFNKSLSDACVSTLRSLLEWKCKIKGKIYYKINTYYPSSKICSSCGYKNSKLKDLSIREYNCPNCGTYNDRDINASLNIMFEGLKLHYNLVSLV

SEQ ID NO: 15988 - protein, 255 aa, unknown
  TnpB Polypeptide
MPMVTMCQGYRFALDPAPAQERMLRSHAGAARFAWNWGLARGKERYATERTWYSAAELHKLWNAAKKADPDLAWWGENSKCAYQEAFRDLDKALRAFIQSRRGKRNGGPLGFPRFKKRGKCRDSFRFSTGAIRCDGATVTLPRLGTIATHEPTRKLARRIENGTARILSATVSRTAQRWQVSFTVEVQRDVPERHARPGSVIGVDLGVKTLLTGADDWMISREDHFVEDEAAPLSGRERTALRARGGVARVETAR

SEQ ID NO: 15989 - protein, 424 aa, Nocardia sp.
MGKVDAVQLRYSYRIDPTPCQRLALARAFGCARVVYNDALRIRQDAHQLGLPYPTDGELSRQVITAAKKTPERAWLSEVSAAVLQQALADANVAFRNFFASLSGKRKGPKLGPPRHRSRKDNRQAIRFTKNAPFSITETGRLRLSKIGDIRVRWSRDLPAAPSSVTIIKDAAGRYFASFVIDVTADPLPTAGDETGIDLGLEHFAVLADGRKIDSPKFLRRAEAKLRRLQKSLSRKEKGSSNRGKARVRVARQHAKVADARREFHHQLSTRLIRENQAVYVENLAVNGLVRTRLAKSVHDAGWSAFVNMLEYKARLYGRAFGKVDRWFPSTRTCSACGVVGAAKPLRVREWACGCGAVHDRDIDAANNILAAGRTERLNACGGQVRPGVIPAPAGEAGSHRGAEMSTVENLRPPGRRARQKSGC

SEQ ID NO: 15990 - protein, 305 aa, unknown
  TnpB Polypeptide
LRTRRRLRTAPRFAYTTGAFGLIQGDPKALKLPKVGRVHCMEDVSERVGGARVLRMTVSKRAGRWYASLTVERDDKPVTKPPRGGAVGVDLGIKTLATLSDGTVIENPRCLAASERRLKQAQKALSRKTMGSNRRAKARAKVARIHAHVANQRLDAMHKATTWLASTYSDISIEDLNTAGMFRNHRLAKAVSDAAFGEFRRQLEYKTARTGAALHVVDRWYPSSKTCSTCGAVKAKLSLSERVFHCDVCGLVMDRDLNAAVNILVAGSAPETINAHRGTVSRGGQPGRATQTPLKREPSSHSPVA

SEQ ID NO: 15991 - protein, 271 aa, Hassallia sp.
VLVFEYKVKGKQHQYRAIDEAIRTTQFIRNKALRYWMDAPKEQKIDKIALNNYSTALRKEFGFVKDLNSMACQAATERAWLSIARFYDNCKFKKADKKTPHASSRETRPRQWLGFPRFQKDNRSVEYKTSGWSLHLTKRRITFTDKKGIGEVKLLGKWDIQTYPVKSIKRIRLVRKADGYYCQFAVDVQTPVCLGVCTTEQRTGNGELGLDVGLEFFYSDSNGHHEENPRFLRKAEKTIKHAQRQIYKKEKGKNQRRKARQRYAKEAFKSK

SEQ ID NO: 15992 - protein, 175 aa, Hassallia sp.
VIFVNPKAFQKAEKRLTRLQRQLSRKVKGSNRYKKQKLRISKGHRRIANIRKDATHKATTFICKNHAVIALEDLNTSGMLKNHKLAGAVSDANFSEFRRQVEYKVIRYGGTVVKVDRFYPSSKTCSNCGEIREISLRERVYVCQKCQHTADRDLNASQNLENYARLAKPCLDVKG

SEQ ID NO: 15993 - protein, 423 aa, Hassallia sp.
MSVAVLKIIATIVRLRVEYSQEVMHLFNLTYEFKLKPTQNQIALFEEWLETHRRVYNYALAERKDWYNSRSCQINVCSLNKCYIMPADAPRPTFASQCKSLTVARKDSEHLNRVNAQSLQQTLRRLEKAFVSMWEQNHGFPRFKKPGRMRSFSFPQLGKDPLKEGCIKLPVIGAVKIRSSRSIPDGGVIKQARVVKRASGWYVMLTLQWDVSVPSHVPHGEALGVDVGLIDFVAMSNGLNVKRPKFLALLQRKLKLLQQRVSRKKLGSSNWRKAQIKVARLHEHIANTRKDFHWKIAHQICDGVGMVFVEDLNLVGLSRSILGKHCLDAAWGQFFQILEQCCFKRGVYFQKVDSRKTSQICPNCQTQTGKKDLSERVHACTFCGYITNRDVAAAQVVCQRGLAAVGYTVKMLSEGKFVGIPAT

SEQ ID NO: 15994 - protein, 434 aa, Hassallia sp.
MTFRLYPNKQIEQSLWYHRKLHKDLYNAAVYNRFTQYEKFKRSVSYMEQQNSLPAFKEVWTEYKEINSQALQATLKRVDFAFERWFKGLGKRPRFKSIRHYSAWTYPAKTGYSVKSNGENGYLNLSKIGRIQMRGKAKYWGTPTTCTIVYRNGKWYASITVEVLEQVLKSKIPPTGAIGIDLGCKSALSITDGENHRQIEAPKFLRNAEYKIKQASKKKRRKQAPNRKKKIKASRRWKRATAKVSKLTRKVACSRQNWVHQVAAEIVSGNSFVATEKLEVINMTRKAKKGKRKKQKAGLNKSILDVGFGMLRSTIKYKVEQIGGVFVEVPTKQVKPSQTCPKCGHQHKKTLDDRVHDCAVCGYIQDRDIAAAEVMLYWAKGNLTGFGTSLVDAESPSSTLRTSKTAGSMKQLGAKKRQKSKSTGLEAETQTSTQ

SEQ ID NO: 15995 - protein, 421 aa, Hassallia sp.
MNKHHNIYSLCYDASMSITVNYEYKLKPNRAQVKTFDAWLFTCKKVYNYALRERKDWVKSRKSPVNACSLVSEYILPTDTPRPTYYSQCKSLTAAKKNIAELTEPHIHVLQQTLRQLEAAFVSMWERGHGFPKFKKKMRSFVYPDVKQNAVEPGRVKLPKIGWVKMRMSRPLPEGFILKQIRVVKRASGYFVMLTYQLGVQVPEVPAHGHFLGVDIGLDKYLATSDGELVSRPRFFNALHRELKLLQRRLKHKKKGSSNWLKLQNKIARIHQRINDTRKDWHFKLAHQLCDKAQSIFVEDINFKAWAKGLFGKHTRDAAYGQFFNILSYICWKRDVFFLKVNKEYTSQMCPNCGTYTGKKSLSERTHCCSNCGYTTNRDIAAAQVIVQRGISAVGQPVESKIASGGVLPGVSSNASLGKIL

SEQ ID NO: 15996 - protein, 645 aa, unknown
  TnpB Polypeptide
MSRTELTSTATCRAGTGVEETTGALLTAATVSRRVGWALDLLTESGRGMLAQLYTPTSLAELAAGVDAAGVALPSNAYMAGRRLSWAAAIPARTYLPDRFRRVVEETVVRRLRQAVWTDTVITALLSTWPVNPVRRTDGEWAAMWAAVPENVDKATIRNRTRHIEAHRRQHGALPAGLVELEPYLTFGPALLLAAADHQLVTVDRVLPKMAKVAVKLPLVARPRTRADWGFLTLAVTLPSTVPTEARLCTPSLRLVSGRVRVDLPWRQTIPRTAGTGHTVALGFDWGVNTFITAALATTDTDGTVRTDGKPLALRTDGATAKVHRLRKHREVLHAKVRRITALADGLESHNPTRAAVLMAKADKYTVEADRVSARQNHLDDEIAWAGARWLVDQARINHATAIYAEDLRSMESAGLGKATNARNANAVRGELLTALRHLAAREGIAVVTVPARGTSKHCPRCLSVLRHILAPDRPQQGHKWSLCPTCGLSLDRDHAAAERIVSRGLSGQHHTWARRGTSEFHCRTPVDVPVRRTLRPHGKMKATPKRPPTTSPRTRSTSPDPAMIRNLVDQRPAGTRPTGPVSPVSEARSTVLAARRRRSTRHARLVGRGFHRNAYATPVALRPGWPTRNGHPTPDHDAQPCQGN

SEQ ID NO: 15997 - protein, 413 aa, Bacillus sp.
MAKRKTTVQKNKELAQDGLKLRHYGLRLRLVPTDIQKSKIHSFCGSSRFTYNFYLGERMEVYKNTGETLNSGEFKKSFNVFKEHPMFNWLKEADKFALETAIEAVDEAYDRFFKGQNKFPKFKSKRKSEQKYTTKFTNNNIELDVKRQMVKVPKLGWVKVRFSKEHRKIFQDKGFNAKIKSATVKYHSSGQYYVSLKYEEIIKLENEINWSLVSLDQIIGLDLGLTFFYIDSNGNKVENLKFLKNCLKKLAKLQRQLKNKEIGSSNYKKSQKKISKLHLHIANMRKDFLHKESRKLVNENQVIVLEDLNVKGMIKNKKLSRSIADVSWGIFKTFVSYKSEWNNKKVVIIDRFYPSSKECNGCHEKNTLLSLSDREWVCPKCSTVHDRDINAAKNIKEEGIRILKKLYPSLYVA

SEQ ID NO: 15998 - protein, 395 aa, Methanosaeta sp.
MIISYKYPIFPNKIAQWKLAENLDACRWLYNRLLQDLTDAKENGIKLKTYDTQNMIPSLKLENPKLNQVYSKVLQMVNYTLWSNIKGLSASKKNGRKIGHIRFKGYGWYNTMNYNQSGFKIDQDHSLLHLSKIGDMRIKIYRKIEGYIKAVIIKREGKRWFAIVQVDQELQPLPENGEAIGLDVGLASFVVDSEGNEIENPRCVEQSADKLAMLQRKLARAVRGSNNYKSLKDKIAKLHKRINCQRDDFLHKLSRMYVNNFDIICVEDLDVKGLKEKGHNIGMHRSIHDASWSKFLFMLSYKAQSAGRKLIRVDPRDTTQLCSACGCIVKKDLSVRVHECPYCGFSCNRDYNASRNILIAGMEQPVVPIESKPLHHISVIQVLAMKWEAAPFRTR

SEQ ID NO: 15999 - protein, 696 aa, unknown
  TnpB Polypeptide
MEKAKEDIYQLRKLQVLPYSLNSVINHDCWKKSIQYASQEMSKLAYLGSTLFNFHLLRLLETGKINDLKEDFFDKHANVRSWYVGVSEGCKATKDLFFEESKEKWSLLFQNNKNEKPLSYGLQSVINGQASQYFTMFQNYHNYGIIQHYSYYLSKKYNISQRKAKEISESILGSENDKEKKKNKRKEKSKEKDTCSEDDNDTIIFSDEEKKVINVEKESLNSYNISNLTDRIKFHYFIQKELEKIEETKLFTIAPICSLKRRFVGFNKSCLKDLYNLNKSIISKSKNNQKHHTHLRIPISIDDAKLVTLTSIPENNKDILNDRGLKRTKMRKKGYDYSLEFRTDGSYVKFSWEKIIEKKSTNKKKKDKNKKPEKEKKKVKAPQVMRPSYNYIKSDSFENETKGIFNKESLMMSEIKEGTIIIANDPGHKNPLTTVKAVYQEDITKMRFKESYSISLGEYYYKIGNKKMLSKMINKRSNDSNIREIEKLWSLNSLKKTTSKEYLDSLINQLKDWNQISHFYRSSNLSREMFNNQRKKQKLLEEIKKLTVPSKNSLFINGSAKFATSRPGLSATPVAKIIENISRDRRVVITPEQFTSCRCSDCLVNEENEDCNNIKMKNLKGNKTYVNKKGVTKNVSIHGLKHCTQCSRLWKRDVNAAINIGKAFLYLNKYQRRPFSLTKMSACNHSKVQNEISRCR

SEQ ID NO: 16000 - protein, 382 aa, unknown
  TnpB Polypeptide
MQRAISLNIPIEDEILETIKQYNIICNLHVQKCFELKTNSKNKLHEALYREIRKQFPDFPSALIQCARDNAVEMLKGNKYKRKTTKSLFSSIRFDLRTSKVFLESEQLQLTTIKGRKKYSIKIPKYFYKYFSWKIKGVIVGVHRKKCRIKVVVENGTAVTSSNNKDVLGIDLGINNFAVCSDYTIIKASKIKKIKRRYAYLRRKLQAIGTPSAKRKLKKISGGERRFMADYNHCLSKKIAGKPFGVFALENLKNVRKGRKGKKFNRMRSNWAYAQFRQFLVYKAEEMGKQVILVDPKSTSLRCSRCGFIDKFNRDKGSFHCKSCGFSHNADLNASFNIFQLGKALLDRLPVNQPIVTTDEGIGLLYSLPEVSCKPYNLLGGS

SEQ ID NO: 16001 - protein, 379 aa, Lachnospiraceae sp.
MEQITVTAKIQISVSNHTKTLLDTTMSAYTDACNYVANYVFQTHDLKQFSLNKVLYYDLRNRFGLKSQMAQSVLKTVIARYKTILENQNEWIKPSFKKPQYDLVWNRDYSLTNHCFSVNTLNGRVKLPYFAKGMSKYFDHSIYSFGTAKLVNKHGKYFLHIPVTYEVEECHNADICNVVGIDRGINFVIATYDSKHKSGFVSGKTIKQKRAHYSKLRKELQMRRTPSSRRRLKAIGSRENRWMQDVNHQVSKALVENNPRHTLFVLEDLSGIRSTTERVRTKDRYVSVSWSFYDFEQKLTYKAKQSQSSVIKVNPRYTSQCCPICGHTEKSNRNKKIHLFACKNCGYQSNDDRIGAMNLYRMGINYLADSQVPSAVTTE

SEQ ID NO: 16002 - protein, 404 aa, unknown
  TnpB Polypeptide
MLVRGVAFSLDSELPFEARSLLEDFRLAVNNAVRAGLQARVSSRNALCKIAYGDFREEHPRMYAQHLVSAFDVAGSILKSHRKRVQKGISGGIPFVKRLMMKAENQAYKLDRKAGIIDLPIRAGCHVELKLVVSQYHRKYLDDMTLSLGSLTVLPNRVIVAFRKDAPTRFVPESALSLDTNERSLDGVFVEGDVAKAVKAEFPEVAIIQQRHHDRRRSFQKKKAHDRRTSRNLCRMEGAREHHRIDYRLHQVANSVIKFAEERRSAIVLEDLKGMRTKRNKGLNRRLSLWPRRRLHQIIEYKAQWRGIPVLVVDPRNSSKTCPICGRIHNSRMGTEFKCVCGWRLDRHINASLNLLQTAISKGMAGGLRFNPGAFQHDVMMILYEPATAARSEPNGTSGIAGVT

SEQ ID NO: 16003 - protein, 428 aa, Streptomyces sp.
VKLVIRVKLLPTPHQASALQATLHTCNEAANHASRHAFTTGIKRNRELRTQIYTQIKERFSLGAQAAQLAIKKACNAYASLRGSLKAGHLGRPGTKRHTRATNKPITFRPDAAQPYDDRMLSWQTEQRTVSIWTVHGRMKHIPYTGQEDQLLLLAHRRQGQSDLLHHNGQWYLLATIDVPEPPQNPAPHDFIGVDLGIENIATTSTGRRHSGRKINRTRENDRRLYRRLAKKKTRSAKRRAKRHAGKQARRTRDINHKISKHIVTEAQRTGRGIALEDLSGIRERARLKKPQRVTMNSWAFGQLGSFIAYKARKAGVPLVHVSPAYTSQECSQCHHIDKRNRPSQAVFACRSCGFVEHADLNASHVIGRRGWWVWVCGAESQVPALTLVVQGWMRRSAEAIGEGELQAGVSDRQRTRTLVHGAMMRRA

SEQ ID NO: 16004 - protein, 466 aa, Firmicutes sp.
MYNVTQFHIRQVMTGVQKDKACLSENEKHVFATLEQCLVQLNEIQETTYEKKCQKAVLEEKDLPKKPTPHQMPTTEKWFLTYGLLDGMFKLSNNADYRSLPTQTSQAMIKLVLQDWTSYFESIKDFKHHSSKYLGRPNLPRYAKKNGRKVATFTNQDAVIRHMKESFTHHELKLPKTKLTLPLGDLSHCDTTDLKEVRIVPKGTDYVIELVCQLKHIQTLGTKETATRIASIDLGVSNFVTMSNNIGEAPILVKGGILKNKNQFYNQQRAHYYGILRLGKSPKEEPFTSKRLNALDRKRHDFMKDYFHKVSKQLVMYCLDHQIDTLVIGKNDGWKQHVNFKKKDKQNFIHIPYNVFIQTLTYKAEQAGIFVVETEESYTSKASFLDRDALPIYQENNTTKYTFSGYRVKRSWYQSKQHGRIHADVNGAANIQRKVFPQVGDSHVWDTGVLKTPIPLSVSYASKIQK

SEQ ID NO: 16005 - protein, 359 aa, unknown
  TnpB Polypeptide
LNSSSRQSKLSHTSRNIRSSLSRCRSSNTLCRYFVTKTKCTCMSKTHCLPLRSESSFVMKPSIIKGMASIKRYRYRAYPTKGQAHALSCLYGCCRFVYNRFVAVRETMFKVGGRMPTFTQLARDLTQSKNDPDTSWLKTVSAVPLQQSLRHARTAYDNYFAWKKGDRKGPEVGKPTFKTRRGTQSAEFTLNSRFKLEHEPGCKWAFLTLPKVGRVKLRWTRRAAPRFSLSIFKLIERIEAIVDAFDTRVHLVFGIDEAFSDFVHHQGDQGERRGEVRQHVGVQHHFEEGDVTADDGVARRNVANHHHGQAALKHHVDEPREEGKTPAHADDDDYVACRIINQIFAYGLAWIRQNINVSA

SEQ ID NO: 16006 - protein, 391 aa, unknown
  TnpB Polypeptide
VLKAFRYKISPTAAQAELINKHIGSSRFVYNLALETKSAAWAGNRVSLNCFDLIKQLPDLKEECTWLKEINSQSLQQPIRNLDSAFTRFFKGQGSFPKFKKKSNGGSFNIPQNVTLEGEKLIIPKFKKGIGIVLHRPIKGEIRQATISRTPTGKYFVSILCETGEAIKAKAKIRESTTVGIDLGIKTFIVASDGKEYDNPKFLRKAQSRLKFVQRKYSKHKGKRTKHRLAILHEKVANQRKDFLHKTSTQLIRDNQSVAIEDLAVSNMVRNHKLAQSVSDAGWSMFVTMLEYKAEWYGKNILKIGRFEPSSKLHNTCGHINKDLTLSDREWICPKCGEVVLRDMNAAVNIKSFALKNYLSGEHRLKNQDELPTLVGVLTPEAQPIASGVGG

SEQ ID NO: 16007 - protein, 366 aa, unknown
  TnpB Polypeptide
LIRTFLYRLYPTGRQERILLSWLTVLRWIYNAALQERRDAYRLAGKSIGYNEQTKEITQLRAEDAEYAAIPVEVLRSPLKQLKKGFDGFFRRCKTGEKPGFPRFRGRDRFSSFSFGPTKVNDQGRVWVFGIGWIRLNLHRPVDGVIKDGRIIHRNGRWYVSFQCYVGEAPAKVPVRNAVGIDLGLTHFAVLSDGTEIPNPRFFKESEALIARRQQALARKRRGSKSRQKAKRLVGRAHEKVTNQRLDFARKTACDLYDRYDLVVHEDLTIARMIRAGFSKSISDVSWGATLRCLSDKAEYAGRWLIAVDPRGTSQRCSRCQATVQKELSERTHSCPNCGLVLGPDHNAAINILALGASAASNPKSV

SEQ ID NO: 16008 - protein, 396 aa, unknown
  TnpB Polypeptide
MYALKLELKLNNRERSLFKGCAGFKRVVYNFGLTLVKNSWSLGIKGSDSKKIDAAKKILTNDLMKQEQYEWMKLYPSTVYQSAFQDLKEAFTRWRKGKAEIPVFKTKKKRDSFTVYKTAGVYPEKGKPALPFSNRQVLYQTKRITLPGLGTFRLKEAIPFICSSQTFTVSRQADKWFVSFTIDAARLPPIIHEHEAVGIDLGVKTFATLSDGTTYDSPKPMEKAKIKLGKIQWLNRRKHLGNTKKGIYASSNAHKFYIKQAKFHAKIANQRRDFLQKITTEISKKYYRIRIEDLNVSGMKAFGKLSAAISDLGFYEFRRELEYKQYHYDTRVEIVDQWFPSSKQCLCCQTVNKELKLSDRVFKCINPECRLILDRDHHASLNLLNAPSVVVRSARP

SEQ ID NO: 16009 - protein, 405 aa, unknown
  TnpB Polypeptide
VNRSYKYRLYPSEQDKEELEKHLDLCRQVYNHFLEELNEAEEIPSRYKLQQQLPELKQEWTELQQVHSKVLQMVLKQLYDNLKSLSEQKKQGYKVGSLRFKGEGWFKTFEYNQSGFKLKKTDDRLDKLQLSKIGEIPIRLHREIEGEVKGVIIKRDNAGDWYAIFQTEQETVEFDSTESEDVEAVGIDLGIQKFIVDSDGNRIEHPKNVEKAEEQLAKEQQNLSRKQEGSNNYEKQRKRVATLHKRVKNRRMDFLHKLSNAYVENYDKIVLEDLNISGMVQGEMNSKNTADSAWRTFIELLLYKAESANTEVVLVDPKDTSKQCSRCGVKTDKKLWQREHSCRSCGYTTDRDYNAAKNILGNGLAEDTPADTETSAEHKDQNNMRFCDVSASFVVETGSPFHLEA

SEQ ID NO: 16010 - protein, 377 aa, unknown
  TnpB Polypeptide
MLLNLLAILYVIRVWVSSMGECARRMTQGETTPNLYPWMGARPLQALREEIKERLSESWRTVRLRLLPSESGHESLMGIGLTCARLFNELNYEKRQAFFKGELTKKYYEISKKYYHKYKEVLGVNAQAVIQKNDEAWNAFYEQLDQKKQGRLPLYIRKVSPSGYWKDRLTNEKEIHISIRSDRYYLEPVNENGGRLMLVDFGLRIRYAGRIRWEGKQGRLEIIYVNGRWQAHIPIEIGVDPPKSNKRGYVKPNYKDKKDRIVNPKSIKQRDPIGDKQAFIDMGLNNLFAVVISDGSALLIKGGKIKSEYCWWKREIATYQAIIDLLRNAGIPTWREYHEKYLKAMYKRDERLRHLYITAIRFLADKLYDRGVRKLYI

SEQ ID NO: 16011 - protein, 135 aa, unknown
  TnpB Polypeptide
MLSQNNGNEYNTNIWWYRKIVLWIVDVFREYCIEVELVPEDYTSKECSICETKHRNGRIYRGLYECKKAGKKINADVNAALNIARKLGHRMRIARKIESYLVTHNGVKPLIPNQRANTRDPSIETPPLKGGEGSI

SEQ ID NO: 16012 - protein, 449 aa, unknown
  TnpB Polypeptide
MSVPSDSLVNVQLRYNFRLDPTPGQCVALARQFGCARVVCNDALRVRREAHKAGLPRISGAALQKAVITDAKRTEARAWLAEVGVDPLIQAVRDLEAAHGNFFASMAGRRNGPRVAEPRFKSRKDNRQALRYTRNGFRLRGNGTLHLARIGEVRVRWSRRLPSGPSSVTVVKDACGRYFASFVVETDPAADLERFPFGPDAEYAQTGIDLGLTHFAVLSDGKKIDAPKFLRRAERKLAKLQKDLARKQKGSSNRKKAVLKVARAHARVADSRRDFQHKLSTTIIRETQAVYVEDLSVAGLGRTRLAKSVHDAGWSGFVGMLEYKAARYGRYFARIDRFAPTSQTCSACGVKDGPKPLSVREWTCTACGARHDRDGCVESKNGAARNVLAAGQADRGNACQARVRPGLVPAQRREAGGVEFKSRHRGDLSSAQCEPALAAPGGAVGIPAR

SEQ ID NO: 16013 - protein, 516 aa, unknown
  TnpB Polypeptide
MAQDVVKRALKFRFYPTDEQAAELSRTFGCVRLVYNKALEARSAAWLQEQRRVNYAESSALLTGWKKTDDLAFLNDVSSVPLQQALRHLQVAFANFWQKRAKHPRFKSRKKSKASAEYTRSAFTFRDGKLTLAKMREPLNIVWSRALPEGEEPTTVTASRDSAGRWFVSMLCEDPRITVLPDAPNPVVGIDAGITSLLTLSTGEKIANPKHEQRERAALARAQRELARKEKGSANRERARLKVARGHARITDRRRDHLHQLTTRLVRDNQAIVIEDLNVRGMVKNHTLARAISDAAWTRLREQLAYKCAWYGRQLVVIDRFHPSSKTCSTCGHVVPALPLHLREWTCPRCAAVHDRDINAAKNIEAAGLAVLACGAGVRPRGRKPGGRSAMKQEAQRATAGTPSRQGECQGSNSLVRHGRAAAVPARRGRPRRGSGRRRSSAGRPRTGCARSAAARGPRAPARRAPCASSRRGRRTWCRRRSPRPATGTGRNPRRSGRPSRSSRPAAPRRTRPAGR

SEQ ID NO: 16014 - protein, 465 aa, unknown
  TnpB Polypeptide
MGAWWVTCVIIKRTKKEDRQTRGYEMLTAVERTKAMAVRGSGAASKSSDNGAQIHIGRLAEKEMDLVGFATKLHPRAAHLGRNRGKQVSKQGKVSENLSTELRTEDNKLAKMVDTVTCCVKVKVPDSLRPVLDALVRKAQACVARMLARRMESSSKYYKELPCVIAKSLIAKYQKNKKCKQVTHLVLPVCGDKGKQIKLEDRGIRIPALFKKEVLPVLWLRWPVGFVRSAEFFLRSGHWYAAICYNAKAERQLCVTGTVGVDQNSVGAVATLADPQNGKVLHLGFNPAKTKAVWRGQKANLQSLGKRRLLHKIRNKQSRRTKYENHVVSKQIVDYAAKHRRCIVLEKLENVREGKIRRYVEQSQWSFYQLLRFILYKAALRGVMVIEVDPAYSSQECSRCHQLTKPNGKKFVCGKCGHNDHRDANAAFSLAERVMPIGGVVGDSVRSDSGLLVAPFLGTEVQQCN

SEQ ID NO: 16015 - protein, 331 aa, Planktothrix sp.
MEKQEDLDFLNQVSCVPIQQGLRHLQSAFANFFAGRAKYPNFKKKRNGGSAEFTKSAFKFKDGKIYLAKSVEPLDIRWSRQIPKGCEPSSVTVKMHPSGRWHISIRFDDPTIKPLPVNDNAIGIDLGITSLIATSNGEKVSNPKQFKKHYKRLKRAQKNLSRKQKGSKNREKARIKVAKVHLKIADSRKDFLHKLTTNLVRENQTIAVESLAVKNMIKNHKLALAISDSGWSELIRQLDYKCLWYGRNLVKIDQWFPSSKRCGNCGHTMDKLPLNIREWKCPKCEVVHDRDLNASKNILAAGLAVSVCGATVRPEQSQSVKAGAMKQKPKS

SEQ ID NO: 16016 - protein, 364 aa, unknown
  TnpB Polypeptide
MNSQFKTLSLRVKDKHKSILNKWASEVNQIWNSVNEYTDLNCYTQIRGGTGGFMYENISAFDAQRILKFIKTEKNLTVNDSIYQETIAVHAKTRNQFNKHKLKWRISNGSRKSLGWIPFKTRALKLKDNELIINKHKFNVWDSYGLQGYDLRSGSFNCDARGRWYVNIVVSVPIKNNNSSKSVGIDLGCKDIATCSDGKKLNNKKIYYNHERALGIAQKANKKKLIKTIHAKIKNSRKDYIHKFTTSIAKNHKLIVVGNISSSTLTKTKMAKAVLDASWFTLKTQLNYKSIGMSAKFVEVNESYTTQICSCCGLITCNSPKGMNGLGIREWTCAKCGTKHDRDVNAAKNILQLGYGLPVEGFSC

SEQ ID NO: 16017 - protein, 373 aa, unknown
  TnpB Polypeptide
MPKVNCYRIYPTKSQVTKLNQTLELCRWVYNETLALRKNAWEFEQKKIGYYESKKMIPIWKKDKPELKEVHSHTLQDITMRVDLAFQAFFRRVKAGENPGYPRFKGKNWYDSITYLQSGFSLNGNILSLSKIGNIKIKKHRLLEGSIKRLTIRRTSTKKWYVSILTDVETYQPLEHSDKSVGIDVGILSFAALSDRTYISNPRFYIQEEKALAKVQRRFSKAEKGTPEKAKILKSLCRVHERISNKREDFAQKLSKSLVDNYGIICFEDLNIKNMTKNHNLAKHILDAAWSKLVTYTSYKAANAGRKVVLVDPKNTSKMCSNCGMLVEKDLSERVHNCPCCGLSIDRDLNAAINILRLGIQSLRKTDRCPSLQ

SEQ ID NO: 16018 - protein, 348 aa, Sphaerisporangium sp.
GELSKRVITQAKQTPERAWLGEVSAVVLQQALADLNTAYRGFFASITGERKGPGVAAPRFRSKKDNRQAVRFTRNARFSITAGGRLRLPKIGDVPVRWSRDLPAEPSSVTVVKDAADRYFASFVVETGQVSLPETAAEVGIDLGLTHVVVTSDGRKIGNPRLVRRAAKKLRKAQKALSRKAKGSANRNMAVVKVARAHARVADARRDFAHKLSTRLIRDNQAVYVENLSVRGLARTRVAKSVHDAGWSQFVGMLEYKAARYRRTFVKIDRWFPSSKLCSACGAVAGSMPLNVRSWTCLCGAAHDRDVNAAINILAAGRADRLNACGDQVRPPLAVAQVDEAGSHRGAA

SEQ ID NO: 16019 - protein, 471 aa, unknown
  TnpB Polypeptide
MAKRKSKHTDFITICETNHNLYIIAITSMPSCSLYDVINGGFSIPERTVSHRKSSSRRIAKADTVFVAYRFRGYPTKDQETELKQNIGAARFMWNRMLSDYNLMWKELGFTIPMTPADYKDVSGLEWLKDRDSFALLNAQLNLEKARSEYFSGDRGKPKYKKKRCCTDAYTTNCNNNNIRIEDNGIRLPKIADPIKLSMHRSIKPEGKLKNTTIIHEPDGKWYFSIVFEYPAEEIEPSFGLQKFFETGDRNEISGIGLDMSAPFLYIDSTGKKPSYELNGMKVRFLKQYRKLEKRIAREQRRRSHMVNDSNNYNKQCQKIARLHAKAKHRRDDFLHQIAVRLVRRYDLIAIEDLDMTAMKKSLYLGKSVSDIGWGKFTQILEELCNKLGKLLIRVDRWYPSSKTCSHCGYINKNLKLEDRVYVCPKCGHVMDRDKNAATNILEEGFRILEENMIRPAVEGYKKPSMLTTIA

SEQ ID NO: 16020 - protein, 411 aa, unknown
  TnpB Polypeptide
MSKHKIDYLVEKHLIKDTHAYFGELDSLCFLSKNLYNATLYHVRQAFFKDLPFLAYPVINKQFTHEKQPDYTALPAKVAKHTQKLVEKAYRSFFALRKHKDPQIAKMARIPKYLDKAGRQVVHYEKGALSLVKDGLITLSKTNITIKTKLSKKQIEFVRVVPCGNHIMLEVGYKANYPKPLPKGNKIASIDIGLNNLATITSTVATPIIINGKPLKSINQFANKMIAKEQAKLDTKLKTSTQRKDKLWLKRKTKISNYLHKASRLIVNYLVANRIDTLVIGKNDGWKQNIDIGKRNNQNFVQIPFTTFIEKLTYKCYQQGIDVVVQEESYTSKCSFLDDEPICKHETYLGKRIKRGLFKASDGKIINADINGSANILKKYLQEKETWNDCIKSDLVAMCSTSFILKLTPHW

SEQ ID NO: 16021 - protein, 432 aa, Thermococcus sp.
MKRSVTIKLQPSKAQEKTLSELVQISSKVWNRVNYLRRQEFFEGKPVDFLKTEKIVYEEFKAEIGSATVQQIARKNAEAWRSFFSLIRNKRNGELPNWFKPKPPNYLREGGLIVLRDDQYTIEGNRLILKGLGKFKRLEVQFKGRIHLKGKQGRLEITYDPVKRKWYAHVSISVEKKLQGGEWVEVPRRPLGNLSAGIDLGVNNLMAVYVENGESFLVNGRSLKSIAFYWQKRIADYQSLINKSGAKKSRKLSRMYQKAKLQAKHYINTAVRRTVERLYRLGVSRIVVGYPKGIARKPEKGRRQNYLLSHVWRFNTVIKRLKEVAEEYGIRVLVVNEAFTSKTCPVCGKPHEGARFVRGLFKCPATGLIFNADLVGAFNILKKAIKTITLNLGGLYAQGRGNWPKTGPEGSKTRFLVGLNETPQTFPHLARG

SEQ ID NO: 16022 - protein, 481 aa, Thermococcus sp.
MKRTVTVQLQPSKEQEKILFESANATAVIWNKLNYQRLKQFKEFGKIDFRGTQQEAYYQFKNWIGGSTVQTLARKNAESWRSFFVLNKKEKTGGLPEWFKPKPPGFIREKDGRKLFVIPIRNDQYRIYDNVIEIRRLGKFGKLKLQFKGGIHFKCKQGRLEIVYDEVKRKWYAKISFRVNQKLTKNGWVNLPRTPKGNLSAGIDLGVNNLMAVYVENGESFLVNGRPLKAIDFYFRKIIADYQSKLNKSGAKTSRKLKMLRRKAKLQAKHYINTAVRQTVEKLYELGVSEIVVGYPKGIGRNSNKGKRQNFILSHVWRFNYVIKRLMEVAEEFGISVEVVGEAFTSQLCPLCGQRHSNGRIFRGLFKCREEGVVMNSDIVGAFNILKKAVKTITPSLSALTGGRGNWGKTRPEGFSEPLQRGRCGLPLKLPRLWVRGFLVGTPAVHGREEVSGWGLFLAPLLLLLIHPEPSRPYELPLPFH

SEQ ID NO: 16023 - protein, 267 aa, Thermococcus sp.
MVRSHHHHGGRKTINGEWVEVPREPLRNLSAGIDLGVNNLMAVYVENGESFLVNGRPLKSIAFYWQERISEYQSKLNKSGAKTSRKLKRMHEKARLQARHYINTAVRQTVERLYHLGVSRILVGYPKGIARNSEKGGRQNFLFSHVWRFNYVIKRLKEVAEEYGILVVVVDEAFTSQLCPLCGQRHSNARFVRGLFKCRGKGVVMNADLVGAFNILKRVVRTITPSRPALAGGRGNWGKALPEGFSEPPSKGVMRITPRTSPPLARG

SEQ ID NO: 16024 - protein, 403 aa, Spirochaetes sp.
MSVKQRAYPTDGEQLHTLVTHIGQARFVYNIALEQRKLRDKTARERDVKVTLLTQAKQLTDARKEFSWLRDGSTVVQQGALRDLDAAFTNFFEGRARFPRFKKRDRNTSFVVRDVKLRRLNKRYAAVLVPKAGWLKFRLSYAWTTVTQATSARVSLRNGRWYVSLTTPPRPKHTGGTGTVGLDRGVTVSVMSNDAQEFHAPSLTVAEQHRFLMLERELVRRDKRSKNRERTKLKLAALRRKLLDRRVDWMEQSTTELARTYQCAAVEKLNINGMVKKPAPKPDPDVHGAFLPNGAAAKSVLSRSIHASQWGKFVKRLVDKMEVVQVPAAYTSLRCFECKHVSNENRKSQAVFCCVKCGHEANADVNAAKNILYEALCGRTCRVRAEAAPAVDAKTPLTENPRP

SEQ ID NO: 16025 - protein, 158 aa, unknown
  TnpB Polypeptide
MRQTPSSRQRIKAIGGRENRWMQDINHQVSKALVENNPKHTLFVLEDLSGIRNTIERVKTKDRYVSVSWSFYDLEQKLIYKAKQNQSSIIKVDPRYTSQCCPCCGHVEKSNRNKKIHLFTCKNCGYKSNDDRIGAMNLYRMGINYLVDSQVPNTVVTE

SEQ ID NO: 16026 - protein, 427 aa, unknown
  TnpB Polypeptide
  misc_feature (422)..(427): Xaa can be any naturally occurring amino acid
MAPRMPKAKPSRVFQGVHARLVFLDKEDERAVLDLMRRFSSATRFAYQRLLEGKNREELKRENGPLRALFGLNTRYADGAIEKAQALIASAEELGNDPHKVVFGGRRLFEQLKRGHLSGKALLALKREWREKRQGLLYSRGDAAKKGNANLRLESEDGALWLRVNLGDGGHVQALVKTSHPQMDALRERVYASLPYNVTLQLKDGKVYAHFTWSEELPPPVHTKQNEVLGIDVNADPYHLALAVVSPDGNLTRYLTLSLEEVDRASNRGAKELALWKVAHQVVAVAEEHGVAVATERLKYLRKSRRGDGSGRAFRRQQHRFAYRSLLEKIHSLAQKRGVEVIKVNPKDTSTIGMLKYAPQLHLSKDVAAAYVIGRRALGFAERLPKGYKVLLKDDAFLAHAQGFYQTHLQELKKLRKAEKNXXXXXX

SEQ ID NO: 16027 - protein, 507 aa, unknown
  TnpB Polypeptide
MSYGYRFSAEFVSKTSAEVYFTWSAGQALVYNSKVEEARYHYRFAQIFGGEMPDADQKYSHLITNPYTRKRYLEWLESVPPEVLRIGAVLYYKAVRQAKAGLAKRPKTKRIKAADRHLWLTSDLFSIRQLRDKWFELTLWVKEQQVARIRFKAHRPFEMPNSVHIKTKGSRLFVSFCSPKASDEDRYPETEDEIRARLRMKTPEELLERTVGCDRGVVTPLQTQTQGFRLTRTQKARMRHKGKRIKKCQKKLARQVLHSSGWRKTRIKINDANTYGRNVRENLAHQTSHALVSLPNVDVIAFEDLKVEAMMAAPKPKFNEAGKSQHNGRAAKAGLNRVIQFEAAWGRTLAYTQYKALKHDKLVVTVPAAYSSQQCPKCGHTHRSNRPDQAHFACTNPDCRFNEDHQLTADQVAAMNIAARAVKQIFDDQQKSKERKRLLRMRKKGESKGQGRGGTPRTVMRSGNVGAAKPVEPMPDTGNLPVSTLAVKPESLDKRVALAGECSSTSL

SEQ ID NO: 16028 - protein, 396 aa, unknown
  TnpB Polypeptide
MKNKVQSNVKGRAVYKGNVFEIYPNKKQAIQINKTIGCCEFVFNYCLRAWQDAYKKTGKGLSYLTCAAMLPTLKKEEATNWLQEVDSTALQSSVRNLADAYKRFDNKQNGRPRFKSTKNPLHSYTSKYSKGNIAVIGDKVKLPRLGLVRFAKSKEVDGKILSATIRQCSSGKYIISFLVKTNVQPLIKNNNLVGIDVGLKEFATLSNGESFENPKFYQQWENILIKEQRILTRRRQQAVNLSVPLVEAKNYQKQRKKVAKIHEKIRNSRNDYLQKLSTEIIEKYDIIGIEGLNVSDMLKNPKFAKAISDVGWSKFFNMLEYKAKWYKKKVIRIATDFPSSQLCSTCGYLNKEVKDIAIREWICPSCSTRHDRDINAAQNILNEIIRLLTVGTTGIA

SEQ ID NO: 16029 - protein, 432 aa, unknown
  TnpB Polypeptide
MKTVKLDISNEVHFLEDMRSYNRIRRMAFNRFREGMEEKDVRAEIAGYYSEGSWFTQCAIMDAKGLNTRVKDEKAPLFGGKHLLHRYLTHKITKEEYRYARLSPICIQGERLQGANRSFDFDLTNCKVTWKASRDRHVDIHFVKPKKNVWKELRKVQELIDLREITVTARFNEKYLWLSYEESLTSEIQYDGLKSNRILGIDMNPSNIGISIIEFDGQDNFKVLHKEVFDIYKLTLTSGKSSDDPESKYRTNKRKHETIQIAHIIDRLMDVWKCGKLSIEELKIKPSNKKKGKKFNRLCNNVWNRRLFKTKLNMLANEHGYDFVEVNPAYSSIIGNFEYGNENTPDSIAASIEIARRAHKKFQKGWLIPAFNIHCLDEQWKQTLGKVGSWKALSNKIKKLGLKYRFLLLDYLQNAVFSKSYTKANWTCYAFA

SEQ ID NO: 16030 - protein, 367 aa, Clostridium sp.
MILANKVRLYPTEVQEQKLWQSAGTARFIYNWTLAKQEENYKDGGKFIKDGGLRKEITKLKKTEEYKWLNEVSNNVTKQAVKDACNAYEGFFKGLADKPRFKSRRKSKPSFYNDTSKLKVKIKSVNIEKVGWIKTSEQIPMNVKYTNPRVSFDGKYWYLSVGIEKENPIIELTDESIGIKDLAICSNGMTFKNINKTRVVKKLEKRLRRLQRKISKKYELNKEGRKFVKTCNIIKLEKKIRLLHRRLSNIRNNHLHQATTKIVKNKPSRVVMETLNIKGMMKNRNLSKAIAKQGLYEFKRQLQYKCKFYGIEFVEADIWYPSSKICSECGYKKTKLSLSERTYICEECGAVIDRDFNASINLSRYSA

SEQ ID NO: 16031 - protein, 331 aa, Streptomyces sp.
VGRPHHRPPGRRLPHPRRHRPGPLVPSPPPGPSPPTPAVPLEAARAQGLVGVDTNADHLAAWRLDAHGNPLGAPRRFDYDLSGNAQHRDAQVRHALIRLLYWAKRHGLAIAVEDLDFAAEKTREKHGRRKRFRKLISGMPISRLRSRLASMAAELGIPVIAVDPAYTSRWGAQHWQKPLTSKTRKTTRHDAAAVAIGRRALGHPVRRRTAPPPAHRSDEQGHRTVQAEPATPGREAVPISGLRPRAAPAFPDHGHDPCAPDAERKRSTRTPNTVRGVRLSTDPGNRTHSHSVSRNGSPTPGRPGWSGPAASAGSCGPRCARRPPAGRTRPG

SEQ ID NO: 16032 - protein, 418 aa, unknown
  TnpB Polypeptide
LTTSSRGEEVKSWFSTSQRIATRKKSKKICSQYFKASRSECTDFVGTQIKTRKIRIYPTKEQRTLLRRWLGVQRLVYNQAIQHYKDKEFDVRHWMKLYSIVFSELDMDYVKEVPHHIKKNAVKDAYTSWKTNCKKAKKSGTPFSLRFKSRKDKVQSCYIPKTAVSTLGIYHTKSGVLKFSETDWFANSEISDCRLICDHGRWFLSIPKKITTQLPSETQGGAVAVDPGIRNFGTYFSTDGRFGWVGQRAFGRILKLNLRIDKIKSIIAKTEDKLYKFRLKRVLDRLYHKIQDLVDELHWKFINFLTKEFSVVIFPPFNVSDMVKKSGRKIRKVVVRSMMALRFYEFKERLKSKCKERHVLFIEQNEAWTSKTNSFNGEVMASLGGREFFKYQGMKVNRDVNGSRNILLRAMRDSSANG

SEQ ID NO: 16033 - protein, 412 aa, unknown
  TnpB Polypeptide
MCISGALYKKKIIFARDMRKINRTYKFRLYPTKAQTELLAKHFGCARFVYNYFLNQRQEQYRLTGKSDNYYAQAKILTELKKQEETAWLKEVNAQSLQFALKCLDVSYTNFFKKRAKFPKFKSKRSKNSFTAPQSALITNNRLFVPKFKEGIKCRVHREIKGKIGKVTITKTTSGKYFASVLAEEEYVTPFEKTNKSVGVDLGLKDLVVTSEGETFKNNRYTKKYERKLATAQRHLSRKKKGSRGYENQRLKVARIYEKISNCRMDYLHKCSISLIGRYDTICVEDLNVKGMVKNRHLAKAITDASWGTFLNMLTCKAEWNGKKVIKIDRFFPSSQTCNVCGSVNKDVKDLSIREWECTSCHTHHDRDVNAAINILRVGLKQYTSAGTADYTGGGEVRADLSESHSSAKPEA

SEQ ID NO: 16034 - protein, 468 aa, unknown
  TnpB Polypeptide
MKKKSSKTLVQVSTTSGSAFSQFYNDTCKAISSDLLSPTEIDSAVSDLSCLNTSSRGEEVKSWFLSSQRIATSMNSWETCSQYFKPSRAECTDLVSTQIKTRRIRIYPTKEQKTILRRWFGVQRLVYNQAIQHYNDKVFDVRHWMKLYDFVAAELDMNYVKEVPRHIKNIAVKDAYTAWRANCKKSKKSGTPFSLKFKSRKDKVQSCGIPKKAVSTLGIYHTKSGRMKFSETDWFANSEISDSRLIYDHGRWFVSIPRKITTQSTSETQGGAVAVDPGIRNFGTYFSTDGRFGWVGQRAFERILKLNLRIDKMRSIIATTEDKLYKFRLKRAIDRMYHKIQDLVDELHWKFINFLTKEFSVVIFPPFNVSDMVKKSGRKIRKVVVRSMMALRFYEFKERLKNKCKERHVLFIEQNEAWTSKTNSFNGEVMTNLGGKEFFTYQGLKINRDVNGSRNILLRAMRDSSANS

SEQ ID NO: 16035 - protein, 392 aa, unknown
  TnpB Polypeptide
MPTHTLSLKLPFLRLNATKAAEFARLQDLNTATANEILARPREERGALTTAHFGHVALGSAWMNQTIRNARAKTGVKQFRVLPLETNNQNWTLHKTGETYSLGFGLVRGVKKRVPLEVYGAHAQRALDAILGGTAKKGSVKLWRSRRRLWYALVSVTMDVPVAESSGQWVGVDRGQNHLAVASTPTGRPRFWTFGMVRQARRHYAAKRRRLQTAGKHKTIARLEHKEARLVRHVNHISSKEIVQFAVDHGCGIRLEELRGIRQTVKQRKDTKRQADKNRDYWPYFDLETKVLYKAALAGVPVETVPAAYTSKSCCRCGAIGQRERHSFRCPRCGYRGHADHNASRNVGRWIGASCPVMLERGAGVMPVSVSPGAVHDSPQAPYATDPARGTA

SEQ ID NO: 16036 - protein, 363 aa, unknown
  TnpB Polypeptide
MNKGVKFRIYPNKEQENLILQTLGCCRLIYNKGLDMRDKAYKNGEKANYIQTSAMLTKLKKSDDFAFLKDVDSVALQQSLRDLDRAYQNFFKKRAKFPQFKSKHNNHQSYRTLNRGNNIRIVGNYLKLPKLGYVKVKQSMEVGHINNVTIEKTPVGKYFAVLNVDFEPELKQNNGKEIGIDVGLKEFYADSNGNKVDNPKYLEKSEKKLKREQRRLSRKQKSSRNRNKQRIKVARIYEKVTNQRNDFLQKESTKLVSENQTICCEDLNIEGMMRNHRLAKAISSVSWSKFFTMLDYKATWYGNTIIKVPTFYPSSQTCNNCGQANPLVRNLSVREWECPFCHTKHDRDYNAAINILNKGLSLA

SEQ ID NO: 16037 - protein, 407 aa, Escherichia sp.
  misc_feature (279)..(322): Xaa can be any naturally occurring amino acid
VKRLQAFKFQLRPGGQQECEMRRFAGACRFVFNRALARQNENHEAGNKYIPYGKMASWLVEWKNATETQWLKDSPSQPLQQSLKDLERAYKNFFRKRAAFPRFKKRGQNDAFRYPQGVKLDQENSRIFLPKLGWMRYRNSRQVTGVVKNVTVSQSCGKWYISIQTESEVSTPAHPSASMVGLDAGVAKLATLSDGTVFEPVNSFQKNQKTLARLQRQLSRKVKFSNNWQKQKRKIQRLHSCIANIRRDYLHKVTTTVSKNHAMIVIEDLKVSNMSKSAXXXXXXXXXXXXXXXXXXXXXXXXXXXXXXXXXXXXXXXXXXXXRGGQVLAVPPAYTSQRCACCGHTAKENRLSQSKFRCQVCGYTANADVNGARNILAAGHAVLACGEMVQSGRPLKQEPTEMIQATA

SEQ ID NO: 16038 - protein, 441 aa, unknown
  TnpB Polypeptide
MYKRKYTVVTQLHDQNNKELIEYIEVARHTYAKAVRETFYVIKNSKDFNKSSFNTYLQHTYDITKRTANSIISDAQGQINALKELKVYEKTQLERKIKHLETSVIPKLEQKRDDNSTMLKLGLTVSLISQRNLRRKIVAKKQKLNRLKQKLANLTYQIETSSFKFCFGTKHLLQRDYTAFIERRDSQMSFVGAKCETSCNHQLQLRYNPKDNQFELKMRKDFGGFKGFDRFVFGKVYFRHHKAEIVRILKEKSSPLSFKIIKRNNRYYLYCTFEIQLESEDFLTRSTHGTIGLDFNKGFITLSETNQHGHLVRTKFLPYRFKSGNKTKTDLQQIISTVVNLAVSTGKDLCIENLNFNRTKSKTETKQGKKYTEMIHSLAYSQFMNLVESVAYRNKVFIRKVNPAWTSWIAKQKYCPQMKLNVHVGASFVIARRGQGYKDTV

SEQ ID NO: 16039 - protein, 407 aa, unknown
  TnpB Polypeptide
VLQAYKFRLYPTVEQIVLLEKHFGACRFIYNHFLGLSKEDKALKKSDMQKAIVSLKSDANFLWLNEINSQSLQVASHHLHEAYQRFFKHLGGYPSFKTRHHTHQSFNVPQNVEIANNRVYIPKFKKEGIRVVVHREIPANATIKQATISRHSGKYFISILIEDPQEIASLCTPQTSIGIDMGLSCYIATSEHKKLDNPKWFVKSQKRLKVLQRVLSRKQKNSKNRIKAKQKVSTLHAKVSNQRKDFQHKLSHAIIKHYDVIGVESLHVKGMVKNRHLSKAISDAAWGEFIRQLEYKALWKGSHLVKIDKWFPSSKTCSCCGSTKTSLNLSQRTYVCDECELKLDRDINASINIKNEALKILDMAGIVMTVKSAPVSILAQASEIAKGVNNNGLHESVEAPTISALAV

SEQ ID NO: 16040 - protein, 407 aa, unknown; identical to SEQ ID NO: 16039
  TnpB Polypeptide

SEQ ID NO: 16041 - protein, 549 aa, unknown
  TnpB Polypeptide
MGRSKGVTITVRVPVAWDTMTKRKKQRLRQIVGRDTRIIRSFLGVIEQHERDLLSGRNKTRIDDGALDRLTITTIKVTSKYQPRLIVPHDMKKRFPRCSTGELIECRRTAIGLYESYLALRKRSRSNVSRPCESTNSGRIPRWIYSLKFKLVESTSSVTCWWLDLQDSFESVLMKKVIHDRLLIPLKMSEFHTSQIKKGEVKALQLINDRHGKWWVHFAVRLEENLSKSKGNLPVAVLGIDLGIKKAACTALVTPEKVRETRYFIQQDKVKSIEKYDQLVAELQREMDNRRNKKQSYDKVAYRLKELKSKRENISKDYDLILLRHLLNYITMLSKKYTLYVSLGRLKYIRDKARRQNRTGRLHRSMINSWSFARITNGLKHQLSQLGWTVDGKKAHFRIVSEAWTSSLCWKCGSKGRRPKQNHFICPTCGHQTNADRNGAINIAARLIMLTDSLHSVRGRGKWMDSVATGKNPQLMSLLQRRSDVSHSKESAVDHFVQTDLPSFGDKSEKSDNDPAVESTVEELAVFESDTSIEKQEKETRSLGGTVSQ

SEQ ID NO: 16042 - protein, 385 aa, unknown
  TnpB Polypeptide
MQRTIRVKLTPSTAQAELLAETSRLFTAAFNAVCAVGWEQHLTNGVTLHHATYYPTKAAYPTLVSDLLVQARVKATEAVKGAFALQKAGRKVGMPQSGACPPRYNLHTYKVDWESQTVRMSTTSGRQTIRFAIPAYGAHYAGYPVATADLINRHGVWWLHVVVTVPAPAVEPTEAVMGVDLGIAQPAVTSTNRFLGKPAWKAIEGRLFYLKRQLQRKSTRSAKRHLRTLKGKQARFRRDCDHVLSKQIVQSAPPGATVVLENLSDIRKRSKLRKRTQTSRQVHSWSFAQVKGFIAYKAEERGCMVAGVDPRHTSQTCSCCGHVARTNRRSRGRFVCRRCGFELHADLNAARNIAAKYHASRGTAPAGGLPVNQPIVSAPAPLALE

SEQ ID NO: 16043 - protein, 273 aa, unknown
  TnpB Polypeptide
LKLKLSSGKILVYLTLTKEFEVSYNPDNAVAVDINENNVTLAVFVDRKLHEIYRIETNIGRIVIAYSERRKRIAENRSTRDRIARKALRKLREGERKEDIIYKTAGIIEEIARKYSATVVVGNAHRGKSRMASKASKKNLRHRIHQWCASKLVEILNNKPLHVFEESEAYSSSRDPFSRKPIKRYTPSVIRIALRGGRRVRVIKIQMRLARLSNGLTMDRDVIGAINIGLKYLSTDGREMAFPSTGPHAAWAKLVIPSLGPTPLTELKIFTSI

SEQ ID NO: 16044 - protein, 305 aa, unknown
  TnpB Polypeptide
VTGGRRRPTARRHFVRANKRLIKLEGERLRVTIKPGEHVYLDLSARYFKLPSEVSSAGLGEPVITLEKVHLPVHYEDTQSGKLAVAWDFNLLSLDGYSPETAWVRIDTKKLASVHISSFEKRRSVQRKASKSKKAKRILAKYSNRERNRARKHQLESARVIHSVAGVVGLEELEKQGMYTRSRIWNRRISRSDWRSIARILEERLGEAKVERSSTPTVPPSTALGVGGEQRPEWGGLRVWWVRSPNRQLNAAINLYMRMSFGYTEKWVGGRKRVQLKMEDASQMVGPRGASKPCGWVRPDRGGAE

SEQ ID NO: 16045 - protein, 401 aa, Aeromonas sp.
MQRLQAFKYELRPDGQQQLRMRRFAGSCRFVFNKALALQQERFEQGEKKLGYAELCKQLTQWKSEDSTAWLAETPSQPLQQTLKDLERAYTNFFAKRADFPRFKKKGLSDSFRYPQGFKLDQANSRLFLPKLGWLRYRNSRDALGVIKNITVSQSSGKWYAAIQTEREVDVPVHQGTAVGLDMGIKRFVTLSDGSHKDPLNSFKAHEKALRKAQQAMSRKVRFSRNWKKAKARIQRIQTHIGSARRDYLHKISTAISKNHALVCVEDLQVRNMSKSAAGTTDTPGRNVRAKSGLNKAILDQGWGEFRRQLDYKLAWNGGHLIAVPPKNTSRTCPCCGHISADNRQTQATFECVECGFKENADLVGAINVLRAGHAQLACEVSGAIRPPAAGTHRSELGVIA

SEQ ID NO: 16046 - protein, 298 aa, Aeromonas sp.
VINLDKAFANFFNPKLKARMPTFKSKRGRQSSYHPNGKVLTAAIQLPKMTPIRAVIHRDIIGVVSSITVSRGPTGKYYASILCEDGCEAPAKPTFITDVTGCDMGLSHYLIESSGKKIANPRHLINASRNLRRKQKALSRKKKGSANRGKARRQLAALHERVANARADFQHKLSHTMVDENQAVIVETLKSANMMKNHKLARAIGDAGWHGFIMKLEYKAQAAGRHLIKLDQWFASSKLCSDCGHKMPDMPLHQRQWVCPACGAGHDRDINAAMNIQQQGILELKAAGHVVSTHGGQR

SEQ ID NO: 16047 - protein, 401 aa, unknown
  TnpB Polypeptide
MRKIHRTYKFRLYPNREQSELLARHFGCARFVYNHFLNQRKEQYRLTGKSDNFYAQERSLTELKKQKATAWLKEVNSQSLQFALRSLETAYTNFFKKRAKFPNFKSKHSKNSFTVPQHVSIVGGRLFLPKFKEGIKCHVHREITGKVGKATISKTPSGKYFVSVFTEEEYVTPVKKSGKSVGVDMGLKDLLITSEGETFKNNRYTKRYERKLAKAQRHLSRKKKGSRGFENQKLKVARLHEKIANSRADYLHKCSISLVRRYDTICIEDLNVKGMEKNHRLTKSITDASWGIFVSMLTYKAEWNGKKVVKIDRYFPSSQTCNVCGYVNKHTKDLSVREWECPVCHTHHDRDVNAAINILRFGLNHTSAGAVDYTGGEEVRADLSESRSSAKPETHKSLDCG

SEQ ID NO: 16048 - protein, 318 aa, unknown
  TnpB Polypeptide
MRYATTPPDERPAAPSPPSWRKRGRNEGFRIVAVDPGDVRRLNGRWGVVLVPKLGWVRFRWSRRVPAARSYRVIRDRAGRWHVAFAAVPSTLPAPGNGEVVGVDRGIVVSVALSTGELFKAPELRPAERRRLRLLQRRLARQRKGSRRRERTRLAVALLKAREANRRRDWTEQVSTDLARRFDLIYVENLDLRTMTRSAKGTLQRPGRGVRQKAGLNRGILAAGWGRLVDRLEDKAPGRVQRVAAAYTSQTCNACGQIARASRESQSSFRCIACGNQAHADVNAAKNIAAAGQVVAARGGQGSPRPVNREPPTLGAVA

SEQ ID NO: 16049 - protein, 412 aa, Halorubrum sp.
VTELTKTLELKLVDPNAHKRRKLRETREAYQHALQDAFDARCTTQTEANDVVVNYDLSGYAKNGLKKYVPQLTTIYNAGELHDDHPVRFTNEGLRLNRKPENTIEWYIKIPHHEDYGLWMPAQPNPEQRDWLEALNAGDAEMGESRLFEREGTWFLHVTATREIKKRSGASGEKRTAIGVDIGEASLVTVCHRDDHGSPTAPELWADEGKTVRQLRKTYFTATKRLQTRGSERIAESFGDDLWNQIDDVFHRVTREVVEYAESVKNPVLVLEDLTYIRESMDYGEYMNRRLHGWGFAKLHAQIRYKAVEKGIPVETVNPRNTSKECHACGEVGYRPRQATFKCTNDDCWVGEYQADVNGGINIADRYLSGESHSREHRDGDDSAEDGGRLTAPQDTHADAETQQGTRGMNAS

SEQ ID NO: 16050 - protein, 428 aa, unknown
  TnpB Polypeptide
VKDFRVIKVNIGTPTRRQTELRVEAGRLWRRLVRLHKYCRRRHWAWPSESQLKQHFKGRFGLHSQTIQALIEKFIANIDSTRTKRSAGDKSARYPWRDQRKFQVVMWKPSAIRRHGNRLSLSNGAGRKKLTVKLPASLPSGKIVAVELGFRELRLTLSQTVAEPVSAGMNVVAADMGIIHLAVMTDGIQSSGVVGRGLRSLVQGKNRRLAIYQTALSKTQKGSRQNRKLRVAKARMLQRYRNQVHNLLHHAANQMLDFCQAREAGTLVVGDITDMPRNKRKQKKGSRRLNQGNSGNPLGQLYGYLAYKGKRRGIELVKQNEAYTSQTCPACGHRHKPAGRVYHCRQCGYVGIRHNVGACNQLNKYQNDGRIIAGNCTPPELVKYRRPVTLRRGVDRLTGGMLLDTTLTADAGSSGPGSHKPLCLRSVA

SEQ ID NO: 16051 - protein, 437 aa, unknown
  TnpB Polypeptide
VKKAITHLKLNQANSSKLQKLDELAAEHGRVVQAYVDLLIGQEVRQPNKYADIPEQDIPTRLSDRWQRCAWQQACGLVQSWYSNERQNPPLLRNICLQANANVVVIEPSETPTFDFWLRISTLEAGKPIRVPLTLYGRAKETIAEFPKLCTGVTLNRREGQWYVTFVVERRGKKPKSKAVIGVDIGMVNIVSTAEGRRYGQISPELRRRVERSAAKRRRKQKLNACLKRKGLPTVDLADHRAEAFARNEIGQALNQMIADLPTGAAVAVERLTVKQMRFKSRQMNRALRASQLGYVRDKLKFKLDERGLRYRSVQPAYSSQECSECGFTLSLNRRSQAEFECLWCGYKANADENAAANLAKRFGDEALNTLPFRDVEAALAERFMRRLSDARSASAGLELQPGVIWLPRGKVVVAVSEAEPLPTVNQPGQDPCHICL

SEQ ID NO: 16052 - protein, 345 aa, unknown
  TnpB Polypeptide
MILTFRIKHGTDFSKELALARKVAEIAIVTRSRSTADVRHIGLKSAISNQILRKYSRKSIMKVKSVPLTVPGQSIKVNKESRCIVIPCLGLSLNYEFRNDFGKVNQIEIDSEYACVSVSIAEPPQINVWGAIGVDRNTTKHCVVIACPRTGKVWKLGKSAEHIHKKYSRLRRRYQRLRKYKKLKQVSRRERDIVKNIDHRISKKIVEIAKENSCMIRMENLTGIRKNKGHSRSFRYSLNSWSFYQQQTFADYKARLQGVQVSYDEPALTSQLCSRCGLIGIRSGKEFKCPSCGHVDHADSNASFNIALCRGAGRLHADRDACNGSTDTPREAIARMTPTSEPHAP

SEQ ID NO: 16053 - protein, 391 aa, unknown
  TnpB Polypeptide
VKYSKEEVLLVQITTTAKIQVNVTPEQSELLDATMDTYRSACNCVANYVFQTHDLKQCSLNKALYYDLRERYGLKSQMAQSVFKSVIARYKTILENQHEWIKPNFSKPQYDLVWNRDYSLTQNLFSVNTLSGRVKLPYCSYGMEKYFDHNTYYFGTAKLVKKHGKYFLHIPVTQDVLESLDSAICNVVGVDRGINFVVATYDSKHKSNFVNGKAIKQKRAKYKALRKELQQRKTPSARRRLKAIGQRENRWMQNVNHCVSKALVKNNPKHTLFVLENLSGVRSATEKVRRKNRYVSVSWPFYDLEKKLKYKAALNESSVINVDPRYTSQTCPVCGHTEKTNRNKKKHIFRCKTCGYTSNDDRIAAMNLYRMGINYLAKDSQVPDIVAPQYI

SEQ ID NO: 16054 - protein, 439 aa, unknown
  TnpB Polypeptide
VSVVLEAVKVALDPSPAQERLFLSHAGAARFAYNAGLAHVKADIEAGVKPEWSYYSLVRWWNANKDTLTVGDDGAPWWRENSKEAANSGLRSLASALSNWSKSRKGLRKGRRVGFPRFRAKDRERPRFAYTTGSFGLIHGDPKALKLPRIGRVHCMEDVTARVGGARVLRITVSRRAGRWYAALTVEREDKPVTQVPKGGAVGVDLGIKTLATLSDGTSIPNPRRLAASERRLKRAQKALSRKVKGSNRRAKARAKVAHIHAHVANQRQDAIHKATTMIAQTYLHISVEDLNVAGMVKNHRLAKAVSDAAFGEFRRQLEYKTARTGAALRVIDRWYPSSKTCSGCGRVKAKLSLAERVYRCDGCGLAMDRDLNAAININVAGSAPETLNARGGDTSRADTPCRATQTPVKREPSRRSGNRAGLEREPARVPYKLQQSSL

SEQ ID NO: 16055 - protein, 453 aa, unknown
  TnpB Polypeptide
VSVVFEAVKVALDPTPAQERLLLSHAGAARFAFNAGLAHVKEALEAGEKPEWSYYSLVRWWNASKDTLAIGDDGTPWWRANSKEAANTGLRSLASALSNWSKSRKGQRKGKRVGFPKFKAKDRATPRFAYTTGSFGLIHGDPKALRLPKVGRVHCMEDVTVRVGDARVLRMTVSRRAGRWYASLTVEREEPAVRRAPKGDAVGVDLGVKTHATLSDGTVIENPRCLAASERRLKRAQKALSRKTRGSNRRTKARAKVARLHAHVANQRLDAMHKATTWLAETYSDISIEDLNVAGMARNHRLAKAVSDASFGEFRRQLEYKTTRTGATLHVINRWYPSSKTCSACGAVKAKLSLSERVYRCDACGLAMDRDLNAAINIKVAGSAPETINAHGGTVRRSNQHGCATQVPVKCEPSGGDNRVRLGADERKHVLQATNKQLVTVQRGSVVSRGRLR

SEQ ID NO: 16056 - protein, 189 aa, Bacillus sp.
MKQYKPKEFSEMLNVSVKTLQSWDNQGVLPAYRNPKGRYFVSVLCELEEMATKLALNKIGLGIDLGVKDFATRSDGIVHENINKTIKVKKIEKRLKREQRSLARKFENLKKRGEKSVTNKRVNIDKNVLRVQKLHARLANIRIEYVKSIVTNVVKTKPTFITVEDLNVKGMMKNKHLSKTIAKQSFFCI

SEQ ID NO: 16057 - protein, 435 aa, Psychrobacter sp.
MKINKAYKFRLEPNAEQEIILNNLVGSARFVWNQMLAISFEMFAKNEFINATNLVNKIMDLKNNPDFAFLKTSANAVSLQQKVRDLASAWSRFFDSKAHARLKENKKKPRKPKFFKLSDGTEIKLRPLMPRFKRKSDGRDSIRLVQFDKYCRIEGNRVKLPNGVGLVTFRKSQDIIGTIKNITITKKSGRWYLSFGTERELTENPRHPATSAIGLDMGITKLITTSNGETIQPKNSFKANQIKLAKLQRQLSKKVLFSQNWKKQNRKIQKHHHHIANIRHDYLHKITTTISKNHAMIACEDLKVANMSKSASGSVTEHGRNVKAKSGLNKSILDQGWGMMVDMLEYKQQWQGGLLIKVNPRYTSQTCFECKHIAKENRRTQAKFECVKCGYIANADVNAARNILSAGHAVLSVEGGCSKGRPLKQKTCDGREKVA

SEQ ID NO: 16058 - protein, 393 aa, Halorubrum sp.
  misc_feature (29)..(29): Xaa can be any naturally occurring amino acid
  misc_feature (298)..(298): Xaa can be any naturally occurring amino acid
MAKPTVNPDTGGTRKTDENSERTSATRHXKPGYWGNSEDGRELRTYIRNTSYSVEWGEYSRLEILAGKDLKDEYGLGHRERLRLEIRGDPNWKEYEKQGRLELFYDEQAQSFRAFQPVTISENHSRLAQPLASEEAALDIGANTLVACTTTTGQQLLYEGRGLFKRFRETTREIARLQSLLEDGRYSSHYIRRLYDRRTNRRDHAQNALARELIERLYEDGVSTVYVGALTDVLDTHWSVETNAKTHNFWAFRAFVNRLACTAEEYGISVEVRSEAWTSQECPNCGSTENTTRHRDTXSVEVRSEAWTSQECPNCGSTENTTRHRDTLTCSCGFEGHADLSASETFLRRQTTVTRSMARPVCLKWDDHSWSESSRSLRPNEEHTNPQVASVGR

SEQ ID NO: 16059 - protein, 472 aa, unknown
  TnpB Polypeptide
MKLKTNKVFEDALEHQFKMAQDIYKTTLLEILKRAKKQRKDPLYKKAYKLPKGRERNSILKELDDKYNLKGKFTFGKFAANYRKARNYDKYIGNDVATKLGIRAWDAYSKVKFAKGASRVNINEPITSFEAKGNTNITISNKKAKISTRQNKLEIPIEYKDDNYETQVFENKIKYCRIVRKKEFGKNAYYIQAIVDGIPPMESIDAPNEPVGIDIGTSTVATSTVYQTELRELAPGIDRQDARIKRLRRKLDRQRRANNPENYNSDGTIRRGRKQWHDSNNYLKTKNTIAEILRKQTEHRKIQHKTLANEILKMGTHFIVEQMSFKGLQARTKETKVSESTGRYQSKKRFGKTLLHRAPALLISQIEYKAHYQGKLFTKADTFSIKASQLDHTTGEYTKVGLNVRAKKIDGQLVQRDLYSAFILQHVGLDGKTVNLDACNIDFDYFLRNQNTTMYKLETRLSSTGRKIFENE

SEQ ID NO: 16060 - protein, 414 aa, unknown
  TnpB Polypeptide
MDLSRKVRLYPNKTMLTILDSLCDYRRFCWNQALDVWMSLYQQRQEHLPSDLRLKVKQAIKDKSISFTGDEKALLTQYPTPTHYTVRDILVKNKQDWQYQLSSRVLQLAVADLAKTWQYFFNNKDTASLQAGKPTFRQKKNPKQGFKTDMGRIKNGKLLLDKPRQYKGDWYTIPFKGYQLPDGHIKYCSITKINNKYYASLVIDTPIEPLVKTGQNTAVDANVNHFDYTDGQYSINPTRLDSLYEQIAFYQKRLARKRHVNGKKASESKSYTVMRTKLQALYEKATAIQNDLLHKFTTRLYHEYDTIVIEDLDVRVMQMSKKAKNLHRSLFGKFRFQMEYKAQKFNKQLIIADHYYPSTQRCSSCGHIKKGDDKITLTGNTKHGTAHNEYECYECGYTTDRDMNAVNNLLALIK

SEQ ID NO: 16061 - protein, 158 aa, unknown
  TnpB Polypeptide
MRHTPSSRRRLKAIGQRENRWMQDINHQVSKALATGNPKHTLFVLEDLTGIRNVTERVKTKKRYVSVSWSFYDLEQKLIYKAKQNQSSVIKVDPRYTSQCCPACGHTEKSNRNKKIHLFTCKNCGYTSNDDRIGAMNLYRMGINYLADSQVPNTVVTE

SEQ ID NO: 16062 - protein, 384 aa, unknown
  TnpB Polypeptide
MKRTVALKLIPSVEQSSALNGLADTYAKACNAIVPLAQEHRCWNRVALHHLSYYLVREQIPALGSQMVCQAVHRVADAYKTLKANKGIAKDKPVPAITFRPTSVNFDKRTYSMKGETLSLFTLSGRVKVPFTCGKHQRNLLTGSTPKEAKLIVRKGVWYFNLVLDLPDAPPVSGGGVLGVDVGENNLASSSTGKVWGGGQLRHNRDIYLAHRRRLQSNGSRAAKRKLRAISGREQRHVKHINHETSKAVVAEAIRSGASEIRMEDLTNIRASIKAGKRVRTRLHRWPFRQLQGFVEYKAEAAGLRVVYVNPAYTSQTCSVCGKIGKRERHSFSCSCGSRAHSDVNASRNIAWFASPIGLARGGKVTRPKFAHQVRPGVVESPVL

SEQ ID NO: 16063 - protein, 366 aa, Allochromatium sp.
MATKATILKTLKVRVKDKHAKLLRQWAYECNQVWNEANAITAEYSYIPIPEVGWVRTHFSAFDLAKSQAAFKKAHGFTIHSQTVQEVTEAHAKARKQFKKDKLRWRCSGGSRRSLGWIPFKSGATVWKNGQVRHNGHFFKVWDSYGLSQYEFRSGCFSEDTRGRWYFNVVVKVPVVELSGRGEIGIDLGLKDYATCSNGVKLKANQFYRNAQKQLGIAQRANKKQRVKAIHAKVKNRRADAIHKFTTQLVRENSLIVIGDVSSSKLAKTKLAKSVLDAGWYMLKTQLDAKSKRMQGVFLVVNEAYSTQTCSCCGRMSASSPKGRTGLGIREWTCPDCGTLHDRDVNAARNILAAGQCRLAGGIPIF

SEQ ID NO: 16064 - protein, 350 aa, Brasilonema sp.
VTQQSDLKQTKQLFPNYKNVWVQSQQVNLQRLNKAWKKWLFPDKSGKRGGRPKFKKSGQMRSFVFPRVNNPKAGAFLENGVLRLSKIGLMPVIMHRPLPVGFNLKQATIVKKADGWYVCLSLEDDTVPSPLPLDEVKSTVGVDVGLKEFLTTSLGETVPPSKPYRTAQNHLARQQKFLSRKHKGSNGYKKLQNKIARIHQRVGRVRENFHYNTAHKLVKRYDLIAVEDLNIRSLARTPLGKSILDVAWGSFINKLEAVAVRCGVHLVKVNPYGTTVDCSNCGAKVPKTLSIRTHECHKCNAVIDTDENAARNILQRALNAVGLMVSAGGSLGDAQPMKPEAWGWNGVQTT

SEQ ID NO: 16065 - protein, 412 aa, Brasilonema sp.
MQLVERHVIKSNHPHYQEIDQLCFAAKNLYNFANYHIRQAFLNEKKYLNYNTIDKQLDSSEPYRALPAKVSQQVLLSLHRAWLSFFATNNAYLENSQAFLGRPKLPKYKQKEKGRYFLVYTAQAVSKTLLKKGFISLSKTGVKIPTFVESGTLCQVRIVPKLNYYVIEVIYEKQETLLNFEPNLIAAIDIGVDNLAAVTSNKVGFVPLLVNGRPLKSINQYYNQRSSKLKSQLKGSQHTSKRIQQLSKKRSFQVDDYLHKASRLIINHLIANQIGTLVIGQNPFWKQQVLMGKRNNQNFVFIPHARFVELLSYKARLVGIKTIIHEESYTSLADFLKFDPIPVYVQAHCKLVTFSGKRIQRGVYRSGTGVLIHADVNASFNILRKVIPTAFSQGIEGVVVRPVSVTPDKQAA

SEQ ID NO: 16066 - protein, 415 aa, Brasilonema sp.
MDNAYTTYWRADELRCSWKTYQCNSSYPELDKVLKDNPHYKGLAAQAAQQTLKSVGESITSYNGLVKAYYKGEVDRPSLPKYRKKGGLAAVTFPRQALSFKDGYFKPSISKQTKPELIIEIKLKLPDFIDSDWVKQVTIRPCLGEFMIDWVIDDEKKPIKVNPNLDYSHAWSFDHGGTNWLTGVSTRGKSFIIDGRKLKAMNQGYCRLVAKYKQGKPDFYWDSNLNRVQRKRNNQMRDAINKAARFIVNRCLNDKIGNIIIGWNDGHKVGSDMAKVNNQNFVPIPTGRLIARLKQLASEYGIVCTVVEEAYTSKASFLDGDSLHKFGEKPKDWKPSGRRVERGLYKTATGLLINADCNGAANIARKVATQLGVSLVEVGRAVLALPQRYDLFYRLSQSYRRRCADGLLALGAATV

SEQ ID NO: 16067 - protein, 361 aa, Brasilonema sp.
MLLGFKTELKLNKAQRTAFAKHCGVARHAWNWGLGLTKQILAHNKANPDSKIKFPSAIDLHKWLVVLVKSEYEWYYEVSKSTPQQALMGLRESWKRCFKKTAGVPKFKKKGQRDSFTLEGTVKILGNNKIQVPVIGVLKTYERLPQIKPKSVTISRKADRWFISFRFEVDVQESCQKDVVGVDLGIKVLATLSTCEVVVGAKSYKKYEAKLSRIQWFNRHKVVGSNNWKKAQLEIARLHRKIANIRKDTLHKLTTLLAKNHGTIVIEDLNVSGMLANHKLAKAIADMSFFEFRRQLTYKCELYGSRLVVADRWFPSSKTCSNCGTKKETLTLKERVFECDHCGFVIDRDLNAAINLSKIAS

SEQ ID NO: 16068 - protein, 209 aa, Brasilonema sp.
MSAYEVETEPTPKSVYVVGVDLGIKELATLSTGVTFPNPKAYKKNIQKLKRLSKAHSRKKKGSNNRYKSKIKLAKHHNRVSNIRKDSLHKVTHHLCKNHALVVVDDLNVSGMMSNHKLAQSIADCGFYEFKRQLEYKTKKFGSKLIVADRWYPSSKTCSNCGCKKETLTLKERVFESGEQRLAVNPALPRVVPCGESSAAGGFPAVGDW

SEQ ID NO: 16069 - protein, 370 aa, Brasilonema sp.
MLLSIKTKLKLSKTQEIIMSKHAGIARFTYNWGLATWNSLFKDGLKPNKYILKKFFNNHVKPEFEWIKEKGICQKITQYAFDNLGDAFSRFFTGIGSYPNFKKKGHHDSFTIDASGKPIPVGGKSIKLPTIGCVKTYEGLPYTTCKSITISRTADSWFIAFTYQQEHEPSTKQQGVVGVDLDVKELATLSTGVVFPNPKHYKTNLEKLGRLSRKFSRKVKGYNNRHKAKTQLAKHHARVANLRKNTLHQITLRVRHFAIVTEAAKTASGLTTFLCKNHAKIVVEDLNVSGMLANHKLAQVIADCGFHEFKRQLEYKAKKFGSEIIIADRWFPSSKTCSNCRHIQDMPLKERTYNCKSCGHSMTCVYSVAY

SEQ ID NO: 16070 - protein, 389 aa, Brasilonema sp.
MLLSIKTKLKLTYVQKIVMSKHAGIARFTYNWGLATWKSLYSHGFKPNKFLLKKFFNNEVKTSLEWIKEKGICQKITQYAFDQLGDAYARFFKGLGGFPRFKKKGINDSFTIDASGKPIPVGGVRIKLPTIGWVKTYEGLPHTTTTKLSISRVADDWYIAFAYEQECKPTPKPVDVVGVDLGIKELATLSTGVTFPNPKAYKKNIQKLKRLSKSLARKIKGSNNRHKLKIKLARHHNRVANIRKDSLHKVTHYLCKNHALVVVEDLNVSGMMSNHKLAQSIADCGFYEFKRQLEYKCKKFGSKLVVADRWYPSSKTCSNCGCKKETLLLSERVYSCEHCGHVIDRDLNAAINLSHCVAGEKCLARVKRVVATSEVPKDGASGVSRRALA

SEQ ID NO: 16071 - protein, 526 aa, Brasilonema sp.
VARSSTKSFITEVPLKVNSKQESELLARFQAGRQVYNACLNEAMKRLELMRNSESYKVANKISRAKKKERSNTFRKVCEQFRYSEYDLHSFATKTSNAAKWIAQKVDSNTQQKLATRAFKASERVLVGRAREVRYKVPSRFRSMEGKSNKTGIRWKDDCLVWGKLVLQPIIDPSNPVIRHGLESTVKYVRLLWRILNGKRRWYAQLVNEGEPYQKSQNYVVDGLIGLDLNISNIAYVGDDHAGLLPFAELVPTFQKEITELQRKMQRSQRANNSDFFEPNFEAKRGRKTVVNKGKVKKGVKKAKAKWNKSSNYLKAANKKRELERRKAAYAKTQNRRVVNEILRHGKHIKTENVSVRGWQKRYGKAISAKSPGFVQSELLRKAENAGGTVIKFSTQKTALSQTHLDGTRIKKALSQRVHRDVTGISDHHRDLFSAFLSRYVSQDALILQDAQDEYLGAAAFGGKLPPKTCLLEPILLEAYQQRITREQVSKSESTQIDSPSERVSNEPLTTSQVVNKDEKLDGDVA

SEQ ID NO: 16072 - protein, 710 aa, Streptomyces sp.
MATAPCTAFGGVVEGSGERVGQAVLYERVGFLAELSRELTSALVASRWDEASLEVLAAGVDEHGEKLPSKGWMALRRLGWAKAAAPAAGAYVSDRVRRAAEEYAARTLRLALHRRTLLAAVLATWPADPHRRTGAEWAALRALLPPGVSGAEIRNRTRQVRAYLAEHGKLPAGLYELEEPPEIAGQVLLAAMDRQQVTLQRMDAGLARLRVKLPLCPAPASGRDWAWHVLDLRLPATVGPEAVLHTPTLRPTAGGRIAVDLPHSRPLSAVPAAGHTVAVGFDWGINTLLTGTVGRLTGQAKAARVVTDGRPLLFDATAISAKLHRLRGHREHLAARRDHYRALADGLGAPHLAWDELLSKAAVLEVEHERVCARIRRLNQALAWSAARWAVDQTLALGASVIYLEDLATLEARGKRQGNARLSGQVRGSVVEAVRHLAAKAGIAVVTVPARGTSARCPGCLGPLGHHPAPDRLSERGWAWAHCPGCHLSLDRDQAAARRIVSRGLLAQAHTATERATGARTIRTTVEGTVTCVRRPRKTTRRLRRVRQQGAASPQSAGPKATPANPGPLRPGPPRTAGRRLPAVCPTCVRPPPPPPPGRSSVRRGMTPRHQQHSGRCQVMEYPPLTTGRSLLRRGWGGSPAEPVGGAAAPPGGPASTTCTPPRSTPSPRGSDPTMAAHGHAAPEKPELLRHTQSSRDAMRSASCATGRTI

SEQ ID NO: 16073 - protein, 439 aa, unknown
  TnpB Polypeptide
MLDVHRTHRAKILNHAQVEASLDQHGWSASKLWNVANYHSREVWEETGEIPDHGDLKDELKTHSKYKGLHSQSSQRVLEELAEAFNSWYEKRKSDNRANPPGYRKKNYYDNDGNRVHEEHPRSTVTWKQNGICHDTKNNRVRLSKGANHKEHPKAWEYILVEYETRPGVTVENLQQVRALYDKSKERWELHLVCKDVIETPTAPGNETAGVDLGICNFAAVAYSTEEADLYSGNRLKQDGYYFPKEIAKCDDSDGKRATRLHKKWSERRTHFFHSLAKHIVGRCVETEVGRINVGDLSGVREDENGESKNWGRQGNLDLHGWAFDRFTNILEYKAKVEGIDVVDVSERDTSKTCCACGRKDDSQRVERGLYVCEACDAAFNADVNGAENIRLDINQSNSEFSASLGEDRSTGWLAQPSVYLYDLSSGFQPQEQVVDCKP

SEQ ID NO: 16074 - protein, 449 aa, unknown
  TnpB Polypeptide
MALSRRGALDISNGPLQDANRTFRSVLSAISPRSLHVGFVSPKSVVRTHRALVFPVSWRSASLDWVLSEFRLLVNESIRIALKEDIRSRARLVRAGYQVLSRGHTVYKHYIPSAFEVALALLKAHRRRLRKRKRSCVPYMRRLMLKAENQSYKLDRETGRLRIPIRGTEGVQLHLHLSEWHRSFLSDSAWALGSLTVVPGKVIVVVRREAPQAYKPEGAIALDTNEDSLDGVVVSDEVVAPTSLPFGGVRRIQQTHFRRRRRLATKKAQDRRVTRRLLAREGRREVNRVRHRLHLVSKRLVQFARDARAAIVLEDLTLHGAGGRSRRMNRRLSSWPRAAIHRQIEYKAALAGVPIIKVNPQWTSKTCPVCGARRRDRVGKVFVCEMCDWEMDRQINAGMNILKTALASNEALARAVRFQPGALRHDVVNPLYGLSALPTGAREEPSGVE

SEQ ID NO: 16075 - protein, 447 aa, Pseudomonas sp.
MALYFCLDTHTVIGMQRRKVTFKLYPSSSQLQRLDGWVRLHAELYNAALQERIEAYRKAGISISYYDQQNTLPLIKQFRPELVELGSHALQETLRRLDRAFQAFFRRVKAGQSPGFPRFKSSTRFSGFTYPDPAGWKLLQQGPRGGTLRLGSGKDAMMIRLRGRHRFAESTPNDLTLIRRRNHATGQDQWYASVTLRLSESACGRQRTGDDAIGIDLGVAHWANLDDGTQIDNPRWLREALPRLGDLQCQRARKRRGSHRYRQLSQQIARLHQRIGNTRRDFLHKQTSALVQRCALIATEELQPKNMSRSARGTVVSPGRRVRQKAGLNREILSAGLGMAHQMLTYKAHEAGSVLHLSNTRQLKPSQRCSACWAVVPKALSERMHRCACGCVLPRDQNSARVVLLDAWTPKDTPGTGVAARQEPLPAQAGKQPSATRETPTTTATAV

SEQ ID NO: 16076 - protein, 516 aa, unknown
  TnpB Polypeptide
LRRLCRVPGIFASALSAADTWRNPRAGQSFRLVVRSDRLRFGPNSGGAVVPACGISAVDVAADPYRCPHDLVREPRDDALMATVLQAYQFALDPTPRKQGSLASHTGAALFAYNWGLELVTTRLNRRRAGEVVQVPWTLPELRWEWNRAKQQVAPWWAENSKEAYNSGLDALAHALKNWSDSRNGRRKGRPVGFPRRKKKRRARVACRFTTGAIRVLPDRKHVQLPRIGIVKSHESTRKLARRLENGTARILAATISRRADRWFVSFTVEIQRAIPRGDHKPSVVGVDVGVRQLAVLSTGAMIANPRALEGSLRKLRRLNRELARRTPGSRRRRQTRRRLARAHTRAANLRHDALHKLTTALVTEHGSVVVEQLNVAGMVRNRRLARAISDTAMAKLRHQLAYKATWYGCRLVVADRFYPSSKTCSGCGWVRAKLTLAERTYTCEACGLVMDRDLNAARNLAKLVESVAQSGWETRNARGADVSPGQAGQTAVKREAGTEPRSGQTGTADPQGSAA

SEQ ID NO: 16077 - protein, 417 aa, Acidimicrobiaceae sp.
VGGRDRRAGPLDPLLLAQGVEPGKGRVRSLVERELQGGLQLGLRRPGPGTEGVLRFKRWRPGRQAHGVPELQEERWPAKLPLQHRGDPGPRRPPCPVAQARRHPDQGAQRALSDQVVAGTARVLSATIKEEAGRWFVSFGCKVVRRDPVATYPEAIVGVDLGVHHFAVLSTGELFENPRPISQRARRMARLNRELSRRQKGSKRRARTRAKLTRCHARVANLRRDTLHKLTTQLATAYGTVVIEDLAVKNMTACPRPKADPENPGHHLLNGHAAKAGLNRSILDASPGELRRQLSYKMSWHGGHLVVADRWFPSSKKCSSCKKAKATLSLSTRTYRCEHCGLVLDRDHNAARNLAAYGREHLVAGSGPETQNGRRGDAWCTSDTGAHSPKGPRGRKRQDGSGQPVKAVTASSQGEAA

SEQ ID NO: 16078 - protein, 370 aa, unknown
  TnpB Polypeptide
VEFVDGVPRCKMGAIDDFALIVKKNDSFAKNELACIEAFVSDLETEKKAVAIFSKTGIPQNTYRPCFVALKCVTIRGKLRVYAHITVEGDPVPKYTKSGCLKHPCGKGLVGVDLGPQSVAAVSETSVILENLAERNGKSTKRHERKERLFLRALDRSRRANNKDRYNEDGTVKKGVHKPWKKSKQYRIKEACLKELRRKNALSRKYANNELANRIRAMGDDITIERSNVKALQKKAKPSVPEQGKKQKRRKRFGHSILHRCPGHLYAQLHSKFSENHFHVVDNMYRASQYDHKSNSYNKKKLSQRWHKFEDGTKVQRDIYSAFLLLCHNDDFKTINQDICISKYETFKKAHDKCISDIKTSGQKVCNSGI

SEQ ID NO: 16079 - protein, 488 aa, unknown
  TnpB Polypeptide
MLLPKSSWFKACGKTVTGPPGSVISLDSDLLDSWLMTTDGGAAQVDNKSLVTKKQRTESNKGTAWVKTRKIRVYPANDAQHTLLPKWFGTARWTYNQCLKALQEEKSVFKPNRSGGLREAVVNDGNYILENTWVLDTPRDIRAGAYQDLLDAYTSNYAKRKKNPGHAFTMSFRSRKSAQERLYIDRRRYHKGIIYPKTFGSVPLRSTEPLPERLDHDASLIRTRLGHYYLCLTVDVKRDDNQVPSDTPPRVAAIDPGVRTPHTLYDPSGKLIEFGKNDIGHLYRLCHHLDCLRSEIDLLPKRCAHPDLKRYVHRKRWRIRRAWLHGSQRIRNLVDDYHKKVVHFLVTRYDVVLLPALETSRLVLRKARKLTNKAARAMVTWSHYRFRQRLLWKSRTTGCKVVVCGEAYTSKTCGRCGWLHDKLGGSKVFKCGQCGLEVDRDANGARNILLKNASRFGFRVEVALGLTPAVVDNRTDARPSRPQASATK

SEQ ID NO: 16080 - protein, 402 aa, Nostoc sp.
MQKAFKVALIPNHNQQVLINKTIGCARFIYNRFLALRQELYTTEQKTLNYNACSQHLTLLKKEIEWLKEVDKFALQNSLKNLETAYKNFFSDLKKSKNKKGVGFPKFKKKYGCKQSYKTNLTNGNIQVIENRLKLPKLGWIKFHKSQDITGKLVNVTVTRTSSGKYIASILCETELEKYPQVTQNIGLDLGIKAYLVTSDGEVVENPKYYRLQVRKLRKANKKLSRSSKGSNNRVKAKIKLAQTYERITNLRDDFLHKLSTRLIKENSIICIEDLRVACMVKNHKLALSISDASWSKFTTMLEYKALWHDRIVQKVGTFYPSSQTCNSCGFVNPLVKDLKLREWICPSCDTHNLRDKNAALNILSEGLRLMSAVGIPEALNACGELVSPGVIQAEIVEAGIA

SEQ ID NO: 16081 - protein, 421 aa, Limnoraphis sp.
VLKATKVRLYPTPEQELALAKSFGCARWYWNFALNTCIQHYQETGKSLKLATYKGMLPQLKKEYPWLKEDCYSSVLQCVAINLDKAYKNFFEGRARFPRFKSKHHKQSIQYPQNVTVSGKYLKIPKIGEVKAVFHRKVTGKIKTVTISKSSTDKYFASILCEVEGSEVKESGDKIIGIDLGLKDFAIIHDGETATKYANPKHLNRHQKNLARKQKKLSRKTKGSKSRERFRKKVAKVHERIANSRQDFLHKLSRKLVNESQVVVVEDLNVKGMVKNRKLSKSISDVGWGTFVNFIDYKLQQKSGQLIEIDRFFPSSKTCSCCGHVVDSLPLNVREWDCPICKTHHDRDENAALNIRNEGIRILNKDGGNPVSADGACLRPDNRCGERASGYEIRSPHCTFGSVWVVHGVLLSMLKSITALI

SEQ ID NO: 16082 - protein, 433 aa, unknown
  TnpB Polypeptide
MNPKLFGCQPVLLSPDDSLKAILEFICSEANKLTNCGIYYARQLYFKAKQWIAKHSLSYEYKSNKHYQVLHSQAAQQTLISVYESFKSYRGLLKLWNQGELPFKPKMPNYRKKGGLAVVSYPRQALKLKGGMIRVPLGTLCKTWFDVDSFTIPMPSNLQFADIKELRIVPRNGCFYAEFVYRQEAIKVDVDSLRVLGIDTGLNNWLTCISNVGTGFIVDGLQLKSVNRWYNKQISTLKEGKPQGFWSKRLASITEKRNRQMRDAVNKAARIVINHCIENRIGRIVFGWNQGQKNEANLGNKTNQKFVQVPTARLKARIAQLCEQYGIEFVETEESYTSQASFVDADVLPTIGAKPEGWQASGKRTKRGLYRTANNQYINADANGAANILRKVSMTLGFDLSGVSRGALTHPTRIRFWVTAQKKSEATRLQPVA

SEQ ID NO: 16083 - protein, 414 aa, unknown
  TnpB Polypeptide
MQRVESHIVINNKQIDKLCFLSKNLYNYCNYILRHIHFNKIDQFPLQLKSLLKEFSINEKTYKTISQYDLINYLCKTNQADYRALPAQSSQQTILLLYNNWKSFFKSLNTPNCKPKIPKYKHKKNGRNIIVFTNQQCKIKNNFLHFPKKVNLNSIKTKLQKFNQVRISPQATCYVIEIIYDKNVIDTELDHNLYLSIDLGINNLATCINNVGNKPFIINGKVLKSMNQFYNKEKAKLQSYIGGKGTSNRIINLTFKRNQKINDYLHKTSRYIVDYCITNKIKNIVIGYNQQWKRGVHIGKVNNQKFVLIPYLKLINQIRYKSEEVGMSVIENEESYTSKCDSLVLEAIGHHESYLGERRNRGLFRSTVGLINADVNGVINILRKVIGDDFVSLLDRGLVCSPSTVNVLKKFNSF

SEQ ID NO: 16084 - protein, 403 aa, Streptomyces sp.
MVIIVRLRYNFRLYPTAGQRAALARAFGCARVVFNDGLRIRQDAHAAGLPYISDGELSKRVITEAKKTPERSWLGEVSAVVLQQALADLNAAYRNFFASVTGTRKGPKVAPPRFRSKKDNRQAIRFTRNARFAITDGGKLRLPKIGDVRVRWSRNLPAEPSSVTVVRDAAGRYFASFVVEVAPEPLPEADAEVGIDLGLAAFAVLSDGRKVDSPRFLRRAERKLRKAQRALSRKQQGSKNREKARLRLARAHARVADARRDFHHQTSTRIIRENQAVYAEDLAVNGLARTRLAKSVHDAGWAAFLAMLEYKAARHGRHFARIGRFRPTSQVCSACGGKDGPKPLHVRAWTCSHCGTSHDRDLNAAKNILAAGRAERRNACGAGVRPGPALAAGGEAGTHRGAA

SEQ ID NO: 16085 - protein, 426 aa, unknown
  TnpB Polypeptide
MTNTYIWKKNNKLWLPKEKDKFTIENKNLSWFDCNVKLYKKSNKVKILDHSENLLRAKKIKLYFTPEQRKKIISIIGTCRYVYNLTLKFIRTHDVNIHKYNFIKLRKLITSILPIWTHSTPKHILDQQINDICKAYKTSFALLKNKQINHFDVKNKSNKYPKETICIESCCFSKNQNTFCTTLLGNNIKSSESFIGTLKDSRLTWNKRLNEFYLFVPIDKELQQSATSKYKFIALDPGCRTFQTGFSNGHVVEIGTDVKSKITKINKEIDIITSKQSQSKTIKKKYNRAYFLKQKKKENLINELHWKTINFLCKNYNEIVIGDMSTAGVSCNLTSKLNKSTKRELYGMEHYKFRTRLQEKCVEHGCKFNIIPESYTSKTCTNCGNIKNDLGGNKIYKCSKCGMVLDRDVNGARNIYIKHTTLVSAL

SEQ ID NO: 16086 - protein, 393 aa, unknown
  TnpB Polypeptide
MLYAVRVRLYPNAAQREFFAKTFGCCRWVFNDALAHCQRLYEAGEKRPSAYDLAKRVVILKADLPWLADADSQALKYACSSVDQAYKNFFRRVKAGEAPGFPRFKSKHRGDATYTATAATGIALEPRQLKLPKAGWVRCRGGRDWEGKIKRATVRQTPTGKYYATVLVDDGRDLPAQPETGLTPLGIDVGCKTEGFTHQFAALSTGELISAPAAYKRQMKRLRRAQRRLARKQKGSASRLKQKRRVAQLHERISAVRRDFLHKLTHQLTRENQALAVEDLNVQGMMRRPAAKPDPDRPGAFLPNGASRKRGLNRSLASVSLGEFFRQLEYKCDWRGVTLLKVGRWEPSSKRCSCCGKVNDTLTLADRRWQCLACGTEHHRDINAAVNIAARAA

SEQ ID NO: 16087 - protein, 412 aa, unknown
  TnpB Polypeptide
MYTYKVMIHPNNKQETKIRRTLNKCIECNNIVYDYINSFIKNNEKIPSCGDVRKWVTTQKKIYDDIAISKRIGMTKKEMITNHLDILFYDVSNDALKQEIKDTYNSFIRYFNKLSKYPVKKKYDNYKKSFYVDPYKIEFSNKKVKLEKIANSLKQNRQVLNCINLAEKDRIPTNVKYYNPRVVLEGNRFYIVVGVEDTNYPKKKIVTTDNIKGIDMNIKSVVTSDNDVYKSVTSNKKNMKALKREKRLQKKLARKYIKAKELNKSLRESRNYQKQRKIKNKYTRRINNLKEAHIDYVITSIINKRPKTICIEDLDVKQMQQSKDNKYVRKGIQQNPFAKLLNKLTYRCQKIGISIIKADKYYASSKICSECGNKKIDLKLSDRTYICSNCGLVINRDYNAAINLKKYAIINN

SEQ ID NO: 16088 - protein, 349 aa, Rhizobium sp.
MYGRKVLLGLAIMKGFAGKVLRQVAQLASEKQINVMFRLDDEKLHVAFDPEDLPDHPQRRRPLRPLAGRCLGIDLNPNWIGMAVAENTGDPSRLAATSLLEHALVKLDLPVDASPELVRETLAAVADRAIGMARKHRCGTIVLEKGLGKVRSSGKSRSLNRLLNYWARTIFAQMLARRARLAGIQIVEVWGGYSSSIGNLAFDAPDACAAACEIARRGISRLAKAKDVLPVYEEGCVSRLWKNGKVPAELKSWQDVHRSIKAAKIGYRRPHPDRPDGWRDTDAPTPASDGHAVVRLRRRHRLGLLFRPLASPKPDAVVRNFAGSTKTCTRTVSVNRKSRIAEMSSILSS

SEQ ID NO: 16089 - protein, 418 aa, unknown
  TnpB Polypeptide
MYLTIKQQVKHLTKEEYNILRELCKISKNLTNQAIYNVRQYYFQEKQFLRYESNYHEMKYLENYKLLNADISQQTLKNVDQMFKSFFALIKLAKQGKYNFKHIRLPNYLPKNSYSNLIIGQVRIKDDNILMIPYSNTFKKKYKVNRINIKIPQVLENKEIKQIQIIPKFNARFFEIQYTYEIQEENIKLNTNNALAIDLGVNNLCTCVTNTSKSFIIDGKKLKSINQFFNKQNAKLRSIKDKQNILRQTKQQFLISRKRKNRIDDYINKTCRYVINYCLSNNIGTLVVGYNQSFQCKANLGKRNNQIFTQLPFGKIREKLEYLCKRYNINYILQEESYTSKASFFDNDELPIYNADNPQTYEFSGKRIKRGLYQTKNNYLFNADCNGALNILRKSSVVDLSILYGRGALDTPKRIRIF

SEQ ID NO: 16090 - protein, 204 aa, unknown
  TnpB Polypeptide
MPFIRGSPPPGDWIGVDLNATGSIAVVAHPASGGVVMLGEQPEGAGTPERCSGGKRKALRAARDRESSARGDLNRRIAREIVKMARNLECGIKLEDLTGAGFAGWQKPGAPLLFSRRDGSFFHLQNLLMVRAHDAGVVIALVDPALTSRCCSRCGEQGIRRGKRFTCPRCGYTDHADVNAAFNIAAAPGIGRPAIPASSHRQRG

SEQ ID NO: 16091 - protein, 416 aa, unknown
  TnpB Polypeptide
MYLTVKQQVKHLSKADYNSIKELCHTAKNLTNEAIYNIRQHYFTEGKILKYETNYALLKNSPNYKILNSNMAQQILREVDSSFKSFFGLLELAKRGEYAFKDCKFPHYLPKDGYTTLVIGFVRLNGNKLILPFSNIFRKTHKPVKITIPPILLDKKVKEIRIIPKANARFFEIQYVYQMERIQRNLNKANALALDLGINNLITAVSNKGKSFIIDGRRLKSINQWFNKEYAHLQSIKDKQRLGKKPTIRQKTITRNRNNKVNDYMNKTARKVIDYCITNDIGTLIIGYNEAFQQSPNMGTRNNQNFVNIPYGRLCDKLEYLCELNNIVLVKQEESYTSKASFWDKDILPVYNRDNLKKYYFSGNRIYRGLYKTASGKTLNADVNGALNIMRKSNVVDIHILYNRGDVDTPIRIRIA

SEQ ID NO: 16092 - protein, 399 aa, Halosimplex sp.
MHYNYKYRLDPPEALTETLLHHVDTCRQLYNHVLHKLTEADEIPARYKIQGTLPDLKEWWGELNDVHSKVLQMVVKRVYDNLSTLKAQKESGRAVGMLKWKPPREYRSFTYNQSGFKLKNTSGRPTLWLSKIGEIPIHLHRDIPENATIKQVTVKQEPTGEWFATFGVNVDGETPEKPENPERVVGIDVGILKYTHDTDGTAVESLDFSDERERLERAQRELSRKEHGSNNWEQQRKAVAQRHADLKRKRRDFLHKLSNYYAEEYDLVAVENLDAKGLIELPGNSRNRAGASWGTFLRMLEYKCEREGTHFAAVNPRGTTRECASCGTETDKSLWVREHSCPTCGFEIDRDANAAWNVLSRGLEQVGVGHSELPPVETALPVDTTVPAKRVVETGSPHR

SEQ ID NO: 16093 - protein, 335 aa, unknown
  TnpB Polypeptide
MANKAYKFRIYPNSEQKVLFAKTFGCVRFIYNRMLSDKIKYYEETKQKLNNTPAQYKSEFEWLKEVDSLALANAQMNLQKAYNNFFRSPKVGFPKFKSKHRNRRSYTTNNQKGSVAIENCCIKLPKIGFVKLKQHRNIPSDYRLKSVTINQTPSGKYYASVLFEYENQVQETELHSFLGLDFSMRELYKDSNGNEPKYPRYYRSAEKKLKREQGKLSKMQKGSKNRDKQRIKVAKLHEKVANQRRDFLHKRSRQIANAYDCVCIENLDMKVMSQCLNFGKSVADNGWGMFIIFLQYKLEESGKKLVKVDKYFASSQICNVCGYKNTATKNLNVRA

SEQ ID NO: 16094 - protein, 410 aa, Anaerolineales sp.
MRIQRAFKTELELNNVQRTKCAQHAGAARYAYNWGLARKLEAHRAGGKTPTAIDLHKELNRLKQNDLAWMYESSKCAPQEALRNLDRAFDHFFRRVQLKKQGKLKGQVGFPQFKSKKRGLGSFRLTGTIRVFEKHIQLPRLGKLKLKERGYLPMREVKVLSATVSEQAGRWFVSLQVEMDIPDAMASDKPGAGVDLGVKTLATVSDGTVIPNPQALQRNLRKGKQLQRAVSRKVNGSANRRKAVKRLARAHQRVANIRRNALHQATTTLAKTKSVIVAEDLHVRGMLKNHKLARAISDVGMGEFRRQLEYKTTWYGSRLMIADRFFPSSKRCSRCHHVKEELSLSERVFKCEVCGFECDRDLNAALNLEGLAGSSPDTLNACGESVRPDANQATLGEAGTELQSAACRFV

SEQ ID NO: 16095 - protein, 463 aa, unknown
  TnpB Polypeptide
MEKQFTIETRLELQEDAVKYLTEYVVFYNEISRKLWQIVRLSNFKELYTRSEFNTYACNKYNILKRTANSIYSDLAGKKKSLLELKKTELSNKKIRYKKFFNKKNELINKINKLKEKVALNKSNENELIRYRKYKHKYYFICNKINNLKQDVENLEKDIKNKNIKISFGSKKLFNAQYNLEANGFRTHTKWKNNYHKKRDKNIYYLGSKDETLGNQLAQLDYDITTSKFTLKLRKEKQYSSESKYLNISNIDFKYMKDELINIINDHKSNQTLLPLSYRIYRVKNKWYLQVIITTIVENYVTRKEYGVIGLDFNNGFISFSETNESGNLIKTLNYPLKYHGCGNKALNEMLNTINNIVTYARSVGKDISIEDLKFDSKKANSIKSNQKNEKKYNKMIHTLDYSRYIFRLENKCHKMQVSLNKVNPYNTSLIGYEKYAKNRKMTIHQAASFVIARRYQGFIDKI

SEQ ID NO: 16096 - protein, 377 aa, Chitinophagaceae sp.
MLKAYKYAILPTEEQKRQLAKFFGSCRFVFNLGLETKMQAWTTARKHLTCIDLANQMKELKDTEAGWLHECPSQTLQMALRNLDNAYTQFFKGGGFPKFKSKHRRQSIQFPQGVKTDFENSAIFLPKLKNATCIFHRQFKGDIKTVTVSKTSTGKYFVSILVENQKQLAKKKPVREKTTVGIDMGVQTFATLSDGTTFDNPKHLRRNLKRLRVEQRKLSRRFKKGAKEQSRSYQKQKLVVAKLHEHIKNQREDYLHKASTTIIRSFDAVCLEDLNIKGMMQNEKLALAIGEVGWHKFKTMLEYKAEWYGKNILYIGRFAPSSKLCSHCGTIFKELSLKGRSWTCQSCGTHHERDENAARNIKSFGLRIKPSTVNVSH

SEQ ID NO: 16097 - protein, 401 aa, Okeania sp.
MRLVDRHIINRTHNFWRVCDELAFKSKNLYNLANYYCRQHFFKFSKSLDLTKLYHATKDSDAYRSLPTKVSKQIIKCLVATWRGYFQAIKEWSKHPGKFLGKPKIPKYKDKTKGRNVVIYSKESVYKAPLKDGICHLSMSDLKIPVVVDTVIEVRIVPATGCYVIEVVYEKKYVAQINSKYVAGIDLGIDRLVALATNKPGVKPLLVNGKPLKSVNQLYNKRKAKYQSHLKGNRKTSRKIEALSYHRNRFVENYLHNTSKLVVNYLVTNNIGTVVIGKNDNWKQGANIGKKNNQNFTQIPHYKLIQQITYKCQLAGIKVIETEESYTSKTSALDLELPCKHELYVGKRVKRGLFRSSTGKAINADINGSIQIIRKKFPEAFSAEGIVSCAVQPVLVNPISR

SEQ ID NO: 16098 - protein, 379 aa, Clostridium sp.
MEQLTITAKIQVLTDTDSKSLLDNTMSAYSSACNYVADYIFRTHDLKQFSLNKALYSSLRELFGLKSQMAQSVLKTVIARYKTILENQNEWIKPNFKHPEYDLVWNRDYSLTNNCFSVNTLKGRIKLPYFSKGMEQYFSSDIYKFGTAKLVNKHGKYFLHIPVTYEVEESNLSNICNVVGIDRGINFIVATYDNKHKSGFVSGKQVKQKRANYSKLRKKLQMRQTPSSRRRLKAIGSRENRWMQDINHQVSKALVQNNPKHTLFVLEDLSGVRNSTEKIRLKDRYVSVSWSFYDLEQKLIYKSKQNQSTVIKVNPAYTSQTCPCCGHIEKTNRNKKLHLFTCKNCGYKSNDDRIGAMNLYRMGINYLEDSQVPNTVTVE

SEQ ID NO: 16099 - protein, 404 aa, Nostoc sp.
VFNLTYEFKLKPTQSQIAIFEDWLEQCRRVYNYALCERKDWIKSRSCRINACSLHSEYIIPVDTPRPTYFNQSERLTQAKKKYPELSTVAAQVLQQTLKRLEKAFVAMWEHKHGFPRFKKPGKMRSFVFPQLGVNPIQKGKIKLPRIGWVKFYQSREIPDSGTVKQAHIVKRASGWYILLIVQWDVDVPQPIPHGEAIGIDVGLKSFIATSNGLTLKRPRFFVDAERKLKLLQKRVSKKRIGSNNWHKAQRKVAKRHEYVANCRKDWHRKLSHQICNNVGMVFVEDLNLVGLSRSMLGKHCLDAGFGQFFNILEQTCFKRGVYFQKVDSRKTSQTCPNCGTDTGKKELSERTHACSNCCYTADRDVAAAQVVLKRGLAAVGHTVKMLAEGKFIGIPLKQESSSL

SEQ ID NO: 16100 - protein, 415 aa, unknown
  TnpB Polypeptide
VIEATRTVVVPSVRLTEKKLEVFRELEDLYKQVLIELVDYGFRSNIDSFTRLKRDKYHELRGKLPQLPSHYIHTTCQDASTRIKSFNKLKKKGLAKSEKPVVNDVSIWLDDHLWKRIGYTTILIYTHKGWVSVELAPHKLYWRYINGGWVLRTQIKLKIDYECKRLLIYFVFAKTINVDENSAKHVISVDVNENNVAVKVLDKVYILETGIKKITIGYARYREAVQSVKGNGYASRAIHGRERKRKRDIRLKIANIIANTAKNLNAIVVLEKLPKQCPRNMIRDVRDSALRHRIYQAGFRGMVKAVEKKCLEKGVPVAKIDPRNTSSKCPFCGSKLMRGDAPRQLKCSRCGFKAGRDIIAVLNLERKYLTLKGLVPLAPMPDDPTPEVAVLPMKEWVRRKSLDATNKHKLMRMNI

SEQ ID NO: 16101 - protein, 404 aa, Thermococcus sp.
MKRAVTLKLQPSKEQEKVLSELADTGAKVWNRVNYLRRQEFFEGKPVDFNRTEKIVYEEFKREISSATVQQICRKNVEAWRSFFSLLRSKRNGELPEWFKPKPPNYLKDDGERRPLIVLRNDQYKIEGNKLILKGLGKFKRLEVQFNGRIHLKGKQGRLEITYDEVKRKWYTHISFTVGEKIIGDEWVRVPRQPSGNLSAGIDLGVNNLMAVYVENGESFLVNGRPLKSIAFYWRKRIADYQSKLNKSGVKTSKKLRRMHEKAKLQARHYINTAVRQTVERLYQLGVSRIVVGYPKGIARNSERGKKQNFLLSHVWRFNTVIQRLREVAEEYGIVVEVVDEAFTSKTCPVCGKSHEGARFVRELFKCPVTGLVFNADLVGAFNILKKAVKTITLNLSGLYAQRG

SEQ ID NO: 16102 - protein, 565 aa, unknown
  TnpB Polypeptide
VLSPGFEPGPDSSLDCRLYRLGHESMRRQSARICPRSPLWIRPLVPNPAPMPAVDAHTATRGMTGITGAEPPCSTETVPTACGSADKKRGRPRSRKPFPHWADRLYRIRRKTSGFSHGDIRRLTWRRYCFFRRGVMFPLLASCILYWHNANMSKSRNVKRAYKYRFYPTPQQEQLLRRTLGCARLVYNKALAERSEAWAKEQRSVSYKDTSAMLSQWKKSSELAFLQEVSSVPLQQALRHLQTAYSNFFNQTGDYPTFKKKSHGGSATFMKTAFTWDESKRELTLAKMREPLGIRWSRTLPKGRMPSSVTVSLDSAGRWHASILVEATVKPLRRSENTVGVDLGLESFAILSTGEKIANPRFSRKQAKKLRHAQKALSRKTKGSNNRQKARLKVARIQARIADRRRDFLHKLSTRLIRENQTVVVEDLNVQGISRRVKAKPDPDRPGKYLKNGKKAKSGMNRSIQDASWSMFRSMLQYKADWYGRRLIVIDRWYPSSQVCSTCGKRTGRKPLNIRSWTCPCCGTHHDRDVNAAKNIRAAGLAVIACGDGRKGENRKQSSPEPIRQ

SEQ ID NO: 16103 - protein, 482 aa, unknown
  TnpB Polypeptide
LNSSSRQSKLSHTSRNIRSSLSRCRSSNTLCRYFVTKTKCTCMSKTHCLPLRSESSFVMKPSIIKGMASIKRYRYRAYPTKGQAHALSCLYGCCRFVYNRFVAVRETMFKVGGRMPTFTQLARDLTQSKNDPDTSWLKTVSAVPLQQSLRHARTAYDNYFAWKKGDRKGPEVGKPTFKTRRGTQSAEFTLNSRFKLEHEPGCKWAFLTLPKVGRVKLRWTRDLPTVPKTVTVIRRPCGRYEASFTTITTSRITPKALHAEAGVDIGLLSLGVVRRSDGTCEAIENPRFLKNSERRLRHLDRELARKRKGSRNYEKACPRRARACQKVKDTRLDYLTKTARRLIDENQAIALETLSITGLAKTRLGKSVLDAGWGTLIRLVTQMGREAGRDIRRISRWYASTQTCCVCHVKDKPKPLNIREWDCPNCGARLDRDANAAVNIMLAAGLAESLNACGGDVNRKLAMPAATSTPMKQEPSETIPLH

SEQ ID NO: 16104 - protein, 363 aa, unknown
  TnpB Polypeptide
MLINKGYKYRLEPTVEQEIMLSKTTGCCRFVYNYFLKLNVDQYDKEKIFIFNHQMVTILPKLKKEYPFLTEVFSQSLQTSVRNLSTAFKNFFNKQNAFPIFKKKGKNDSFTCPQKFRIKEERNYIFIPKVGEVKYRNSRPLEGKVKSITVSRRCGDWYVSVLTEQEVQEKTKTFDSPVGIDVGLKEFAVLSTGEVIPNPRFYHILEEKLAKQQRKLSRKEKFSNNRKKQLAKVQKIHSKIANTRKDFLHKLSTQIVNNHDVIGVEDLNIKGMVRNHYLAKSITDASWNMFNNFLKYKCLWQSKTFQKVERFYPSSQLCSECGSKQIMPLHLRTYVCKDCGTNIDRDFNASKNIELRALQLVLA

SEQ ID NO: 16105 - protein, 380 aa, unknown
  TnpB Polypeptide
MLVCKKIRIKISQEDKVTLEFMQRKCRGLYNWWIGKLRKGEKWHLYEAKLSLQESKKYDPELNDVYGKLLAEVYFRIDSAMKAFFRRLKENAGKAGFPRYKSRYEFFTLSYPAMYIKTNGKTVILPTGGKGKNKSYQSIIAKLTEQPPEKFKELAISKDSRGNYYCSFVYERPEKPRNNSGVVAFDLGIKTLAVGVNESGRIYKIGGFKGYRWYNRQLDKIRSKRDKCKKGTRRYRFLTQVYKRVSEKKHNKQKDSLHKASYLIAYKLAESAVVIGDLSQEQMVAKSENKNKNRAVKNDWGLYQFKQFLSYKCKLYGKELHVISERNTSKTCHKCGYIQAMPLYKRTYKCPKCGLVMDRDENSAINILNRFFARLGPYTT

SEQ ID NO: 16106 - protein, 432 aa, unknown
  TnpB Polypeptide
LFKTDRIISKFDVVYECGKNIQAQAMPSTPAQQTLLSVSEAFKSFKELRNKFLRGELDFRPKAPSYRDSGGLFKVAYPNTGAQRPNLSADGKTLTFSMGNQVNRWFGVKSFDLPMPANLDYSKVKEFTILPKNGAFYLEANYEVEKKAHPLNADKALGIDLGTASNLMACVDTLGNSFLVDSKQAKAMNQLYNKRSAQRKKGKSQDYWDVVCDAITRKRNNQMRDMVNKAAKLAIDHCILRGIGTLVIGWNPGIKDECNMGKRENQKFVQMPLAKLKTRISQLCELHGIRFVETEEANTSAASYLDGDSLPAHGQKPSGWKASGKRSFRGLYTTADQSKINADLNGASNILRKVAGNLGIDLSRLGRRCLATVGRIRLWDCSKSKSNTCPKESQSLLSLRAVNITINAFNQRFHESFRSAIYNWFKHLYTKV

SEQ ID NO: 16107 - protein, 377 aa, Helicobacter sp.
MYNAPMLITYKQKLYSTSRNKHISKLLRLYGICYNHCIALHKRYYRLYKKHLKLYTLQKHITKLKRTARFAFLKILGSQTLQELVERIDKAYQKFFKKQGRPPRLKKVANYQSFTFKGKTGYKIQDNIISFNGYGFKFVKTYDLVGKPKTLTIKRDNLGDYFLCLVCEKEDEPAKAECLKPFASEPAGGNSVGLDFGLKTFLTASDGTQIASPLFFSKFLPLIKSCSKSLSKKKRGSHRRLKARLRLARLHRKIKNLRTDFFYKLANSLAKQYTTIFIEDLNLKGMVKLWGRKINDLAFSEFVAILERKTQVIKIDRFYPSSKTCSSCGALKEDLSLKDRVFSCPSCGFSLDRDLNASVNIHRVGASTLGVEAVRPA

SEQ ID NO: 16108 - protein, 385 aa, unknown
  TnpB Polypeptide
MQRVIGLQIKKYPEILKTITQYNQIVNEHIAKSFELKTNSKSKLHKALYKEIRNEHPNFPSALIQCARDNAVEMLKGNKYKIKTSKRLDSSIRFDLRTAKVFLKSKQFQLTTIKGRKKYKLNIPNYFAKYSDWKVKAITIGVNKKVLNLKVIVDGEIPKNISNKEVLGIDLGIKNFAVLSNNIFIKPKHIRKVKRHYAYLRSRLQSLGTRSAKRKLKSLSGRERRFMKDFNHCLSKRIVSLNYGAFALEGLKNIRKGRKGRTFNRMRSNWAYFQFRQFLTYKAEDIGKTVVLVDPRYTSQRCSKCGFIDKANRNKGIFHCVSCFFHSSSDLNASINISQIGKILFEQALVNEPIVTMNEGNSLHNEMPDISCKLQPQIYDLGRSD

SEQ ID NO: 16109 - protein, 553 aa, unknown
  TnpB Polypeptide
LGLGEDRRPRQLGTRQAEPSDDCGGPPPAGGGGCEGRPPRLRKYPEPQLRMADGGSGGIPGDKAREAGGLRRRRGGKEPIDERPAARPPAGGDGDGHQRGGIGPDPSPSIFHSHLTASRKIHLSVCLLLSRALASRRFTKISAGCPRLQSGEECAPTPASPWHRKVHLHRWDMYIHMMQTLKVKLEPTPEQVQAVRETMHQFNAACNFVADKAFELRTANKIELQKVVYYPIREQFNLSAQMAVRAISKTCEAYKRDKSIKPTFDPDGSVVYDQRLMSWKGLDLVSLLTLEGRIKVPVVICEYHEPRLNRIRGQADLIFERGSFYLCVVVEVPESAKIEPIGVIGVDLGIKNIAVDSTGEEFSGDGIETVRSKIDNLKADLQSCGTDSAKRHLKKLSGREARFRRDVNHCISKKLVAKAKDTSSVIALEDLQGIREGMTVSKAQRRKQHSWGFYQLRQFVEYKAAIAGVPVVYIDPAYTSQECSVCHHISRSNRPTRDQFACVCCGFSGPADTVAARNIAARVAVNLPIVARFFAEPQAPNTGEHHARQFIGG

SEQ ID NO: 16110 - protein, 360 aa, unknown
  TnpB Polypeptide
MKQQITIIGKIEGLSKIKENILQTEYNRFNVICQQVQQCVNNDIEPQYFWFKDKNTHASFVAEALMSIKKPFIKLNNQPLYLRKDVSRLEKQNENKKYKYWLKIPTKQRRHFWVAVNIPKYCENRLTDFTFCDSKIVKRNDEWYTHLVIEKEIKMITEYKDVLGVDLGIRRTASVVRLSDGMTRYYGKEIRNIRGHYFYLRKKLGEKKANKTIKKIGQTERRKVNDQLHKISRKIVNMAKETNSALVIGDLKGITKKKNNKGRKFNRKLSMMPFAKLSDYIKYKANLEGIQVVKVNEAHTSQTCNKCGKKGIRNKGLFKCKCSYDDNADRNGAINIAKRGLGEMSSSGVFVAMPRTGGSL

SEQ ID NO: 16111 - protein, 400 aa, unknown
  TnpB Polypeptide
VRVRYINGEIKKDLMKTYQFRLYPSEQVEQKMFDTIELCRQTYNILLCELQEQKVIDRAQIQGIIPDMKICDSRFKRLYSKTMQYECYRLFSNLRALAQTKKRGRNVGSLRFKGKGWFKTFTYNQSGFKLLGTGKRNNTLCLSKIGDIPIRCHRVIKGEIKQVTIKHEQSGKWFAYVVSDEKKTIVQQPIKNVVGIDVGLDNFVYDSDGHVVKNPRHLKHNEIKLTKLQQNLSRKKKGSKNRVKQRIRVACRHEKIKNIRNDFLHKISYYYTTNYDAIGMEDMSMQIKKDMFSKSRQDASWGRLRQFMAYKAASAGKLLIPVATKGTTQRCSQCQTIVPKELWQRTHECSNCGFTAPRDYNAALEIKRLTLKEIGWGTAESTLVEMEQVALSVKQEAPLF

SEQ ID NO: 16112 - protein, 396 aa, unknown
  TnpB Polypeptide
MYLAHRIRLDPNNVQATYLARAAGTARFAYNWALAEWKRQYEACKLDPALPRPNEAALRRQLNAIKREMFPWMLEVTKNAPQMAIRQLGCGFKNFFEGRAAYPTFRRKGHDDRFTLTNDQFSVKDKRIRIPKLGWLRMCESLRYAGRIVSASVCRVADRWYASIVVDTDASFLPPAENQGAVGVDLGVTALATLSTGETFVGPKALKSSLVRVKRLARSLSRKVKGSRNYAKAKIRLARLHARIADIRRDGLHKLTTSITCRFQIIGIEDLHVKGMLGNRCLARSIADMGFGELRRQLEYKAAWRGEQVVVIDRWYPSSKTCSRCGHRLDVLGLQVREWQCPDCGTLHDRDVNAAGNLRNMAVSSTVAACGGEGAGLAREAQGETGPREAGIQQQS

SEQ ID NO: 16113 - protein, 488 aa, unknown
  TnpB Polypeptide
MQIGYRFRCYPKSAQKQKLSEWMGCQRKIFNSKVEQYEYDKYFAYRTMNYIGEHPPLDCTMSQFKDKELTPYLYDVPAVVLRNGAYIWRQTMQGFLKGLNRPAKRQRGHGEVGVWITSELFRFEPVANQETGEILSYRLFIGDKKKNVIGYIEFVAHVQFDIPNSIHIKRNGNQWYLSFNADNKEIEWTKEENIARVSQFTDDELSKATIGVDRGVAIPFATSKLGNFDYSDAQKKSLSKHDKYIRKYSRIAARRTKGGRNQKKAYARVAKYHAQIKDIRSDFSHKTSHAIATNPAIHLIGLEKLNNVGMVKRPKAKQDENGKWLRNNASAKAGLNRAILGSVWGQFSTRVQYKAHRAGKVVLFVNPKNSSQECSNCCHTHAQNRKTQSDFACLSCGFECNADLNASLTIEKRTIAMLREGVTVKKSKSRSIRRKKQDVEIGVDTSKSSVAKPRTLTETMLDDTIANAVVAQKSLKWETATRRSSNRL

SEQ ID NO: 16114 - protein, 302 aa, unknown
  TnpB Polypeptide
  misc_feature (6)..(12): Xaa can be any naturally occurring amino acid
LAGSGXXXXXXXRRPQADLVRGRDWGFTAGMEMVSVNTLGKRIKCTYQCRPDSRLFDPAWKHGGAKLVFHDTDRNWYLHISVTKAFPDTGRSRITEIYGHDRGLVNLVTSCGDNGETVFQDGQGVRRIKERYARTRASLQAKGTKGARQVLKRISGRENRMMSDVNHRISKTLVSGCRAGALHVFEDLSGVSFQNLEDRNASGRYELRSWTFYSLEMKTAYKAAMRRGAILKVNPQYTSQKCPGCGTIDKTARNRSQHRYTCKHCGRVYNDDEVAAKNLRQLGIWYVSGVDNPHFSKKVSGY

SEQ ID NO: 16115 - protein, 231 aa, unknown
  TnpB Polypeptide
MIRSGTVSVKAGRFYVSVLVEIPDVNIDNSSNEGIGIDLGLKDFAIISNGKTYRNINKSAGLKKLEKQLIREQRSLSRKYESLKKGESTQRANIQKQKLKVQKLHHKIDNIRTDYINKTIAEIVKTKPSYITIEDLNVKGMMKNRCLSKAVASQKFYEFRTRLKAKCDENGIELRVADRFYPSSKTCHHCGSVRKNLKLSDRIYRCECGYVADRDLNAALNLKDAKTYRIA

SEQ ID NO: 16116 - protein, 444 aa, unknown
  TnpB Polypeptide
MKSKKYKHNLKKSHIKLIEQLNKKYSNKIPLNELFNDTPNVINSDSWFSISKSDNFNKDNLLSFNNNINKDKLIKCKKVILLPSNEQKLILLKMLEAYRIMYNRTINTIRKRWFNNERTNINFQYLRTYILKSEKDDLIKQFNVPSHMLDGAIKLACASYKSAFTNFKQGNIKKFQINYLKNSKKSHIFDIEKCSFNKNTFYSTFLGKIMLNNENYDYSNINKDSKLHYNVVSKRFTLLIPIDINEKNSTDNNDYISIDPGVRTFLTCLTNSDTIEINKETNNNIGGIITKIDKITDLNNIRNKKFAIRKRSLKIQNKIQDLHWKSINYLMKRNEKHILIGNWSTKQCISRCGNLNKLTKRISSRLSYYQFLQRLKFKCNEYNKDLHIVDEKYTSKLCSNCCIENETLGSSKIFNCKNCNLCLDRDINSCRNICIKSFSKKFNV

SEQ ID NO: 16117 - protein, 418 aa, unknown
  TnpB Polypeptide
MLLSHKTSIKICPEYSNIIGHMCYAASKLWNVCNYERHHYKELGLEKYPDWYYQKKAHKGDLWYRQLPSQTAQETCKQLDKAWKSFYVLKKTGGIKEPNPPRFKQDNIPVTYMQKGIRHEKGSDQLRLSLPRDLKSYMEETYGIHEKFLYLENKIFRKMDRIKQLRIYPPKNGKCELIVIYEIEEPEQHSQNGHYLSIDLGLHNLMTCYDSGNGRTFILGRKYLSLERYFHKEIARVQSVWYAQQSERGINYPKSSKHIRRLYRKKQNAVKDYLHKTTRWIAEYCRKEDIRCVVVGDIRNIRKEKDMGHKTNQKFHGLPYNRLYIMLEYKLKLYGIQLIKQEESYTSQCSPLSPEVSNRYAEASNRKERGIYITDGVRYNADAVGSFNILRKYLSVSGKKKELSVTGLKTPEIIKVAA

SEQ ID NO: 16118 - protein, 437 aa, Methanobrevibacter sp.
MLSCYFLIYVLLVYIIVYDFKWWVVFLRIVNKGLEVRLYPGGDMVHDLDQNIGNARFTWNHLLDEYQKTYALFKQHGYNSLKCNMSTFNTMLNMLKEEYDFLYLSESSSLQQVYRDLLNAFKKFFNEGAGYPCFKSKKHDKQSFRIQNNNNIKIKDNMIVLPKIGAIYYRTSKEYKRILNSNEVQINNVTIKKSNGKYYAVFNVEMPVESFEKKFLSVGIDLGLKTLATLSNELKITNLDLTYEDKMIKKYQKILSRKKYNSNRYRKVQKTYWKWIDKKNNKIKDAYHKLSLYLTKVYDIICMEDLDIQEMFQDTNQSSKLQRIGLASLVDKIKYKAEWYGKTFIQISRWFPSSKNCHICGYYNKNLKREESEWTCPKCGEHHDRDINAAKNILLEGLRIYHENLVNLRDWGDSTVILEALASTAREVRILELHSSR

SEQ ID NO: 16119 - protein, 367 aa, Hungatella sp.
MLKAYRYRIYPSAEQKVQIARTYGCCRFVYNQMLAYRKEAYEKEKRSVSRTDCNNYCNRELKKEYEWLKEVDKFALTNAIYNMDCAYKKFFKEHAGYPKFRSKHDNHKSYTTNYTNGNIGVDFESGKVKLPKLKEVKAKLHRRFSGQIKTATVSRAPSGKYYVSILVETGHEELPHRNQSIGLDLGIKELCITSAGRKYKNPKTIKKYEKTLAKLQRQLSHKEKGSKNYYRKRKQIAICHERISNTRKDYLHKITHEIISENQVIVSENLRIKNMVKNHHLAKSISDVSWYELTRQLEYKAEWNGRKYVKVDTFYASSQRCSACGYQNADIKDLSVREWICPVCQAEHDRDVNAANNILAEGLRQIA

SEQ ID NO: 16120 - protein, 521 aa, unknown
  TnpB Polypeptide
MSQRKGKSKEVHMAKAITTIRQSLNYQSQHADYLAANHALFNHVVAFYFAVIQAHENVLDLPTKEALTALETLTHATSKNRAPVMPLAEIAQDVPAMFRRAAINAALGSARSFYTSLKKWRTRREHAEAKKARKGKRNKCAERPPVPPRTWNKPVPFYAGQWKERTGSSILLKVWTGSCWSWIKVRSFGRALPDGVEMGSPALVRRGKRWWLHTPLEKKFSSPATIEQQVTTNAHTRICAVDLNLDTHLAVCTVQTVEGTILATRFIGHGRAISGFRKRQLGRIARNRSKTGIIAENEQDNADLWRKIRRVDEQIAHLVSARIVQFACEQAATILVFEHLGNLKPEKGRYSRRGNSKRAFWMKGRIFSYAKYKAWNEQIITSRVNPRDTSKECHRCHRLLIRYNTGQPLQGYTPGASLVCCEHCSMQGHADRNASLVIGQRLIARSQEPRKEKPLAPVRRAGRESKDSGVVLSQDATRERRPSADDARHGDGNGHGTAQERGRRMGRPLAAIPHQLRLPLE

SEQ ID NO: 16121 - protein, 471 aa, Actinocrispum sp.
LRLPIEGISGVRHRDQAHHLGRGQVYPILSVLPASVHLVSRYRMSPAPDQEVGLLQHCAQARFVWNLACEQHRHWAPGRAPAPGYYEQARQLTEARAEFAWLRAGSVTVQQQALRDFAQAMRSFLEGNSRTPSWRKVGRNEGFRQVGLKREHVQRLNRRHGRLWVPKVGWVRFQWSRAVPVVAKSYRITRDRAGRWHVAFAVIPEPISAPGNGRTVGVDRGVTVSAALSTGELLKAPGLEPKEKRRVQRLQRRLARGRRGSSRRARVKRAIAILRARERDRRKDWVEKTSTDLARRFDLIRVENLNVRGMTRSAKGTADQPGRNVRQKAGINRGILANGWGQLETRLEHKASGRIEKISAAYTSQQCSACGHTALGNRKSQAVFQCVACRFACHADVNAARNIAAGRAVTARGALQPLGGAMNREPQFATSSPAAVVSWNPRPWPWEDVNSGSPSVGRASGRSVAPGRRRR

SEQ ID NO: 16122 - protein, 568 aa, Sutterella sp.
MMKPVFPNYIHLKESRVKELCVNEAPAYHVGTRAVDIEHLDPEDEAVLIELLLRWNKQVNVFVQKFESSEWRLFLIGNGYRKLRDALVAGENPTSYFGLQGRHWKVGLQFASSVQSNRWRLAQTNALKSIKKGSRWVALCKDAQKFVRRMLNSLSIDFFDLMDEKTPNLSDREKGIPDIEKLCAWVRHKVQDCLGKIPEVSPTLIRFDSDSFKLEEEDGRQYLSLMSLTPGKRIKLPILGYVPARKVDGKNKLSTISVIKSHGTLKVEFQYSLKKPDGSLRIKPLLLPDAYRLKDGFAVTRAVDLGLTEPLTTNDGIRFGAHESRLDLGKRSNGRTLEIPGLGELIERYAQYLDRKQAERNRFEAMVRDPDTDKKKKKRIKKNNLGSKRYEAEIRRLKAAIVCCINRAINNLFARCPANVYVLECLSEVFDLKGISKKVRRKLSMWCRGIIRERMYYKAAKRGIRIVEVAAAYSSQQCPICGHVDRNNRHGDKFHCKACGYIGDADQVGALNCLKRAESPKYERFMSTEQVRKLCREEYLSYCKAHNLEPLPEARPKPKTKPRSRPRC

SEQ ID NO: 16123 - protein, 436 aa, unknown
  TnpB Polypeptide
MITVAHRIQLMPNNKQKTYFRKAIGCCRLAYNWGLAEWKRRYKEGERGLSGRKLRNDFNAIRGEQFPFTYEVTKYATAHAFDDLQTAFTNFFEHRADYPKPHRKKDGEGSFYLGNDAIRLSDTHKGLKHLKKVAHNVGGKRQYVNIPNLGYVKMAERLRFNGKILGVKISQDGDKFFASFQVQITEEEYHRTHPEASRERHGAVGIDLGLKEAMTLSDGIAVHNPRTLRRHQRKITRLSRQLSKRQHAKTKQERLQGVKRSNNYIKLSRRLGREQRHVAAIRQDFTQKLTTILTTTYEAIAIEDLNVKGMQRSRLSKSVSDMAFGELRRQIEYKAAMNGVRLEVADRFYASSKTCHVCGHKRDDLTLRDRTFVCPHCGAVIDRDLNAARNLLSLINSKVGTDYPELTPADLTALHSRFTLNRIATSKVETGRQRKL

SEQ ID NO: 16124 - protein, 521 aa, unknown
  TnpB Polypeptide
MFVSLQFKLELKKEDREKLTKLMRKQSSAIRVAYNMLKELEKEETKNPHAQVYQRLRQLFPDLPTKYIDSAIYKAKQYPTDKPVVFGGKRLFEKLCKNHLTGKLRERLKKQWKEQRQGTLISIGSKSKEDKGNRLLRFEDKEGQLHLRITIGNREFIYAKVLREPSNSKDKWITFMAMLLESWQTKNYFAYTVELKLRDGEVYGSVSFEIPTPKVKYTKENGVIAIDTNASPIHLAVAEGSKTGELLSYQTISLHHLLGLSKNAKDHQEWILAHQIVDLAIQKNKAIAVENLKKLKKGRRGDGKAKLRRMLHQWNAKKFLQKLKRVAMLKGVEVVEVNPAYTSVIGMLKYAPQLSIDKDIAGAYVIGRRALGFKEEMPENYERLLKDKAYLEFALKRYEEREEKLKELLEKETNEYKRNALESELRNVQNAKEILVNLIQSLQSKPSSCEGANGRNPKQGETEKVSQVAWVVLKVALLFPILGRVLPRDLSPLKPVLVEGVWDRMRHFNGLVPFEAGGTSQ

SEQ ID NO: 16125 - protein, 402 aa, Escherichia sp.
  misc_feature (38)..(38): Xaa can be any naturally occurring amino acid
  misc_feature (49)..(49): Xaa can be any naturally occurring amino acid
  misc_feature (64)..(64): Xaa can be any naturally occurring amino acid
  misc_feature (74)..(74): Xaa can be any naturally occurring amino acid
  misc_feature (95)..(95): Xaa can be any naturally occurring amino acid
  misc_feature (115)..(115): Xaa can be any naturally occurring amino acid
  misc_feature (139)..(139): Xaa can be any naturally occurring amino acid
  misc_feature (167)..(167): Xaa can be any naturally occurring amino acid
  misc_feature (178)..(178): Xaa can be any naturally occurring amino acid
  misc_feature (199)..(199): Xaa can be any naturally occurring amino acid
  misc_feature (226)..(226): Xaa can be any naturally occurring amino acid
  misc_feature (241)..(242): Xaa can be any naturally occurring amino acid
  misc_feature (247)..(247): Xaa can be any naturally occurring amino acid
  misc_feature (251)..(251): Xaa can be any naturally occurring amino acid
  misc_feature (355)..(355): Xaa can be any naturally occurring amino acid
  misc_feature (361)..(361): Xaa can be any naturally occurring amino acid
  misc_feature (365)..(365): Xaa can be any naturally occurring amino acid
  misc_feature (388)..(389): Xaa can be any naturally occurring amino acid
VKRLQAFKFQLRPGGQQEREMRRFAGACRFVFNRALAXQNENHEAGNKXIPYGKMASWLVEWKXATETQWLKDXPSQPLQQSLKDLERAYKNFFXKRAAFPRFKKRGQNDAFRYXQGVKLDQENSRIFLPKLGWMRYRXSRQVTGVVKNVTVSQSCGKWYISIQTEXEVSTPVHPSAXMVGLDAGVAKLATLSDGTVFXPVNSFQKNQKTLARLQRQLSRKVKFSXNWQKQKRKIQRLHSXXANIRXDYLXKVTTTVSKNHAMIVIEDLKVSNMSKSAAGTVSQPGRNVRAKSGLNRSILDQGWYEMRRQLEYKQLWRGGQVLAVPPAYTSQRCACCGHTAKENRLSQSKFRCQXCGYTAXADVXGARNILAAGHAVLACGEMVQSGXXLKQEPTEMIQATA

SEQ ID NO: 16126 - protein, 399 aa, unknown
  TnpB Polypeptide
MKYNYLLLNRQVQRGYKFKLKVRSKAIQLKLTHFSGCYRLIYNLALQQRIWVWNQRKVSLSYATQCLELPRLKEEFPFLREVHSQVLQQALLDLDRAFRNYFEGRAEFPRFKKRKDGASFRYPQGVKVEGRRVYLPRIGWIRFFKSREIEGKIKQATVSMEADGWFISFSVEKDIDIPQMRLDNLIGIDMGIRNFLSTSLGWQVENPLYLDRHLRKLAKEQRRLSRKKKFSRNWFKQLRRVRRVHKKISNSRNDFLHKVSTSIAKSHGVVVEDLRVKKISGSRTSTLNRSILDSSWGRFLQFLEYKCSERGHLFLRVSPRHTSQSCSKCGFSSPENRKDVGLFICGSCGLREDADINAARVILKRGLAVLNCSTVGHTGSKASGVWTNVQTMKEESHVL

SEQ ID NO: 16127 - protein, 431 aa, Ammonifex sp.
MKRTNVVRILPDKQQERVLEIIGDRSASLYNAVTYRCRQAFFKGEPVPSYEALCSEFKEHPAYKALPAHIGQEVIKKARKAWYSYFACLRLYRKGDMSRPPRVPRYWKDRRTGKRIFRVIPIKAPTSYSLDARCLSLTLPRDLRKRQGDRLVLRTKGVLRFHGRPKTLELKYDPVKKRWYAHQVVEVPEPKRPARPEKYAACDLGARVLAALAVEGLDRQLLFSAREVIKDFLYWTNQIAEEQSRLNRAGRETSRKLRRLYQLRARRLRHAFVALAAEIARVLKRHRVTTLFLEDLTGIREDMDFGPKNWLVHNFWAFRMLRNLIEAVSTRAGIKVVPVEPRGTSSRCAVCGHPVRRPVRHKAVCEECGRVWHADANAALNILLQGSLKEHGAEATPQRPRVLRWNRHRWESRRKPAAGTLKAASGSRMAA

SEQ ID NO: 16128 - protein, 453 aa, unknown
  TnpB Polypeptide
MATYQYVRRYNAVLTEEQQARHTMNRAAMDAAFNHIVAYLEKRYPYTRKRRFPTNAGGKRVLRNELIKSLRTKLAWMKKSDGVHNVYSQSLQIFVDLIITNFGEYQKKLNKARLMTAQDKDDYKANKGRHKNPQHRSWYRKGSLAFLRGRKQVFKTVTYSNNGKFRIISDHEIFVQQYGLIYVRQNIRKFRGNEKQIAQVKIKMRRQGDYEIQFVLNAPRVKSEGLRAQGVDMNMKHNKIFHTTNQDNVQERYYLSKDISERSDKLSDLVDALKSQRDTSKLSQQSKSYRALDNSIRYWARKRENILNNAYRHMVRDLMSRYDITIMEKLTTFDMRRKKRENRGFNKKLTKVRFGTLIEFAQQYANHYNKRLILVKPDMTSQVERGASRVKKHALDESVVIDGVERRDWFSEIDGHFVSRDGNSSGNVLDWGLNPKVHYLYPQYPVSKLAFEK

SEQ ID NO: 16129 - protein, 503 aa, Solobacterium sp.
VYTIRLAIQTSEYDNRFFEKCFYYGCAISNMVTRHANNALASLSCIKEYKIAREKYGRRYAGKKANELSSEQKAERERLLEIMNAYQMRYPLTAAALEKYAKKARRQYTNYLSAHQVQWIADQAAKSVKAYLYGSGHQLHFCRNNQFTTIGQKTASDGITFIAWNKIRFMKRIFYLNVPSTPYIQAVMTQRDKVKVVSLKRIEFNSGWRYYAIITLDGNPPVLHGKGNDRMGVDLGMSTLAAESDSAMMLENLAPNAVGYEKKIRHLQNLADHKMRIANPDNYDSLGRVRKGRQYWKVSKAVKRLRRYIRVLYRKQSAYTKSSHGHLLNRLLSNSAEIVLEPMLFKRLQKKSKKTERQEKLSAVKKKNGTIIQVHKYKRKKRFGHSIKNRSPGLLQSELKRKAALMHIPVLEIDIMQYRASQLHHDTGEYVKLGLSERYKTISGHIVQRDLYSAFLIRHSDTSLCRPDFEACNKDFQHFAEMQDALLSEMRANKVSNIPCWDF

SEQ ID NO: 16130 - protein, 379 aa, Fusobacterium sp.
MRQLKAYKFRMYPSEEQKIFFRKTFGCVRLVYNLMLHDRMKAFEERKGNSDKKIKYPTPANYKKEYEFLKEVDSLALANAQMNLEKAYKNFFRNKAIGFPKFKSKKNPVQSYTTNNQNGTVTIFENWVKLPKLKEVVKIKVHRNIEGIIKSATISCNGSGKYFISLLCETDIQELPKTYSSVGIDLGIQNIAILSTGEKIENLTFRKQVEKKLKREQRKLSKRFRNAKKSNKKLSEAKNYQKQRIKVAKIHEKIVNRRTDFLNKLSTYIIKNHDIICMEDLNTKGLLHNHKLAKSIADVSWASFVNKLEYKAKWYGKEIIKVDRVYPSSQICSVCGHRDGKKTLDIREWTCPICHAHHDRDINASKNILAEGLRRRETA

SEQ ID NO: 16131 - protein, 271 aa, Cyanobacterium sp.
VALNLSSAFLNFFEKRAKFPKFKKKGNKQSVRFPQSIKLDGDYLTLPKLKKVYCKVSRLPNSKLKSVTVSMTTSGKYFASCLYDDEQDLPERNSEGKAIGIDLGVKDFCITSDGSKYGNPNHYRRYEQKLARKQKRLAKKQKGSNNRNKARKAVAKVHEKITRCREDFLHKLSRKLVDENQVIVLENLAVKNMVINHKLAKSISDCGWGQFCTMVKYKAEWDGKTYIEVDRFFPSSKTCNHCLHQVDSLTLDIRSWQCRKCGTIHGKHIDL

SEQ ID NO: 16132 - protein, 310 aa, Bacillus sp.
QDTIWLKEVDSIALQSTLKNLADAFSRFFKKQNDIPRFKSKKNKVQSYATKQTNENIAIVGNKMKLPKLGLVRFAKSREVEGRILNATIRHNPNDRYFVSVLVETNVQEMPKTESNCGIDVGLKDFATLSDGATYKNPKFFRILEEKLARAQRILSKRTKGSSNWNKQRVKVARIHEHIANARADYLHKLSTEIIKNHDVIGMEDLQVSNMLKNGKLAKAISEVSWSQFRTMLEYKAKWYGKQVVVVSKTFASNQLCSNCGYKNKDVKNLTIREWNCPSCGTHHDRDRNAALNLRNEAIRILTVGTTGIA

SEQ ID NO: 16133 - protein, 346 aa, Bacillus sp.
RFTIDEFVRNHDKWKILFSRARNKQLILSGRKDAKYGNFGFQYVPETQELWMTTSSGKTLKFPAVTFPYGQEIMKEVITTQLQCKNKKKHGKPIAWSVEDHGEYYIVKCLVDVPENSHTNYSTSDGTIGVDCNLEHFAWANVTKDGNYKGSGALRFSILGKSIGQITKIIEAEAVRLVDLAERYNKPIVIEKLDTTQSKTGDRYGNKHANRMKSMFAYEKMTSAILGRADKRGVAVFQVNPAYTSIAGKMKYMRKFGISIHQSAAFTIGRRGLGYKEKVPRVLQLYIPKKDAHHWSHWHQLNNRLAIRTHHFYQLYDANRPNEALQIERLDVFENEKKKLAKLSVL

SEQ ID NO: 16134 - protein, 440 aa, Halopenitus sp.
MLEIHRTHRAKILNHSQVAEILDRHGWSASKLWNVANHHSRQVWDDTGEIPDHGDLKDELKTHTNYKGLHSQSSQRVLEELAEAFNSWKEKRKFDDRANPPGYRKKNYYDNQGRRVHEEHPRSTVTWKQNGIRHDTKHNRVRLSKGANHKEHPKAWEYILVEYETRPGVTVENLQQVRAVYDKAKGRWELHLVCKDEIVTPDAPGEETAGVDLGICNFAAVAYSTEQADLYPGNRLKQDGYYFPKELAKCDDSGGEKATRLHAKWSERRSHFFHSLAKHIVERCVEENVGRINVGKLAGVREDENGESKNWGRHGNLDLHGWAFDRFSNILEYKAKVKGIEVVEVDERDTSKTCCVCGRKDESQRVERGLYVCEVCDAAFNADVNGAENIRLNINDESNSESSASVDEDRSTGWLAQPEVYLYDLSSGFQPQAQVVDSKP

SEQ ID NO: 16135 - protein, 219 aa, Halopenitus sp.
VTFKAAGFKLDTQYDRVRLSKGSNLKEYWSDFILCKFQTRPDVDLSAVETVQQVKAVWSGDAWVLHFVCKVESEVAESPGEKTVGIDLGINNFAALAYEDGHSDLYPLNCLKQDDYYFSKRLAQCADSNSAQATRLNQKKSARRTHYFHTLSKHIVQRCVEKGVGTIAIGDLSGIREDDENGESKNWGKHGNLDLHSWAFDRFTELLTYKAEVEGISRV

SEQ ID NO: 16136 - protein, 420 aa, Halopenitus sp.
MNYNYRYRLKPTDRQRKTLDYHRDTCRQLYNHALYRFNQIPESDGTVKQRVRKIRDELPVLKDWWDALTDVYSKVLQPTVMRIAKNIKRLGQLKEQGYTVGELRWKSPREFRSFTYNQSGFELDKKDGQTVLSLSKLADIPIELHRPLPDDATVKEVTLKKEKTGEWFAIFGIEMDGEPPTKPSLADIDAENMVGIDVGILKYAQDTDGTAVESLDLSAERDRLEREQRTLSRKEYKSHNWKKQRQRVAECHFQIKRKRRDFLHKLSNYYAREYELVAVENLDVKGMLESARNSRNTASAAWNTFTDMLEYKCEREGTHFVEVEPEGTTKECAQCGVATDKPLWVREHSCPACGLKADRDANAAWNILLRGLTELGVDHSEGTPVETALPADTAVVSAKRVLEAGSPCLKEPPKAASRQG

SEQ ID NO: 16137 - protein, 399 aa, unknown
  TnpB Polypeptide
MIIRKAFKFRLKTNAEQEEVLRQFAGCCRKVWNKTLAEQKQRLDEGKPCERYNSFAKKLPEWKKTESLSWLGEAPASALQQKLKDLDKAIKDAFDKKQPLKRFPKFKKRGVGDSFRIPQPSQFELGHSRIRLPKIGWLNYFDSRKIEGNPKQATVSYCSGYWYVSVQTEIEIQPPVHESTSDIGLDMGISKLFALSNEKNIEPLNSFKTHQVKLARRQRKLAKKKKFSNGWLKEKRKIQRLHSKIANCRKDYLHKSTTMLSKNHAMIVIEDLQVSNMSKSAKGNQEKPGKHVKAKSGLNRAILDQGWFEARRQLEYKQLWRGGIVVTVAPQYTSQTCSICGHIDKASRLSQERFCCTNCGFKSNADTNAAKNILAAGHAVLAGGAEPLGAAMKPEPLVA

SEQ ID NO: 16138 - protein, 465 aa, unknown
  TnpB Polypeptide
MKTIFSRKAVKFIVPFNEDITTLQEKGRGFYKAVNKKVARMINDGKIIDIGNRNKVLVQYEWGAEWKTEAQFMNEFLIEEEKPFEGLKLRKHTRTIYQGVVRKYNGKRTRDDKKKEKPLRETTSFIAPRTLNLVWSDNFFKFVDGDVNGNIEFKSLTGKKVQVPYKKTSKKGRIEKNAIKFLPYMKPDETWGATMIFSKDLKRCTIVASAEVPVTFKYEPEGFIGVDINMSEVFDNWLYFSEPIFGLSKIPKSQYVDTIIKTEKALEELNKQTKIQRLIKDRPIRSRERGKLRWKVKWNHRLHEKYIENAIFPGTEMTCVDALCTYAEQNKKGIAIDSVKSGNQNGTFGQDKIPNALIAECEKRGIPYILTPTPYTSRRCIDCGHVEAEYYANKGIKPNKARDSKTNIFTCRGCGSSHDADFVGATNLAVWAEFLVSVDQWQGDLMKDKWALIKRSFLFKDVKFP

SEQ ID NO: 16139 - protein, 358 aa, unknown
  TnpB Polypeptide
MILTYKYRLKGHRVARSLREFSWAVNQVWNFCTASQRKVQEIYKLGSYKKWPSHFDLQKLTKGTSKELGLHAQTVQCVDEQFSKSRDQHKKCPKFRKSSGSKRSLGWVPFKEQSRQVSMNSITYLGHTYKFFGAKRSPLPSNATGGCFVEDSSGKWWVCFYVKVGGLPTGVGEVGVDLGLKTLATTSDGEKIENPTSYRKLEEKLSIAQRANNSKRAKAIHTKIKNQRKDYLHKASAKLADANRLIVVGNVNAAGLAKTRMAKSVLDAGWSTFRDMLRYKASRHGATFLEVDESFTTQTCSTCGSRPESRPKGIAGLGIREWVCSDCGASHDRDVNAARNILMIGRSAAPRVDESRVS

SEQ ID NO: 16140 - protein, 407 aa, Microcystis sp.
MLVAERHIIKKGHRFWAEIDNLSWQSKNLYNSANYLIRQNFIYGHGYLTYNQMASLMKKTEQYQALPAKVSQQVLRGLDKNWPSFFAASSEFKNHPDKFLVKPKIPGYKEPKKGRNLLVYTIQSLSKLGLRQGLVKLSGTSIALPTRVEERIAEVRIVPKCDCYVIEVIYEKTEQFLAPNEKIAAIDLGIDNLMAVTSNQPDFIPLLINGRPLKSLNQFYNQRRAKLQSLLKGNRQSSQRIRRLTRCRNQKVDDYLHQASRYLVNLLVDQQITTLVIGNNPGWKQEVNLGKVNNQKFVTIPHARLIDMISYKCQLAGISVILQEESYTSASNFLNDDPLPVYGQITEKPVFSGKRISRGLYRTDKGILVQSDVIGSYNILRKAFPNAFNRYGIERCVVHPRRINLSK

SEQ ID NO: 16141 - protein, 358 aa, unknown
  TnpB Polypeptide
MKLTIAVKIVTTSEQAEALRETLARCNEVSNWIAATGFAAGVFREFDLHYLCYRAAREKFDIGSVALTKCMTKVAGVFSRSRTVAPNFRPLSAHLYTKNMFRIFGDMVSIWTIRGRMKLPIAMGERQRNLLPFAKGEASLAHRQGKWFLILPCEVEAKPARVPSDWLGIDMGIVNIAADSDGTVYSGSEIEARRAHASRRKAGLQRRGTKAAKRRLRKLSGKQRKFQTHTNHCISKALVLAAERTGRGIGLEDLKHIRARVTAMRSQRARLNNWAFGQLREFITYKAKLAGVPVAIVNPKYTSQQCSCCGHIDKANRPDQATFSCVSCGHSDTADLNAARNIRARAALAAPSSSRASA

SEQ ID NO: 16142 - protein, 374 aa, unknown
  TnpB Polypeptide
MQNSLIMAKVFRYRLKPTKAQIAKLNEQLELCRWVYNETLAMRSDAFKQEGRSVSYFETKRMLPVWKKSKPELSIVHSQVLQDVVLRVNLAFKAFFLRVQSGEEDPGYPRFKGKNRYDSISYPQSGFSIDGNKLWLSKIGEIKFWLHRSIERYVKRLTIRRSATNKWYVSFLVEESINHVLEPTEKVVGIDMGITNFAVLSNGEFIENPRFLLTDETMLKSVQSKRDKLPKGSSERRKASKAVSHLYERVANRRENFAQQLSRKLVKSYGTICFEDLNITNMVRSHTLAKSILDAAWNKSVQYTIYKAEEAGRKVVLVNPANTSQMCSSCGQIVKKDLSARVHDCPYCGLSIDRDLNASRNILRLGLQSLAKKA

SEQ ID NO: 16143 - protein, 202 aa, Helicobacter sp.
VSRSLSKKQHPKTKSEAMQGIKKSHNYLKQSVKLNKLHTRIANVRNDFLHKLTSSLVKHYAYFGLENLNIKGLMKNHRLAKAISDVSFYEFKRQFQYKSDYHKREIIEADTFYPSSKTCSKCGSIKETLTLKERIYECENCGLKIDRDYNASLNLYNLIPQKIGQVLSEFTPADLTALQYDLATNNIANSKVETGIQQKNYL

SEQ ID NO: 16144 - protein, 196 aa, Okeania sp.
MKNLSSKVYQYAFINLGEAFKRFFQGLGKRPKFKKKGKSDSFTIDNCGKPIKLNGWSHKLPFIGWVKTYEPIEATTQKITISRQAGDWFVSLAFEFTPTATAKNTEVVGVDLGVKTLATLSTGEVFPSIKPDRTAQDKLAKLQRQLSRKVKHSSNWYKAVVKLAKQHRRVANIRKDALDKLTTISAKNHGIVVIEV

SEQ ID NO: 16145 - protein, 222 aa, unknown
  TnpB Polypeptide
MLGLECEVNVPDVMPSGYPIGIDLGLDKFLATSDGELIERPKFFVERQRELKLLQRRLKHKIKGSNNRRKLGLKIARLHQRNSDSRKDFHFKLAHKLCDQAGMIFVEDIDFQTWAKGMLGKYTLDAGFGREFGGQSTLSANTRHFLTILQWVCWKRGVYFSKVEKNYTSQVCPSCDTHTGKKELSDRIHSCLECGYTTHRDVASAQVIRNRGGKSGGTHRGL

SEQ ID NO: 16146 - protein, 421 aa, Desulfomicrobium sp.
MSKAIRNCTLRLYPTAKQARQLESWLELHRLLYNQSLAERRDAWCEGKRSVSYNEQQNALPAMKEEKPWYLPLGSHALQETVRRVDRGFKAFFRRLKSGQKPGYPRFKAKDRFDSFTYPCVAGWKLTELSSGRGVLAVTNLGHIKLRGTCRVNLLGLDRKQMTCCTIRRNWGKWYTTITYHTTLSALARPVAEDPESMTGLDAGLKSLGVLADGTEILRKRHLNEDVAMIKAASRSISRKMKGSANRRKAVRELSRIHGRVANRRKDYLDKTAAKIVSTTSFLAVEDLAVKNMMAKGGMWKRGLNKSMADAALGRFLIILGYKAEEAGCQFVRVNPRGTTQDCSRCGETVLKTLSDRIHNCPHCGLVMDRDQNAAINILFRGLALAGREPSAVWRDVRLGPKAEQSRRSTKPHQCVMHSCG

SEQ ID NO: 16147 - protein, 488 aa, Chlamydiae sp.
MSKENLVLKMQVTADPQTLSELDGQSRICNWLYNHLLEKSLELKREFIHSGNPEASKTIYTKRGLRNVLPTLKVEHPFLKVVHSSPLKNTALRLSEAIRVHQKSKKGKRKGKQMGWPKFRAWRRDWFSLLYDEPEKGFKIQETSLILSLGMGQDRKHRFLVLDLPEAHLLKGKTLRNLRIVSELGNYYAVFTIQKELPIRKPISKILSLDPNHKNLAYGVDTEGTAIEIAAPKWIKTYDRRLDELKSKRDRCNKKSKKSPVLDEKGTPTGKEFYLPSKQWKKYDDSFKCALRKRREQTKTFMYTSAHRLFRDYDCIGIGNYTPNGAGITKPMRRAMNNRSLIGRWKNTLSWVARKSGKIYLEFDEKGTTRTCSHCLHVEEHGIHVSLRQWQCPQCQTEHIRDENSAINGLRKILRDLLQKNEGEYPLIVSGSDLAFVKERWAWCVLPGGVLVTPRRQNSEIIRSTRKLNRGHDSPRSKVDHLVMYDHV

SEQ ID NO: 16148 - protein, 394 aa, unknown
  TnpB Polypeptide
MEKEWEALSEIRMEKQRFNAAEKLIHTTARNKAKYSFDAAFPKMPSYLRRAVLQHVLGAVSSARTRSDNGCPLRNHYMPVFYKDNMYRKEEDRVFLKLYDGKDWVWQEVRLKKTDLDYIRKYWSGVKAKSPVLIKKHRKYFLQFAFEQEAKLTEKSAGAQRICAVDLGINTDAVCSIMEADGTVAARKFINFAAEKDHLQHVLNRVRKHQRLHGPQSVRGFWAYGVRLNEELARKTAGAIIAFAKESRADVIVFEHLDMRGKKLRGKNRQKLHMWRKQSVQEITEHQAHRLGMRISRVCAWKTSAYAFDGSGRVTRDPKNHSLAVFRNGKQYNCDLSASYNIGARYFIRELLKPVPETERSVLEAKVPAVQRRTSCVYADLIKLSEVMTEVSAA

SEQ ID NO: 16149 - protein, 375 aa, Butyrivibrio sp.
MEQTITAKLQILVNPSDKQILCDTMKAYSDACNYVSEYIYRTRKLSRYSVQENTYYQVRETYNLRSQMAVSCVRTVIAKYKTILENQKEWIKPVFKLPQLDLVWNRDYSLNNKNDIFSVNTLNGRIKVSFYKKGFERCFAGNCKFGTAKLVNKHGMFFLHIPVTYEISELNKSEVSNVVGIDRGIRFLATTYDSKGKSVFYDGNVIKQKRAHYKALRKQLQQVGTPSSRKRIKAIGQRENRWMQDVNHCISKALVESNPDGTLFVIEDLTGIRSATERVKIKERYVSVSWPYYDLEQKLSYKALKHHQLVEKVNPAYTSQTCPKCGHTEKTNRNKKMHLFCCKNCGYKSNDDRIGAMNLHRMGIELLVPDAVATE

SEQ ID NO: 16150 - protein, 227 aa, unknown
  TnpB Polypeptide
MTGKSCPSIHSGKRTKCTFEGEHFAGYLDGSYQLGTAKLVELKGRWYLHIPVTKAVEDFQKENVRHVVGIDRGLRFLAVSYDEQGKTEFVSGKKIATKRHKFQEVRKQLQAKGTKSAKRKLKAISGRENRWMSDVNHQLSKTLVQKYGKDTLFVLEDLTGVSFEESNLSRTAKQNYDLRSWSFLPVGTVPDIQGSREPFGSPESVCEVHLPALPEMRDYPQGEPRPP

SEQ ID NO: 16151 - protein, 369 aa, unknown
  TnpB Polypeptide
MLKSFKYRLYPNKTQEIQIQKTFGCCRFVYNQTLAYRKNLYETEKKSMSKFDCNTYCTQVLKKEYVWLKEIDKFALNNAVFNMDSAYQKFFKEHSGYPKFKSKKDNRKAYSTNSTNNNIEVDFENNRIKLPKLKWVKAKVHREFVGIIKSATISQTPSDKYFVSILVDCENFHMKPTGAMIGIDLGIKDLVITSDGDKFENFKTLYKYEKKLAKEQRKLAKKAKGSSNRNKQRIKVARLHEKITNIRIDNLHKISHKLIQENQLIVSEDLKISNMVKNHKLAKSIFDCSWYELTRQLQYKAEWNGRQYIKIDTYFPSSQTCNVCGYVNKGTKNLSVREWDCPNCHTHHDRDINAAINILNEGLRLVKSA

SEQ ID NO: 16152 - protein, 578 aa, unknown
  TnpB Polypeptide
VIKLKTQKISKVGTKLELYPLTPKDRELLKELEYEGAKVSRLAFYYLRYVLPLSNEDEYKLHLNRFRSMLVFSGSLLNKETATMIFNTCYRNFEYSRKNHGSLPRKFMKNSLTIPVRISKHVNDSYHRRAGTLKLWNHNLLFEANLIKKKKIRFYVNYDKKAFGQIEEILSRKTDIAFGDPSNLIIKKGRAFLHLSFTKEFKEQSFKPKRIMGVDFGLKSLATYFIIDVDDSIKRFSAGNIGNLDRFILDYVERRAVEQRNGKIKSDKTVLGDSLYTQEVNQYIYQTINKLIEIAKQYGVDTIAVENLKGLASKQLKKSIIKTHKAWKKTLMKGARGKRAAHLQMVKEKAYRRLISKFPYKRMLEDLELEAKWNGFNFIKVNSFDTSRRCPRCSTIRKKNRKGNSFICQKCNYSSNADINGALNIAIKAARPDLFEAGKRVPPKGGQPALEEVIASGVEGEQSLPPATTLTHPPPSVQQTGGIKDADQIGELVARCGKPVGSMGLCGETYRETDNIATQNDNMKQFKISELRETKQENTSVANKEKRDTSILGFLINGVILVANKEKRDCRIHKEQSS

SEQ ID NO: 16153 - protein, 400 aa, unknown
  TnpB Polypeptide
MLRELCSLSRAVYNESLYNTRQHYFEEGSYLRYEANYYLVKNSDNYKRLGASVAQQSMKGADASFKSFFGLMKLAKSGRYQGWKIRMPKYLKKDSFFKIVFIQAQISDGKFRVPVSFDMRKDYKEPMFIKIPPHIRDKKIRQIHIVPKYNGRYFEVRYMFDDFDELKPELDAEKAMGIDLGVNNLATCVTNTGESFIVDGKKLKSINQWYNKELSRLSRIKDKQGIKCYTKQQYKLTTKRNNRVNNYIYCAAKKIVEYCIDNKIGNVAVGYNDGFQSRSNLGRVNNQNFVMIPLGRLKNRIEYLCNEYGINFVQQEESYTSKASFFDNDKIPKWNPQNPEEVEFSGKRVQRGLYITYKGNQINADVNAALNILRKSNLTDLTVLQARGAVSSPLRCKILS

SEQ ID NO: 16154 - protein, 395 aa, unknown
  TnpB Polypeptide
MCRYSNNLYNYGLYCIRQHYFDTKQFLPYESNYHVCKENENYALLQAGVSQQILRVVDRSFKSFFNLIKKAKGGDYRFQDINIPHYRKKGGLFLLVLQKNSISIKNGFFKVPMSREFRKLHDVEITLPYPKRLADKELKEVRILPCSGGRFFKIQYVYEEPETNLDLNSENFLAIDLGVDNLATCVSNVRTPFIIDGRNLKSINWHWNKEKARLQSVLDKQGVKGGKSNKVYAITEKRNRRINDGIKKAARYVVNNCIAHDIGTLIVGYNKDFKRGINIGKRSNQSFVQIPLGDLRLQLRNLCERYSINYIEQEESYTSKSSYLDSDILPEYKAEHPYTGTFSGKRIHRGIYKAKDGTLINADVNGAANISRKVSGSIMQPCIGLLASPQRIRLT

SEQ ID NO: 16155 - protein, 385 aa, unknown
  TnpB Polypeptide
MYKSFKTEINPTPTQKAKIDKTIGTCRFVYNFYLAHNIELFNAGEDLMTGKMFSVWLNNEYLPNNPEYNWIKDTYSKAIKKSIEDGFTSFKRFFKHESDFPRFKKKGKSNVKMYFVKNNKTDCKCERHRIKIPTLGWIRIKEKGYIPTEKQGWNIKSGTVSYKAGRYYVSVLAEIPDIEYEKTSNEGVGIDLGIKDFSVISNGNVHENINKSHKIRKLEKKLRREQRCFSRKYENLKKEGEPTQKKNIEKQKLKVQKIYHKMDNIRTDYINKTIAEIVKTKPSYITIEDLNVKGMMKNKHLSKAIASQKFCEFRRKLKIKCDNQNIELRIVDKFYPSSKLCHHCDSIKKDLKLSDRVYRCKCGYIEDRDRNAALNLKDAQSYVVA

SEQ ID NO: 16156 - protein, 385 aa, unknown
  TnpB Polypeptide
MLRTVAITLRVAPEDVPKLERTRAAFVAACNDAARVAHAEGLSNAYRLHQRVYYDLRARYGLPAQHAVLVRDVVAAAYRRDKTVRHTWRPDAAVVYDHKLLRFEPKGGYQRASLATLEGRITCDLAIGGHQRRLLARTAKVGQADLLCDRKGRWRFHLVVHLPDPEPGDQSGGVLGVDLGLKNLAADSDGTRYSGATVNGLRRRHARLRARLQRNGSHQARRRLRQQRQRQRRFQADVNHGIAKQLVATARTTHRALAVEDLNGLRDRTRDVSRDQRRLLGNWGFFQLRTFLTYKAEAAGITVYAVDPRHTSQTCPSCGLIDRANRKTQATFQCIACGVAGHADHIAAINIARRGASMAGLSVMEPDIPDAGANPRGSPSPARRP

SEQ ID NO: 16157 - protein, 406 aa, Cyanobacteria sp.
MIVYESKLEGTQSQYGQLDAAIRTGRFVRNSMIRAWIDGQINSRNDAYKYCKVLADNPEFPWAKQLNSMARQAHAERAWAAIERFYRNCQAKIPEKKGFPKFKKYQVRDSVEYKTSGWQLSEDRRYLSFTDGFKAGNFKLWGSRNLHYYQLNQIKRVRVVRRHDGYYAQFLIDYKREENKELTGSQIGLDVGLNHFLTDSFGNKVDNPRFFRKDERKIKRLQRRLSKTKKGSKNRAKARNKLGRAHLKVSRRRNDWVCKLAQRVIQSNDLVAIENLKVRNLVKNHCLAKSISDAAWYRFREWLEYFGVVYGVPVIAVNPSYTSQNCSNCGQKVVKTLSTRTHKCPHCGYIADRDENAAINILKSALKEWSTTVGRTECQVSREIPLCLVLETDKSKGTQRKRKSKK

SEQ ID NO: 16158 - protein, 423 aa, Cyanobacteria sp.
MAIKRVTFRLYPNKAQNEKMHYWRRLHKDLYNACISDRKEQYKRLGKNVTYFDQQNILPEFKQVWVEYKELGSHALQATVKRVDFAFQRFFKLKSGYPKFKSARYYKGWTYPCKAGWKADTQGKHGTLKISNLGEIKMRGQARDWGTPKTCTIMYKQGKWYASITVDCIPTRYQTDKGVIGLDFGVNDAIADSHGNFVENPRFLKTTQEKIKHIAKKARRKRNPRRGVKPSRRYKKVAKAIGKIQSKVARQRHNWHHKVSVDIVSRNSFIGTEQLNIKGMTKKAKKGSKRKKQKTGLNRSILDVGIGELKSMIAYKVTEAGGMYIEIPTRKVKPSQTCPKCGHQKKKSLSERVHKCENCGFTTNRDTAAAMVIENYIRGMERASLDAESSSSTECGSMRQLGAKKQMSAKKRQKQQSQSSGLL

SEQ ID NO: 16159 - protein, 438 aa, unknown
  TnpB Polypeptide
MLEVHRTHRANIRNHPQVAESLDRHGWSASKLWNVANYHSREVWEETGEIPDHGDLKDELKDHTKYNGLHSQSSQRVLEELAEAFNSWYGSDDERDNPPGYRKRNYYDSEGRRVHEEHPRSTVTWKQNGIRHDTKNNRVRLSKGANHKEHPKAWEYILVEYETRPGVTVENLQQVRAVYDQQKERWELHLVCKDEIETPTSPGNETAGVDLGICNFTAVAYSTEEADLYPGNRLKQDGYYFPKEIAKCDDSDGKEATRLHAKWSERRTHFFHSLAKHIVKRCVEKGVGRINVGDLEGVREDENGESKNWGKHGDLDLHGWAFDRFTNILEYKAKVEGIEVVEVSERGTSKTCCVCGREDDSQRVERGLYVCETCDAAFNADVNGAENIRLNINEESNSESAPDLGGDRSTGWLAQPGVYLHNLSRGFQPRTEVVDSKP

SEQ ID NO: 16160 - protein, 370 aa, unknown
  TnpB Polypeptide
MRCIRTYCFKLYKSKRNRKLHRQINAAGLIYNHGIALHKRYYRLFKKQLNANKLKNHLAKIKKTERFSYIREIGSQAVQDIAERIDRAYRLFFENLKRKVRTAPPGFKKVSKYKSITLKQAGYKLLDGNRLRIKDTVFKYFKSREFSGKIKTLTIKRDALGDIYIYVVCQTEENEVIARTGEMVGFDFGLKKFLTSSNGQDIEAPLFFKENANAIRKANRNLSRKKKGSNNRKKAKLALAILHKKVANQRSNFHWQLANYLVGQYADICIEDLNLKGMQKLYGRKISDISFSEFVKILEYKAYRTGSRVLKVDRFYASSQTCSSCGHVNPETKDLRVRTWVCPACGKVHDRDRNAAINIVRKAEMLYDIA

SEQ ID NO: 16161 - protein, 251 aa, Okeania sp.
MVKTYEPIEATTKKITISRQAGDWYISCRGERPFAPTNESTPTPTPKTTNAIGVDLGIKTLASLSDGKIFKSVKPLHKFEAKLSRKQYINRNKIIGSANWKKSQLKIARLHRRVANIRKDTVHKSTTYLAKNHGTVVVEDLNVSGMLKNHKLAKSISRQCFYEFRRQLEYKCQWYGSELVVVDRFFPSTKTCSNCSHVQEMPLNLRTYECECCGISIDRDLNASINLRDAVGLTVNACGRSAADSSGGSRK

SEQ ID NO: 16162 - protein, 238 aa, Okeania sp.
MKARFKYRIYPAPGQKARLAKLFGCVRVVWNDSLACCQEKYRLGQKKPTNSELQKLFITQAKKTEDKEWLSEVSVVPLQQSLNDLNQAYQNFFSSTKGQRKARAIKPPKFKTRKSKQTARFTLRGFKVHQDKVYLAKIGKLKVAWSRKLPSEPSSVTVIKDSANRYFLSFVVEIQPETLPKTDNSVGIDLGIKTFATLSNGQKIDAPKPLKKRIKKYRKLSKSLSKKLKDLKDMKKLG

SEQ ID NO: 16163 - protein, 208 aa, Okeania sp.
LVAFAGATLRERVVWNDSLACCQEKYKSGGKKPTNSQLQKQFITQAKKTENREWLQEVSNIPLQQSLNDLNQAYQNFFQSTKGQRKGKPVKPPKFKSRKSKQTARFTRGGFKVGQHKVYLAKVGKLKIVWSRELPAAPSSVTVIKDVGANGRLPLHRYFLSFVVETCAKTLPRTDNSVGIDLGIKTFATFSDGTKVDAPKPLKKRIKK

SEQ ID NO: 16164 - protein, 235 aa, unknown
  TnpB Polypeptide
  misc_feature (212)..(234): Xaa can be any naturally occurring amino acid
MLRRAVAVELEAPREVSKLLYDVESVYLGIVREVVAYAVGNSVTSANQLRRLFYHKYRQEYPNLNSQLVIEAIRQASGVAKSFVERRRKGLVNKPCPEVKTVSIRFVETTWNYEEFVKSIAPVRVWISPISTGKRGRGGRRFEVWLRPHRRFWQYWWKVLTGGARLASTLVVKRRANKWYAIFIFELKPKEEEPKSIISFDINENTVAVGRXXXXXXXXXXXXXXXXXXXXXXXI

SEQ ID NO: 16165 - protein, 245 aa, unknown
  TnpB Polypeptide
MVKAVIHKLPKDDWKLKSVTVSQDGVGNYFASVLFEYEQEDIPSVSKSSTNAIGLDYKSDGLYMDSNGNKAGVHKYYRESHKKLAKEQRRLSRKAGSKKNETKSSNYFKQMRKVNRIYRKIANQRLDSLHKKSTEIANQYDVVCVEDLDMKAIGNKGFGNGKATFDNGYGMFLNMLEYKLKERGKYFVKVGKWYPSSQICHCCGSVKKFDLKDRVYTCDCGYIGDRDHNAAINILTEGLRILQSL

SEQ ID NO: 16166 - protein, 402 aa, Cyanobacteria sp.
MYQSVKARIYPTDAQAEKLSQFFGCARWWWNRALHETTTTYTETGKGLSREGLNGLLPQLKREFPWLGECHSQVLQSVTLNLTKAFINFFEKRAKYPNFKSKHGKQSIQYPQGTKFVDNLIYLPKLGWVKIKLHRPLDGEVKTVTISKNPSGQYFAAILIEKEGENPQPSSQGQAIGIDLGIADFCITSTGSKYPNPRHIKKHERNLKRKQRKLSRKQKGSNSRNKARKLVARVHQRISNSRQDFLQKLSHKLVSENQVIVVEDLEVKNMVRNHSLAKAISDLGWSSFVGMLNYKCERSGKILIKVDRFFPSSKTCSNCYHRVSSLPLDVRNWTCPSCGTYHDRDICAAQNIKAEGLRLLALGTSATADGGEVRPTRGRKTSTRRSPVKSEAPTLCASVGGG

SEQ ID NO: 16167 - protein, 402 aa, Saccharopolyspora sp.
MQVKRAYKYRFYPTDAQRAELLRTFGCVRKVYNLALDARTRAWFTEQRRVNYNETSAMLTSWKKSDDLAFLSEVSSVPLQQTLRHLQGAFTAFFDKRTQYPRFKSRKKSRQSAEYTKSGFKYRDGQLTLAKMREPLNIVWSRPLPEGAEPSTVTVSRDAADRWFVSILVETSVERHAPTDTTVGVDAGISSLATLSTGEKITNPQHEKRDRKRLAKAQRELARKQKGSNNRDKARRKVARVHARITDRRRDHLHKVTTRLVRENQTVVIEDLNVRGMLSNGKLARAISDASWSEFRTMLEYKAAWYGRDVIAVDQWFPSSKTCSACGRLAKSMPLNVRTWTCPGCDTTHDRDVNAAKNILAAGLAVSACGAGVRPQRESSRTGQSAAKQELSGASPIGIPRL

SEQ ID NO: 16168 - protein, 560 aa, Lactobacillus sp.
  misc_feature (446)..(545): Xaa can be any naturally occurring amino acid
MLFQAKEMKFMAFKTKLAEHEIQLGTRQYRIYPEGEQIAWIWQLFGANRFVWNQFVAAFEARYEANPELKFPKIGVLKSWLPLMRKEYEWLKRVNSTSLQFTVERFSDDMWAFLTKKQVKQGKPRFKSRKYYCQTATIKNVKYRTKTGAQAQIAVLSPHHLRIGKKNGITLRTSSLHNLRNVRIQKAVISYRQDLDRYYISFSVVKDKRQLAQYQVKSKKTGKAVGIDVGLGKEWLVTSDGKRFGVPDTFKLEKAMLKRQSHCDRNRTAIEKRAARFNHEHEEKIDKYDYANWQKLRKTKSKYQLKIRNIRYDYLQKVTTELVKGYDVIAIEDLKVKNLIGNHKLAHNIANASWGMFRRLLAYKCEWYGKKLIVVKPQYTSRICSECGKKNPRFAHMKTRDWLAIREWYCPYCHAHHDRDVNASKNILARAVGLGSKISKIQAGAXXXXXXXXXXXXXXXXXXXXXXXXXXXXXXXXXXXXXXXXXXXXXXXXXXXXXXXXXXXXXXXXXXXXXXXXXXXXXXXXXXXXXXXXXXXXXXXXXXXXIYLMGGRSWRIYELV

SEQ ID NO: 16169 - protein, 225 aa, Nonomuraea sp.
MTQQVKRAFKYRFYPTDEQAAELSRTFGCVRLVYNKALQERTRAWYGEQRRASYVQASAALTEWKKTEELAFLAEVSSVPLQQALRHLQTAFGNFFAKRARYPRFKSKKKSRACAEYTRSGFTWRDGRLVLAKMTEPLDIRWSRPLPEGVVPTTVTVSRDSAGRWFVSMSCEDHMVAAPATTNAVGIDAGITSLVTLSTGEGVTNPQHERRDRAKLARAQRELPR

SEQ ID NO: 16170 - protein, 497 aa, Subdoligranulum sp.
VSALNITSSYQVRIVNCSINLNETVRIYRKALAYLIGVVNENWEAVKRIDTGSLEQRRYIDKLVHGTKNHEARYPDFDKQFYKYPCYLRRATITAAIGAVSSYRSNLANWEMSDKKDKQPTLQVNRNELPTFFRDEMFLVDGAPERVKVVKNPKPKDELTAEEKKIEKAKRKAVELQNSQNELTALSNHCTVRLKVYYKNDWVWATVTLRKTDIAYLRKYWMHACASAPMFEKRFGKYSLRFAFDENIKLSDAPIDKQRVCAVDLGLNTDAVCSIMTADGTILAREFINFPSDKDHLYHVLNRIKKFQRLHGSREAHNFWPYAKRVNNELSKKIAAAIVEFAVLYSVDVIVFEHLDFKGKKASSKKQKIQMWRKNGIQEYAEHKAHRCGIRISRICAWGTSKLAYDGSGEVSRAQNNHALATFKSSKQYNADLNACYNIGARYFIREIIKPMSKKAWSQCKAKVPDIERRTQCTLHSLRQLHDFLSTSKETQPEAAA

SEQ ID NO: 16171 - protein, 460 aa, Escherichia sp.
VKRLQAFKFQLRPGGQQEREMRRFAGACRFVFNRALARQNENHEAGNKYIPYGKMASWLVEWKNATETQWLKDSPSQPLQQSLKDLERAYKNFFRKRAAFPRFKKRGQNDAFRYPQGVKLDQENSRIFLPKLGWMRYRNSRQVTGVVKNVTVSQSCGKWYISIQTESEVSTPVHPSASMIGLDAGVAKLATLSDGTVFGPVNSFQKNQKTLARLQRQLSRKVKFSNNWQKQKRKIQRLHSRIANIRRDYLHKVTTTVSKNHAMIVIEDLKVSNMSKSAAGTVSQPGRNVRAKSGLNRSILDQGWYEMRRQLAYKQLWRGGQVLAVPPAYTSQRCACCGHTAKENRLSQSKFRCQVCGYTANADVNGARNKYKQLWRGGQVLAVPPAYTSQRCACCGHTAKENRLSQSKFRCQVCGYTANADVNGARNILAAGHAVLACGEMVQSGRSLKQEPTEMIQATA

SEQ ID NO: 16172 - protein, 372 aa, unknown
  TnpB Polypeptide
MRVTENPDFFAGLPMQTAQAIVKQAVTDFNNWLKSLKAYAKHPEDFLGRPKMPHYKKDSLTTVTVTNQDAVLYPEESGVSLKLPLIKERILLSNISGRSTLKEIKIKPYYGRFLLCLTMEEPDITETLSMPHVCAIDFGTDNFAAIVCDDHSSAIYKGGAVLSNTQWFHKQRAKYISIITKGHSQMNATSARLKDLSFHHANFTKDQCHKISRNIIDFCLEHQAGTLILGVNPLWKQRTNMGTASNQKFVAMPISILRTMISYKALNAGIRIIEQEESYTSKADITMNDYLPTYGKDDNNATFSGARITRGLYRCADGTLLNADCNAAANIMRKAIPDIWKDTSDYTFLSSPKVYGFHELNPKSIPVKRIVA

SEQ ID NO: 16173 - protein, 202 aa, unknown
  TnpB Polypeptide
VELPTPPSTGAVVGIDLGIKDLAITSDGVKYDNLHSYQRNLKKLARLQRQLSRKSKGSRNREKARIAVARLHEHITNQRNDAIHKMTTQLVRSNDIICMENLSSKNMMRNHKLALHIADAAWGEIRRQLAYKADWYGKKLVIIDRFFPSSQTCGCCGYRNKEVKDLSIRFWTCPQCGTFHDRDINAAQNILAEGLKTMGLSA

SEQ ID NO: 16174 - protein, 452 aa, unknown
  TnpB Polypeptide
MSKTTYVTRTQTLLVVKQNNTLFKTIDDLSFKAKNIYNSALYLCRQSFFEYKQSIGYAALNSFHKSLYEADYKSLPTKTTQQIIQVVSKNMKAFINASKDFNKNPQKYKAKPKLPNYKNPSKGRFNLYFTNQQVKFKDGYIHFPSSTNIPPLKTHLNLSLPKDNDLYISDSVESPIRQVRIIPLLNSYRIELVYTKEIQLPEYTDSTEPHNIASIDLGINNFAAIVTYGPKPSRPLILNGKGLKSYNKNFNKKLAHLKSSSMLSNKKHTTKAIQMLISKRNRVYNDFYHKASRVIVKYLLDNKVSILVIGYNQGWKQNSSLSKNVNQTFIQIGFSIFIKMLTYKAKEQGIQVILQQEAYSSGTSFLDKEPVTKEFYNKTRRIKRGLFKHNNQTDFKYTYINADINSAFQILSKATNNKLTYDSKFITQQSITPRVINIDTFQRTKLNQKKAS

SEQ ID NO: 16175 - protein, 235 aa, unknown
  TnpB Polypeptide
MVGLDRGVAVSVATSDGELLHAPKQDSEQRCRMRRLQRRLARQTKGSNRSARTKLAIGRLKAKERDRRKDWVEKTSTHLVQAYDTVVLESLQVHRMTRSAKGTRERPGRNVRQKAGLNREILASGWGELARRVKEKGEASGVSVVEVSGAFTSQTCAVCWSVRQENRESQAVFHCRDCGHRANADGNAAVVIRERGIGMLAPAAGHAVAARGADRNAGATNRELTLAASAARPAG

SEQ ID NO: 16176 - protein, 414 aa, unknown
  TnpB Polypeptide
MKLIKRSQVSLNEATNFKIDKLKSFFEEYQRVVNVFIDLYWLKEKLPSKINSNHYKQIYSWLLGKAMKCAGNQAMKILKSAHTNNKKRIYSKYKKIYAKAKSKKKKYPIVNKTWSVWSKGKTFRPRINKPIFDGSTIELNSDLCHVQESKTSSSFDLWIRLGSIFGNRFSLILPSHKHRQYNKLCNSGYSLSKSLTLYFNKEQNRYYANLFFQKDIQDTPIAKFKTLGIDLGRNKLFSCSDGRFLGTEITSKIQNLLRKKKHSKNYNQALNSLKDYIDCEIKKLNLHEYKTVVMEDLINMNHKTRQERRMNKFQRAEQAHWNLRQVYRRIEDICEENRVHLIKISPAYTSQRCSSCGETHKDSRQGEVYECISCGYTCDADYNASKNILHFGSIEESTVPQEQRHTNLDLSKFL

SEQ ID NO: 16177 - protein, 418 aa, unknown
  TnpB Polypeptide
MKINRAYKVELNPNNKQRTLLEKSVGCARFAYNWGLNERIELYKSEKKTLTAIDQHKILCSKKKTDYHWMYDISKMAPQEALRDLDTAFKNFFRGLKQGKKVGFPKFKSKHKDKDSFRISFGFYITNSTINIPKVGYVKLKEKGYITTKDVKINSMTVSKEADRWYISVQVEQDIPEPVNQIESVLGVDVGIKTLATCSNCQIFENPKYLKKSKKKLAHAQKDLARKKFDKETKRSSNNRLKSKLKVQKIYKRISSQRKDTLHKMTSILAKTKPRYIVLEDLNVSGMMKNHKLAGAIGDASFNEIKRQLTYKTSWYGGSIIKVDRFFPSSKTCSVCGCLKEDLTLEDRIYICDCGNVIDRDLNASINLEKYVLIKLKNTDSSSGIKACGESIRLQDACIGQEAVSMKQEENMSLAKIL

SEQ ID NO: 16178 - protein, 434 aa, unknown
  TnpB Polypeptide
MTDDQRLAKNQRIKDTMNATRKRRSGMDCKVYSVKVSRSRLNDTQKESLTRLFLEAKWVRNALIGSGDFTRESLKKFRDEVPVHTPDGVVFRPVTVLGGQIAQSVLSELKSNLKQLSSLKKSGRKVGKLKFCTEVTSIDFVQYGNSWKLDVDNSTIKLANIPGWLKVHGLKQIPEGAECANAKLVKRPSGYYIHITTYIPKKKNHVQPGTTIGIDMGVKTGITLSDGSKINTAFEESERLRRLRRKLSRQKKGSNKYQKTWNVINQELEKLSHKRDDAANKLVHEIAKNEAIYFQDENISGWKNKKSKARGSKKIHHGILGRVKSRLKNLDNAVCLDRYLPTTQLCVCGKKNPHGLDKRIYSCPSCGYTEDRDVHAALNMIRIGRFLDDNNSTDLGQIRTPVEFPVRPATMLSCNMEAGTETVKREAAMSSASP

SEQ ID NO: 16179 - protein, 371 aa, unknown
  TnpB Polypeptide
MILSKKIRIIPTKEQEQQLWKSAGTARFMYNWTLAKQEENHKNGGKFISDNDLRKEVTKMKQTEEFKWINEVSNNIAKQAVKDGCNAYIRFFKGESERPKFKSKKRSKPSFYNDNIKLKVKPKKVLIEKVGWVKTKEKIPMDVRYTNPRVSYDGKYWYISVGIEKENPKVELTEESIGIDVGIKNLAKCSNGMTFENINKTKLVKKLEKKLRRLQRKLSKKYELNKEGRKFVKTSNIEKLEKQIRLLYRKLSNIRNNHIHQATTKIVKTKPSKVVMETLNIKGMMKNKHLSKAIQKQGLYKFKRQLKYKCELYGIEFIEADKWYPSSKMCSECGHIKDKLSLSERTYICEECGAVTDRDFNASVNLSRYSA

SEQ ID NO: 16180 - protein, 366 aa, unknown
  TnpB Polypeptide
MKELKMNYRTYKYKLKPNYHQSIEIDKNIENCSFLRKQLLSDIKEGVRLPYLETDKLKYYLDKYEQINRCDKNALLNEIFTVRDQENGRKIKLTKNSYTFSNLDVYRSKYPLKNDRVYLHSVGWVKKSKNRPIDESTKIRSFIVMKRKEEYYLFVNVTRVSQDFRELDINNLIAFDYSSTHFMIDNTGKQYDIPRFQRDHIKEISAKQKQLSNCVKGSNRYIAIQKQISSKYEKIRNTRKDYLHKLSTQIANKYDYVIVETLDIVEMSRSLNLAKATLDNCYAQFVEFLNYKLAEKNKKLIKISRWYPSTKTCHVCGYTNKNLKLSERSWICPKCKTLLDRDTNAAINIKNEGIRLIKAAGHSAAH

SEQ ID NO: 16181 - protein, 364 aa, unknown
  TnpB Polypeptide
MSLITYKYRIKESVSGKHLLQMASAVNYVWNYCQEVSLLALRRDKTYLSAYDLHTLTAGTSKDLRLSSSTIQQVCTEYVTRKRQCKKIKLKWRSHKRSLGWIPFKSANVQLDNDTVIYYGHRLRLWLSRPVEGVIKTGSFTQDARGRWYVNFQCEVADAEEPIGHLDLGIDLGLKHHITCSDGVQYSRENLTKKHEDALAMAQRAHKKKRVKAIQAKIANTRSDWTHKATTDIARRAKLIVVGDVASAKLTKTAFAKSTYDAAWHNIRHQLNYKAIRLAGVCVSGSEMFSSVTCSDCGARSGPSGLRALRVREWVCSSCGVAHERDVNAARNILALRTGRGTPTRESPGFSRGEDVKTLDSMCH

SEQ ID NO: 16182 - protein, 413 aa, unknown
  TnpB Polypeptide
MTLVEKHDLRKGSAEYKELDKLCFLSKNLYNAGLYTVRQHFFATKKFLSYNQLTSQFTETNQSDFRALPAKVAQHTLKLINQNFKAFFALLQLKAAGKYQAKIKIPQYLEKQTGRQVLHYTSQAVSTKAKHGYIKLSQTNIFIKSKVEKIQFVRVVPKKGKITIEVGYKKELPEAKNLLQPRKFSAVDIGIDNLAAVTFSDSNSFIVNGRPLKSINQHFNKINAKLKSRQRKINGEDFSRTNKMLTLSRKRDNKISDYLHKASRYLVNQLVSRQITDLIIGHNKKWKQGTNLGRKTNQNFVSIPFNRFIDMLTYKCASEGISVHIIDESYTSKASFFDRDFIPDYKPADLVKYKFSGRRKCRGLYKSKNFTFNADVNGSLNIMRKFFQYHTEITEPTYFEQILKCSPKVYTIG

SEQ ID NO: 16183 - protein, 487 aa, unknown
  TnpB Polypeptide
MPESVATLRNQTSIDKLLDSLNSTHQQRLWQKLGEVSTSRGRNLLPYWNASVKEISSTLSLPTRTDSPGLALTSYTGTVNKTGANSWFSMKQSSAQSERWLKISLPSSTALVVGSTDSESIRLRSKKIRVYPEKALDLLWKKWSAATRYCYNQAIAQQRVATKRLSKLSLRNLVMNLELPQWVKDTPCHIRQNAIFDAHLAYTASRDAKFRSIRNPTQTIKFNGSNFSKGTWYSRLTKGLTWLASEPTPVSSEYGTQLVKQKDRWYAIFPEIANSITTYGSGSIIALDPGVRTFLTGFDGHRFTQFGGGDFSKIARLCRCLDKLQSRIAKAKCKLKRRLRMASFRLRQKIRNLVDELHKQVACYLTHNYKVILLPTFETSNMVAKVKRRIGSKTARAMLTWAHYRFKQTLKHQAELRSCEVVEVSEAYTSKTCTKCGQVHTKLGSSKIFRCSNCGHCIDRDFNGALGIMLRALRDISTTLSSAIIDP

SEQ ID NO: 16184 - protein, 385 aa, Bacillus sp.
MRRAYLIEMKPTNEQIVKINQTIGVCRYVYNLYIFKNKEVYESKGQFLSGYDFSKWLNNVYTEECDQWIKEVSSKAVKQAIMNGDKAFKRFFKGLSGFPSYKKKKKQDVKCYFPKNNKTDWIVERHRVKVPTIGWMRLKEYGYIPKNAIVKSGTIGKRAGRYFVSVLCELAETETKPTLKQTGVGIDLGVKDFAIRSDGIVHENINKTIKVKKVEKRLKREQRSLSRKFENIKKRGEQSATQKRANIDKNILRVQKLHARLVNIRLTYVKSIVNDVVKTKPTFITVEDLNVKGMMKNKHLSKTIAAQCFYTFKTWLLFKCEEYGIELRQVGRFYPSSKLCSCCGQKRADLKLSDRVYRCGCGHVMDRDLNAAINLLQAKEYTILT

SEQ ID NO: 16185 - protein, 413 aa, Saccharopolyspora sp.
MCRVSSAGCAPPVRCGSRWRLPGAPRRSGAPGSLAAVGRQRRCRCSSVRLPVMSMVLQAYRFALDPSPGQEAGLRSHCGAQRFAFNWGLGRVKASLDQRRAEASYGLDADGLTPLVSWSAYGLRKGWNQAKDAVAPWWQENSKEAYSSGLANLATALRNWDDSKKGTRRGRKLGFPRFKGKRAGLSCRFTTGSFGLVDGDRRHVKLPRIGVVRTHESTRKLARHVERGRARIRSATVSYRAGRWFVSFSVEIIRDDPASARLDVTVGVDLGVKFLAVLSTGEVIANPKHLEVALRELRRLQRQASRRTGPDRRSGQKPSNRWRKTQARIEKLHAQVANARRDGLHKLTTWLVRTFGAIVLEDLNVAGMVKNRRRARTARAAGIATGRPAPKYAGQRRHRKVPTHDTFYTFRER

SEQ ID NO: 16186 - protein, 378 aa, unknown
  TnpB Polypeptide
MQITYKFRLYPTEDQEKRLLKTLEICKQTYNYFLSKIRESNKVPSRLELQSELPKLKKEKPKLNKVYSKVLQMVLYQLYSNLKALAKLKKKGKKVGKLRYKGKWFKTFVYNQSGFKIIRTGKKLDRLYLSKIGDIPIRIHREIEGKIKQVIIKRYKSGKWFALVCVEKEKEQKSKTGKAIGIDVGVRFFLTDSEGKQIENPKFYEKTLKRIRIEQRRLSKKKKGSRNRRKQKKKLAKKYEKLVNQRDDFLHKLSRFYVNNYDTIYVEALNIRNMVKNHNLAQKILDASWGKFLRYLTYKAENAGKQVVKVNPKGTSKGLSYKNPLRDYISACRILMRGWDSPDSLLERRPLLRTVSYKEVVSGQVFSMNQEAPCVSEG

SEQ ID NO: 16187 - protein, 400 aa, Streptomyces sp.
MIRAYRFLLRPTVRQAQALSDMLRDHRSLYNGALQERRDAHRHTARARPGYGGQCAQLEEIRAFDPQRQGRWSLSSQQATLRRLDKAMRAFFRRLSLGDTPGWPRFRGAGRFDTVDFPRDGDGCRWDSTPHDPVTRLHLQGVGHVRVHQHRPVPGRVRTVSVKREGRKWFVVLTAERERPEPLPKTGSTVGIGPGGADFLADSSGGLVPAPRHGRRAAAKLQAARQALSRFPRRRAKDRTAGHRRAAEEVARLHGKLRRQQLDHAHKTALHLVRTHDVIAYEDPRTRDTRKPPAPRPGPDAPGAHPPAGAGPDRPTTDAGWGVFLRILHAKAESAGREVITVDPRDTSRTCPRCGHLAKENRPAPEKFCCAACGHTARTETAAAVNVLRAGLVRCYAGTA

SEQ ID NO: 16188 - protein, 372 aa, unknown
  TnpB Polypeptide
MSKPLTRTICIKLDVDGHEATLAATQRAFNAAATWIARVCWDEGITNTNTAHHRAYGETRLAYGLGAQLAVCARAKAVEAIKGVQAKRRETCPHFGPRGSVRYDARTYRLMSLDRVSLNTLEGRVVCRLLLGTRQHEMLVEPAWEVGGADLVWRAGIYYLHVTQSREAPSEQVPDGGTLGVDLGIVNLATDSEGEHFTGTIVHLVRSRYHLRRQRLQKADTKNAKRRLRQLRHREARFQKDINHCISKALVHKAAVSRKAIALEDLSGIRERTTVRREHRYARHSWAFFQLRQYLTYKAAWAGVPVYLVDPRNTSRTCSACGHCEKANRKSQAEFLCQRCGFATNADENAALNISRIQRAAVNRPMAATFAS

SEQ ID NO: 16189 - protein, 395 aa, Leptolyngbya sp.
MAQVTTTLKLKFLALNNVKASMFADTVAASTELANSLLKVPFSERKKLTTAMVVTSLKSALSNQVIRILKGKAGKRAKSFKVFWPEVNKQNWNVCKVGETYSLSFPTIQGVKRVPIAVHPHFEQQLDEIISGDLEKGTLKLMCLRGTWYAMLSVTRDVPDVESTQRIGVDRGQNNLAVAATVEGRCLFFSGKAVMHRRRQFQQLRKELQAAGKYRAVKKLERRESRWMREVNHTISRRIVRFAGSADADVYLEDLSGIRQTTRQRKKNRSDAATSRHTWAYYDLETKLSYKMALEGRQTHKRRAAYTSKSDHRTGRLDGKRNRHKFTGADGYQVNADLNAAINIAQWDGFSCALVLEEAVPVMGTVVPADGVLGAPLNSMNLTKVEQLSLFPLSA

SEQ ID NO: 16190 - protein, 413 aa, unknown
  TnpB Polypeptide
VSLPDVSQTTKYAVTVQLRYNYRLYPTLGQRLALARAFGCARVVFNDGLAARQAAHQAGLPYPSDQELSARLTAAKATPERTWLREVSAVVLQQALADLNAAYRNFFASRTGQRKGPKVGPPRFRSRKDTRQAIRFTANARFKVLPNGKLRLPKIGDVPVRWSRPLPCEPSSVTVIRDSAGRYFASFVVQADPGTLPEAEPVIGIDLGLQYFAVLSDGRKIASPRFLRRAEKKLTRAQRSLSRKQKGSRNRDKTRVTVARAHARVADARRDFHHQLSTALIRENQAVAVEDLCVAGLARTRLAKSVHDAGWSAFVATLEYKARLYGREFRRIGRFEPTTRTCSACGVKDGPKPLHVRQWTCGACGTTHDRDINAAKNIAALGRREALNARGGQVRPAATLAPASEAGSLRGAA

SEQ ID NO: 16191 - protein, 419 aa, unknown
  TnpB Polypeptide
MAKLKYLPRLLMVVVCVLRTFRYRLYPTEEQETVMGGQLRALCDLYNLLRNEKMEKHSSLNNLRKLALKHRNNTHSQAAQNVANRVNSAFKNYFEGRTRFPKPKKEERYRSMTYPQLGFRLEGKIVKRGKRTELVGKLYISKVGLVRIFMHRPLEGKVKTLTVKREADGWYACFSCEADEPPKKPLWQIPIERVAGGDLGLEKFLTLADGSSVDAPQFLRRMENKIKRLQKAFSKAKKGSRNRKRLGVRLARLHLHVARQRSNEQNQVIALLYANADVLGLERLKVENMLRNHRLAKSIMDAAWSQFIRKAEFKSRVLGKYFIPVDPWGTSQFCWRCLSWVPKQLGDRTHVCPVCGEVLPRDQNSAKIVETLVLLWMSYAHGRWVNTPVEQKPLPSLRGQAFVVKREAPAFRLGRTSLK

SEQ ID NO: 16192 - protein, 544 aa, Streptomyces sp.
VGGVRELAASFVVPGPAGVAVRDRLRVTDKDAAVLREVGAFLGSLAAGDLADRCRQGLEHDAAAWAVRKRELTGRSSSRWAGSVTKATHDQWALARRAQAAHIAWLRRQIAQIGARLDRPLGAKADKHEGLPKGYASRREWHAKSRRLQTLKDRLAAVEADWNTGRVHVVRGGRRLANTRHHLAQAGLDEKAWRSRWEAARMFLAADGESGKRFGNETIRITDTGQISIKLPAALAHLANAPHGRYELHARVAFKHRGQEWLDRITADRAVAYRVHHDVLRGRWYVTASWQRAAVPVLPLQTALARGTVGVDMNDDHLAVWRLDQHGNPVGEPQRFFYDLSGSAAHRDAQIRHALTRLLHYARRCGVAAIAIEDLDFADSKTREKHGRKKRFRRLISRFPTARLTARLVSMAAEQDVAIVAVDPAYTSRWGAQHWQKPLATGRRETTRHDAASIAIGRRALGYPIRRRTAPPPPHQSDAVGHRTVQAGSENRRREGTRPHLPGPRTRCASPAVERKRTTSLPNTVRGSATEQQSRQQDSPPLSV

SEQ ID NO: 16193 - protein, 396 aa, Microcoleus sp.
LIYSYDGYVIIGITGEKKMLTLEFKIYAKPNQFQAIDEAIRICQFIRNKSIRLWMDGGAKSWFDLSKYCAIWAKEFDFANKLGAMARQASAERAWASISRFHENVKKGIKGKKVGFPQFQKDCRSVEYKTNSWKLSADRKSITFTDKCGIGRLKLKGTRDLNFYQPEQIKRVRLVKRADGYYTQFCIQVDRIELAPSTGKTIGLDVGLKEFYTDSNGEMIPNPRFLRQGEVQLKRAQRLVSRKTKGSSNRRKARVILGKRHLKISRQRKDHAIKLARCVITSNDVVVYEDLRVSNLVKNHCLANSISDASWYQFRMFLEYFGKVFGRITIAVNPACTSQECSKCGEIVKKSLSTRTHICKCGCEIDRDHNAAINILNRGIGTTGHVGTSILEIVNA

SEQ ID NO: 16194 - protein, 401 aa, Methanotorris sp.
MSNEYLETVKLTARFKIKEIPNELTNIFPTYKTIVNNLLNYAFKNNITSFKRLKSEKYKDLRGKYKKLPSHYLYTACQMATSIFKSWRKRHRKGKASKKPDFKGSVIMLDDHLFKLDLDKGLARISTPYGRVEVELYSSDYHKKFKDWKVGQAWIVRKKNDYYLNVVFSKNILIKEGENVVGVDLNENNVTIATDENIIQIITNERTIRTSYYVKRRKIQEKIRLGDKKKELLEKYGERERNKIVDIYHKVANKIIEIAKKVGGVIALENLKEIREKVNYFKKLNGRLHRWSFRKLQEFIKYKAKLNGVRVVFVNPHYTSSRCPICGGRMSPNGHRVLKCECCGCIADRDVVGSLNIMIRGFKAIKPKDVGSSVPPESYPMKLGGWKVIRYACFNCFKISG

SEQ ID NO: 16195 - protein, 485 aa, unknown
  TnpB Polypeptide
LARAAPSRGGGLSGRGRRRALRSDGTFRRRKIRGAIAPLNSYRRTCEPTQSEYRDYLERPAGGGTHARVADSRRECRHRTRGRRSLCNPRQAAGLMRFDTKLMLLAHKVQLYPTAAQAEYLRRCMGARRFAYNALLAHFRQPGIKWSKRAAYNYFIAHVRQPWMAELTSRAPRNAIDDLHNAFHHFFRRCKAGEKPGFPRFHKKGVHDSFAIREKPKFDVCGRRLRIEKAPGRIKMQQALRWSGELCAVTVSARAGKFFAAILVDTQDYDRRGGDGTVGIDLGIKALATLSTGDVIPANQKLKANLRRLCRRSRNLSRKQRGSNRRARTKLALAKLHRRIADQRTAMLHEVSNLLTRRFDTIVIEDLAVKNMVKNHSLACAIMDAGFGCLRRMIEYKAAFRGGTVIVAPRFYPSSKTCSACGVIKETLTLVERIFRCDDCGHECDRDLNAALNLLRLDTLRPDVKRTQEPRQPIGLAPTAAALMA

SEQ ID NO: 16196 - protein, 344 aa, unknown
  TnpB Polypeptide
MHQFNAAANYVASVAFAEKTANKFELQKGVYGELRTTYKLAAQLAIRAISKASEAYKREKSMKPTFKPEGAIVYDERVMSFKGLMTVSLLTIHGRVLVSFQVGDYQQARMESIKGQADLIYRNGTFYLAVTRDVPEPMPDTPDGTLGVDLGIINLATDSEGEIFSGQGVENNRKRHHALRQRLQKRGTKSAKRHLKKLSGREARFKKNTNHVISKRIVQKAKANGQAIAIEELRHIRKRTDSTVRRSQRSRHSSWSFGQLRFFLSYKAALAGVPLHTVDPRKTSKTCSVCKHCAKENRKSQASFCCVQCGHTDNADRNAAINISRAPVNVPLVAGRAQLQAPAF

SEQ ID NO: 16197 - protein, 504 aa, unknown
  TnpB Polypeptide
VQVRWNYKLKPNIEQLALMAEWLVTLRKHRNYCLRERENGWSNNNRASDQPVNYVYGSYCDIDTRTEWGSCSPLTCPVVKHGVTSAELTKLSKGVLKWGSASDIQMKRTTQLRHENVYYSRIDSDVLQRNIAHLDTAFQGFWQDGRGFPKYARFATFKSFEYKPKRCKFEVDRAQGKKHRYSRVYLPLIGWMSYNESRPIPENAETRTVTITRKSDGWYISVLLNLPELLPEETPLSRVSSIVGIDVGINQLVAVSDGSFIENPKIGTNKRFRRRLKIRQRRLNRKHKGSKNRAKAGIAVAKLHRSVTDKRDAHQWKTAKIVVDTAEAIAHENLNILGMKKRCKPQRVNGRFMPNGQSAKRGLNRSISDAAWGGLFQKIAWLALKIGKPVVKYNPKNTSRECSKCEHISPDNRDGEKFICSNCGHIDHADTQAARTGLKRVGLKFVSIRRKNLPTDCGEVMPVRDGAASHGKRQQARNPKSKAKPEAGIIEQLSIFDLIALETG

SEQ ID NO: 16198 - protein, 431 aa, unknown
  TnpB Polypeptide
MEVRRTVPVKLDVPDKRRDDLHETVDQFLHCANRASDFAWHSTDRDECITSKAKAERALYDSLRDETDLTANLVQKGVRRAVEAIKSGVDRWAKRKRTSQPFFDAPSVVYDKRSATFHRDHASLSTVNGRVECEYVLPSNSERETPHAKYLSDEDFEFRTSTLQYRERTDEFYLHVGLRRYDGDDWVSETTENGTVLGVDLNVDGYLAVTSTGLFGESADYINHRRRQFEQVRGDLQRTGTESAHDTFHRLGSREWRWVEDLLHRESKALVAEAVEHGCSTIAFEDLTDIRDRMANAKKFHAWTFRRLFEYVEYKAEERGLSVVQVNPAYTSQRCSRCGTTLSENRDGDSFSCRKCGYELHADYNAAKNIAHRHVNVHPGPKSRDGRATRQLALKSGTLSANASFEPAEPASDGTTAEAGVHRQAHESTRG

SEQ ID NO: 16199 - protein, 382 aa, unknown
  TnpB Polypeptide
MAGDMMLSYKFRLYPTRLQQSRLTEMLGGFCALYNAALQQRTEAYRRQGKTLRYTDQAAELKAVRAADERLAGFSFTAEQQVLRRLDKAFGAFFRRLKKGGKAGFPRFQSASRWDSAEMRIGVGLTLRKSKRLGVVGVPGEIKAKWHRPLPADAKLGAAVLSRSLGRWFVCFQIEVPDAEPRQDFAPVGIDVGLSALVALSTGETIATPQLTKDAAVALRRRQRKLARAKRGSRGRKIARRSVARFQAKIAAKRRDGLHKLSCGLTRRFSHLAMEDLNVKGMARGMLAKAVHNAAWATLAGMVSYKAARAGGIAVLVDPRGTSQTCPECGAVATKTLAIRTHRCNCGCVLDRDVAAAREILRRAGFQGPGTGLVAPSQRVAA

SEQ ID NO: 16200 - protein, 524 aa, Nonomuraea sp.
VVCALVDGMTKRWRGLRLGAAPAPRCLLHPAIVTMRVQSLTQCTVMLVESFAHTLEYGGRGIVVRVVQAYRFALDPTARQGAVLASHCGAVRVAFNWGLAQVRANLAQREAERSYGIPEDRLTPALSWSMYSLRKRWNQVKDEVAPWWAGNSKEAYACGLTRLADALSNWRDSNSGKRKGPKMGFPRFKTKRRAARSVHFTTGTIRLDGHTHVILPMLGRIKTHEPITKLAGLLTEGGARIASATVRWQEGRWHVSFTVHTERPPAAPTRPDAVLGVDLGIKTLAVFSDGRPPVPNPRHLNNAMRKLRRLSRAVSRKHGPDRRTGQRPSQRWQRANAARNRAEHRVAALRRDGIHKLTTSLARTYGTIVVEDLHVAGMIRNRRLARAVSDAGFGEIRRQLAYKTAWHGGRLLVASRWFPSSNTCSSCGAVKAKLPLRVRTYVCEGCGLSMDRDENAALNLASLVERTVAGSGPETRNGRGADRKTPPGGAGGRETSTPHRAPTVRIRRGPSPTPGESLRILETQ

SEQ ID NO: 16201 - protein, 185 aa, Photorhabdus sp.
FKRKQGKQSSYHCVGVKVLEGAVKIPKLSPIEARIHRKIEGKVKSITLSRTATGKYFAAILCDDGKEALEKPGVITRVTRAIGDAGWHGFIKKLEYKAAAAGVHLVKLDQWFASSKTCHCCGHKMPEMPLNKRIWPCPCCRVEHDRDINAALNIQRKGITELQAAGLVVSAHGGQRKSVIKTVAA

SEQ ID NO: 16202 - protein, 413 aa, unknown
  TnpB Polypeptide
METQLTKQGYTFELDPNRAQRVQLAKSVGASRYVYNWGLAESQAAYELTGKRPRLGELRAWLVKLKKGDCPWLYEVSAHIGQQALVDLDRAFDRFFKGLKGDGPKTGFPRFKRKGERDSARFYEVTLEERHLRLPNVGRVRLKESCRERGFEGRVLSATARRRADRWFVSLCVEQERELPERKPVRRHADVVGVDLGLKTTAVVHDGETTRVIEPQRALRKNLKRLRQLNRRLSRRQKGSRNREKAKRELASLHYRISCQRQDHLHQLSSSLARTKSVIVVEDLHVRGMVKNRHLALSISDAGMGELRRQLSYKSEWYGSTLIVADRFYPSSKTCSGCGCVKESLSLSERVYCCDVCGLSLDRDENAAVNLRRLGLAQLPVDRREVTPAERKALAPALVAGTKPASSNQEAST

SEQ ID NO: 16203 - protein, 383 aa, Kribbella sp.
LLEQCRQARYVYNLALEQWSMWTRDKGPTPGYVEQAKQLTEARAAFGWLRAGSQTVQQQALRDFDQAVRNFYAGSHRRPTWRKAGLHEGFRIVGSQASRIVKLNCKWAAVNVPKVGWVRFRLSRPAPDAKSYRITRDRADRWHIAFAAIPPPIPAPGTGEVVGVDRGVTVSAALSTGELLTCPGLSDREQARLKQLQRRLSRCRRGSNRSQRAKVAIAKLQARAGDRRKDWVEKISTDLARQFDVIRVEDLRIAPMTRRPKPKPDPERPGRYLPNRARAKAGLNRGILANGWGLLVQRLERKAAGRVEKVNPAYTSLTCSVCGHCAPENRESQAVFRCAACGHQANADVNAAVNIAAGRAVSARRETPPRVSPKREPQLATSA

SEQ ID NO: 16204 - protein, 467 aa, Lamprocystis sp.
MKVTRTLQANVPGALGPICQAIGYLRADIWRRYGALGTVGKSASDIRKAISARDIYAGLGVDGTIRNETTKDVVNDILTYKAAAKLKVRQAIAAKTADPAERARLYTLLKADRWMDEPFLHRQMRKHFRHGVSHTANQFIVRSDKQASAVIDGQLVITIRVAPKYGDHIRLVTTSNGKNVDLTGSNLRVCVKDGFTEIHYAVDKEAGRPHGVQALGIDKGYTEAFTDSDGAAHGQAFGDVLTAYSDTGAKTGQLRNQLHALEKKHRKRGNQAKADRILTNNLGRKKLEARRVRTKQRLRTIAYQSAHSIVDKAALVVSEDLTSPIAQKQQWKRYNRRMSSWAKGVLAEALDSVCEQRDAEHVLVNGSYTSQMDSTTGLLEGTRRGDKFYRVTGDVLQADHNAALNVLARLADPEIKRYMPHRDVRRVLLSRSPAQLSVKGLELQAAMPINQVRINPNFIPEQLCSEF

SEQ ID NO: 16205 - protein, 428 aa, unknown
  TnpB Polypeptide
VPLETVKLTAGFKLKGSIPESLFSMYGEVLNQLLDFACAKGITSFKRLKAEKYHEMRTKYPSLPSHYIYTACQMACSIYKSFRKLKKRGLAREERPFFKKHVIMLDDHLFSLNLERWEASIATEHGRIRVKLLHGTYHEKFKDMKAGEAWIVRKNNEFYLNVCFSKAVELMEQNNRAIAVDINENNVAFGSTEGIVNFKTEERAIRTAYFLKRRRIQLKLGSRGENLMKKYKERERRRIEDIYHKLAGKIVEKARKEDATTIVLERLKNIRRRIRYSKAVNGRLHRWSFRRLQRIIEYKAKLAGLNVVYVDARGTSTLCPICREKLSPNGHRFMRCPKCGLEEDRDVIAVRNLLLKLRDVGASSVHPEGPIREGMKVNARPERQYPKVPRKTTSPLSHGSKPTIILSSVLFPDPFSPVIPTISPLLTF

SEQ ID NO: 16206 - protein, 438 aa, Okeania sp.
LKARYKYRIYPNQIQITKLNQLFGCCRYVWNQSLAHCNQLYASGEKKPSYINLTKQFITQAKRELLWLKEVASTPLQQSLKDLDQAYKNFFNRCTGKRKGIKVKPPKFKKCKSKQTARFVGANYKVGQDKIYLPKVGKIKIVWSRKLPKEPTSLTIIRDSANRYFASFVVETNSESLPKTDNSIGIDLGISTFATLSNEEKILAPKPLKNNLKKLGKFQRKFAKTQPGSKRRERRRLKIAKLHAKVKDIRTDFLHKLSTDLIRKYDVIVLEDLNTSGMVKNRKLAKAISDLGWRQFRTLTEAKCEKYGREFRVIDRWEPTSQKCSCCGFKGGKKELNVREWTCLNCGAKHDRDINAAINILNTSVETVVETAPQPKTKVEETVELENPIQLSLFDIVAGGHSETLNKTRIQRKSTRKKVVDGNESSTRPEFFQPSLFE

SEQ ID NO: 16207 - protein, 393 aa, Exiguobacterium sp.
VNGVSTHKGYRFRIYPTKEQEVLIIKTLGCARFVFNHFLAKSDETYQASGTGLTYGACSEVLPSMKEELTWLKEVDSTALQWSLKHLADGYDRLFTKQNGHPRFKSKRNPVQSYTTNIQGKSQNPEVSIIGDRLKLPKLKWMRFANSRKVEGRILSATIRRNATGKYFVSLKTEQDIEPLPQTGSSVGVDVGLKHFAILSDGTVYKNDRYFRTLEEKLAREQRKLSRRRLIALNKNVKLSEAKNYQKQKRKVARIHEKIANKRNDLLHKVSTEIVKNHDVIGIETLQVKDMQQNRQLSKAISDVGWSEFHRMLEYKADWYGKTVVKVGKTFASSQLCSGCGHQHKDVKHLALRKWTCPNCGVHHDRDVNAGLNLKREAERILASSTVGTTGLA

SEQ ID NO: 16208 - protein, 345 aa, unknown
  TnpB Polypeptide
LAIKTIKIRIKDSTSKKDLKKMSCAINFVWNYCNETSFKAVRYNREWLSSGDLQDLTQGSSRELGLNSASIQMVCREYVQKRIQFKKRKLRFRGKKSLGWVPFRKDSIKFKNGSVVFNKRTYQVFQPERLPEGKFCSGEFCEDSRGNWYICIPVEVDVEKTKSKGEVGIDLGLKDVATLSDGTKVANNKYFRMMENKLAKAQRRKDKKKARKIHAKIRNRRLDTLHKASTNIIKKNELIVVGKFGAKNLVKTKMAKSINEAGTIMFKTMLKYKASVHQCRYVEVSENFSTQICSSCGVNPASSPKGVKDLGVREWVCSDCGAVHDRDVNAAMNILRFGRESLGLK

SEQ ID NO: 16209 - protein, 386 aa, Clostridia sp.
MIRLLRAFKTEIKPTQEQALKIRQTIGICRFIYNFYLTENQKAYAHNQPFITANKFSLWLNNDFLPNNPTYNWIKDVSSKAVKESMRHGETAFKKFFKHQTGYPKLRKKNKDTRTKAYFPRNNKTDWTCERHRIKIPTLGWMRLKEKGYIPTSMEIRSGTISMRSNKYFVSVLIDVPGPEKYDLNPDGIGIDLGIKNFITCSNGMVFKNINYSRKVRKLEKQLRRAQHKLSRQYKNLKKGKATYRNIDKQKRRIRKLYYRLDCMRKDFLNKCVNMLVKTKPAFIAMEDLNVRGMLKNKHLSHAISQLNFTAFRTKLIDVCSKHGIPVKLINRWYPSSKTCHNCGYVKHDLRLSDRTYKCPVCGSVMDRDFQASLNIRDCQDFKYAC

SEQ ID NO: 16210 - protein, 395 aa, Streptomyces sp.
VIVMQLRYAFRLYPDVAQRTALARAFGCARVVFNDAVRAREDARKAQRPFPKIGELSTRLITEAKRTKERCWLGEVSAVVLQQALRDAEAAYRNFFDSLKGTRKGPRLGAPRFKSRKDTRQSVRFTANARWNITTGGRLNLPKIGAVKVKWSRTLPARPSSVTVVKDSAGRYFASFVIDTDPATDAARMPDTDQAIGIDLGLTSFAVLSDGTKIDSPRFLRRAEKKLKKAQRELSRKQKGSRNREKARLKVARAHAKVADARREFLHQVSTKLIRENQAIGVEDLAVRGLARTRLAKSVHDAGWAQFVNMLAYKAARYGRTLVRIGRFEPTSQTCSTCGVKDGPKPLNVREWTCTACGTLHDRDHNAALNIKTAAGLAASACGAPVRPGVIPARR

SEQ ID NO: 16211 - protein, 420 aa, Streptomyces sp.
  misc_feature (420)..(420): Xaa can be any naturally occurring amino acid
LWDSVGGRDTRARRQVARSWQVGPFSARFRNFALREHVYDEIKQRWGLGAQAAQHVIKKTCDAYATLNGNLKAGNLGKPGSRRYRRATEKPIVFRAQSAQPYDDRMLSWQTARRTVSIWTLSGRMKNVAFTAAPEQLARLALYRRGESDLLYRDGMWFLNATCEVPEAGPNTDLVDFLGIDLGIVNIATTSDGEIMAGRALNRGRLRERTLRTKLQRKNTPSSKRRLKKRRRKESRRAKDINHKIAKHVVAEAGGTSHALEAVGEHRPRNRPGRPDGHPRTGTASQAWGYLPRPLGSGGGPPTPAGPFISWGSSSHTRPAGQGCRWCTSIRRTPPAPAPSAATSTGRTGSRRPGPRAGPADSLITRTGTAPATSALARKSCGAAGRSQSPQTHRRNRTWDRTQAQHHTQWRPLCKPGALX

SEQ ID NO: 16212 - protein, 296 aa, unknown
  TnpB Polypeptide
MRVRPARESRRNTHGEYLLNEDYSFATSTVHYDSEADEFYLNAVMERELDVDSSEKAEDSSVLGVDCNVDDHIAVTSTGRFIGNADSLNHQRREFEKRRASLQQTGTRNAHLTFQRIGDRFGRWSEDYLHQCSRAIVEVARRHECTHIAFEDLERIRERISDGKKFQQWAFNSLRTMVEYKAEECGIVVDTVKPQYTSQQCSKCGCTLEENRDDQQFECLDCGYTTNADYNAAKNVARKLALKLQRGQKSPAGGAFCQYALKSGVMTVNATEVASDTPVSAERESTDKPTPLGVGS

SEQ ID NO: 16213 - protein, 406 aa, unknown
  TnpB Polypeptide
VTISISSDGPPQNSGTSVATTHKNSGTKRARFPMTGNSKPNSKVTNAIRTYVLNPVSAFSKNSLKRLTAGSASVGTAMTVPDRPATAKTETPIHVRPCRSKRLASSTTHSSTAFASRKVATAKNTARTSSRASTETRPDVDLTEWDIQQVRAIYKRDEWRLQFVRRTTIGPEPPGEEVAGVDLGICNFAAVSFGGESVLYPGGALKEDEYYFAKKKAKCDDSSSREATRLNRTRTGRRTHFLHALSKSIVEERVERGVGMLVVGDLGGIREDDENDEPRNWGDHGNLDLHGWAFDRFTTLLDYKPEAEGIDVELVSERDTSKSCSACGHTDDNQRVERGLYVCDKCDTVANADVNGAENIRQKVLSSLATDGGDRDNGRLAQPAVQLFGRSEGVFAPREQVVNREP

SEQ ID NO: 16214 - protein, 417 aa, unknown
  TnpB Polypeptide
MKRVERHRLKPSSPFYAMLREFCHRSKNLYNHGNYLIRQTFIEDGKWLRYGEVDRLLKADKDYPDYREMPTAQSAQQTLRILDKNWTSFFAAIKDWKAHPEKYRGRPKLPKYKPKDGYFPLVLTNQNCKLKDGVIRFPRAFQGFTVKAIFASQPDAVFKQARIIPHGGEIDLELVYELPKVEEKDDNGKYAAIDIGVDNLAALAWSTGERFVLLKGTPLKSVNQYYNKQMAKRRSICELMNGRHSSKRIAWLTAKRNRKVEDYLHKASRKVIDLCAEQDVSVLVVGKNKGWKQEAKLGRRVNQSFVQLPFARFIQMLQYKAEAIGMKVVLTEESYTSGTSFLDGEAPTKDHYDKSRRIHRGLFQANDGRKINADVNGAYQIMRKVFPNVNADGIEGVALRPVVVALSMSARRSFGCA

SEQ ID NO: 16215 - protein, 242 aa, Fischerella sp.
IHIQLKDEVPDPQPTRKVIGIDFGRRDIAATSNGDSWSGKQLTETRDRYSKVRASLQKKASTRTRSSRRRCRQVLVRLSGRERRFQAWVNHNISKTIIQQAKSEQASVAIEDLTGIRAWTNQKPRNKTERRRSNSWAFYQLRIFLEYKGLRDGVEVVAVPAAYTSQTCNRCLHIGLRSEKKFKCGNCGLSCDADLNGAKMIALLGHSVSVPGGSNGLCCNLSTDSSGLLKAHTVFGTPNLCG

SEQ ID NO: 16216 - protein, 305 aa, unknown
  TnpB Polypeptide
MIVERTIKLKLELSDESKETLKQTMVLSNQVFNEIARYGFDNHTCSKVSVHHATYYGIRKQHPELPCSVLQGIRDVACEALKGLELKTLPRSKPFSAIRYNKRVHKINLIKQNVSLSSVKGRVTATFSIPEYYKQYLKWEFKTSTLRYNKQQNVFYLHVVIHKPSPEPVGDKILGIDRGIVNIAVTSNNHFFNSKPIKNVRAKYAFLRAKLQSKGTKSAKKLLRKISRKEQRFVSKVNHCISKEIVAMPFDIFAIEDLTSIRVQSRTRGIDFTQKLNNWAFYELEARKGIDTEHSDNTPHFIVRS

SEQ ID NO: 16217 - protein, 412 aa, Trueperaceae sp.
MLYVVNRLSAWFLRGDIVMKESGEIIPEDVRRLARSIMRHVMGRHRRPTLSRISMRLDHRAARLARPTEATQAGRVGWWINLSTMEPGKKIAVPLLTYDYHAERPGRVTNGVQVNLNREGQLTFGVVTDMGEACAKSRAEYDGRGVLALDFGLSTLFATSEGQLLGQGWLKRLRRYDALLSMIAASQQRAGKKPRASKRYRALVEDVRGFLRTEVGRVLNHLVEQGRPKELVLERLDFRNPDLSRRLNAILRNCGRSVIKSKLAALEQRFGITSTEVNPAYSSQTCNVCGYVDARNRGSQDKFHCLWCGHTKHADLNAARNIGERRALPIGSVFQSKHAVLGHLVATFVARHPMSERRPGLSRFGRSGQRGLPADPRTTNPYFGKVPPAVVRSSERREAPMKSGTTQALVAA

SEQ ID NO: 16218 - protein, 393 aa, Bacterium sp.
MYYKAYRFRIYPDEKQRTLINKTLGCTRFVYNYFLNIQKENSYKKASENIKYYTHHLKYEYPFLQEADSIAINKALFNLEDSYKRFFNKQSGYPKFKSKFSKNSYSTTAIYGTYKNNNYCNIELDLESKIIKLPKLKKTKIRGYRNTKSINGRIISATVSREPNGKYYVSVLFEMNDEIQNVVPASIVGIDLGVKKLVTLSDGTEYENNKYILKYEKRIKRMQRALSRKVKGSNNYFKCKRKLVTLHNKLANSRKCYIHKISKNITDEYDIITCEKLHTKSMIIEGKKNTLSKNINDACFNEIIRQLEYKSKFKGKQFYQIYDYYPSSQTCSRCNNQDKKYKNLNERIYNCTKCYLKLDRDLNASINIMFEGLKMYIKNNKRNILKSNISMIK

SEQ ID NO: 16219 - protein, 357 aa, unknown
  TnpB Polypeptide
LKKKVYKMKLTRTYKLKLYPNFGKSEVARYSYKRFLEYTNLFAGKLFFNGNKSISTEGLGKLANQAQHKARGITSALVAAAKQTGRKTNVPSIKTIGCPAKIQPSKTKKFNYWVSVENQFSKGRISMPALSHKKLNVSLRQGWMLNSACEFIYENNKPFARVFVQKEVSKAQPQHKLLGCDVGYKNSVTRSDKYIGRNASKVIFKSGRKQASRQRQGIKTKSVKSQVKQLLDVEAKSAVARCKKTSSSLAVESPKVLNNLRSGRLQGWARNYFANRCHVLGSEEGVFVWEVNPAYTSQTCSKCGHVDKQSRCGTKFCCTSCGFEAHADVNAACNIATKGMVSLGRVLSKRSGTKISW

SEQ ID NO: 16220 - protein, 402 aa, Escherichia sp.
VKRLQAFKFQLRPGGQQECEMRRFAGACRFVFNRALARQNENHEAGNKYIPYGKMASWLVEWKNATETQWLKDSPSQPLQQSLKDLERAYKNFFRKRAAFPRFKKRGQNDAFRYPQGVKLDQENSRIFLPKLGWMRYRNSRQVTGVVKNVTVSQSCGKWYISIQTESEVSTPVHPSASMIGLDAGVAKLATLSDGTVFEPVNSFQKNQKKLARLQRQLSRKVKFSNNWQKQKRKIQRLHSRIAYIRRDYLHKVTTTVSKNHAMIVIEDLKVSNMSKSAAGTVSQPGRNVRAKSGLNRSILDQGWYEMRRQLEYKQLWSGGQVLAVPPAYTSQRCACCGHTAKENRLSQSQFRCQVCGYTANADVNGARNILAAGHAVLACGEMVQSGRSLKQEPTEMIQATA

SEQ ID NO: 16221 - protein, 408 aa, Nostoc sp.
MIIYEFKIKGRDKQYRAIDDAIRTSQFIQNKCLRQWMDVKGLSKYDLNKYCAVLADLFPFASELNSMARQSAAERAWSAISRFYDSCKKKVKGKKGFPKFKKHCRSVEYKTTGWKLSTTRKSITFSDKKGIGTLKLKGTYDLNHYDIKQIKRVRLVRRADGYYAQFAISVDQKVETQPTGQVLGIDLGLKYFIADNKGNVEPSPQFYRKSEKQLNRANRKKSKKYDLSKKKDKKQQSANYHKARNRYARKHLRVSRQRKEYCKRLAYSVIQSNDLVAYEDLNVKGMVRNRHLAKSISDAGWSTFRQWLEYFGHKYGKVTVAVPPHNTSQNCSNCGQKVKKSLSTRTHVCPHCNYVEDRDVNASINILKLGLTTVGHTGSYAWGDLPSWAVGASLLSNGESGNQESPSL

SEQ ID NO: 16222 - protein, 391 aa, unknown
  TnpB Polypeptide
VRAVADDNTVYRAIKYRVYPTDAQSEKLSQTFGCARKVYNDALSMQRGLYEAGMPTFGQTALNAYCNRVWKDEYPFLTEVDKFALTNSLYALCAAYKNFFEGRTGYPRYKSRRGEEQSYTTNYTNGNIEVITRKGNRGFVKIPKVGKVPASIHRVPKKDWVLKSATVSRQVNGKYYISVLYQLPDTLIKQAPLPTEETTLGLDYSSPKFYVDSNGNDAGVMHWYRKLEERLAKEQRKLSHCKKGSNRYFKQKARVSKLSRTVANQRLDFCHKLSRKIASSYDAVCVEDIDLSAMAQTLKFGKAVSDNGFGMFRTFLQYKLAEQGKYYIVIDKWYPSTKTCRHCGSKNPDVQLGQMEWVCPHCGAVIDRDLNAAINIRNEGLRTFYAERIPA

SEQ ID NO: 16223 - protein, 403 aa, Streptomyces sp.
MATTHVKRAFKYRFYPTDAQVAELSRTFGCVRKVYNLALEARTTAWYLRQERVNYNATSAMLTAWKKTEELAFLAEVSSVPLQQCLRHLQGAFTGFFEGRAKYPRFKSRKKSRRSAEYTSSAFRYRDGALTLAKMREPLDIVWSWPFPEGVQPSTVTVSQDAAGRWFVSMLCDDEITPAPATTAAVGIDAGITSLMTLSTGEKITNPRHERRDRARLAKAQREVSRKEKGSANRAKARLKAAKVYARITDRRRDHLHKLTTRLVRENQTVVIEDLTVRNMVKNHSLARAISDAAWRDMRTMLEYKCAWYGRELVVVDRWFPSSKLCGACGTIRTKLPLNVREWTCDCGMVHDRDVNAAKNILAAGLAVSACGDGVRPQRESSRTGHSSVKQEPQRVTTGIPLL

SEQ ID NO: 16224 - protein, 367 aa, unknown
  TnpB Polypeptide
LPTLSHGRHRRSFQGSTSRTRRRPSRWSADSNTESTRTRASASRSRGPSVAAGSCTTAPSTSRSPPTARPARRSRGRSSPECCRRGNATPRPPGSRKRTPWRSSSPSATSTAPTRTSSDVCAKPGFPKFKSRRHARQSYRTNGGKGVDRNHIALPKLGTVRAKVSRPLQGRFMSVTVSLDAAGRYFATFLCTDVPTKDTPATDREVGIDLGVETLATLSDGRKIGKPRHLKKYERKLAREQRRLSRRKGARKGEKQSRRYLKQRKRVARIHAKIADARTDALHKVTTMLADENQVLCMEDLNAKGMMKNHHLAKAVTDASFGELARLLEYKCAERGRSLVKIGRFYPSSKTCSACGHRLDALPLSVR

SEQ ID NO: 16225 - protein, 326 aa, Bacillus sp.
  misc_feature (267)..(268): Xaa can be any naturally occurring amino acid
MEVNQIMINKAYKFRIYPNQAQAILINKTIGCSRFVFNHFLSLWDQAYKETGKGLTYGICSAKLPAMKKELVWLKEVDSIAIQSSVRNLADAYTRFFKKQNSAPRFKSKKNNVQSYTTKQTNENIAVVGNKIKLPKLGLVRFAKSREVEGRIVNATVRRNPSGRYFVSLLVETEVQELPKTQSYIGIDVGLKDFAILSDGTPYKNPKFFRSLEDKLAKAQRVLSRRMKGCSRWNKQRVKVARIHEYISNARKDYLDKISTEIIKNHXXSSQLCSRCGYQNKDVKNLNLREWDCPSCRTHHDRDINSSINLKNEAIRLLTARTAGLA

SEQ ID NO: 16226 - protein, 542 aa, Persephonella sp.
MITLQCKLTFENEKDKQKLLELMRQFSSCNRYAYNRLLEGHKRKELKKDLQKVFNLNSRYCDDAIFKAQSLINACKERGQNPKKVIFGGRKLFEKLSKKHLNGQQREMLKQKWEERRKGYLYSRGDKSKKGNLNIRIICEKEGLKLRINTGERNWITANIKRAVNRENDKWTEFIARLLEAEKTKEYFPYSVEIRQINGQIYAFISLEEELPKQPIITKEEGIIGVDINAKPFHLALVTVKPDGNLQTVNKISLHDLINKTKNQREYLSWQIAHQIVEIAITQDKAIAIEKLDTIPKGNKGDGSKKSRKIKQQWIYRGILEKIKTLAKREGIQVIEVNPAYTSIIGILKYAPQYNFDKDTAGAFVIARRGLGLKEELPKHYKNLISDEEYIQYAMSKIEEEKQKTKERLNAEKNQYKKKPLKRKINDLNRQIKLLRSLNSEPQTQQPVNQRKEQVRGWQYASYKLWQVVKVTLTIPVLGKSVPRDLSPLKPILVSGEWDRVVSRLVPVAWDRGYGASEIPPAGECLHLKKAEYKYPSPKCES

SEQ ID NO: 16227 - protein, 490 aa, Persephonella sp.
MPIRAYKHKHSINKGKIQTIKQILAEYRKTAKKIAKKQWNIFFKEGSFNKNADIKDIPSNLSERYKQTCQYQVVSVLNSYISNRQNDFVEIVKSSSLDEDTKFILLTINKTKSWFNEKLKEAKLKDKKTGKIIKKLPIEKHHYKLARKIVKQTFKKNRLPSFKHISMQLDQKVAKIEKKKEGKAKEFDYWIKLSTLEKGKPIYLPVYKNSYFENKEGKQLNFVQINEKEENVEIVFLKDLPKETNYIPQTEKISIDIGLKALFAVNTGDLFGRQFYKFLKHYDKIITNLQANLQKQGIRPSQSSRYKELNRKLKEYIKNEINRLLNKIFKLYQPKEIVIENLNFQNSELSPQLNRLLNRFGIKIIKQKLKDLEERFGIKITYVNPAYTSQTCSSCGYVDKRNRKTQEKFECLMCGRKINADVNASRNIGVRSSNPMIYKKRRTVLRMLIRAYLSDARFNACDSRACEVILSNRYFIGYSEPLRIASKEKS

SEQ ID NO: 16228 - protein, 435 aa, Persephonella sp.
MTTTVLDKKQKIKESLKKTKEKRKNQIPKVYQLKISYSNLNNHQRQWLERVFLEAKWLYNYTIADIENRLNSQTEKIKQVEVKTPQGIETRDIICLSSQMKQGILDRIKKNLSDLSKAKQKGIKVGKLKFKSDYRNIPLKQNEITFKVLKDKNRIKLQGLKKPVRVLGLQQLPENCDIAKAELIKKPDGYYIYLTSYIDKDQIKQEKINKLIGIDFGIKHQLTLSNGIKINYSVEETKRLKKLQKKLSRQQKGSRNYQKTKQKIQRQHQKIYNRRKDIKNKILSLLKKYEYVLIQEEQIKNWHRGLFGKQIQNTGIGGIISMLKQNIETLIPVDKYEATTKVCSRCGCRKEDIKLSVRTYKCEKCGLVIDRDLNSAINILKIGLQKVEKTTIKNLPTDCGEVTPVERQATARILGSNPYIRVSYTSVKQEAPNFS

SEQ ID NO: 16229 - protein, 371 aa, Clostridiales sp.
MLRAIKYELKPNSSQRELIKQTCGCCRLVYNTMLDRKIQAYKKDKTNLSSYELMDKLVELKEEKPFLKDVPSQSLQQAIFNMDSAYKAFFKKHNGFPKFKKKGSNDSFRIPVPCKFDFNKWIVKIAKIGEVKVYEGHNKEIQGKIKSYTIRCTSTDRYFISVLYECEDKKELNNGKSVGIDLGIKTFATLSDGKIFENQKYLKSNLKKLRVLQRSASRKYKKGKKREEQSNNWKKAMKRIAKLHEHIAFQREDFCHKVSREIANNYSIVCIEDLSVKNMEKNHRLAQAINDCGWSMFVEFLEYKCDRVVKMDKFFASSQTCSVCGHKNEKVKNLAVRKWTCPKCHTKHDRDLNAAINIEREGLSRCSLNSV

SEQ ID NO: 16230 - protein, 432 aa, unknown
  TnpB Polypeptide
MNKIRVIKINIGENTQRHSHARRESARLWNRLVKLHKYCRKRHWPWPSKYQLQKHFKGQFELHSQSIQALIDKFSANIDSTRTKRKKGDKAARYPWKDQKRYQVVAWKGQCIKRKGNWLTLPMGRGQTAILIKVPGDIPPGKIVAVELGFRELRLTLSEPVEAVASAGDNTVAGDPGIIHQMMLTDGQSSTAIVGRGLRSLIQGKNRALAYYSSALSKTKKGSRKNRKLRCSKARMLETFERRQRNLLHHAANLILDFCVEREAGTLVAGDIANIAKNKRKTQKGSRRSNQENSNSPIGKLYEYISYKGKLRGLELIKINEAYTSQTCPVCGHRHKPTGRIYRCKSKTCNFVGIRDEVGAANILNKHLNDGTITSNEILPTGKVKYLRPVKLSSRPGVARLTGGTLPNTTPCPVAGVSTPGSHEPLPLDSVA

SEQ ID NO: 16231 - protein, 369 aa, unknown
  TnpB Polypeptide
MRKTFKYRLNPTPAQERAMRATLDECCWLYNHMLEQRKAAYKECGDILTLYEQQATFVALKAARPSLAAPYSQVLQNVAVRLDLAFKAFFRRVQAGETPGYPRFRGRDRYDSFCYPQSGFRLDGTRVFLSKIGHVRAIVHRPLEGTVKTCCVRRTNAGKWFVAFSCEAEASPLPPTDTAVGIDVGLEKFATLSTGEQIVNPRFFQCDERDVARAQRRLSKESRPAQGERATSERRKRRKVVARIHERIANRRHNFAHQHARKTVNTYGVIAVEDLSINRMVHNHCLAKSIHDAAWRQFIAYLTYKAEDAGRRLVTVNPAYTSQTCSRCGHRARKELSERLHRCSCCGLVLDRDHNAALNILALGLQSLA

SEQ ID NO: 16232 - protein, 394 aa, Nostoc sp.
MAKLALTLKLPFYRLNQIKALEFERMTMVNTQIANDLLLVEKKERKNLTSSAFRHVEIGSAWINQTIRNTNAKTKVKHFLQMWLEVNNQNFEISKQDKFYTVAFNLLRGRKGRIPLDVHSASHTDTLDRIISGAAKLGSLKLCKSKKGIWYALISVSMDVPDASGVKGWIGIDRGQKNIAVAALPKGFGRFWKGGRVKQLRRQFQRTRRKLQSAKQLKEVLRLEQRERRIMTHINHVISKQLVQFAQDFGMGLRFENLSGCRQTMKQKKKTKSDSEAVASLRASAANNRDSWAFYQLELFARYKAIKAGIPVESVPAPYTSKSDHRNGILGVRNGDWFRGFDGYRCNADWNASQNIGQWLGFSCPLSLQKAVAAMAIVDAEGAVNDSPLTGEAS

SEQ ID NO: 16233 - protein, 275 aa, unknown
  TnpB Polypeptide
MVKAIKVMLIPNNVQKTKMFQYAGASRFAYNWALAREIENYEKGGKFISDAELRKEFTKLRHSDEYAWLLSISNNVTKQAIKDACTAYKNFFKGLQKFPRFKSKKRAMPKFYQDNIKIQFSNTHVKFEGFSSSRKRNKQKLNWVRLAEHGRIPTDAKYMNPRISFDGLNWWISVCVEFPDCRETLNDDGVGIDLGIKDLAVCSDGTKYKNINKSQKVKKSEKQKRRLQRSISRSYEKNKKGESYCKTNNVIKKEKLLLKRNHRLTNIRKNYLKKE

SEQ ID NO: 16234 - protein, 409 aa, unknown
  TnpB Polypeptide
MRLVYKFNIGQNEEISKLCKISNNLYNQALYIFRGMLSKEGKWLSYFELDSIMKNTKNLDGDINYKLLKAQCSQQILRVLDKNIKGYYKSVQDYKKHPNKYKGKPCLPCYRKRGSEFYLCYTNQSCKIKYGKIVLSKSLSIGIPQYEKYSDLIKDFNQVRIKPLNKGYKVEIIYEVKDTETSKERMDKVSSIDLGIDNLVTLVSEDFTYLFSGKFIKSYNKLFNKTLAKLNSIKDLQKIKGTTKRIKKLYYDREQYIEDVFHKISRKIINLLTNSGITKLIVGYNKRWKQGVNMGKRNNQKFTQIPFARLISYLEYKCELAGIKMVIHEESYTSKCDSLALETIGKHDNYLGNRKKRGLFQSSTGKLINADANGALNIIRKVVGDSCGSVQRIIDRGLLFNPVRIKNVF

SEQ ID NO: 16235 - protein, 390 aa, unknown
  TnpB Polypeptide
LLVRAYKFRLYPTKAQAALIDTWLMHCCELYNAALQERREAYRTANKRISWMDQQNQLPSMKNDRPEFRIVNAAVLQNVIRRVHFTHEAFFARIRHGERVGLPRFKSVRRYDSFTHPDVYWRIDQRSANFPNIGRLRWKPWKDIATLGKPKTCTIRREADGYYAVLACEISAPAALPASTTAIGLDVGVTKLITTNTGTVLGSLAPLKRLEHKMRKAQRRKDRRVLDSRRRDKAIRNLARHHQRLMRARKAQLDRISRKLIQENGTICIEDLDVVKLLQSGDDTTAAKGLRRNKHHASWAALRHMLTYKAEEAGRRIVAVPPYGTSQSCSGCGATVRKTLRDRVHSCDCCGLVIDRDTNAARNILQRGLQLLRREATELRRPEKITFDHG

SEQ ID NO: 16236 - protein, 397 aa, Lactobacillus sp.
MRSEKTTLIWVVMMLVIRTQKVRLYPNRHMKKVLDSLCDYRRYCWNEGLATWNDMYDLYTLDSSSPRPSAYSVRNELVANKADWQYALSARTLQLAVTDLGQAWQNFFDKSQPDWGKPAFKSKKAARQGFKTDRAKIVAGKLRLDKPHDIKDWYDIRISKHSDLSGVLKVVSIYRENGKYWASLPFEVELDNKPQTGDNSAVDVNVGHLNYTAGVVNTLPKRLRKLYQRIKFYQKQLAHKRVVNGKKATKGSRYVAMRAKLQRDYRKVVKIQHDIMQKFTTKLVNNYDKIVIEDLSVKAMQMSHVASKGLQRSMFGYFRQILTYKCDWYGKELILADQGYPSTQRCSKCGHIKVGDDKITLQGNERHRTKHNEYVCYSCGAVLNRDENAVANLLALI

SEQ ID NO: 16237 - protein, 368 aa, unknown
  TnpB Polypeptide
MLYTTYQFRLKDGNLKQLLKQLAWETNLVWNFVNEIVRKRWKESRRYTNEEDLNKLLKGASKFLSINAQSIQAIAQEYLLKLKTTKKFLRWRNVKKHLGWLPFKGQTFKFHGGYAVYNKIKLRLWQHRSLPEGAEIKTGSFGEDARGRWYLNLVVEAAKLPLEEAPPPDTFVGIDPGLKTVMTTSDGGKFERHNLTRTYAAKLAKAQRRKKKKQAKKLHAKIKNARKDFNHKASLDLVRNYKIIFFGNASSKRLAKTNMSSGVHDAAWGQLKEFCHYKSLRRGGMMLEINERKSTITCSSCLKETGPSGLSGLGVRGWTCSSCHEVHDRDVNAAKNILRFGHETLRALSGDDSHQTKRKGSPRYNRKV

SEQ ID NO: 16238 - protein, 428 aa, Plantibacter sp.
MLEGVRVALDPSPAQERVMMSHAGAARFAFNAGLSHVKSQLDAREEARTAGVSDESLPTVDWTLYELRRWWNSAKEELAPWWASNSKETYSSGLDGLARALRAFTKSRRGNAGRPSGFPTFRIRARDRQHWAYTTGTFGVADPYGVNLPRIGRVHTHERIDRRVAGGHVTRLTISRSGGRWYAAFTVERDVPEHAIRAQSSVGVDLGIRTLATLSDGRVFENPKHLRVAQRRLRRANRALARTAQGSAGRARASRKLNRFHARVAALRSDSIHKMTTTIANDYTVISLEDLNVAGMLRNHRLALALSDASFAEVRRQLAYKTARRGGTLLLVDRFFPSSKTCSACGDAKTKLSLAERTFTCGACGASLDRDLNAAINIHNYVAGSGPETQNGGGAPQKTRPGGQQAMKPQPRARQRLDVDRLLATVAS

SEQ ID NO: 16239 - protein, 410 aa, unknown
  TnpB Polypeptide
MEADSCVRRCAEMELTYKYRIYPTKKQMSDVRNICGAARFLYNKMLEDRTQHYREKRQWKRLDSKPFIEFFPFLAQTDPGALAWTVNRLNRAYQHFFFVEKTEMDRYRPESIAKNKIDKKYALLDTDLVSYPQYKRKKKAKESYTTVLKKVDVQNKRILLPVLGRVKIAYHRQVPEDAQLLDCTILKAKSGKYFVLLRLELSETPKVELQTALGMVFVPGGPVGVRSDGEAVCMRRQTQRQTKRIKQAYKTLCRRTYGSRRYEEQRKYLAALYEKRANQRRDDLHKAARQITNAADALYLQKPDVRKRAAQQETARARARIWDESWYTLFSYVRYTAMLEGKHFWGVPENFPTYHFCSACGAFNKEPEKGKWVCPACGLQMDDAVNAAMNLQHMAEKYIRELKELEQKKK

SEQ ID NO: 16240 - protein, 442 aa, Helicobacter sp.
MKVNKGFKFRLYPTKEQQDKLQHCFFVYNQAYNIGLNLLQEQYKTNKDSPPKERKWKKSSELDHAIKHHLNARGLSFSSVIAQQARMNVERALKDAFKVKNRGFPKFKNSKFAKQSFLWNNQGFSIKESDDERFKVFTLMKMPLFMRMHREFPPNAKIKQITISCSHRKYFVSFSVEYEQDITPIKNTKNSVGLDLNILDIACSCGINNHEKLTDFKQYQTDMKELLGIEIDEEMDTKRLIPTCSKLYSLKKYSEKFKRLQRKQSRRVLKSKQNKTKLGGNFYKTQKKLNQAFDKSSHQKTDRYHKITSELSKQFELIVVEDLQVKNMTKRAKLKNVKQKSGLNQSILNASFYQIISFLECKQQHNGRLLVKVPPQYTSKTCYGCGNINPKLKLNHRQYWCLECGYREHRDINAANNILSKGLSLFGVGNIHADFKEQSLSC

SEQ ID NO: 16241 - protein, 289 aa, unknown
  TnpB Polypeptide
MARKKSATARRREGMMSGTPTRALVMPLALSPDQHAMYSRLADLYNRVWGSAVSWYDTHRTVNAVGAHKALYAGLRGRFPQLPSQFVCNALRDAAGAVRSWNSNHPKRRWSLRASRRKPTVRFDLRTMGLRGNLLTLSSMHGRKRQRFLLPPIPAWFDERYPERRLQAVTLVLDPNDLVARLTLTFRIPQAEPVEGGVLGVDLGLHALYKDSEGGEYRYPQVQRVRRRHAYDRRALQEKGTRSAHRRLKAMGGREERFIRDVDHCAAKRLADTPGIGVIAFEDLAYIRR

SEQ ID NO: 16242 - protein, 426 aa, Halorubrum sp.
MAKKVVTRTYTASIRNQSRVSDDLDALGFAASKLWNVGRWTCSRIWDEIDYIPNHNELTTYLKNHERYDDLHSQSSQRVLQELAEAFNGWYGKRQNGDARANPPGYRKHGDEHPRSTVTFKAAGFKLDTQHDRVRLSQGSNLKEYWSDFILCKFQTRPDVDLSAVENVQQVRAVWTDEEWELHFVCKVESEVAESPGEKTVGVDLGINNFAALAYEDGHAELYPLNCLKQDDYYFSKRIAQCDDSNSEQATRLNQKKSARRTHYFHTLSKHIVQRCVDEGVGTIVVGNLSGIREDEETDESKNWGKHGNLDLHSWAFDRFTELLEYKAEMEDIAVEQVSERDTSNSCSCCGRTRKANRVERGLYVCDDCGTVANADVNGAENIRQKVSPSLVTDSGDRSNGWLAQPSTFLFDKETGAFAPQERVTS

SEQ ID NO: 16243 - protein, 355 aa, Aphanizomenon sp.
MAPQSARQMLKSVGESITSYNKLVALYYQGDVHKPSLPKYRKGGGFAAVTFPRQALTWKNGCFYPSIRKKTKPELLTEITLQLPNLIDSHWVKEVTIKPYLGEFWIDWVIDNCNKPVNTNPELDYSQGWSFDHRGTNWLTGVSTRGKSLIIDGRTLKSINQGYCPLVAKYKQNKFDFYWDSNLDRVQLQRNNQMQHAINKAARFIINQCLNDRIGNLIIGCNHGQKNSSKMSKCGSQNFVSIPTGGLIERLKQICPEYGIKITIGDYLYKHGEKLDGWKPSGQRVKRGLYKTSAGILANAYCNGAANILTKVATQLGANLAKVGRGALTLPIRVDLFNGLSRSYPKGCVPRLQPG

SEQ ID NO: 16244 - protein, 372 aa, Massilia sp.
MQRLQAYKYELMPNGEQERAMRRFAGSCRFVYNKALALQKENYEAGNKFIGYVAMAKHLTGWRNGIDTPWLKDAPCHPLQHALKDLEKAYQNFFAKRADFPRFKRKGSGDAFRYPDPKQIKLDQANNRLFLPKLGWLRYRNSRDVLGELRNVTVSQSGGKWFVSIQTRREVEQPLPMATTAIGIDVGIARFATMSDESYIAPLNSFKKHQQRLARYQRRMSRKVKFSNNWKKAKARVQKVHTRIANARKDFLHKTTTTICQNHALVCIEDLQVRNMSRSSKGSSEQHRKMVKQKSGLNRAILDQGWGEFRRQLDYKVAWNGGMLLPFRRTTPAGCAHAAATHRKTIGKHKRSSYASIAVTKITPMWSVRSIF

SEQ ID NO: 16245 - protein, 292 aa, unknown
  TnpB Polypeptide
MISYKYNIYHSKKTKYLDKMLRECCFVWNHALALQRRYYKLFGKYISIGKMKKHFTKRIKRNLLHSQTTQEILERLDESYNRFFKKLAKRPPKFKSPEKFNSFVFKQGGFTLNGNCLTINKGNKRFRFSYSRPYEGNVKQIRIVRETCSRFSLIIITDHNHSNSYRKTHDGASIGLDFGLKTYLTKSDGSKIGSPLFFKQYQNKIRKLNKRLSNAKKGSNNRRRRLFELQQKYRKINDLRSDFQWKLAHDLCKQYDYIFIEDLNIEGMKRLWGKKVSDLSHSSGVSYKRHLI

SEQ ID NO: 16246 - protein, 377 aa, Psychromonas sp.
MKKKAYKYRFYPTDEQSLLLAKTFGCVRFIYNRVLKVRTDAYYKDGASVNYSAASKILTELKKDPELVWLKEVASVALQQSLRHQQTAFTNFWDRRAKYPTFKKKNARQSFSLVGTAFRYRDGNIYIPKSNEPLNIRWSQAMPCEPSTITISKDAAGRYFISCLCEIDIKPMPISAKQVGIDLGLTDLYITSDGFKSGNPRHLKRYEAKLAYLQRMLSRKKKGAKNRNKMRLKVAQLHAKIADCRMDATHKATRKLINENQVVCVENLAVKNMIKNPKLAKHIADANWGEFVRQLHYKGVWAGRNVIEIDRWFPSSKRCSTEGCGFVNESLPLSVRRWACPKCGSHHDRDINAAKNIKAVGLTVLASGATGSGAKVA

SEQ ID NO: 16247 - protein, 407 aa, Mycobacterium sp.
MARFEVPEGWCVQAFRFTLDPTEDQARALARHFGARRKAYNWAVATLKADIEAWRVTGIGTVKPSLRVLRKRWNTVKDEVCVNAETGAVWWPECSKEAYADGIGGAVDAYWNWQNSRSGKREGKTMGFPRFKKKGRDQDRVTFTTGAMRVEPDRRHLTLPVVGTVRTHENTRRIERLIATGRARVLAISVRRNGTRLDASVRVLVQRPQQPNVAQPGSRVGVDVGVRRLATVANEAGAVLEEVPNPRPLDAALKELRYASRARSRCTKGSRRYRERTTEISRLHRRVNDVRTHHLHVLTTRLAQTHGHIVVEGLDAAGMLRQKGLPGARARRRGLSDSALGTPRRHLSYKTVWYGSALVVADRWFPSLSVEPTVRPGLARLVAVKRGREAAPRLPNNPETGGKSRDH

SEQ ID NO: 16248 - protein, 320 aa, Salmonella sp.
  misc_feature (140)..(184): Xaa can be any naturally occurring amino acid
MKRAYKYRFYPTTEQAELLAQTFGCVRFVYNSILRWRTDAYYERKEKIGYLQANARLTALKKEPEFAWLNDVSCVPLQQSLRHQQTAFANFFAGRAAYPAFKSKRHKQAAEFTASAFKYRDGKLYMAKNKIPLDVRWSRXXXXXXXXXXXXXXXXXXXXXXXXXXXXXXXXXXXXXXXXXXXXXADCRLDALHKATRKLINDNQVVCVESLKVRNMIRNPSLSKAIADASWGELVRQLRYKGEWAGRSVVAIDQFFPSSKRCSCCGFIMKKMPLDVRKWQCPECGTDHDRDVNAARNIKAAGLAVLAHGEPVNPESLKAA

SEQ ID NO: 16249 - protein, 450 aa, unknown
  TnpB Polypeptide
MSQKVRINGVKHTGASVFLGVDHCGNPCWTQNPERVMVWLCDGWRARFNQRREQRPRNIPVKDEAGGIVDWAKEPLGGPDVADLLSDKEARLRCSWMAGIPAPILSSTDRIENTEWFAGLKRRKTIGGRVPGFKSRHRGLGFVCWRNASRSGNAIFHKTGRKSGVVVITGMNPTRWRKPGEKAHWRIVVHVRVGQEIRPYTSVHVDWTHRTLVFVNMPLPLPRTGDGVIGIDRGCVHTLASSDGTFMDMPKPSRAELKRLKYLQRKMARQDRANEAKGGRTAKLASKRRQKTLSQFNALQGRIVRRRNDWIEKTTTSLAKADILVAMEDLDVQAMTKRPKPRPDPDKPGHYLPNGAKAKAGLNRSILGNNWSRLMKRLKDKMDANGGKLVVVPSAYTSQTCHQCGHVASENRDSQAVFRCVECGYQANADVNAAKNILGRALNQTGGGTA

SEQ ID NO: 16250 - protein, 427 aa, Escherichia sp.
MHQENTMLPRRISVSLFIDQSIIWPVKRLQAFKFQLRPGGQQEREMRRFAGACRFVFNRALALQNENHEAGNKYIPYGKMASWLVEWKNATETQWLKDSPSQPLQQSLKGLERAYKNFFQKRAAFPRFKKRGQNDAFRYPQGVKLDQENSRIFLPKLGWMRYRNSRQVTGVVKNVTVSQSCGKWYISIQTESEVSTPVHPSASMVGLDAGVAKLATLSDGTVFEPVNSFQKNQKTPARLQRQLSRKVKFSNNWQKQKRKIQRLHSCIANIRRDYLHKVTTTVSKNHAMIVIEDLKVSYMSKSAAGTVSQPGRNVRAKSGLNRSILDQGWYEMRRQLEYKQLWSGGQVLAVPPAYTSQRCACCGHTAKENRLSQSKFRCQVCGYTANADVNGARNILAAGHAVLACGGMVQSGRPLKQEPTEMIQATA

SEQ ID NO: 16251 - protein, 419 aa, unknown
  TnpB Polypeptide
MGKPKKQLGVQQNLISPNPELKAVLEYVCAESNKLHNCAVYYARQIYFKTKRYVTPFDLNKELGSHPHFAAMCAQAAQQTCGAVGESVKSFSELIKLFWQGELKDKPKFPNYRKPGMHLVAYPKQALKLVKGQIRFPLGLKVKAWFGVSEFFLPMPSNLDFAALREVRILPRNGEFYAEFVYPVVSVKTDLDKAKVLGVDPGLNNWVACVSNAGTSFSIDGRKLKSMNQWYNKSVAKLMDSKDNGYWSKRLARLTEKRNRVMRDAVNKSAKKIVDHCIQNGIGTIAWGWNDGQKDSANMGSKTNQKYVQIPHARLKGRVKQLCEKYGIQFVQTEESYTSQASFVDRDELPVYGEKPEGWKPSGRRVKRGLYRAGNEWRINADCNGAANIIRKVAVIFGFKLEGISRGVLTAPLKLQIWS

SEQ ID NO: 16252 - protein, 369 aa, Herbidospora sp.
LFAAGFSRLWHVSRFRLQPTAPQEVALLEHCRHARFVWNLAVEQSSYWRPGRGSTPGYSEQCRQLTEARAEFGWLKAGSAVVQQQALKDFAQAMTRFFDKINGRPNYRKCGKSEGFRIVGVKPGDIHRLSRNVGRVKIPKVGWIRFRWSRAIPPGVKSYRVNRDRAGRWHVAFSAIPAPIPAPGTGEVVGVDRGVVVAAALSTGEMLHAPMLREHEKTRLLRLQRTLARAARGSRRRDTVKSAIARLRAREADRRKDWVEKTSTSLARRFDVIGVEDLKVAKMTRSARGSIETPGKTFDRSPVSTEEFWLQVGACSSLGLSTRLQVGLSRSIRASRHRPATPARASPGGVARAKPSYNASPAGIGSMRT

SEQ ID NO: 16253 - protein, 468 aa, unknown
  TnpB Polypeptide
MYEFRSSRYRLYPNRAQAVQFRQLCGASRYVYNTLLGQQIEDYERYRAGDGEKPDASAYGLGRQFIRLRHRDGHDWLEPLSCQVVRASGAFRLGAAFGHFFRRVKEARAGEEPGFPHFKAKGFSRESFIIPEAVRLERKRLRVPKVGWVRLNRKAQSRTQGSDPWSEGEAVSVVVYEEVGKWYAAVLRRVEIGLRAWPWNARAVGIDRNSENVALCWEGETRLIEIPLERIERYEKKAAHYQWRASRRKMKPLRGEDGAVVLKKSGRPVQVASGRRQKMQRRAAKAKRRAATIRLDWSHQTACRIARQFQFIVLEDLNLKAMTKSAKGTRDCPGKQVGAKSGLNRKLLRSCMGQLGRLLEYKAMQVLKVPARNTSRKCARCGHTEEANRKAERFACRACGHRDHADCNAARNILGLGLNKLLAGGAPVTGRRGDNETGVLLCEWRHLVETANDPSRHLSWNLPRLDPG

SEQ ID NO: 16254 - protein, 286 aa, unknown
  TnpB Polypeptide
MIFTSEVCGVVLIAPFDKISRPPCSTIRFIVFLSLFFRCFSPFSFYHRTFSLTTAKLVNKHGKYFLHIPVTYDVEESDLSDICNVVGIDRGINFVVATYDSKHKSGFVRGRSIKQKRAHYSALRKELQMRHTPSSRRRLKRIGQRENRWMQDVNHCVSKALVVNNPAHTLFILEDLSGIRHATERVKTKHRYVSVSWAFYDLEQKLIYKAKQNHSSVIKVNPRYTSQCCPACGHTEKANRNKKIHLFTCKNCGYKSNDDRIGAMNLYRMGINYLYDSQVPDTVAAE

SEQ ID NO: 16255 - protein, 369 aa, unknown
  TnpB Polypeptide
MLQTLMVKLNPNKKQYQILLDTMHRFNEACNAIAEVAFAMRKANKVELHKVVYYDIRERFGLSAQLTIRAISKVAEAYKRDKSIKPEFRLDGAIVYDQRILSWKGLEAVSLTTLEGRQLIPIRIGDYQKARMDRVRGQADLILVNGVFYLCVVVEVAEETPYDPKGVLGVDLGIKYLAVDSDGEVHSGKHVNQTRERLDSLKSRLQSKGTKSAKRHLKKLSGRMARFSKDVNHCISKQIVTKAKDTLRSIAMEDLSNIQSRVTVRKAQRRSLHTWSFGMLRQFTEYKAKIAGVPLVFVDPRNTSRTCPSCGHITKSNRPTRDEFKCIQCGFAGPSDYIAAMNIAARVSVNMPIVSRLISQAQAHDFSHG

SEQ ID NO: 16256 - protein, 483 aa, Richelia sp.
LLINLQGERDIITLALQRQERNAMKVTYQYRFYPDTNQKQQLNRWLRICRYWYNRQLGDRFDWWQMNRTDIDACPLTSSIATPRPKPNYYNQKAALPSIKKDLVKVFHSGELLDFKQVDSTVVQDVSKRVDTAFERFIVGDSKGGKFGRPRFKNKASYRTMTFATASNDWIKCCRNDWIYIRLPKLGVVKVRMHRPIPDKFTLKQASVTKKADGWFIQLMLEDLEVPEFTPDEITPTWGNSIGLDAVLHEDVYLATSEGDKLPSLKPLRKNQSKLARISKKRNQRKRGSKARRKLAKREAKQHQRIARSRQDFQYKIAHKLVKTGAKFFFHEDLNLKGLTKRNKSEQNDDGAYLTNGQSAKSGLNKSWLDAAFGQFFKTLDYIASKAGAVVIAQKPAYTSMVLCYRNEIIFTDCSIRDYWDEQNSLMVDRDINAAINLKRLGLDIFPSIKRRSGNLSVVGTMDNSTVKEILYTLHRAAKMPTS

SEQ ID NO: 16257 - protein, 463 aa, unknown
  TnpB Polypeptide
MSKELIKTVKQYSFPLSDEEIEMLEATGESFRNCRNYFFSRFFSIRSITRLENGRKLRDSLMNENLANISRLPARYWKIALVQVLGNLKTLLENVKLKIRRASSNNSNLSDADRHYINNILKYEIYLNNVLNFKKLDQYIYKKHNVNFKRLNSLIRRYYRRYRGKIPYSHKTNFILLDADMYRYEKGMIAISTVNKGRRIPIKLKDERIFKGNLTLKWDTRLIIYGTAKTEIKIDANPENIVAIDKGRRKLVTSTSGNSYGTGYSGLTNDLIEKQERKMKERQFYWNLYRNFLKSEQTSKAKNVLANNLGKKKFNKFSERIREKSRSYINHELDLFFETEKPTEIIKEDLTWENLNGKSKGKNFNRIMNRWEKGYLDNQIEWKAKQREIMVTNVNPAYTSQICHICNNFGNRNGETFDCPRCGNKMDADVNAAHNIMKRKEIEGINIYTSASKVKEHYLKLNN

SEQ ID NO: 16258 - protein, 413 aa, unknown
  TnpB Polypeptide
MMRSQKIRLKLTKEQENLAWWYSKVSRNFWNLLVDIDKRNNKGEFDDILSTNGNQTYHSNFHNREVYSLNQSDYLNLAKMVVAKSSEEDSEKWSWYYQPNQSFIYGFLSRELVKIRRLNKGKLNFRNIDKTQPNFNVVCCAFGDKKRPSRIYLKKNGKLQIPTIGGVGFGSVRNAFDLSCKKQVANVSFDGKYWYLSYTEDVGSTATNLPDYTDGIGIDLGIKTLATVSDGTNVPNIKTFRRVRILNKRLKRLQRKVSRKYLINKCNKHNKTKNIIKLERQIKLIHRSIKNIRINHIRKFVSELVKKQPQYIAIEDLNVKGMMKNKHLAKDITNCSFYTIREHLIRKATERRIVVRLVDRFYPSSKTCSTCGSYKKDLKLSQRLYHCDNCQEKIDRDLNASLNIAKTDNYVLA

SEQ ID NO: 16259 - protein, 446 aa, unknown
  TnpB Polypeptide
MIQLMSNKVKKTACVKLKIKDNPEFVKYMPSVFDLMQKISSAVHSEILNISDIGPFTLKWKDKVYKDSGEFRELPFIKPVLDDFFKDHDNIGFSALRAIYWSVVRMYRSYVGRNKKNMPLPIRVNTNAVALKDATFKIKEDGSQIIMSTMFDRKVKIKLEVDDKKSFIKNLKYINFNDKGFKQNAGGIINMRTNHLVLTTDDAYFECQDVDSFIGVDINMNLKNFLTWSDGDIISRPKEIQDLLDKLKKHNELLGKKNRGLITGNSRTKINKAKNRMHKRYLPKAMRKWLYPILDKKLKKGIALALDTVTTGATNGSFGQEHVIACCKRYCEENGVFVYEIPTPYTSQMCNECNFAAKENRNGDKFKCIECGHEDHSDVNAAKNIKAYADYLYSINFQSHIGGDSKYNRSKIAKIKNHFADKHGNKTWKRNPLNNNPPPLILRVKS

SEQ ID NO: 16260 - protein, 360 aa, unknown
  TnpB Polypeptide
MRNKLIGSREALDNFQFVTINGRVLFDEKERVIRIARAYSQVVKSAIKPLFDGKSVDELTKEFYNILPNYVYLETALKQAKTIVDGLLDREKDKIIHAKVKRFWFGSRGNRSDKGNRNVKFHVLKDHVEIKVKDPWGKWVYGKAYFGKQYLSLLHELEELASNKEEGYGAVISFEEKPMIHLQIPLWLYLKYFSSPKPNGYGLIAGFDLNSDRLNVVVINKDGEITANKTWWYSDVTRPGFPKGKARALRLNALSESLNSLSRIGVDYVVFEDLFLVKKKKFTRSRSGNRKVSRFAKRQLLIHGVIKALRLGFNVVLVNPKGTTNSEDHDRIMREKGFDRHIASAYLIALKGLGMLNDAN

SEQ ID NO: 16261 - protein, 371 aa, unknown
  TnpB Polypeptide
MILAKKVRIIPNVEQEQKLWKSAGTARFIYNWALARQEENYKNGGKFINDGDLRKEITLMKQTEEYKWLSGVSNNIAKQAVKDGCNAYKNFFKGLADKPKFKSRKKSKPSFYNDNLKLKVKSNMILIEKVGWIKTSEQLPMDVKYTNPRVSFDGKYWYISVGVENENSRVELTDESIGIDVGIKDLAICSNGMTFKNINKTRLVKKLEKRLRRLQRKISKKYELNKEGRKFVKTSNIIKLEKQIRLLYRRLSNIRNNHLHQATSKIVKTKPSRVVMETLSIKGMMKNKHLSKAIAQQGLYEFKRQLQYKCEFYRIKFIEADKWYPSSKTCSECGHVKAKLSLSERTYICEECGAVIDRDFNASINLSRYSA

SEQ ID NO: 16262 - protein, 198 aa, Ktedonobacter sp.
VDVGLKQAAVVSDGRKLENQRPLALHLKKLGKLQRKLSKKQKTKDPETKRTVFSKKYEKQRLKVARKHQQIANIRRDVQHKFTTELARTCGSIGIEDLNILGMMANRKLVRAVADAAMGQLLRFLKTKIANAGGDLCIASRWFPSTKRCSCCGHVKKRMPLKHRTYHCLVCGLVMERDLNAALNLLWFATEQLRQLHA

SEQ ID NO: 16263 - protein, 336 aa, Ktedonobacter sp.
MPPFSNAGRKQAFLTEQRVSVLTLSGRLILPYSGYERHVALIEQGTSIGTAQLWYDQRKKRFYLLVALSLELPDPEPGDLPQVVGVDVGRRYLAVTSTTTGSGDPLFFLGKEAVAQADHYTRLRKRLQQKGTRGAMRKVRAIEQRERRLKAETNHCISKRIIHRHPASLIGLEELTDIRERTKPKKHRRTKQGKSSELVSPKQRRENRRRSQWSFAQLQAMIAYKAMLAGSVAIKVDADYSSQACPRCGHTARANRPGKGLVFVCQNCHYTLHADLVGARNLVLRTLLVWQDWARTGLLSVAPDTSDSEAKAARLSRYAELRWSPDASPSLQRWGH

SEQ ID NO: 16264 - protein, 170 aa, Ktedonobacter sp.
MKQKRAFKYRVYPTPEQQQILAQTFGCCRFVYNWALRKKTDAYYNDHQRLYYKELSLLLTDLKKQEETHWLNAVSSVPLQQALRHLDKAFLNFFEGRAKYPTFHKKRNKQSATYTANAFTWHNGAITLAKMNDPLDIRWSRPLPKDAPPSSVTISKDCAGRYAHQHPCGR

SEQ ID NO: 16265 - protein, 432 aa, Ktedonobacter sp.
MLITRGYRTQLDLNHQQITLCKQHAGAARWSWNWGLRRKQEVYQQEKRWISAMELHRELNTLKQTEIPWMYEVSKAAPQEALRDLDQAYRNFFRRCDLKKEGKWRGKPGFPKPKTKRKGVGSFRLTGSIHIYEQAIELPRFGRLRLHECGYLPTGGVAVLSATVSEKAGRWFVSVQVSEQVPDPPQAAGPPIGVDTGIKTLAQCSDGRAIANPKALTSELKRIKQLHRWLSRKQKGSKNRAKARQKVARKYVRVAYVREDALHKGTSQLTRAQLPPEEREIRKAEIAATLPEPKAKVKPKRGKRSKKESPPEPLPKTIANKVKAKQMKKLLLQACILDAQRRPAVVVLEDLHVAGMRTEPQAGSGNQRCRIRRVQAANGLQNVLARRKPAVGRSLVCFHQTVLWLQPYQRRDRPFRAHLCLRASGLWAGDRS

SEQ ID NO: 16266 - protein, 358 aa, Ktedonobacter sp.
MQRSMNAKVPIAWLVSPSPMNLNVPNCQGASASDRNWGEVPSQVLQDAVKRVDRAFDDFFRRVENREVPGYPRFRSRSRYASLTFKQYGNSFNLLPGTKGNKGTLVLTKLGHVKMIMHRPIKGTPKTAIVQRTQTGKWFVSISVEIPKEEVLSSRLPEAGEAVGIDVGLSTFAYLSTGEAIANPRFFRAEAAALARVQRKLSKAPKGSKKRTKKRKVVARVYERIGNRRKNFIEQEVCKLMKRFGLLAVEALVVRNMIRNPKLAKSIADVSWSQFFGRLQAKAEEAWRQVVRVNPAYTSQTCSACGHRQPMPLSVRVYECPHCGLVIDRDHNGSKNILVEVFIAVGRHSRVIPEAPGL

SEQ ID NO: 16267 - protein, 251 aa, Ktedonobacter sp.
VSPDAIQLPRLGVLRLKEHGYFPLNGKITSATISEQAGRWYVSICVHEEAEEAKEPQAATGDVIGVDLGIKRLATLSDGRTFENPKALRKKITALKRTSRRHCRKAKGSRNRQKAKQRLSRMHARIANVRNDALHKATAQIVARTKPDAERPRVIVLEDLNIAGMLKNRKLARAIADVGMYEFKRQILYKAEQAGVQVLLASRWEPSSKTCSCCGWVNETLTLSDRIFVCRDCGSVQDRDDNAARNLAALA

SEQ ID NO: 16268 - protein, 339 aa, Ktedonobacter sp.
VKKCSILEEIRGFDVYQERWAMIRAHKIRLHLTEEQKGYFAKAAGTSRFVWNWALAEWNRQYEAGEKPTAFKLKKQFNEIRRAQYPWTWEVTKNASDQPFLDLANAWAAYFDGLKQGKKTGRPTFKSKKKSKRGFYLANDQFELGDHRIWIPKLGWVNMAENLRFVGGKVTGARITKTADWWFVSIQVELPDAIPAKKPAACGIDVGLNRLATLSTGEGVENQAFLKTALKKLRQANKRLHRRTLGSKNREKARRQVARLHYRITCMRDDVLHKLTTRLANCYGIIGIEDLNRKRVAQESQARAFVLGCGIRQTLERAEGEGGATRWARHQGQPFLCFQ

SEQ ID NO: 16269 - protein, 200 aa, Ktedonobacter sp.
LGLNRPAVTSNRHFLGSRHWKEIDRSSFRLRRKLQSKGTKSAKRHLKKLSRKQMLFHRDCDHVLSRRIVQSVPPGATIVLENLTNIREGVRHRKGEGQRKLHSWSFAQLYGFIAYKAQEQGIGVERIDPRHTSQTCSLCGHQARNNRRSQAVFHCRSCGYQLHADLNAAYNIRDKFCLAQDGTSDLSWSLSDGLSSHASA

SEQ ID NO: 16270 - protein, 432 aa, Ktedonobacter sp.
MQLVEKHVIAQTDPRFACVDAACFASKNLYNAALYELRQTFFLTNTSLSYPALDKRMQEHEAYRALPAKVAQQVLKQVCTAWSSFWAALLVYRETPAKFVGRPQLPKYLPKAKGRNLLVYTMQAVSRGKRTLDRGIIQPSQLGIQVKTRQDPKAIAQVRVVPKVGYVVVEVISEHEPTVTAVDPDLLAGLDPGMDNLATLTSNKPGFVPVIVNGRGIKSCNQYYNKQRAVLQKSLGHPGRSRRVEQLTTRRNRRIEHDLHTASRFLIDLLVAEGIGTLIMGKNPLQKQEIRLGKRTNQHFVQIPHARFIQMLQYKAELVGIRVILTEESYTSKASLLDLDPLPVYRKGEQVAYQFSGKRIERGLYRAADGRVIHADVNGAGNIIRKVAPGAFERKGVEDGECRVHLPVVHPVRKSFPHKPAREKILAPVRIR

SEQ ID NO: 16271 - protein, 451 aa, Ktedonobacter sp.
MKQTIIAKLKLHTTSEQLAQLRNLQLAYRDALNYVSRYAFEHGKMSSKRRLQEGTYQELRVLYALPAQMACSVPRQVGATYKGLWTKYKKHAASRKAGVTKKRYKGLDQPPRYLSPTVTYQQGRDYGFKTEQRVSVLTLSGRLILPYSGYERHVALIEQGTSIGTAQLWYDQRKKRFYLLVALSLELPDPEPGDLPQVVGVDVGRRYLAVTSTTTGSGDPLFFLGKEAVAQADHYTRLRKRLQQKGTRGAMRKVRAIEQRERRLKAETNHCISKRIIHRHPASLIGLEELTDIRERTKPKKHRRTKQGKSSELVSPKQRRENRRRSQWSFAQLQAMIAYKAMLAGSVAIKVDADYSSQACPRCGHTARANRPVKGLVFVCQNCHYTLHADLVGARNLVLRTLLVWQDWARTGLLSVAPDTSDSEAKAARLSRYAELRWSPDASPSLQRWGH

SEQ ID NO: 16272 - protein, 293 aa, Ktedonobacter sp.
LTYQYKKDYTFKKEQQVSILTLEGRVIVPYTGYNKHVALIQRGAEIGASKLWYDKPKKQFYLLVSLEIETADPTPETHKQAVGVDVGMRYLAVTATMQGDCTFHSGKQIVPKANHYARLRKRLQKKGTRSATRRLVAISGRERRLKQNTNHVVSKRIVLQHPQSLIGLEHLTDIRERTKRRKGKNAKQRKANRTFSKWSFAELHSMIAYKALLHRSMAIKVDANSTSQACPKCGHTCKENRPNKGLLFVCQNCQYTLHADLVGARNIAMRTLLIRQDWRGTGLLSVRAFCVGR

SEQ ID NO: 16273 - protein, 632 aa, Ktedonobacter sp.
VSRLAQAFLGNHSKERGDQCDLPSHIPFYRERGEKAPVIHAGDESPPLLDERKESRVRYLELAFFSFLWDNRRQWIEITCMFEEGATMPKKCQGQRKQKEQQEKRPATPTFLLELPLAVDAGQAARLRAHLEAARQLYNAILSQGQQRLRRMRSDPAWQEARALPRTHKAERAAAFSALRKAHGFSEAALHEAVKRLRVGWIAEHIEAVLAQTLATRAYRALNRVCLGKAKRVRFKSRGRGLSSIENKRNDTSLRFVLQPASEGNAGYLLWNGDQLPALINWKDEVVIHGLRHRIKYARLIQRPASSPRAAGADAQGSRYVVQLALEGKPHHKPKHTIGQGIVGADLGPSTLALVPQQGEASLQVFCAELAPEACAIRRLQRQMDRQRRAGNPEHYDEKGRVKKQGKKRLPWKNSKRYQATRRRKATKERKLAAHRKSLHGRKVHEVVALGRTIILEKVSYKAWQKRFGKSVGLRAPGMFVELLRRTVASTGGTLVEVPTRTTALSQWCHDCGRRVKKPLSQRWHHCECGVGPVQRDLYSAFLAAYLDPAEPTPSCARYQAYWEGAEARLRAAHERLAQRAREGQSLPRSFGIPRAGARLPKSPGEPPQEPAFLHQWEGLEAWNESLEPPAL

SEQ ID NO: 16274 - protein, 532 aa, Ktedonobacter sp.
MPKTCRGQRKKKEQQEKRPATPTFLLELPLVVDAGQASRLRAHLEAARQLYNAILSQGQKRLRRMRADPAWHVARTIPRTQKAERAAAFSALRKAYGFTEAALHEAVKGLRVGWIAEHIEAVLAQTLATRAYRALNRVCLGQARRVRFKSRGRGFSSIENKRNDTSLHFVLQPPEEGNAGSLLWNGDQLPALIDWKDEVVTHGLRHRIKYARLIQRPASSPRAAGADAQGYRYVVQLALEGKPHRKKKHTVGKSIVGGDLGPSTLALFPQEGEASLEVFCAELAPEACAIRRLQRQMERQRRAANPEHYDEKGRIKKQGKKKLRWKQSKRYQVTRRRKATKERKLAAHRKSLHGRKVHQVVKLGSTIIIEKISYKAWQKQFGKSVGLRSPGMFVELLRRTVASTGGILVEVPTRTTALSQWCHGCGRRVKKPLSQRWHHCACGVGPVQRDLYSAFLAASLDPADPIPSCARYQEYWEGAEARLRAAHERTAQRAKEGQILPRSLGVTRARARLPKSLREPTQEPASLGRLEA

SEQ ID NO: 16275 - protein, 522 aa, Ktedonobacter sp.
MGVYRERGEKAPVIDAGDESPSLLDERKESRVRYLELAFFPFLWYNRRQWIEITCVFEEGATMPKKCQGQCKKKEQQEKRPATPTFLLELPLAVDPGQAARLRSHLEAARQLYNAILSQGQKRLRRMRSDPAWQEARALPRTHKAERAAAFSALRKTYGFSEAALHEAVKGLRVGWIAEHIEAVLAQTLATRAYRALNRVCLGQARRVRFKSRGRGFSSLENKRNDTSLRFVLQPPEEGNAGYLLWNGDPLPALIDWKDEVVTHGLRHRIKFARLIQRPASSPRAAGADEEGYRYVVQLALEGKPHQKKKHTVGTSIVGGDLGPSTLALFPQEGEASLEVFCAQLAPEACAIRRLQRQMERQRRAANPENYDEKGRIKKQGKKKLHWKQSKRYQATRQRKASKERKLVAHRKSLHGHKVHQVVKLGTTIIIEKISYKAWQRQFGKSVGLRAPGMFVELLRRTVESTGGTLVARPHTHHRAEPVVSWLWQEAQEAAFAALASVRVWRGSRATRPVFGVSGCLP

SEQ ID NO: 16276 - protein, 387 aa, Ktedonobacter sp.
MMKAHKIRLHPTPEQATYFAKAAGTSRFVWNWALAEWNRQYEAGEKPTALKLKKHFNQIRREQFPWTWDVTKNACDQPFLDLGKAFTAFFEGKARRPKFKSKKKTCPSFYLANDQFELADHRVWIPKLGWVNMAENLRFKGKITGARITHVADWWFLSITVELEGKIPEKKPKSVGLDVGLNRLATLSTGEGCENQRFLKTALRNLRKAQKHLSRCKKGSKNREKARCNVARLYYKITCLRDDVLHKLTTTLAHEYGLIGVETLHLKNLMKNRALARSFSDAALGKLLSLLTSKVSAQGGMIVKVDRFFPSTQRCHCCGWRWHDITLSDRVFVCQSPTCAMSGVRQDRDENAAKNILQEALRLISLVDQAVFGSGSDETLKTPADLG

SEQ ID NO: 16277 - protein, 342 aa, Ktedonobacter sp.
VQLVERHLIRHQDARFAVIDRAAFASKNLYNQANYQIRQAFIHEGTYLPYAAIFHRLKHHEAYCALPRKVSNAILIQLHHNWVSFFDGMEAYREDPSPFTGRPKIPGYQDKTKGRFLLIYEKKALGKRVFKRTGKLVPSGLPIEIATQITWEAIRQVRIVPRADGYMLEVVYEQEIQPAAVNPQLRAAVDVGVNVLAAITSDKPGFVPRLVIGKNPLWKQEVSMGCRNNQQFVQLPHARFIEQLTYKAHLVGIRVILQEESYTSKASFLDDDPIPTYEANTAEKPVFSGKRVARSWYRARDGRLIHADINGSYNILRKSNSDPLQVGRGVAGAAVLPRRLAV

SEQ ID NO: 16278 - protein, 399 aa, Ktedonobacter sp.
MLIYEYKLDGTQAQYRAIDEAIRVTQFIRNKCLRLWMDTRGINRNDLQCFCSQLAQEYDFAILLNSQARQAAADRAWAAISRFYDNCRNQKPGKKGYPQFQHDCRSVEYKQTGWRLEPDGRHLTFTDGCGIGRLRLIGSRDLATRPLPAINRVRLIRRADGYYAQCAIQAERHIEHVPTGKHTGIDLGLKAFLTDAEGNTVANPRHLRKAERKLKRLHRRLSRTQKTSQHRKKARKKLAKGYLKVQRQREDFARKTANALITSHDLIAYEHLRIANLVKNRKLAKSISDAAWGRFIGWLTYYGHIHNIPVIAVEPAFTSQDCSACGARVKKSLSVRTHICPSFGVVLDRDHNGARNILAKAYRTVGQTGTGEAQATPNASGQNASTRSGRKARTGKRAG

SEQ ID NO: 16279 - protein, 334 aa, Methylococcus sp.
MDSVKRGYTYRFYPTPEQETLLARTFGCVRKVYNTILDWRTKEFYEHQKKMDYLKANARLTDIKKRPEFGYLSDVSSVPLQQCLRHQQTAYKNFWAGKQSAEFTASAFKYVGGKLFVAKSKEPLDIRWSRELPSAPSTMSKDPAGSYFVSCLCEFVPERLKVTPNRVGVDLGIKDLFVTDQGKKTGNPRHAAKYATKLAKHQRRLAKKKLGSKNRIKAKQKVARIHAKISDCRMDNLHQLSRRLINENQVVCVESLKVKNMIRNPKLSKSIADAGWGRFVKMLGYKADWGGRTVVAINQFFPSSKRCSGCGHINDELTLDVRDMGMPVLRYRFG

SEQ ID NO: 16280 - protein, 288 aa, Paenibacillus sp.
MLAHKAYKYRIYPNPKQQQLIHQMFGCCRFVFNHFLVKWNETYTATGKGLSYNTCATQLPALKQQFEWLKSVDSIALQSAVRNVADSFERFFKKQNQAPRFKSRKHPVQSYTTKYTNDNIAIDGNRIKVPKLGWLRFANSRACEGRILSATLRRNAAGKYFVSILCEVEMKPLPQTDKEIGIDLGLKEFAVCSDGFRVANPKVFRKYEQKLAFWQRRMARRNKGGSNWQKAKQKVAQIHEKIVNGRHDFLHQLTTKLIRENQTISIENLRVANMLKNHRLAKSIADAS

SEQ ID NO: 16281 - protein, 402 aa, Escherichia sp.
VKRLQAFKFQLRPGGQQECEMRRFAGACRFVFNRALARQNENHEAGNKYIPYGKMASWLVEWKNATETQWLKDTPSKPLQQSLKDLERAYKNFFRKRAAFPRFKKRGQNDAFRYPQGVKLDQENSRIFLPKLGWMRYRNSRQVTGVVKNVTVIQSCGKWYISIQTESEVSTPAHPSASMVGLDAGVAKLATLSDGTVFEPVNSFQKNQKTLARLQRQLSRKVKFSNNWQKQKRKIQRLHSCIANIRRDYLHKVTTTVSKNHAMIVIEDLKVSNMSKSAAGTVSQPGRNVRAKSGLNRSILDQGWYEMRRQLEYKQLWRGGQVLAVPPAYTSQRCAYCGHTAKENRLSQSKFRCQVCGYTANADVNGARNILAAGHAVLACGEMVQSGRTLKQEPTEMIQATA

SEQ ID NO: 16282 - protein, 414 aa, unknown
  TnpB Polypeptide
MKHLINLTLYTHIQTTYGVSKRHANGIIAAANGELGSARECRKLHIKTLESKAKSCESWLKKAEKNLKNGRKFYAVKNWRNSKKGCGFPLSCSLKYRQTNWQNLRFQIHHKKRKLARYLQKLAVIKVAPIRVKVPKNQVFIVGCKNESFGNQACQWDGNNLRFRVPACLESKFGKYVESKIGDFPRNINRLPATGAKTWHFYYKAGKWCAAVQFTPLEVKRVSRYVDDGCIGIDMNPGSIGWAYIDTEGNLKAQGKIPLQTGLPNGQQQAQIVKACLELSVLAIKFYCPVICEKLDFTTKKEQLRERGRKYARMLSSWAYSKFYELLSSILSNRGIELIKVNPAYTSIIGLVKYLRMYGLASDEAAALVIARRGMRLSEKIPGSLTALLEVNSNKHEGEPVESTKYQNEVFRDN

SEQ ID NO: 16283 - protein, 293 aa, Calothrix sp.
MIVLEFKAKGKTTQYTAIDEAIRSAQFVRNKAIRFWMDNRGVGQKDLYRLSKSLRGEFPFVKALNSSACQASIERAYSSIARFYDNCKKSVLGKKAYPKFKNNSRSVEYKTSGWSLSETRKQITFTDKKGIGKLNLKGTWDLNFYKLDQIKRVRLVRRADGYYVQFLISSDNKVQFQPTGKTIGLDVGLKEFYTDSNGHSESNPKFYRTGEKRLKFRQRRASRKKRASINRQKAINRLGRLHLKISRQREEHAKRLARCVIQSHDLVAYEDLRIKNLVKNHCLAKSINDAGWY

SEQ ID NO: 16284 - protein, 398 aa, Calothrix sp.
MIVFEFKAKGTLRQYQQIDEALRITKFIRNKCLRFWMDNSKVKPYDLNKYTAVIANEFDFADKLNSSARQAAAERTAFAIKRFFDNCKAQVPGKKGYPRFQKNNRSVEYKLSGWKLSDDRKHIKFTDKCNIGQLKLIGTWDLHFYQIKQIKRVRIVKRSDGYYVQFCVDAERNINTQPTGKTIGLDVGLNHFYTDSQGNTVENPRYLRSYEKSLKRLQKQVSRKKKGSNNRKKAINRLGRKHLKVSRQRKDNAVKQALCVVRSNDLVAYEKLQVKNMVKNSKLAKSISDVSWSLFTQWLEYFGKIYGRVVVPVDPKFTSQNCSSCGEVVKKSLSVRTHICKCGCVLDRDLNASINILNKALKQTNYDLSTVGRTETLNACGETTLYPDLVTSLGKVAQ

SEQ ID NO: 16285 - protein, 399 aa, unknown
  TnpB Polypeptide
MTLTRNYKFRLYPNDSQDRKLQNNLAVCRWVYNKFVDSAKNGFVSRNDCNYYLTELKNQESWLYQYHSKMLQSISTQIDGAQKSLIEKSKKGYKTGTLQFCRYDDFRTFTYNQSGFKLERKGTADLLYLSKIGHIEIRQHREIPQNSNIKQVIVTKSKSGKWFACVTIDIQEPLMNIQTNSFSKGVGVDVGIKNFVYDSNGSKISNPKNLQKMLKPLKRIQRKVSRRKKGSNNRLKSILKMQKIHEKITNRRKDFQHKLSAQYAKNNDVVFVEKLQLTNMVKNHMLAQSIADASWGEFVQKLEYKCKMLVKVEPRNTTVDCSRCGNQVLKILAVRIHRCNKCNLVLDRDYNASINILKKGLNLLTRVDYTLPQELGKVTLVESAMHSLKQENATQLVGW

SEQ ID NO: 16286 - protein, 426 aa, unknown
  TnpB Polypeptide
VIVVHKVALDPNQEQETSFRKAAGCARFAYNWALAEWRKQYEAGGKPNEAALRRLLNAIKAETFPWLLEVSKNVIQQAIKNLGNAFSRFFDRLEEYRHEPDPRRKKRLGRKLGSPKFKKKGRCRDAFRADNGPPTTGADAVRVDGIYVVLPVVGRIRMRERLRFAGQIKSAVVSRTADRWFVSLSVAVPDEVLPRKSHAAVGVDLGIATLATVSDGRDPYEAPRPLRTLAKRRRRLGQALARKQGPGPGKVPSKNFLKAKRRLARLEARIANIRIHATHEATTDLCRTCAHIVLEDLSVSGMLANHKLANSLADVGFSEFRRQVQYKAKRYACTVQLAPRFFPSSKMCSKCGQINENLKLSDRIWTCPACGTTHDRDSNAAKNLASLAESTPATACGAAGAGPRRTPRTKLAATKQELNGGIKSQS

SEQ ID NO: 16287 - protein, 411 aa, unknown
  TnpB Polypeptide
LIRTHILPCTIPKARADELNRASGTIYTGVLVAHWRLVRKKGLWLSEASGTRWGDTRTAAKMHAHSIDAAQQGFYKACDVTRALRQAGIAEAKFPYHRKTFRTTIWKTTGIQREGDTLRLSGGGRTKKERDERECKIPIPERLRDCLRFIEVRLVYDKLARRYTWHVVVENGLKPKPAPGRDVVAVDLGEIHPAVVGDRERATIITCRERRHESQGHAKRLATISRAIARKAKGSRRRKRLVRAKARMKAKHERVMRDIEHKIGRAVVDVAVERKAGTIVIGDVRDVADKGDKGKVQNGRMSRWNHGKIRAYIEYKAAAEGITVAPPVDEAYTTQTCPNCGQRHKPRGRTYRCPACGFQAHRDVVGQINILSRFLKGDVGRLPAPTEIKHRIPHNLRVLRRCRDTGQGGAL

SEQ ID NO: 16288 - protein, 246 aa, unknown
  TnpB Polypeptide
VLDGAVKIPKLSPMEARIHREIIGKVKSITLSRTSTGKYFASILCEDAKGAPEKPDVIDADKITGCDLGLTHFLIRSDGRKQANPRYLIRASQNLRRKQKALSRKVKSSKNRTKARLIVARCHEKVGNSRADFQHKLSRALIDENQAVIVETLKTSNMLKNQRLARHINDAGWQGFVTKLEYKAIDAGKHLVKLDQWYASSKKCHRCGHKEIAMPLGKRFWQCPACQMEHDRDINAALNIKQQGCI

SEQ ID NO: 16289 - protein, 394 aa, Leptolyngbya sp.
MLVLEYKLRGKQEQYERIDNAIRTALFVRNSCIRYWTDNQGIDKYKLSAYCKVLAKDFEWAGKLNSMARQASADRAWAAISRFYSNCKKQIPGKKGFPRFKRRGHSVEYKTTGYKLSEDRKYINLTDGFEIGKLELVGTHDLHFYQPNQIKRLRLVRRADGYYAQFIVDVERSIELEPTKQTLGLDVGLLHFYTDSNGNKAENPRFLRKAEKSLKRLQKRVSKKFKKGQKQSNNYKKARQKLARKHLKISRQRKDHAVKLARCVIQSSDLVAYEDLQVRNMVKNHKLAKSINDASWYQFREWLEYFGKVYGRATVAVAPHYTSQECSSCHRIVKKALSTRTHQCVCGAELCRDQNAALNILRKGLNTVGHTGINAWGETDRYLAEETTLDKSIR

SEQ ID NO: 16290 - protein, 502 aa, Leptolyngbya sp.
MSSVTYQTKLPEALIPFCERMSSLMSGVERALYQDLEAGTDLAQLKREYQRIYGINARQFNSIYATLKGKIRSRAECHKRQLKQLRSQITDLEKLIKKWKKQLLKIPLACPLQPDAKTPRQSLRWKLHQKPRRLHSLRSKLAQLTQTKPRLIFGGRKLWTAQYNLESNGFVSHEQWLNQWQQHRNSQFYCVGFSDETNGCQICQLSADDTLKIRVAPVLEAEFGQYVQAEGIRFAYGQNDIDWARENHKAISYRFAQKNEQWYVFATVERPAVPHQSHRRNGCLGVDLNPGVIGWSYCDAEGNLKAHGQFRVTLQDKTTQQTKAIVGDVCAQLVGIAQSFGCPIVIERLDFERKKASMREQGVRYARMLSNFAYSLFDAMLFSRCERFGIELIRVNPAYSSLIGLVKFMQLYGLSSDTAAALVLARRALHKSERIPAKSASCLPVERHKHVWSFWNALSKKLKGMRRHSFFTSVAYSESEVSLFDKSARVDRSDGKPLALLN

SEQ ID NO: 16291 - protein, 235 aa, Leptolyngbya sp.
LGVTSLVALSTGEKIANPKGFRAKHRKLKKAQKALSRKQKGSNNRHKARLKVAKVHQEITDARKDSLHKLTTRLVRENQTIAVENLAVKNMVKNRKLALSISDASWGELVKQLEYKCDWYGRTLVKIDRWFPSSKRCGNCGHIVEKLSLNIREWDCPNCGMHHDRDINAAQNILAAGLAVKVCGANVRPERHKSDGSCEHSSNGKKQKDLRSDSWNHRGFSPVRMSMVQTDTTLK

SEQ ID NO: 16292 - protein, 659 aa, unknown
  TnpB Polypeptide
VECRRRRRAPGRVRRGGRRTAALRRARRAAHAERPRHADAPPSARRALPHVQQRAPPHAHTRAALARARRPARRVADTVGVRVDAARAPRRTLRHHDRGDRSRRARRGHRHLVGARGRPAGGHGRAPRSVSDRGRDLCPPRRAPGRPAVDRAGVRRGHVHVPRDGVQQPGARPRPRARPSGRAAATQRRTRPAIAVTAIVCPVSGCHSGMLVLGCVVADGSCGVAGDVAQRRRLVGLLRAGGDVWAALIEVNQARFRRHARPIFGYQAWCREIAGVEVGELSTAAMCSVVRRYSSACFEVAKRKRTGERAHYPRRKRGLVPLRWRTGTFTVEDRRVRVSMAQGAAPCWLRLSRPVPYPPASVRSVTLLVDAGRLVLDVTAGFDVEDHRLDPTRVAGVDLGIIHPIAVRSTEEALLVSGRALRAEDRLHLADTKARQRKMDPKKPRRGQRGSRRWRQLRAKQRRAAAASKRRVHQAHHEAARMLVDWAIAQRVGTLVVGDPQGITNQDAGVVHNRRLRTWRRTHLMRTIIDKAAVAGIAVERVDERGTSSTCPRCRRRVPKPSGRNFACPHCGHVGHRDLVAAHNIAARSGGTITTTPVVVEHRRVGNPTQRRDRRRHHMDQRRSCPAPGRPANPDGESLAAHQACEDQPTPRPNSANVG

SEQ ID NO: 16293 - protein, 402 aa, unknown
  TnpB Polypeptide
MQALLKAFKTEIAPTKEQKEKIIRSIGIARFLYNQYIAYNRKRYKMYQRGLLDDHQKHFVSANAFDKYVNHKLKKELPWIDTCGSKARKKALVNAETAFKKFFKGEALFPRCKKKAKQDVKLYFPKNNKGDWKIWRHKLRIPTLKQVRLKEFGYLPVGVPVISGTVSCKAGRCYVSVGVDIDEKSKYNKDLEASYHAITDGIGIDLGVKDLAIVSDGKVFKNIHKHSKVKRLEKRLRRAQRRLSRKYAFQKKKGGKTAAASANIDKQRRKIQKLYQRMDHIREDYENKVIHEIVKQPPRFMTVEDLNVKGMIKNRHLAKAVAAQRFHRLLTKLKRKAESIGIEFRIADRFYPSSKTCHACGHIHKGLKRKDRVYVCPACGYTEDRDINASLNLRDTEEYRIA

SEQ ID NO: 16294 - protein, 461 aa, unknown
  TnpB Polypeptide
LRSHAGAARKAHNVMLGLVIAVMGQRAAERSYGIAEARLTPCLSWSLAGLRKEWNRRKDEVAPWWAENSKEAYNTGLDALARGLDAWRKSRSGERAGKAVGFPRFKSARSRRSVRFTTGPIRVEADRHHVTLPRVGTIRTHESTRKLARRIEAGTARILSATVSEEPSGRWFCSFQVIVWRPVGVPGHAGAGAPAVGVDIGVKADALLVIAAPDSREIGRVPAPKSLTTAQGRLRAHQRKAARQQGPWDPGTKSRRPPSKRWGRTNRRIGRLHAHAAAVRRDVLHKATTSLAQQHRVITVETLNVSGMRSAGGAHKRGLNRALADASLAEVRRMLAYKCTWYGSTLVQAGRYYPSSKLCSACGRRKPNLTLADRIYKCGHCGLQIDRDLNAAVNLARLGEARQLMLAGEQGPAGSGPVAGRGATRETDPARAGDAGGCETSTPHRQQPGKTGTVSPQGEAA

SEQ ID NO: 16295 - protein, 627 aa, Microbispora sp.
VVLRLLEQRAQRLGDVAQAELLGLLHPLAVAAQLLLLQFEVEPQRLRAVGRDRDLGNADARHAAEEVDLLGQRARVVELLAEVLLELLDDRQVLRALDRRRVLDVLHDRAVLALQILVQEGDEGLRVHQSLGRSPVAFRRRGNAVPDRCSFCTHREFLSSARWIHSTVMMAVWLVRCAQPPVRRMTSDTTPSSPTCARSCPRWGRGPTSVRSARGRCSLTSRCGTSAAPWGMVVRRSYKFLLRPTSKQAVALSACVEDHRQLYNAALEHRRTTYRKAGVSVRYGDQSGELKHIRADDPDGQGRWSFSSQQATLRRLDKAFAAFFARMKAGRTPGFPRFKGRGWFDTVEWPRDGDGCRWDSQPEHPSATYVRLQGVGHVRVHRHRPVRGRVKTISAKREGARWYVVLSCDDVPAEPLPVTGAVVGLDMGVASLVTTSEGEHLANPRHLKASAERLAGAQRDLARKKRGSRRRRKAVARVAALHARVRRQRLDGAHKAALRLVCGYDVIVHEDLRIANMTRSASGTIEAPGRNVAQKSGLNRSILDAGWGVFLRVLAHKAESAGRELIAVNPACTSRTCPRCGYCAKENRVTQAAFRCQACGHTAHADINAAVNILRAGLALRDAAKAA

SEQ ID NO: 16296 - protein, 376 aa, Microbispora sp.
MVQIVKRAYKYRFHPTPEQADELARTFGCVRLVYNKALEERTRAYTLEGRKVSYVESSAALTAWKRADELAFLSEVSSVPLQQALRHLQSAFANFFAKRAKYPTFKSRKKSRASAEYTRSAFRWRDGRLWLAKMDGPLDIVWSRPLPEGAEPSTVTVSKDAAGRWFVSILVEEKIRPLAPTDNQIGVDAGITSLLALSRPIDGLTDEDGKVANPRYERADRRRLAKAQRALARKAKGSANRAKARLKVARVYVRITDRRRDHLHKLSTRLVRENQTVVIEDLTVRTMVRNHRLARAISDASWRELRSMLEYKAQWYGRELVVIDRWFPSSKLCSACGTLVESMPLNVRTWRCACGAVHDRDVNAAKNILAAGLAER

SEQ ID NO: 16297 - protein, 317 aa, unknown
  TnpB Polypeptide
MGIKKDMLKQLPAWCKPVPFQIKGIAIKEACNAFWKAKGKPAFRTRKNPEQSCFIPKSALSLKGIYSKISGKGLYFQETLPDNFKDSRLIWRHEKWWMAVPHKEKLIVGENQATKIVSLDPGIRSFITFYSPDHSGHLGKGDFSRIQRLCSHLDNLVSKRDLIKNKQRRRSLTKASRRMRAKIKNLITELHHKTAKFLTDNFDIILLPTFETKDMSNKTGRKICRKSVRSMLTFSHYKFKQFLKWKAFQTGKLIVDCCEAYTSKTHPQTGEIRNIGGAKWIKLSDGSRADRDIIGARGIMLRALSDSTMRNHTVNES

SEQ ID NO: 16298 - protein, 334 aa, unknown
  TnpB Polypeptide
MRIRRAWRYRIYPSKTQEHELNSYLYECKNLWNSLLEYTKSYYKKTRKFPKRSQLHLLTKEREIYSQVAQNVADRLTKSLKGTVARKKAGQKAGFPRFKPIERVKSFTYPQFGFRLNEKLELSGIGSIAIKKHRDIQGEMKTLTIKKTPSGRWFALFTTEIEKEIPQKKQGGPAAGIDLGIEHFAYLSDKTIIENPRHLKQAEQRLKQRQKQLSNKKKRSKNRRRARIKVAMAHEKLTNRRTDFLHKVSRKLTDKYSFIAMENLNIAGLAKGFLAKSVLDCSWAEFLSMLTYKAAEAGCEVVLVDPAHTTKKCSSCGLIQKKSLAECIEISMQR

SEQ ID NO: 16299 - protein, 449 aa, unknown
  TnpB Polypeptide
MGIAYRTLLLSYDLLRLPPEAAEKVSALLKVQEEFRRWAEGWLRGEAEKPRQNPLKYFTNEFLHAGKALDWLYGVKNGAKPRRLKPPLVFNAQLRLDKERDVSKGVFVDVPKREVRVRKLGGGTLVLPLGDKAVEWILARVREGGRLVLAAAWVGASRRSRAARLYVALVFRREVVPMRPRRLLVVDLNALHNGVSWAVVEGERILKSGVLRPAVSKLIHLQRRAAELDSLCANKDKACEEATAAKSRIWRILRSFGDEAVKKLIQLAFQYKAAIVADVPNDESIRGLKENNYSADKKVFLNFGHLRKKLKGLAEWYGVPYREERLYSTICPRCGAEMEEQPNRRVKCAACGFEIHRDEVPFYWAQKRFHELTSLFSKQIIKLLPSMFFMEFAVAPAGRGPSAWRRLGRQARSGLAPGEAGREAATPPRPARLRRTAQPGLQPPETAGS

SEQ ID NO: 16300 - protein, 174 aa, Okeania sp.
LIFNQQALINNYLSWKIRGLTNNENFFFSWSMVGQRGDQLLTEPLRGPSLLAKIHARIANIRKDAIHKLTTYLAKNHSIIKIEDLQIKAFLKNHKLAGAIADCGMYEFRCQLEYKTEKFSSQLVLVDRMFPSSQICSNCGNHRHQMPLKNRVYICPDCGHIEDKDLNASKNIER

SEQ ID NO: 16301 - protein, 359 aa, Bacillus sp.
MSQTITVQVKLLPTKEQICLLEQSSQEYIRVINELVSEMVELKKSTKKSTKDVLVNLPSAVKNQAIKDAKSVFSTKVKKSKYKIVPILKKPVCVWNNQNYSFNFTHISIPFMVNGKSTRLKIRALLVDKNNRNYNLLKHKLGTLRITKKSHKWIAQISVTIPTTEKTGTKIMGVDLGLKVPAVAVTDGDRVRFFGNGRRNKYMKRKFRSVRKQLGEGKQLNAIRQYNDKEQRWMKNEDHKVSRKIIDFAIYNNISVIRLEQLTNIRQTARTSRKNEKNLHTWSFYRLAQFIEYKATLIGIKIEYVNPAYTSQTCPKCSEKNKAQDRKYNCTCGFEKHRDIVGAMNIRYATGIDGNSQSA

SEQ ID NO: 16302 - protein, 350 aa, unknown
  TnpB Polypeptide
MIKTFKVKHNTDFSKEIEKAKAIAEFSLKNHCTSSAQVKQFGLKSIIANQIIRKITQNKKIKRIRRVNLIIPTQGLSYQKDFIWIPSLKLKLPFHIKGFTKINQIEINSEYCFVSCSFGEASMLKPNGYLGVDLNTTGHMAVLADPQTGKVWKLNKKSNHIRNKYRAIRRQFQKKKLFKQVKQLKDREHRICKDLDHKVTTFIVHKAKELNKGIRLENLKNIRNTAKTNHAFKPTLHSWSFYQFRQMIDYKAKLLGVEVEYIDPRYTSQADSKTGLLGQRKGKIFKTVNNTVEHADVNAAFNIALNQLNIAQLRAERDARKSHKENTPLTDLALKAPSNKSKKTLEPNAL

SEQ ID NO: 16303 - protein, 396 aa, unknown
  TnpB Polypeptide
MFRAYKMRIFPTEEQKVLIVKTFGCCRWYWNQALHDNIEYYKENGKGKITTPAKYKTENEWLKEVDSMALCNTQMDLQSAFSKFFSQPKTGFPKYKSKKRPKNSYKTTRSKGYEVTDDYIKLPKLKEVKLVNHRHKTGICKSATISLTSSGQYYVSCLFKEEVDLLPATDKEIGVDLGLVDLAICSDGTKFPVLRSLRKNLSKLKREQRKLSKMVYGSNCYLKQKQRVAKLHEHIANQRKDYLHKISHKLINENQVVCLEDLNVKGLLKNHHLALSISDVGWSEFVSMLQYKADWYGRTIQKIGRFYSSSQICSYCGYKSGKKPLHIREWTCPECGTHHDRDVNAAKNILQEGKRLLAASTCRNRQFMLSDKLSQPKNEIAKLNRVASSVLLGWSG

SEQ ID NO: 16304 - protein, 234 aa, unknown
  TnpB Polypeptide
MQMTATAKIQLIVPSEYYELLINTANTYRNACNFVSEYIFKTHNLKQFSLNQELYYELREKFGLGSQMTQSVFKTVIARYKTIQTNQHQWIQPEFKVPQFDLVWNRDYSLNQDCFSVNTLHGRIKLAYCSQGMEKYFDKEIYKFGTAKLVYRHKKYFLHIPVTFEVSECSDSDICNVVGIDRGINFIVATYNSKHQSGFVSGKTIKQKRGHYKNLRKQLQQVKTPSSLLLKKSS

SEQ ID NO: 16305 - protein, 671 aa, unknown
  TnpB Polypeptide
LRIHRLANFGRPLRHAGKHFPFQHVCERCSGGRWKAHRHFPQPIALKQRDTAPVCVPVLELDIQLELKATIFRDHVHRRRPGEPVRVSAFDLDGLIPREVLPLISEIYSRLSEGDQVLGFVESVTIGHVEHHRSSFSVGVGEAFRAAAIARLISRSTMPAILIATGSTGGILSSSPSNMAGLTHSPADSPHTALTVGFTDLPCSSSQTWDFVSPEASATCCKVISRSSRRSLMRVPSAGPSKRSLIPLLPFLCARIEGWGWDPLVLDCKWRRNKYSNEMIHRAYRYRLAPSEEQRAEFIRYAGVCRTVYNIAREQRHCHWRQYLRATGKHINFASQCAELTALRADFDWVRSVYQTCTAQAIRDVDRAFRNFFAGRAGYPSPRRKGVNDSFRYIGREIRVQRLNSKWSAIRLRGIGWVKFRDTRPIQGSIREVTVACAAGEWHVSILCRIDCDPLANHGPAVGIDRGVANTLTLSTGENISLPTSLVAIDSRKRRAQRALARCKRGSRRRMKRLASVSRLAARITAARRDWQHRVSTDIARRFGAVAMEDLNVKAMTASGPGKRGLNRSILNQGWGAFATMLTYKLEERGGTLVYVPAAYTSQTCSECGSIDRESRKSQASFHCRHCGHRAHADVNAAINILRGSTPAMRVEGAGCGPVEARTTPNPALAA

SEQ ID NO: 16306 - protein, 501 aa, Desulfobotulus sp.
MTETFIHEIPLITTPHDEAVLDVRLDAGRNLYNACLRESLRRLDLMRESKMFRAARKTPKSKERTALFNECNNRFDFKEYSIHAFAAKTCKACWLGDHLDAFTIQKTASRAFNAVKEYAFGGRGRPRFKRYGWFTSIEGKSNASGIRWRKGRVLWNGLDIASRFDLKDKHGVEAHALSCRVKYLRLIKRTIKGKICWFVQLVLEGKPHQKRKNELSEDICGLDIGPSTIAIVGTKNAVLTQFCDEVVQPWKEIRRKQRAQDRSRRASNPDNYNEDGTIKKGSRKWHRSNRYKKRQKQIAECQRKLAATRKKQHGELCNKILSLGKNVKTEQLSYKSFQKNYGRSVSVRGPGMFITEITRKAANAGGGVELINTRTTRLSQTCICGTIKKKSLSQRHHICSCGVTAQRDLFSAFLAKHCSNNTLGIHQANKDWSAAEPLLRRAMSRVTETASRRSVPSSFGIRRQSCSSVKDRSECIEVVDAVAVRREPRRDAALAVRTPWL

SEQ ID NO: 16307 - protein, 400 aa, unknown
  TnpB Polypeptide
MVNLWSFMVIYIQCPPCFKLFDKISNYFLIYEIILYICSMKLTLKIKLLPTDEQANLLLDTMKEANTVCNAISEVAWEKKIFNNFKLHHEVYHPYKATFKLSSQILVRCIAKVADSYKLDKKTKREFRPLGSIGYDSRIMTYKPNDIVSLWAIGGRIKIPFVCHNRNYIPYIKGESDLVYNKGKFYLFQTVDVPDGDIEDVEEFIGVDMGINDIIVTSEGVKQSADWVNQYREQRQKVRKSIQSKGTRNSRKLLKRLSGKEKTTATIINHTIAKNLVLTAKAEHKGIAIEDLTNIRFTTKRRNKKFRTKLGNWSFGQLRAFIEYKSRLHGVNLVVVEPAYTSQTCSVCHHIGVRKNKSFKCKNCGNDMDADFNAAINIATLGAAINQPEKSSMYCSLHAA

SEQ ID NO: 16308 - protein, 406 aa, unknown
  TnpB Polypeptide
MLVKGVVFRLGGELPSETRFLLEDFRLAVNNAIRAGLQARATSRYALTKLAYKDFRQEHPMIYSQHLVSAFEVAGSVLKNHRRRVRKGDSGRIPYVRRLFMKAENQAYKLDRVNGVVDLPIRAGCHVYLKLVLSDYHRKYLEDHSCALGSLTVFPDRVIVAFRKGTPKLYVQESALSLDTNERSLDGVFAKDNDIKTVKAEFPDITMIQQRHHDRRKRLQKKKAHDRRTSRRLCRREGAREHHRIDYKLHQLANAVLSFAENQKSAVVLEDLKGFKPTWNRQLNRRLSLWPRRKLHQIIEYKAQWRGIPVVKVDPRNSSRTCPICGRIQDSRMGAEFECGCGWHLDRHINASLNLLQTAISNGLEVAGGLRFNPGAFQHDVMMILYDPVTGARSEPNGTSGMTVAS

SEQ ID NO: 16309 - protein, 415 aa, Streptomyces sp.
VSIVQLRYSFRLYPTAGQRSSLAQAFGCARVVFNDALREREDARAAGLPFPKAAELSKRLTEAKKTPERAWLGEVSAVVLQQSLRDLETAYGNFFASLKGTRKGPKIRPPRFKSRKDNRQAVRFTANARWSITPGGRLNLPKIGPVPVRWSRVLPSTPSTVTVIKDAAGRYFASFVVETGPDLLPETGRAVGVDLGLTHFAVLSDGRKIESPKFLRRAEKKLKRAQQALSRKAEGSNNRDKQRVKVARAHARVADARREFHHQLSTSLVRENQALAVETLSVKGLARTRLAKSVHDAGWSAFLNMLGYKAGRAGREFIRIGRFEPTSQVCSHCGIKDGPKLLHVREWTCGDCGTVHDRDVNAARNIAKAAGLAVSACGAQIRPGLVPAPRGEAGTHPDAACSTRSVEGITGLQAG

SEQ ID NO: 16310 - protein, 414 aa, Streptomyces sp.
MAVVQLRYGFRLYPSAGQRASLARAFGCARVVFNDALRVREDTRAAGLPFVTSAELSKRLTASKKTPERAWLGEVSSVILQQSLRDLDTAYRNFFDGIKGKRPKTGPPRFKSRRDNRQAIRFTANAGWSITGGRKLRLPKIGEVRVKWSRSLPSAPSTVTVVKDAAGRYFASFVVETDPAADLERMPRADTTVGIDLGLTHFAVLSDGRKIDSPKFLRRAEKKLKRAQQALSRKAKGSKNRDKARVKVARAHGRVADARREFHHRLSIELIRENQAVAVEDLAVKGLARTRMAKSVHDAGWSAFVAMLEYKAARYGRAFHRIGRFEPTSQVCSNCGVKDGPKPLGVRVWTCGACGTVLDRDINAAVNVARAAGLAVSACGAQVRPERVPAQRGEAGTHPKSRSTTASQTGIAFH

SEQ ID NO: 16311 - protein, 433 aa, Streptomyces sp.
VAAFRPRGGPQCCDVRDSSCTDCPARLWVMTTTHVKRAFKYRFYPTDAQAAELSRTFGCVRKVYNMALQARSEAWTLRQERVDYNATSAMLTGWKKTGELSYLSEVSSVPLQQALRHLQGAFTNFWQKRAKYPTFKSRKKSRRSAEYTSSAFRFRDGRLTLAKMDQPLGIVWSRPLPQGAAPSTVTVSQDSAGRWFVSLLCEDRPSVPAPVNPAVGVDVGVTSLVTLSTGEKITNPRYGRKDRERLARAQRELSRKVKGSANREKARLRVARVHARIADRRRDFLHKLTTRLVRENQTVVIEDLTVRNMLRSRTLARAISDAGWTEMRSMLEYKARWYGRDLVTVDRWFPSSKLCSACGATAAKMPLNVREWACACGAQHDRDVNAARNILAAGLAVTACGDGVRPQRSTPGGQSSVKQETSRPQRSRAAAQP

SEQ ID NO: 16312 - protein, 413 aa, Halococcus sp.
MDYTLRFRAYPDADTASEAWRHIDIHRQICNHAVRDHYRTDYNDRPSAYDQHSKLTEWKRQWPTFADVSAHAAQQTVSQIHRDLTVLKEHRKNGRKTGRLKWQGAGEFRSVAYQSEGYNVNHTTGHDFGTLTLSKIGTVRFRVHRTVPDTDDIKRTILKKERTGDWFVCFVVEAEEPEKPNPENIDRTDCVGIDLGIQSYIHTSNDLAVDCLDLSDEYERYAREQRSLARKEHESNNWERQRQKVSRAKRHIKRKVLDFQHKLSTWLVKEYDVVAVEDLDVKPMLEGSQSAKNKQDAAWRQFITLLEYKGDLHGTYVETVEPAGTTKECNQCGVETAKPIWVREHSCPACGHTEDRDLNAAKNVLDRGFDKLFSDDDIGAGRSESTPVQTVLPTFARIQANAKHVVETGSPAP

SEQ ID NO: 16313 - protein, 393 aa, unknown
  TnpB Polypeptide
MTYMAYKFRMYPNTEQENLIIKTFGCVRFIYNKMLEDKIKFYECTKKRLNNTPAQYKKEYPWLREVDAFALCNAQIHLQAAYNNFFKNPKSGFPKFKSKKHSTPSFYQDNIKIQFTDTHVKVESFSMSKKQNKQKLNWINHSENIRIVDKTIKLPKLGMVKIKQHREIKQNQKIKSVTITRKPSGKYFVSILVEYNIVEKSVKLNKEKSIGLDYSSHSFYVDSQGVEADYPRFYRASQDHLSKEQRKLATMKKGSNNYYKQKVKIATIQEKIANQRKDWMHKLSTELSNKYDYICVEDINLQQMSQHLNLGKSTYDNGFGMFRDMLFYKLKQRGKKFIKIDKWYPSSKMCRYCGTINSNLTLSQRVWTCECGKVLNRDENAAINILNAGLSMI

SEQ ID NO: 16314 - protein, 371 aa, Nonomuraea sp.
LWAVAQIVKRADKYRFYPTPEQAGELARTFGRVRLIYNKALAERTRAYTIEGRRVSYVESSARLTEWKRSGEFDFLLEVSSVPLQQALRHLQTAFANFFAKRARYPAFKSRKKSRASAEYTRSAFRWRDGTLTLAKMDAPLAIVWSRALPEGAEPSTVTVSKDPAGRGFVSMLVEEKIEPLPPVAETVGVDAGITALATLSTGEKIVNPRRERADRRKLAKAQRSLARKQKGSANRARIRLRVARVYARIADRRRDHLHKVTTRLVRENQVIAVEGLTVRDMVKNHSLARAISDASWRELRAMLEYKARWYGRTLVAVDRWFPSSKLCSACGTLRHTMPLNVREWECACGAVHDRDVNAARNILAAGPAES

SEQ ID NO: 16315 - protein, 251 aa, Shigella sp.
  misc_feature (183)..(186): Xaa can be any naturally occurring amino acid
MRYRNSRQVTGVVKNVTVSQSCGTWYISIQTESEVSTPVHPSASMIGLDAGVAKLATLSDGTVFEPVNSFQKNQKTLARLQRQLSRKVKFSNNWQKQKRKIQRLHSCIANIRRDYLHKVTTTVSKNHAMIVIEDLKVSNMSKSAAGTVSQPGRNVRAKSGLNRSSIGIKTPKRLKKHHKTDVXXXXYWIRAGMKCAASLSTSSSGVAVRCLLFRQRTQASVARAVVIQRKKTACHKVNSDARYVDIQRTPM

SEQ ID NO: 16316 - protein, 385 aa, Hyphomicrobium sp.
MHLSYKYRLLPTRPQHVALGRVLEDQRQLYNAALQERIECHRKTGKGCTYIDQCGGLTEWRREDADAAAMPLCVQRWTLRRLDDAYKAFLRRLKARTGKAGFPRFRGKGCWGSFGFNEFSGIRFDGKRFRFRGVPGGLRVHLHRELPKGKICSCVFTRDAKGWSVCLQVRVEAQEKRSVSTSVGIDLGIKVFAYQSDGVILPNPRVARKAERRMRIRQRALARCKRGSNRRRKVKAELSRLHRKITNTRSTWLHQQSARIANSYDLIAAEDLNVKGMAKHPTLARSIHDASWGKFISMLSYKAERAGSTFITVNPRNTSQRCSGCGEIVPKTLAVRTHSCPSCGLVIDRDHNASLNILQAVVGLGQPNVADYGKRAARNLNEATN

SEQ ID NO: 16317 - protein, 336 aa, unknown
  TnpB Polypeptide
VQVRYRYRIYPAPGQQQALAQACQDARRAYKNWFDSLTGRRKGPKIRHPRPRRNHGRQSIRLTRNGFALHGQRLYVAKAGDVKAGWSRCLPSVPSSVTVIGEPDGRYYASFAVERDTAPLPACDREIGIDLGLNRLIVTSDGEAIPNPRFLRKADKRLRRAQRVMSRGQEGSANRAKARHRVAVLHRKVRETRLDHAHKTALRLVRDNQAVYAEDLAVSGLMRTRLARSVADAGWSQLIRCVEEKAVQYGRTFARIGRLEPTSQVCSACGVKDGPKPLSVREWVCVTCGAVHDRDVNAAKNILAAGRAERLNACGADVRTHLVAAGAETGTHRSAA

SEQ ID NO: 16318 - protein, 375 aa, unknown
  TnpB Polypeptide
MQRFQLTYKFRLYPKKEQEERLLETLELCRQTYNYFLEQWNGKIPSRFELQAQLPKLKQEKPELNKVYSKVLQMVLYQLYSNLKALSQLKKNGKKVGKLRFKGKGWYKTFMYNQSGFKLLIKTGKRLDLLRLSKIGDIPIRIHRAVEGEIKQVIIKKHNSGKWFACIYVEKEIKVIRRELKKAIGVDVGIKHFLTDSEGRQIENPRFYEKTLERIRVAQHWLSRKKKGSRNYEKQRIKLAKLYEKLTNQRDDVLHKLSRFYINNYDVICVENLSIANMVRNRNLAQKILDASWGKFLQLLEYKAESAGVRVVKVSPRGTSEGLSYENPLRDWISARRILMRGWNSPDLPAEMEPLLVEIPASSIIEAGSPLLCKG

SEQ ID NO: 16319 - protein, 565 aa, Streptomyces sp.
VARKRKEKRKLRVLAAPFTVGAPAGARIRDRLRLGAVDEKVLRLVGEHLGRHQRADLAERVRLGSVRAKDARRAERKKKLTAVSSSRWAGAMTRASEDQYQLSMRCLHDARSGLRRAVRTITRRLAAPCGKRAKNGVRGYADQNERAQKQRRMQVLKARLAVVEARIASGRPSITVGGRRLAGLRHHLADAQLTEREWLRRWEAARLFLTADGESGAPWGNYTITVDPDDGTVSLVLPEPLRHLANAPRGRYRLACSVAFHHRRGEWLDRVMAHRAVRYDINCDPARGRWYLDASWSADTTVLPTPDQLKASGARLLGVDLNADHLATCVLDPHGNPIGDPLTIPLELTGRTATRDGRLRAAISHLIALAREHGCAGIAIEDLGFADARATGRETMGRGGRGMRFRRTVAGMPTARFRERLRGMACHAGLVVVAVDPAYTSRWGGRYWTTPLQEQSKKTTVTRHHGASVAIGRRALGYGIRRRPGVTARHRRMAARRATGQAVSLPRVCGTASPPRTAGTPTRGGKTRPCQGDQLALFPGPQDRSEGHRTDCPDYGELANSVQQT

SEQ ID NO: 16320 - protein, 359 aa, unknown
  TnpB Polypeptide
MWRYLDHHDVRLQKAMRRNYLSLAMCYRNMDVLLIYLLSFFWNMDVLVTPNGIVKSILDVVSDSWLSARARQAAAHEALSMIKATRNRWKENAVKPLHRGERMMVSSTIALLEEAESTSEFDAWLHLRCIGRKIILDLPIRFHKHFNRLARKGKRLNSYIITRKDVQFVFDLEVPEPRMEPVVGVDTGINVLASLSSGEQLGEDVRAGIDRINGCQHGSNGQQRAVRALKQRIDETARDVVQKCGTVVVENLKGICNRTKERVGKTTRRLLGRWQVRHWMTRLEQRCQMEGRSFHVVSARYTSQTCHTCGHVEQGNREGRKFLCRKCGYADDADINAAKNILSRFLTGAACGPGSKALA

SEQ ID NO: 16321 - protein, 304 aa, unknown
  TnpB Polypeptide
MQKGIKFRAYPNKKQKNLIDRTLGCCRMIYNKGLSMREDAYKSGEKVNYSQTSAMLTALKKDDDYAFLKEVDSIALQQSLRDLDRGYVNFFQKRAKCPTYKSKHQNRQAYRTLNQKDNIRIVGKHIKLPKIGLLKIRQSMDAGHINNVTVEKTPTGKYFVVLNVDFEPVRIANGGGRIGVDVGIKEFYTDSNGAVVENPKYLESSLRKLARESRRLARKQKGSNNRRKQRLKVAGVHERITNQRNDFLQKQSTMLVRENQTICIEDLNVKGMIKNRRLENPSRAFRGRSFSRCLNTRQSGTARP

SEQ ID NO: 16322 - protein, 568 aa, Virgibacillus sp.
MSTKTYFSNRIYKHTLPNEFVITISNALSAFNRAKHFVFNSLVKEKRSGKQKRDKSLHLITKEKFQLDDYYANSAVQAANAQMKSLDELKKLYIGNKKAQIKATKKKLKKDRSRLTAIRKIKTSFTKDNPNFPKRAKEQKIGNYYAVCFKKQTDIYYHAYEFEHNYLDPNIKELKTRIGFLTSKLNRLEEELKQLETGVPSAVFGSKKLFKSQYTKEHYFNDHETWQKNWKHARHNKMVISGRKDASAGNFVFNYDIEDKKLHFKTPDRSFVYVEDVLFPYGQDQIESAIKTQMNSKDKKKHGEPFAWAVEDYGDYYIFKCMIDVESGTQVSYSKSEGVIGVDCNVDHFAIAQINAKGQLLSSHVMPIDIQNKKSGQITKIMEAEAIGIVNIALKVNKPIALEKLNTTISKVSNPYGNKKANRKMSMFAYKKMITAIKVRAEKMGVAVFDVNPAYTSQIGKIKYMKRLGISIHEAASFVIARRALGFKEKLPPVLRALLPEKIIGAHHWVQWRFVSKHLKGIRTHTFYLSEFFDADKFRQTGELFVPGALTDLEQKRLSKLKSRKSVP

SEQ ID NO: 16323 - protein, 403 aa, unknown
  TnpB Polypeptide
MNRVERHIYPSSQHLIDLAFKSKNIYNCATFIMRQNFIRNDKIISYSTMDKILRRDYPDAYRGLPAQTSQQILRLVEKNWKSFFKAIAAFKKAPEKFTGRPKMPGYKDKGKGLNVIIFTNQQCKIKNGKITFPKAVGIKPLTTKVENLQQVRIVPKFKHFVIEVIYHKEAVAQDVNQKNVIGIDLGLNNLATLVSNQPDVSPMLINGKPLKSINQFFNKKKAEAMAFIGDKGSSNRIADLSNKRTNKITDYLHKSSKAIVDYAIETGTGTIIIGENKGWKQEINIGKKNNQNFVSIPFDQFKSMIAYKSEENGIMVIFTEESYTSKASNLDEDFLPVFKEGQKHTFSGKRVKRGLYRWSKGFINADLNGALGIIRKVVPESLEEILKIRNRGFGFKPFRVLAF

SEQ ID NO: 16324 - protein, 393 aa, Okeania sp.
MHIPEFRVQRRDGRKKDSNGNPITKKGDKHPNIVNGYVLWETVQLADLAQTKKLFPEYKSMHSQVLQDVVQRVQTTMDNFTLPNKNGKTSGRPKFKGKHYYNSFSYPQLSNAIPVKNANGRFCVNLPKIGLVPLVYNRPIPAGFKVKTGTVIREVDGWYINFTIEDKTVPVEVAEIQPTLKNSKGIDLGLLHYAVTSDGEFIEVPKFFRLSEHRLSKLQARLAKKQKHLSPWKIIKRKIAKLHQLIARQRLDWQFKLAYHLFSDVSVIFIEDLLLDNLVRRCKAKLGENGQFLPNGQSAKSGLNKSLQDAAFGQFIHVLEYVAWKLGKRIVKVDPKGTSQHCWECLNRVSKSLSERWHSCPKCGQELDRDYNSALLIQKIGLLSTQGEDITWC

SEQ ID NO: 16325 - protein, 206 aa, unknown
  TnpB Polypeptide
LCCTDIEFTSLPKTNSNVGIDLGIVDFAIMSDGNKISNPKFYEVSEKRLVKLQKELSRKTIGSSNWNKTRIKIAKLYKHIVNQRTDFLQKITTQLVKQYDIICIENLNVKAMKETDNKIRNKRVEDVSWFEFRRMLIYKCQWYDKTLSVINRYYPSSQICHCCGKSSGKKTENIRMWICPNCGAKLDRDINASINILNEGLRILNI

SEQ ID NO: 16326 - protein, 382 aa, unknown
  TnpB Polypeptide
MPILKTAYKFRMYPNGQQEAQLDLALDTCRHLYNTALADRKNSYEMKGISRTYEDQAAMLTIEKKDGNFKGVFSQVLQDVLRRLDKSFKAFFRRVKSGENPGYPRFKGYGWYKSFTYPQVGFKLDGSKLTLSKIGSIRIFKHREVEGKIKTCTLKKDNLGHWYAILVAEIDDVPLIESRTTIGVDVGLKSLVALSTGETIQYPKYYVRAEQKLAVAQRDLSRKKNGSSNREVAKTRVARLHQKIQNHRDEFLHQVSRKLVDSADLIVFENLNINGMLKNHHLAKHIQDHAWGKLIQFTKGKAAKAGKIVELVDARYTSQKCSQCGIMVPKTLKDRVHHCTNCGLKMDRDINASQNIRTLGLRGRACQEIGSTDSMKQEALPI

SEQ ID NO: 16327 - protein, 531 aa, Streptomyces sp.
MVPGPCGVAVRDRLKHLTPQDENVLRLVGEHQGRLASRDLRARCADALEHGADTWASCKRDLTVLSSSRIAGAITKATHDQWALARRCQAAHIQTLESGIRTLRHRLSLPIGEPGTKRAAGGYRSKGEWFRKSRRLAALEARHDAAVRDRQPGQVRVVRGSKRLLNTRHHLADAHLTEGQWRERWEAERWFIAADGESGKRFGNETIRVTRDGEVSIRLPAPLAHLPNARHGRYTLTSTVAFAHRGQEWADRIAANRAVAYRIHLDTDRGRWYLTASWQRPTVQTIPLETARARGVVGVDTNADHFAAYHLDPHGNPIGDPHRFGYDLSGTAAHRDAQIRHALTRLIRWAKQTGATAIAIEDLDFTTEKTREKHGRRKRFRQLISGIPTGRLKARLVSMAAEQGLSIVAIDPAYTSLWGAQHWQKPLATPHRTMSRHDAAGIAIGRRALGHPIRRRTAPPPHDRSDRAGHRTAQAPPGTRGRDGIRPPATDRLPGGPSPNGKRKRGPSASNTVRDAPRTQQWVQDSLMHTG

SEQ ID NO: 16328 - protein, 106 aa, unknown
  TnpB Polypeptide
VKTKPCKVVVETLNIKGMMKNRHLAKAIAQQKLYDFKLKLQYKCEKCGIELVEADKWFPSSKMCSSCGAIKNDLKLSDRVYKCNCGLVIDRDYNASINLSRYELVV

SEQ ID NO: 16329 - protein, 1096 aa, unknown
  TnpB Polypeptide
MGDWKKEARKKKAQDEAIDHCFIDADKLPLSDAEKQQKALECGAKVLVMPLKDLEVWNAAHAKEAPPSPPPAEPPPSPEATLYAKYQGCQEESEKATSPEEKEEYLDYCQTKVVQEYQRALAKLEGQAQAQRKTLPIPSTERREQLREFCNEEEPCTQRIVSYHLDPSVITKVGPLYELRDEGLRFGVARPTREGASRVQGEGPIITRKFTLIPIEGPRNQLPVPEQFFVLFQKIVNQMIKLGMDDTTLKTGLEVWRNRAEKELQAIETKLKAAGVSPSGASEDAEEPDQVDSEELKDIEGDDDEVEEAVAPKVGTDITNLRQKWQNKQRQVRWLNGCYANSNVLFAKVGLISVENFYLTLQKVPAFGKFRARCKTGVFKFLRATGPLQLTARVWRAAAQFAYFSVREYRRLLRTLPVIITALGKLPDPTVLLERGFPEQEEYEAVRNAVTVPGLYLKAGHISKVALGGWCRHVRNFVKRDLVATQTTAIKRLIQTSALTPTLQWSLETWLAGALEEQLKAFLKTLSRRLTKRVKRVQYEHKRQEKAKRRGKSVHSSTFGKGSLDKTILGILGGRKIVELTPATWKTLVKPWRGAAYTALKARLGQVPVTKIVQLALAEAIRGLTPTRLLARLWAQRPRYVTLADASWETFQKFLEAGSISEAESRIAEDLRPHLRSVIQTSLSSFQTHLTEQKVPPPVFTKQTIPLGTADTQMYEVPILTAAGPRGILKLLKSGPNLQDPIIPIPFTLHTPRRFQTFVDQNYSQGLGTLQRKGARLILAIPFQRTSQTPAAEVSLQPEELSLGGSIDLGLKTLVVLHKAPVKQVAEGQWEEVKLKGGEKTPEQKERERPLFIDQRYLEGERSGWIAQHSSPKLKSNPADSRHMRNQKARRRRHKSIPMGFNWKRRLTTLQEIARQRQAAMATYRQETRVKSKKDKKYNHKWGYWRLRREYKQAWQKIQDLHKELAYQLATRVIAACQQAHLMVLRMEDLSWSQHSPKWKAGGFLTTWQVHWFFSQVQGHITDLAARIGLRVEFVNARHTSTRCSHCGHEQKENRDKKRFRCLKCGFRLDADLNAARNILVAPLSNSPDAIASVGR

SEQ ID NO: 16330 - protein, 426 aa, unknown
  TnpB Polypeptide
VEYRRTAVIKLDVPQDADASLRETVGQFKHCANTASEWCWHGSDDGYHVTSKAKAERALYDQLRDETNLTVNLVQKGVRRAVEAVKSGVARLKRGERTSQPYFSADSAVYDKRSATFYRDHVSLSTVNGRVKCDYTLPDDPDRHPRTYLEDEDYEFRMANLQRRDGEWFLHASMRKVEADDPEPDTEHRTVLGVDLGVNNIAVASTGTFWSADEFNHWRREYEKCRSSLQQHGTRAAHEAIEGVGRKEYGRFEIYLHGVANELIEEAVEYGCSHIVFEDLTHIRENIPKATWQHVWAFRRLFQYVEYKATEHGVGAVQVPPNHTSQRCSTCGCTHEDNRDGEHFECLKCGYQNHADYNAAKNIGFRYLRRRQNAADGGAPVDVALNRGMLNVSGEYAPPATTDGGIERESMRKPSPQRARSSDRAK

SEQ ID NO: 16331 - protein, 252 aa, Staphylococcus sp.
LYGNLNVDDVIRFLSKEITKEDIKNINIDEDILNQYSTNPIEIIDANFRTVKIIYDYIQEVYREDIDYLGIDLGTKVFMTCSDPYLEHTYAVNNEQIFNALAKYRNKTKDVNVTKDELNQKFKKQIEAPISEVIKQLSRKYKSDITYVIGMPNHVNLSEEFDILSNMVISLFKKYRRKYGYEVYYIFEQNTSITCPNCNSIDKKYRKPNNSFCCSNCGFKHSNDDEVAASNIVNRYLKKYKEPRHGYDIKQR

SEQ ID NO: 16332 - protein, 378 aa, unknown
  TnpB Polypeptide
MIRGEIVRLFPTPEQEKIFRECIGYARFSYNYCKSYDDNYVKTHNTRLSIYDLPKLLRQLKHSGNYDWMKKLPADIAKQAARDFAKAKSNSKRIYKNANHTSYKKKHDHKQSFFCDPYKTKIKSNKKVYISKIGDVKMSRKLPKDKKLKNPRVVYQYGKWYLSVSFEIEPKEKPILTEDVIGVDMGLKDLMVLSDGTVYENINKQSKIRKLDKEKRRLESSLARKKVKNAKSQSKNYYKTRTKYYKVIEKMNNIRKNHRHQVTRNIIDKNPKRLVLEDLDIKDMLKDVTKAKAISEASWYTLRVYLTYKAEESDIEVIMADKYFPSSQLCNCCGYKNKQVKDLNIRTWSCPKCSINHNRDLNAALNLKDYPDKYCTNL

SEQ ID NO: 16333 - protein, 390 aa, Cyanobacteria sp.
ILNVAKIRLYPNSQQKQLLEQSFGNCRWVWNYCLNLINQAYKKTGKGLSGYEVKKQLPALKKKHEWLRLTYSQCLQQTCLNLGVAFNNFFEKRAKYPRFKSKHGLQSIQYPQNVQLKDRGIYLPKIGEVKAIIHRPIEGKVKTVTVSRNPSGRYHASILFEDGKDKPEPSTEGKAVGIDLGLNHFAITSDGSKFDNPRWMDRHDKNLKTKQRQLSRKEKGSNNRNKARKKVAKVHNKVTRCREDFLHKLSRKLVDENQVIAVENLNVKGMVKNHNLARAISQVGWGGFCTMLKYKAEQEGKMYVEVDRFFPSSKTCNVCLNQVDGLPLDIRSWTCSNCGTKHDRDINASRNIRDEALRLISCGTRDEAYRPGVRPNRGGRKKSTIGYSVG

SEQ ID NO: 16334 - protein, 402 aa, Cyanobacteria sp.
MLSLNYQYKLKVTKSQASTINEWLDVCKTVYNFALRERKDWVNSRKCPIDRCSIDSEYIIPADAARPTYANQCKSLGKAKKEFPRLNIPQSQVLQQTLKTLDEAFCNMWKKGFGFPRFKKKMRSFVLPQVKSDCIQGKTITVPKLGKLKLVFSRKVPEGFIPKQVRVIKKASGYYVNLTLQCNVEVPEIPTHGYPIGIDLGLNQFLATSEGELIKDHKFLKKYQGKLKLLQQKLKNKKKGSRRWRDISRRIARTYEKITNCRKDFFYKIAHHLCNQAGMIFVEDLNLKALARSALRKACLDVAWGTFVNILSYVCWKRDIYFAKVKANGTSQICPECGVNCGKKKLSQRVHKCSDCGYQQDRDIAAVMVVKKRGESTLGTRGRKLAEGNGFGDEAEVLSRAT

SEQ ID NO: 16335 - protein, 390 aa, Cyanobacteria sp.
MPTRRVTFRLYPTNSQEQKLRWARAMHKELYNSALANRKTQYQKFGNKVDYYQQQGSLPAFKEVWTEYKLLNAGSLQATLKRVDFAYQRFFQGLGKYPRFKSIRHYSGWTYPDSRQGFKAHTTGINGYLELTDLDIQVQMRGQARNWGRPTTCTIVYRNGKWYASIAVDIPSIQRELGMGAVGIDIGCKSALAITDGEHHQLVEAPLFLRHAEARIKQVSKSKRRRRAPNRKSKVKASRRWKKASSRVGKLTRKVANQRQNWLHQVATQIAACNSLVATEKLEVKNMTRKAKKGKRRKQKAGLNKSILDVGFGMLKSAIKYKVEEGGGQFIEVPTKKVKPSQTCPKCGNQHPKTLDERVHQCSNCGYQQDRDIASAEVCLYWVKGTLPGP

SEQ ID NO: 16336 - protein, 358 aa, unknown
  TnpB Polypeptide
VDSKALQTEWRHLGWAYKNFFRGLKNGQDIGFPKFKSKRDRQSYTTYSINNNCKIDFERKKVKLPKISWIKYRDNRVFEQDIRHITVSKTRSGKYYASILIEIEENIKPKQGIDEDKIVAFDMSPSKFLITKELGLSSPHFYRNEETKLKKLHREVSRKTKGSNNRKRAREKLATLYEIIRNRKKDWMHKMTHLLSEHFDCVILEDLNIKGMQTFSSGLSKSVSLDFSWNKFLNLLKYRMEEKGKHVVLIDRYFPSSKVCSNCGYKNDSLTLSDREWICPNCNTHHNRDVNASQNIRKEEIKQLKDKNITIITHNDSAVGTTVNAFGEDVRLMVCQQSSMNYESIALYFGRGSSTNFY

SEQ ID NO: 16337 - protein, 495 aa, unknown
  TnpB Polypeptide
MSHLAVEVRGISSYSTYVVRNDTQLDVGLATAGAVQPATAGRRAGVTLPDFLVTGKSGRSRKEALIQHRVVTEYRSWQERVKAANGESDKYISQGWKRTMNAAPPTYGEGDFINLGAVDRKYALIENNPFTDGEIILKMVIRGAWYRLIFPFDNKRFTEGKVTLPVVKVEDNQPVFIFSVATDNPVVQFSSDYTIGVDVGINNYATVAVRDTKTGKITYQTTLSQRVHSLWNSVRASEKQVRQLREKAAQLLEDRPYERQAIMAALDEAQLHRAAASRKKRELAILAAQEIAYLSHQFNNAVVTVEDLSWITDTMQNGRWNRGELVKWLTHYVSQNGGWVVAVSSFNTSQVCHTCGSEVTHPKYKVSQCAKHGIMDRDVNAAANIAARAVPRVEKARKTRAKSRKLQEQEPLKTPVTRCSLKYPGRDRTKNAPTPKRKKKKGVKTLSSPARAQAKCLGATVLADCNTCSINVAETSPAAIKQGEKTYTCRLHNPN

SEQ ID NO: 16338 - protein, 492 aa, unknown
  TnpB Polypeptide
MSQLASEIRDISSYATYVVRNDTQLEAGLVKAGAVQPTTAGRRAGVTMPEFLVTGKSGRSRKEALIQHRVVTEYRSWQERIKAVNGESDKYVSQGWKRTVNDSAPTYGEDDFINLGAVNKQYAAIENNPFADGEINLKIVIQGKWYRLIFRFDNKRFTEGKVTLPLVKVEDGKPVFIFSVVTDNPVVQFSGHYTIGVDVGINDYATVVVRNSVTGKIVHQTTLSQRVHSLWNSVCASEKQVRQLREKAVSLSLYDRQAIMAALDEAQLHRKAASRKKRELAILAAQEIAHLSHFYGNAVVAVEDLSWIRNTMQNGRWNRGAFVQWLTHYVSQNGGWVVSVSAANTSQVCHVCNSEVTHPEYKVSVCAVHGVMDRDVNAAANIAARAVPRVEKARKKRSKNSKLQPQAPLKTPVVRCSLKYPGRGRTKNAPTPKRKKKKGVKTFSSPARVQDSYLDATVLADCNTCSVNVTETSKAAINQNYVTRDCRLCSLN

SEQ ID NO: 16339 - protein, 348 aa, unknown
  TnpB Polypeptide
MILTFKVKHNKNFAKELEQAKKIALFAINNRHSLSSKNVKHIGLKSAISNQILRKYGLNRKCKAIRSVKLIIPNPSIRVDQKERLIRIPCLKLELNYQFKNTFAKVNQIEIDNVYAYVSCWFEDGKPKKYTNNLGVDLNTTGHCAVVAIPKTGKVYKLGKKAEHIHKKYNSIRKNLQKQKRYKLLKKVKNRESRIIKDLNHKISKKIIDIAEENKCNIKLENLKGIRRSAKVRRSFKYALNSWSFYQLQQFIEYKAKQQGLVVLYIAPEYTSKSCSRCGHIGNRNDKIFKCPHCGHVDHADAQAAFNIAKRQISIDRLNVDRDAFKGNTDIPRKATSIELLDLRTPRL

SEQ ID NO: 16340 - protein, 483 aa, unknown
  TnpB Polypeptide
MQMKTITLSQRLYYKELDEDLYPMIRHDLMLYSSILHTAYHQLYDIRFHNVPKPKNMIRDLKLKYGTNDYLPLAAVHEARALLKASIESNRLHQKKVEKKIKRITNRMKNNEKKLQKIDKQLQMFIEKSHHKKTTKADYLEEVQVWKPKKKQLKNEQKMLLFRLHREEYRLSGLKKRVKQCCFGGRKQMKQRTTMPYEDWKREYRLKRTSRMLIPGRRQGKYGNNLFKYHVSENKLIYRSASGRDIELPIEFHYQKEELIRAVKMKHNTPGKAICYELRDHGEYFIIKAIVEVVDKDIQMQTCNGVYGMDLNIDHMAVSETDANGNLIRMKIYTYDLKHKTSNQRKAILRDTIKNLGHDLKGNRKPLIIEKLSFENKKEQMLYENKRQNGILSEFAYGQIKTMLYSRMRKDDIMIQETSPYLTSQIGRLKYSRRMGMNIHMSASYVIARRGMGLTERIPEELKCYGKKNVKRITQWKKISKEV

SEQ ID NO: 16341 - protein, 395 aa, unknown
  TnpB Polypeptide
MYLVEQHIINNKHLFYNECDYLCFQSKNIYNQGLYNVRQYFFENKKYLNYYSNYDITKKQECYSYLPTKVFCQTLKIVDRNFKSFFGLLKNKEIDNKIPKYLDKVNGRFITIFPKQALGLREFKKTGRIHLSKTNIYINTKIKDFNLIKEVRIIPKLKQYVIEIVYECDCKKLEYNGNIAAIDLGLNNLATITYNCGYKPEIINGKPLKSINQYYNKNKARLQSQLKNNKKTSKKIDLLTNKRNNKINDYLHKASKELVNQLVSKNITLLVIGKNKNMKQDINLGKINNQNFTQIPIMKFANIIKYKCELVGIEVIFNEESYTSKCSFFDCEDISKHENYCGKRVKRGLFRTATNKYVNADVNGSYNIMKKAIPNAFANGIEGLGVNPLVLTIKK

SEQ ID NO: 16342 - protein, 349 aa, Noviherbaspirillum sp.
MLLVYRYRVKSLNGLLNRQARACNFVWNYCNDRQKDALRFGRPWLTGFDLNNLTKGASKELGLHSDTINAVCEQYAKSRSQKKRPHLRYRGKKHIGWVPLKGRALKREGNAFRFAGNTFRVFYSRPLPDGKIKDGTNFSQDARGNWFLNIVIEIAVDAEARQPLRGVGIDLGLKDFATFSTGEKIEAQSFYRGMEKALAVAQRARKKNRVQAIHRKIANRRNDFHHKLSHRIVRDFDYIAVGNVNAAGLAKTNLAKSVLDAGWSSFRHQLAYKAVKHGAWFEEVNESFTTQVCSNCGAMPDSRPKGIADLGIREWQCCECGCVHDRDTNAALNILRRGRATLGVGILIL

SEQ ID NO: 16343 - protein, 390 aa, Microcoleus sp.
MKKAYRYRFYPTAEQEKLLRRTMGCARLVYNKALAARTIAWYERQEKVGYAQTSSMLTNWKKEEDLDFLNEVSCVPLQQGLRHLQTAFTNFFAGRAKYPNFKKKHNGGSAEFSKSAFRWKDGQVFLAKCTTSLPIRWSKQVPLGCVPSTITVRLTPAGRWFVSILVDDYTIKPLPRIEKSIGLDVGITSLIATSDGDKIANPQHFKKLRKKLKKKQKALARKHSGSNNRQKARVQVAKIHAQITDARQDFLHKLTTQLTRENQTIVVEDLAIKNMVKNHKLALAISDASWGELIRQLAYKCQWYGRELIKIDRWFPSSKRCGNCGHIVDKLPLNIRDWECPKCGVNHDRDINAANNILAAGLAVSVCGATVRPEESKSRRAGALKQKPDQ

SEQ ID NO: 16344 - protein, 331 aa, Microcoleus sp.
VRTAYQYRLRPTNQQAHNIDRWLSMLCAQYNYLLADRFNWYEQNRCPINVCPLVCHIPELRDNPDYYSQKKTLPSLKKTHPHYGEIYSQVLQDIVKRVKVTFDRFLKGDSNGKRSGRPRFKSRDRYRTFTYPQMKDGCLQGNLINLPMFGKVKIILHRPIPDGFKIKTASVTKKVDGYYLTLSLEDATVPTIKPDFNPDSIIGIDVGLKEFLTTSENETVAIPQHYRQAQKRLKVIQKRVSRRKKGSNRRQKAVKQLGKQHKKVADKRKDFHFKTANNLLKKYDVVAVEDLNVNGLARTRLAKSVLDAGWSSFLSILTNKAENAGKVGDPS

SEQ ID NO: 16345 - protein, 463 aa, Streptomyces sp.
VRRTARTADAPHRAGRRRRHAGTSSQKQSAHDEGNAQCLPVLIDRPSVINQLSTVTHVQLRYQYRAYLTPGQRTRAARVFGCKRVVWNDAWAIVTPRKRSNKLLGNPKNRLAQGPYRGIPSAAELGKHLITEAKKTEDRAFLSDAPVGVLQQTLRDFDKAWKAHEDSKTGKRPGPKVAPPKRKSRKDNRQTARFTVSDRFRLLDDGRLRLPKIGDARVKWTRDLPSAPSSVTLVKDRSGRYWVSFVVETDPAQDMFPPTDGDQGIDLGLTRFAVLADGTHIASPKYLRRAEKKLRKRQRELSRKKKGSNNRDKARIKVARAHAAVADARRNFHHQWSHKLTSENQAVFAETLNVRGLARTRLAKSVHDAGWAQFVGMLEYKATRRGRSFTKVARDFPSSQICSACGHRDGPKPLNVRTWTCSEPTCRTRHDRDWNAGRNVRHEGRRILAATSPPTPGPGARRR

SEQ ID NO: 16346 - protein, 285 aa, Streptomyces sp.
SRSTFTWCDGRLTLAKMTAPLDIRWSRPLPEGAKPTTVTVSRDAAGRWFVSLLCEDTIAPTPATDAAVGIDAGITSLVTLSTGEKITNPRHERRDRTRLAKAQRELSRKPKGSNNREKARRKAVRVHARIADRRRDFLHQLTTRLVRENQTVVIEDLTVRNLLKNGKLARAISDAAWTELRSMPEYKCAWYGRELVVIDRWFPSSKLCGACGTVREKLPLNVREWTCDCGTVHDRDVNATRNILAAGLAASAGGDGVRPQRESSRTGRSSVKQEPQRVTAGIPRL

SEQ ID NO: 16347 - protein, 415 aa, Streptomyces sp.
LLIVKLVVQVKLLPTPVQAAALEATLRACNEAATWVSGVAFKKNVKSNFALREHTYRQIKARWGLGAQAAQHVIKKTCDAYATLKSALKAGNLGRPGSKRYRRAAQKPVVFRPQGAQPYDDRMLSWQIDQRRISIWTTAGRMKDVAITAAPEQLATLALHRKGESDLVYRDGIWFLNATCDVPEAAPNTDPVDFLGVDLGIVNIATTSDGEIMAGRELTRIRARERTLRTKLRKKNTPSAKRRMKKRRRKEARRAKDINHKIAKHLVAEAERTGRGIALEDLTGIRERVRLRKPQRATHSSWSFAQLGQFIAYKARRAGVPVVHVDPAYTSRTCAECGHIDRANRVSQAWFACRNCGFVGHADRNSSRNIRARAWELWRRGAQSTAPAPRPEPECGTGRKRSTTASGARSASPGL

SEQ ID NO: 16348 - protein, 363 aa, unknown
  TnpB Polypeptide
MNKGIKFRAYPNKEQQNLINQTLGCCRLIYNKGLAMRNDAYSDGKKIGYTQTSAMLTDLKKQDEYAFLKVVDSIALQQSLRDLDRGFKNFFEKRARHPQFKSKHNYHQTYRTINQSDNIRISGRYLKLPKLGYVKIKQSMEVGHINNVTIERTPTGKYFVVLNVDFVPEFRPNNNNSIGIDVGIKEFYSDSNGNVVKNPKYLEKTMRKLIREQRRLSRKQKGSNNRNKHRIKVALLHEKITNQRNDFLQKQSTMLVRENQTICIEDLNVKGMIRNHKLAKSIASVSWSKFFTMLEYKATWYGNDVIKVPAMYPSSQTCSCCGYKNPLIKNLAIRSWECPNCHVKHDRDTNASINILNKGLSIA

SEQ ID NO: 16349 - protein, 447 aa, unknown
  TnpB Polypeptide
MKMNEYPYHFGFKTRIYPSNRQKRIIHINSEASRIMYNQIVAINEEIFSLEKLIKPSKQVKLRQKQPFTTSVINNDPNTHYTYQTSCIMGNFKPYLDRLNYLYAFRNKVPHIAKVHDIFLCKEYDSLAGSYAHKAYQLAWKNFKNGLQKRPTFHSKQKNPYVEKYQTYVNPRVQTVFTDSTHIKLPKLKQIRCDKIRDILLDKSDWASGTIMISKDATDCYWIAIQLGSQTPFVVPKSKTRRHLGIDLNIENFATDSEGKVIANPRFFIQQQTRLVRLKRIMSRKFEKAKQQNRDIRSDKAYQDIRKKVARLSHKVYNQRESFLQKLTTKLVSENDVIVAEDLKSHNMLKNHNLAKAIQDVGWRKFLTMVEYKCQLYDKQFVTVNPRLTTQTCSNCGYLLNKQNHERLSLADRQWTCPNCNYHHIRDVNAAKNILQKGLTELKTKSD

SEQ ID NO: 16350 - protein, 477 aa, Paenibacillaceae sp.
MYNTQQIRIKKGHRFYPYCEKMSSLAKNLYNATNFHIRQIFTAFNEDKTINPLQQEVFDLVDKHLPQMNEVRIKAVEKKREKELKKPIRERKEIKDATLFKYPSNENKMISYSFLDGLFKASENADYQELPGQVNQQVMKMVFQNWKSFFASIKDYKINPHKYAARPKLPKYAPKKGRKECVFSNQVCVIKDKKYLKFPQTKEKLNIGKVGLKGELQQVRIIPAYGEYTVEIVFKVEDKEQIELDKNHVMGIDLGVNCLATMVDNTGAAPVIIKGKAIKSINQYYNKQRAHYYSVLRHGHSPKVGAFHSHRLAELDRKRFSKLKDYFHKASYHIVKLAIERKVSTIVIGVNKGWKEDLKLRKSEKQNFKFLPHTMLINMIEYKAKEYGIDVQRQEESYTSKASFVDMDELPVYEKGNKTKVLFSGQRVNRGLYRTKENKHIHADVNAAGNIIRKVVPNAFADGIEGVVSRPLMLSII

SEQ ID NO: 16351 - protein, 574 aa, unknown
  TnpB Polypeptide
MQLTEQFHIPDEHHEACDRLTTLVQQHTQRLLDTEYWTDTHLDAISDHTGQSYTYIRDDDNDCFEDTDEYLYSRFKRCVYHRVTHVLDAHTDEYQAFQFVTDTAAERKIRRIGWQRLRQRLFDEDSPYINWRVLESVVDQLNSYYDQHGHFPEEYTELVETPEPNGTLPYAPDKGDYHIHELAVGDDELRLMLNAPDSLSPESYHDWTKHELRFPTHSRVNEMLEAGDVKAPTLHASEHGYTLDVPVSVPEQETETVADRVLAADLGVKKQATAVVLASGDETHEQVTPPQFLDHPAKDKLFRVKADAEGINDRLAELRRQGKAHTERFDHLLSEYRQTRGKERRLREQIQHDIANQLVWLAAKNGCETIVFESLGQLDAGDTTGTVAWSISSWARGELLDYVEYKAGLLGIDLTTVNPWGTSRYCPRCVERGRTVNAPNDHTECRHGGHFYCPKCGYECDRDVVGAVNVGRKHLDACKMEEANPVEYISAGNHARFPSPRGARSAGVQSATDEQDQASGRQTHLSQHCSSSLTAKRRETDTGGLHRNHGSNTGQRCPRRSVTQAVLASTTDCG

SEQ ID NO: 16352 - protein, 377 aa, unknown
  TnpB Polypeptide
LKELNISKGAGKLKAPSKLTTTVCIKLQMDFVSAQKLMKTRLLYRDACNFLVRYVCRDPSKRNWQRYNLHHAAYYDLRSAFPTLGSQLACNAIRSVSSAYKTQLTNHPRKNKADPLKEIVFKNPSIHLDKNTIAYQENMTEATVFTIDGRVRVRLCSGDFQKRLLQCGKRKESNLVYRKTKKGESWYLHISLEFEITLAELTDQIKKEEVIGVDVGENNMAAASTGQVWKAGKLKHKRDQYLGLRARLQSNGSQSVKQHLRKTSGRERRHVTHVNHVVSKSIVEEAVKEKAKVIVLEDLTHIRDRVKAGKRVRSRLHRWPFRELQQQIEYKAQRRGINVMYVDPRYTSQTCSACQQLGKRAKSFGSVRKSVSEGPLV

SEQ ID NO: 16353 - protein, 369 aa, unknown
  TnpB Polypeptide
MTVEKAYKYRIYPNKKQKEMIAKTFGCCRFVYNTYLAKRIKLYEESKQIFAYVQCANDMKNLKTKLEWLKEADSTALQSSLRDLDSAYQKFFKEHTGYPKFKSKKTHRYSYKSKCTNGNIQYCGKHIKLPKLGMVKTKNKLIPKGRILNATVSQEPSGKYFVSLCCTDVDIKPLKKTGNSIGIDLGIKEFCITSDGKMIANPKYFKKSLDKLAKLQRELSRKSKGGSNRNKSRIKVARLQEHIANQRKDFLQKLSTAIIRNNDVICLEDLQVSNMIKNHKLARSIADVSWSEFVRELEYKANWYGKQVIKVDKFFASSQTCNVCGYVNKETKNLGVREWDCPCCNTHHDRDVNAAINILNEGLRLLEVA

SEQ ID NO: 16354 - protein, 399 aa, unknown
  TnpB Polypeptide
MKIYKSYKAELKPNNKQKMLLKKHSGVARFVYNWALSERIKLYETEKKSISPFEQDKKLNALKVTEFPWMYEVSKCAPRQAIMNVGRAFDNFFRRLKKGVKGENVGFPKFKKKHKGVSSFYLDGSFHLEDGRIKLPRIGWVRLKEKDYIPNLPIKSVTISERAGHWFVSTSFEFEIPEQKTTGEVIGIDLGITNLIHTSNNEIFNNPKALKDSIKKLKRYQREISRKQNGSKRREESRKKIARLHYRISNARKDNIHKITTKLVKTKPSIIVIEDLSVKNMMQNHKIAQALADSSLGEVGRQLNYKTKYNSILLAQVPRFYPSSKTCNKCGNIKKALGLNERVYNCKVCGNTDNRDFNAAKNIRDYFKINTVGSTGINAHGQNVRPKGLESTLGGLVEV

SEQ ID NO: 16355 - protein, 778 aa, unknown
  TnpB Polypeptide
MEQYVVRTALRVQPFAKGACEALILKRSTVESYANAVYTLILLRRYESGLPFTESFVSQAAIGACLRSVCSRVKGEPPAPVEFKDPDVQAAIRAAQTTVVPNMASFENDIGLTETMNQSARSFLTVFQNNVFMRLEAWQLRALRAEFAHPDSPVADSTRDLNSFLARAAARKINSANELDASLYKDEKIRNFQLQDCGFFQEVVARHQAAFSSGRDQPGLLPTDISPALGICTPTLVKKNLHFYLGYALYLQRRTEILEKRATTPAVRAKLPSQVIPQYTMKTRCVTFGKQQIAELLTLLAVDPTLHGSVSVSNHVYALFADVQPPSVSEKASAKIERLAQNVASMESALAAREQSLLKKKERTEAEIARDDADLQRRREKTEKKRQTYTSALETQAKRDGRKRKREDGDGKGSKKSRTAPRSRDTWLAMSDVTARRLFAVPKGIAHRWTGVVTTDGVSASWHCERPVPSKPQKTMKAKDQPTLCQRLQPRHYGAHGTHTVFQGLEEFNIIAVDPGHADLISAVREHRTEDALQTLDGKNLPSTKKGKVHEVYRRQNRSLFRLSNREWASNCGRLLNRSRSQKLSQCLLLQGSIDLLAAASARTGFSVQYTKHVTARVATAPYLQTRMRARAPRRWKFESYQTEQRAVNQLRTDLLDGLSPANTLMVWGNGGFGPTSKGHDSSPNKKMQRALSRWIPIVTSSEYRSSKTSCCCHCPVKELKSQGQRTRSVAVQCVACKTLLGRDTNAAAVIADIFRSPGLDLPSWISDHDTREANSVL

SEQ ID NO: 16356 - protein, 299 aa, Haloarcula sp.
MGEESFVGSVRCAGNGTRATQRDQASHLRGEARRASPRCRRQTQDSASRVREESLPRRDCGSCRPGSSVGSDVGIIKYAHDTDSTMVGSLDLESEYERLKREQRALSRKQEDSQNWHEQRRRMARIHAHIVRKRRDFLHKLSAYYAREYDLVAVEDLDVHGMMQLPLNSRNRASASWRTFIDFLEYKCDREGTHFVKVESEGTTQECAKCGVEVEKELWVREHSCPTCGFETDRDENAAYNVLQRGLQELGLGHAEVTPAETALPTSTTGGSSNIVDAKCVVETGSPTLKERTAVAVSE

SEQ ID NO: 16357 - protein, 387 aa, unknown
  TnpB Polypeptide
MSMRTIALTLKPTADEAVALRRLQVAFNAACNDISGVAWEAHEFNKVRLQRRVYGHVRAAYGLLAQHTIRAIAVVADSYKANRDERHTFRKDAAVVLDTPRLYRITHNRASIATLDGRIKVELNIGGVQRQWLATATKLAEADLVRDHKGRWRLLVSAHYADPPMLETAGVIGVDLGRTDIAVTSDGESFSGAQVTAVRDRYTRNRRIRQAKASKGTRSCRRRARQLQHRMSGRERRFQTNVNHTISKRIVASAAATNRGIALEDLTGIRERANKQPRTKTERRRSNSWAFAQLRAHIADKCVAAGVPLTLVNPAYTSQTCHCCLHLGERSGKRFTCVNPECLWCGDADYNGALTIALLGAAVTGPRGPRLCCSYQPGRRAPENPTR

SEQ ID NO: 16358 - protein, 384 aa, unknown
  TnpB Polypeptide
MVLINKGLEIRIYPKDELIPLIHQNIGNARFVWNKVLERYNQMYEEAMESEKEIYPSLILFNNILKDLKKEFTFLKDSESTSLQQVLRDLSQSFTQFFNNTSNYPTFKSRKKTKKTFRVQNNNNSIRVENNKLRVPILGFIKYKTSDEYQIYLHTSKINNATIKFKNGKYYAVVNVEIDYTPWPHCRGNVGIDMGMKTFATLDDGTKIANLDLKHENEMIEKYQRKMSRQKYGSHNYYKTLQKYWKWIDKRNNKLDDFLHKISYTIVRNHQNIFMETLNIKGMMQNKKLAPKLQAISISKFISMIKYKCHWNNRNFIQVDMFFPSSKLCNVCKEKYEELTLDMRTWTCPHCNTEHDRDINAAKNILYEGLKILASNLLDETTIT

SEQ ID NO: 16359 - protein, 362 aa, unknown
  TnpB Polypeptide
LRFPVRTLYDRRAALCIEQKRRLSSFRVQQSPGTAKRAQEKQSFSLALQRAMPRACQMEERGKDCFSQRGDVPTSAAALKDLDRAIADSFRPKSDPARKEWPKFKSKDIGDGFRIPQFKPEHIDDVNGRVKLPKIGWMRYRKSRPLAFKCADGSMKSGTVRQIHIRKDCGHWFVVFTTEFDIEMPDPKELDVGIDLGVVHAVATSDGQFFDLNTGRIKELEKEIARYQRKVALNRSSRLKLAKEGRAEAFDKTKPSRKRRRLLEKLQKLHRRVRNIRRDFQMKTAHTLAQEYGCVYVEDLKTRNMTKSAKGTLDNPGKNVKQKSGLNRAILRTGFFGMRQAIEWQQYKAGGYVVAVPAAYTS

SEQ ID NO: 16360 - protein, 203 aa, Planktothrix sp.
  misc_feature (155)..(158): Xaa can be any naturally occurring amino acid
MFQGYKLRIYPAIEQQIALAKSFGCCRWYWNYALNLCQETYKTTGKGLSRKAIQGLLPQLKQEYPWLKDAYSQCLQVVALNLCTAYKNFFEKRARLPQFKSKHGRQSISYPQSVKFEGDYLKLPGKVGLVYCCRHREIEGTIKTVTISKNRDGKXXXXSKMKPCGFYRWEPAILPRRGDVSHQNKLLFLLMLSLLKLEAHTYS

SEQ ID NO: 16361 - protein, 398 aa, Ignisphaera sp.
MPEGAYHRTLKAEAEVVEGDLEDLLWDLVIYRYVLQRVIDVLWDLDVVPEKSQIHQMFYNMLRGYGFRAHVARNIYSTAIALVESAKSNGGSKPVIRRLSARLDHQDAKVDLSNRIVRIILRDRWYILRISHRDEYIERFKGLKWKEVHIKYYNGKLYISIVFETRYAPYIPRGVVALDVNFRHIVSYDGSEVRRYRTRFIDALGKRARAEEIQRKYPKRWRYSEKILDRIRALHRKSRNIVVDWCRKFAKEIVLKAKKRGYAIALEDLEKLRESFNDKNSKIVWKLTLFAYRKLQESIMSKAIEYNVPIIFVDPRKTSSKCPRCRSKIRYIGRLGICHRCGFRADRDKIGAMNIWLKVLEGYAGVPGSPPRAPAMKSEARQSRGIRHEGMKKVIRSI

SEQ ID NO: 16362 - protein, 398 aa, Ignisphaera sp.
MPEGAYHRTLKAVAEVIEGDLEDLLWDLVIYRYVLQRVIDVLWDLDVVPEKSQIHQMFYNMLRGYGFRAHVARNIYSTAIALVESAKDNRGSKPIVRRLSARLDYQDARIDLSNRTVRIILRDKWYILRIRHRDEYIEKFKGLKWKEVHVKYYNARLYVSIVFETRYKLYTPRGVVALDVNLRHVVSYDGSKVRGYRTRFIDALSKKARAEDIQRKYPKRWRYNEKILNRIRELHRKSRNIVTDWCRKFAKEIVLKARRHGYAIALEDLEKLKGSFSGKNSKIVWKLTLFAYRKLQESVISKAVEYNIPIIFVDPRKTSSECPRCKSKIRYIGRLGVCHRCGFIADRDKIGAINIWIKVLEAYAGVPGSPPRAPAMKSETRRSRGTKHEGMKKVIKSI

SEQ ID NO: 16363 - protein, 417 aa, Ignisphaera sp.
MPGDEGFLTLTTRMRVSPEPEVVELLKKYRDALNYAIMWIIENSIKVGKRYRTPSISAIHRTLYEKLKSYGLPSRVAIDCYREALAIAKSYLGNGANGRIPRVKSLRMWLTSNQSYRIREGYVEIIGGYRLRIIGWDRRYDNYEDREARLVYKGNKMFLMITKRVPKPKDVVPRWILAVDVNERYIYYGNRFFIDRIGTAIDRAVHYRKLAEDLQRRYSSTRYNAWIRRRGILDRIRYFYRKARNIVEDWARKTALEIVMKAKQNSYAVAREDLNGLIESLRKLPKDHRVKMMILSYRKLVYWIDWQSQKHGVRVIIVDPKDTSSECPKCRSKMVENGYRKMKCPLCGFEADRDIVAILNIEKKALKQMGGLLAALTAPQMTDVSPNRCGEPMNPEGNTHPSEWGEGQICYTCIFTT

SEQ ID NO: 16364 - protein, 376 aa, unknown
  TnpB Polypeptide
MNMLKNFQYRIFPTKKQLRMLEITLEECRWLYNHLLEARKTAYEQEGKSLSCYGQQATYPILKEQRPSLSIVHSQVLQNVAVRVDLAMKAFFRHVKAGETPGYPRFKGYGRYDSFCYPQSGFSITHDTRVSLSKVGAVKMVYHRPVRGSIKTAAVHRSSTNKWYVTFSCECEPQRLEPTSTQVGIDVGLKTFATLSNAEEIDNPRFFRQEETALAKAQRRLCKAEKGTPERKTRRSVVARVHERATFKRENFTHQQSRQIVDRFGVICVEDLHVNRMVHNHCLAKSISDAAWSAFFSHLSCKAEEAGRQFIKVSPAYTSQDCSRCHHRQKMPLGERMYQCPCCLLSIDRDHNAALNIKAVGLHSVGLPLEAPAFYA

SEQ ID NO: 16365 - protein, 250 aa, unknown
  TnpB Polypeptide
VHLFITRSVEYKTTGWKLESGGGHITFTDGCNIGHVRLIGSRDIETFPLKQIKRVRIVKRADGYYCQFGLQATRQIEHVPTGKQVGIDMGLHAYSTDSEGKTVANPRYLRKAETRLKRLHRKQNKCAKKSKNRNKAQKKLAKAHLKVQRQREDFARKQASTLILSCDMVAYEKLSIRNMAKNHHLAKSISDASWGKFIAWVTYYGGIHTVPVLAVAPQFTSQDCSACGTRVKKSLSVRTHVVSSLRHGNG

SEQ ID NO: 16366 - protein, 445 aa, unknown
  TnpB Polypeptide
LGDENKRTVRLRLLPNGSQERKLRRIADTAAKLWNELNHARLVQHRESSAIDFKGTEHEFYHRYKSVLGVNAGQVINLNNWMWKSFFELSRLYKQGELPKFMGKPSPPGFWKDRLLGRRELRVLVRNDRYYIEPINNGEGYLVLKDWGLRIRYAGRIKWSGKQGTLVIKYEGGRWFAYVPITVGEKPARSNPKGYVRGIHEKIQIEKPKGNNKAFIDVGLNNLFAVAFSHTNAAILIKGSTIKAEYYWWKREIRTYQAIRDWLKHRGFELWKKYHALYMHAVYKRRERLRHYYRTAVRFLTETLHEMGVDEVFVGYPYLVSQDNGNEYNTNIWWYAKVIKWLGEVLQEYGIKLNVVSEHGTSKQCSICNAEHENGRVKRGLYVCPVTGIKINADINAARNIARRVGYEVPIPRKILSYIVTSNGVKPITPKEGVTVETPTMETPP

SEQ ID NO: 16367 - protein, 341 aa, unknown
  TnpB Polypeptide
MYYAYKYRLKPSDAHCEELDRHRDICRQLYNHTLYRLNEYQDDHDELPSMTTLRSELPDLKQWWDDLSDVYSKVLQTVVERLFDNLKGLSKLKENGYRVGQLKWKPPREFRSFTYSQSGFKLDKKGGQAVLSLSKLGDIPIRLHRAIPDDATLKQVTIKKEPTGEWFATFGVQMDREPPEPPENPEKCIGIDVGILTYAHDTDGAAVGSLDLSGERDRLEREQWKLSRKQHGSNNYEKQRRRVAECHADLRRKRRDFLHKLSVYYAREYELVAVEDLNVKGMMESPSNSRNTASAAWRTFLSLLKYKCEREGTHFVAVNPERDDQGVRGVRRFDRQAVVGP

SEQ ID NO: 16368 - protein, 360 aa, unknown
  TnpB Polypeptide
MKLTLQLRLLPDAAQRCLLLTTMEHFNAAATHAARVGFEAKVYSQPPIHHRCYRDLRERFGLSAQMAVRAIGKAVEVFRRDKTRCPIFKLHGAMTYDQRLMSFKGMACVSLLTLEGRQLVPLVFGEYQRARFDRIKGQCDLVYRRGKFFLYASIDLPPRPPVEITDFLGVDLGVANLAVDSDGRQYSGAPVEKIRQRHHRLRQRLQRVNTKGGRKKLKRLAGREARFRRHQNHVIAKTLVTTCKDTGRGLALENLQGVRERTRFRRPQRARMAGWAFGQLRAFLQYKAALAGIPVAVVDPRNTSRTCSRCGHCEPANRKHQATFVCRHCAFSSHADINAAQNIGLRATCKPAPELARLTA

SEQ ID NO: 16369 - protein, 416 aa, unknown
  TnpB Polypeptide
VIADDRLTMRWMHRVRLYPSPAQERRLDYVLHATRHLYNAALQERRDAYRMRGVSVTAKMQYAELTALRAEEPGMAGVYRECQDAVLHRLELAMQAFFRRLKRGEAPGFPRYKGARSWSQIEYPHGDRALKLDAEQRRVRVPGVGRIPLRKGRSVPDYGRAFIVRKNGRWYAVFECRRDVAPLPCTARVVGIDRGVRVLAATSTGELIANPRHADRLRSRVEVHAVALDAASLKDAKGRCLNRRDPARIAAARRLARAKEREANARRDYAHKVALRLVRGHDLIAIEELRVRNMTRSARGTVDSPGTNVAAKSGLNRALLDAGFGQLGTLIREKAEYAARTVVSVDARYTSQTCAACGHVAADSRSGRHFACVRCGHAADADVNAAQVILARATAQSAPMSELSSGSTRFTQHDGA

SEQ ID NO: 16370 - protein, 383 aa, unknown
  TnpB Polypeptide
MFKSFKYRLFPSRAQERLLSQTLETCRRWYNTCLEERKTAWEERRESVGKYAQLRKVKYLKATSPYAAPVHSHILQVVAQDLDKAFQAFFRRVQAGETPGYPRFKSRDRFHSFGLKEYGNGFKLDGRRLKVSGIGRIAVRWHRPLESEVSTVRLVRKAGKWYACFGCEVEARLLPSTGQEVGIDVGLHHLAALSNGETIENPRWYRAEQARLRVLQRRVSRRKLAGSNRRKAVASLQRQHERIANRRQDYLNQLAHDLIVRYDRIALENLQIKNMVRNRHLAKSILDAGWSYLKQHLTHKAEGAGRVVYLVNPAHTSDTCSQSGTVFENLTLADRWVSCVCGLSLDRDVNAALNIVHRAGQAHWGQTWPVPATASVPQEAAPL

SEQ ID NO: 16371 - protein, 350 aa, unknown
  TnpB Polypeptide
LRRWLDTCRHLYNSSLAEHKESYERNKITINYYDQANALKEAKKTDERLKAVHSQVLQDVLRRLDKAFLSFFKRVKNGDKKPCYPRFKSWDRFNSFTFPQSGYRVEGSRLVLSGVGSIKLKMHREIPAGARIKTCAIKRDADQWYVTFVVALPDKVVPPVDGIRTAVGIDLGVDKVATLSTGDTVGNPKWLRSSEKKLAKEQRELSRRRRVGENRKRQRIAVANVHRKIRNQRKDFYHKLSRELVKGYDLIVFEDLKVKKMVKNPYLAKSISDAGWNQLVSFTIYKAEEAGKHVGLINPNGTSQICSGCGMEVRKSLAVRMHRCPNCGLEIDRDLNAAINKISSKEEWSP

SEQ ID NO: 16372 - protein, 416 aa, Nitrincola sp.
MTLKAYQYSLKPTKAQADLFVLSFGHNRFVWNWALALKSRYYRRFGQSLSKRQLQDQLVKKKNRDRYAWLYQVNAQSYLATLDHLDQAFSDFFNGKKKYPRFKSKSSHWHGYQNPQHTDVDFEQGCVKLPKIGWVKTTLHRPFEGKIKTSTVKLTPSGRYRVSILVDDGLDLPVPSTIEPDLTVGVDLGIKSLAVASDGTVIENTQPLQAALVTLKKEQRILSRQKKGSKSRAKQRLIIAKCHEKVANIRKHLLHQVSNHLVSKNQATSICIEDLHVKGLIRNKKLSRHIADIAWGELLRQFEYKCAWQGKNLITIDRFYPSSKTCSSCGSIKHDLKLSDRWYACDHCGVEMDRDLNAAINIKQQGLKQALEQVGTTCAVKCSPKSRLAQSSDLAKGTEFTQYESAETNARTAHAV

SEQ ID NO: 16373 - protein, 322 aa, unknown
  TnpB Polypeptide
MKATEAIKAVKARLKKKQKATCPQSKQCSVRYDARSFNVWFERNELSLLTIEGRIKIPVSVPEYFQQYLTWKRCSADLFIRKNKVFLNIVFSKDIADPEVTGKVVGIDRGIKKIAVTSENQFFDGGQSKRVSKHYEKIRKALQSCGSKSAKRHLRKISKKENRFRTDANHVVTKRIVESFNPGTVIALEKLTGIRQSTRLRKKQRKDLNKWNFFQFEQFLTYKAEARGITVEYVDARYTSQKCSVCGYISRSNRQSQAIFKCKHCGFSLNADLNASRNIRQNYLDATCYPSRASVNRPIVAHDDVKAPYRELRRSAVTSRLL

SEQ ID NO: 16374 - protein, 358 aa, Alkalibacterium sp.
MPQTITVKIKLLPTKEQAAILTEMSEEYISTINSLVVEMVKERKPTRKTSKDMDAFLPSAVKAQAALDAKSVFKKAKKKKFETVPLLKKPHCVWNNQNYSFDFRYISMPIMIDGKAKKIPIQALMVDKKNRNVDLLKHKLGTLRVTKKSNKWIAQIAVTISITEKTGTKVMGVDLGLKVPAVVATDDDCVRFFGNGRRNKYMKRKFRSERKALGKRKKLNAIRNSKDKEQRWMKDQDHKVSRAIIDFAKDNHISVIRLEKLASIRQTARTSRKNEKNLHTWSFYRLATFIEYKATLEGIQVEYVNPAHTSQTCPTCSERNKAKDRKYRCKCGFEKHRDIVGAMNIRYAPVVDGHSQPA

SEQ ID NO: 16375 - protein, 598 aa, unknown
  TnpB Polypeptide
MAKPIRYWNPALQHLYDRVGGAGVNGAIHIPLPPKVLSDGRSKVVTKKQITAVRAPLRADVFAPLLTPGFASPLAPPRPAYAVLPCAKRKRNAIAKSKTLLAPDEHIRALKIRLLPTPEQKELLHKMFAAARAYYNETVEILNTVSDGWDEEKYLDSLMRDEDDILGDGEQDAFYWYQFFRTEEICSAPTAASYPRFTNDATMDYGGGELQDESGLRSVVHELLRKKSPWVDDVPEKIRQNAVKAAVEARDTNVAKCMAKPGTHHFRLRFRSLRNLSHTPTESIVIDSTGAGGCIRRILALDTGRRTGASSNSRADCAVHIAPTLFGANNPIRARDKRGVVDWLVSEGVIKKTAEIVWDKRINKFFLIAKRVVTRAADDRPPEERKPLALDPGSRTFQTACDADGNWTMFAVDAKAHMKRLCTKADGTQARLDALPRGGEGRWCWARRRTLRGRLRRLRRKAHNWMKHLHYEVIREMFTLGDLFLVPIFESGKMSEWGGRSYNSTVAREMYTWAHGYFRQRLWSKVQITPCKAMAFVYEPGTTRTCDACGHVMPKSTSEKFMCSACGHAAHRDAHGARGNLLSALGAAVGVAWDGVRR

SEQ ID NO: 16376 - protein, 376 aa, Alicyclobacillus sp.
LVISVHKAYSFRLYPTKEQEQQIRRTIGCCRFVYNHFLARRKEVYEQDGTTLNQYACMRELPALKQQYSWLRDVDSTALQRAVEELDDAFQRFFREKKGYPHFKSKKHPKQSYTSKRNGREDDKATIRIEGNRIRLPKVGWVEFAKSREVQGRILSATVRLTPSGKFFVSVLVDTEIPSLKPETTAVGIDLGLKDFAILSTGETIPNPRHLRKHEEKLKRWQQILSRRKSGGKNREKARLKAARLHEKVRNARLDFLHKLSTRLIRENQVICLEDLRVQNMQKNHRLAKNISDASWSEFRRQLEYKAVWYGRQISVVSPSFPSSQLCSNCGYRNSETKDLSVREWTCANCGEHHDRDVNAARNILREGLRLLNMSA

SEQ ID NO: 16377 - protein, 437 aa, Thermococcus sp.
MKRSVTVKLQPSKEQEKILFELAHASAIIWNKLNYQRLKQFREFGKIDFSTTEKEAYHEFKDWIGGSTVQQLARKNAESWRSFFTLNRKKKKGELPEWFKPKPPKFIREKNGGKLFIIPLRNDQHKIEGNKLILRRLGKYGMLEIQFKGRIHLKGKHGRLEITYDPVKRKWYAHVSISVEKKLQGGEWVEVPRTPKGSLSAGIDLGVNNLMAVYVENGQSFLVNGRPLKSIDFYWQKRIAEYQSKLNKSGAKTSRKLKKMHEKAKLQAKHYINTAVRQTVRRLYELGFSRIVVGYPKGIARNSEKGRKQNFILSHVWRFNYVIKRLTEVAEEYGIQVKVVDEAFTSQTCPLCGQCHANARFVRGLFKCHREGVVMNADLVGAFNILKKAVKTITPSLPALAGGRGNWPKARPEGFEEPILTGSPMRTPQTSPSMVRG

SEQ ID NO: 16378 - protein, 397 aa, Ectothiorhodospira sp.
MIRAHRIALAPNNRQATYFARAAGTARFAYNWALAEWQCQYAAWKQDNSLPKPSQVALRRQLNAIKREQFPWMLEVTKTAPQMAIIQLGEAFRNFFAGRARYPKFRKKGVHDRFTLTNDQFRVEGSRIRIPNLGWVRMRESLRFAGKIMSATVSRVADRWFVSITVETEDPPRRPTENQGSVGVDLGVSALATLSTGDTITGPKAHTALLKRLRRVSRSLSRKQKGSSNRNKAKAKLARLHARIANIRQDALHKLTSDLTRRFHTIGIEDLNVRGMMANRHLARSIADMSFHECRRQLAYKADQRGGQVVVADRWFPSSKMCSVCGAVQKAMPLSTRQWICPDCGVHHDRDVNAARNLAHYAVSSTVSACGEEGAGSGRETGVKPASVKQEISTEPV

SEQ ID NO: 16379 - protein, 322 aa, Pleurocapsa sp.
MKVTTTLKLKFHSLNSAKATMFAETTAACTELANELIKLPIAERKKLTTAKVLTSLKSALANQVIRHCKGKAGKKTKKFKLLPPEVNCQNWRLFKVGDVYSVSFPTLHGIKRVPISITSHHWQPILDKLLANDPTLAKGTLKLCQYRNKWYALISVTEEVPEVIADNRVGVDRGQNQIAVAVPKKGFGLFFSGKQVKHHRRKFQQRRKQLQKAGKYRAVKRLEQKEQRWMRAVNHTVSRRIVDFADWQDADLILEHLSGCRQTMKQRKKSRSDNAESRHAWAYYDLGQKLEYKMAKLGRQVHVRPPHQLLQSFGYSVAIAWS

SEQ ID NO: 16380 - protein, 394 aa, Burkholderiales sp.
VQATCFARTAGVARFAYNWALAEWGKQYEAWKLDNTSPKPSQMALRRQLNSIKGEQFPWMLEVTKNAPQMAIIQLGQAFQNFFARRSKYPKFRKKGAYDRFSLSNDQFSVDDSRIRIPHLGWVRMREALRFTGKIMSATVSRVADEWFVSITVETPDDLPLAKAENQGAVGVDLGVSALATLSTGEPPIPGPKAHKALLCRLQRLSRSLNRKVKGSENRHKAKMKLARLHARISNIRKDALHQLTTGLTRRFHTIGIEDLNVRGMVKNRHLSRAVSDMGFFEFRRQLEYKAVQRGGAVMVADQWFPSSKMCSCCGHKLEVLPLAVRQWTCPACSTTHDRNVNAAVNLRNMAVSSTVLVCGEEGSGLGRKRKTKPASMKQKVSFVPVCAGMSKSD

SEQ ID NO: 16381 - protein, 369 aa, unknown
  TnpB Polypeptide
MALIQSRIRIRIYPNEEQEVLINKTIGCCRFVYNKMLAERKESYESTGESISRTPAEFKEEFPFLEEVDSKALATEWVNLNKAYGNFFRDKKVGFPKFKSKKNDRKSYTTTLSKTRVFNDSRNFIKLPKIGFVKCKVHREIPSDWKIKSATISQTPTGKFYISILCEYEVEIRPIVLDRNNAIGIDYKSNGFGITSEGEILSNHRYFRENQSKLSREQRRLSRKKKNSKNFKKQRMRVALVHEHISNCRLDQAHQLSHLLAEKYDVICLEDINLQSVSQSLRLGKSTNDNGFGMFRNFLKYKMEERGKCLIYIDKWDATSTVCSECGAYHKDIVNSLKIREWTCPNCGAHHDRDINAAKNILRLGLERL

SEQ ID NO: 16382 - protein, 487 aa, Streptacidiphilus sp.
MIRAYKFLMRPTAGQEQALTEMLRDHCSLYNGALQERRDAYQHASKTSVKYGMQSAQLKEIRAFDPERQGRWSFSSQQATLRRLDKAFAAFFRRVKSGETPGYPRFRGVNWFDTVDFPKDGDGCRWDSTPHDPVTRVRLQGIGHVKVNQHRAVVGKVKTISVKREGRKWFVVLTAEQSRPEPLPATGTVVGIDLGIANFLADSGGGFVPNPRHGRGNADRLEAAQQALARFPRVRRDKRTANHRRAVERVAKLHGKVRRQRLDHAHKTALTLVREHDFIAHENLTIRNMVRTAAPKPDPDQRGAFLLNGAAAKAGLNRSIHDAGWGVFLTILHAKAESAGREVIAVDPRNTSRTCPECLHTSADNRITQAKFHCVTCGHTAHADTVGAINVLRAGLVRRDANPALREAPAFTQGRSHVVLVEAEFVGGVGGEDLEAVVDGDADGLHECAVDAVGDGAEDLGGPGGAGVDANEWHGRLPGWVFDGLRT

SEQ ID NO: 16383 - protein, 436 aa, unknown
  TnpB Polypeptide
MKIAYQYRLKPTTSQSAHMENWLEMLRCQYNYRFAQRFDWYDQTRCRIDACPLVARVVPIEEIFRDIPVEYISKQGYVTWKALQQGDLPQTKVERPWYKDIHSQVLQDCVHRVDRTFERFISGDKNGKRSGRPRFKSRSRYRSFTYTQAKQDCIEGNRITLPKIGDVKIVRHRPLPDGFKIKTATIIHKADGWYVTLSLEDASVLTLSPNIDFTKVVGIDVGLKDFLVTSDEDVVPIPQFARKSAHRRKILNKSLSRKKRKGTKRRQSSGRKLSKHFLQSSIRGKPAQWTLRYQKVARQRKDFHYNTAKRLLNNYDVIAHEHLNIKGLAKTHLSKSILDAGWGNFIEIVSRKAENAGKTTVSVNPSGTTQNCSNCGTKVPKTLKDRVHSCTCGLEICRDLNAAINIRKLAEGHPVSKARGDLSDSRSMKREARAIA

SEQ ID NO: 16384 - protein, 435 aa, unknown
  TnpB Polypeptide
VVLEAVKVALDPSPAQERLLLSHAGAARFAFNAGLARVKEALDAGAKPEWSFYSLRKWWNANKDALAVNDDGVIWWAENSKEAYSYGLEALAKGLSNWVKSRKGVRKGRRVGFPKFKSKDKAAPRFAYTTGAFGLIHGDPKALHLPKVGRVHCMENVTERVNGVRVLRMTVSRRAGRWYASLTVEREEPAVREAPRGGAVGVDLGIKTLATLSDGTVIENPRCLAASERRLKQAQKALSRKTMGSNRRAKARAKVARIHAHVANQRLDAIHKATTWLAETYSEISIEDLNVAGMARNHHLAKAVSDASFGEFRRQLEYKTARTGAALHVVDRWYPSSKTCSKCGRVKAKLSLAERVYKCDGCGLVMDRDLNAAINIRVAGSAPETVNAHRGTRSRSNQHGCATQVPTKCEPSRRGGKPRRLGADGRKTVLQTATK

SEQ ID NO: 16385 - protein, 427 aa, unknown
  TnpB Polypeptide
MQYNVVAAYRSWQERIKAASGESSKYVSQGWKRTVDKSAPSYGEDYANLGAVDQQYAVIENTPSIDGEIVLKMVIQGQWYRLVFDFDNARFTEGKVALPLIRVQDDRPVFVFAVVTDNPVVQFSGDWVIGVDVGLNDYATVVVRSAATGRVVYETMLSQRVHSLWNSVRASERQVRALRRKAGRLLSQRQARMSALDEAQLHREAASSKKRELAVLAAQEIADLSHLWGNAVVAVEDLSWVANTMQNGRWNRGALIQWLTHYVSQNGGWVVAVNAANTSQQCHMCGQQVTHPTHKLSVCPEHGAMDRDVNAAANIAARAVPRVAKARVTRAKNRKLRPQTVLRTPPARASLKYPGRDRTKRKPTPKRKNHHRVTREVILPLCPARAQAMRLEASVLADQGAHCTLGTNKAALKQGDVAYKSRLYILI

SEQ ID NO: 16386 - protein, 216 aa, unknown
  TnpB Polypeptide
VEREQGRARRQPGYGRGVVESEQQGSLQYGLRKAQQALSRKTKGSARRRKAQERVARLHARIANVRADAINKATTMIARTYSTVCIEDLNVAGMVKNRRLARSVSDASLGEFRRQLEYKTARTGAALRVIDRWYPSSKTCSACGAVKAKLPLSERVFHCDACGLSIDRDLNAAINIKVAGSAPETLNARGGGISRADTLSDNANPSETRTKQPPVA

SEQ ID NO: 16387 - protein, 375 aa, unknown
  TnpB Polypeptide
MQRTIKIKLTENNDLIETIRIFSKARQYVNDIGFKKKIFNKNKLNKLTYKKIKKLYPNLPTGLIQTARDVASESIKREKCKRPIQVKEFSAVRLDKRNLRVNLKHNLISISSINGRKKITFQTHRLIEKYKDWKPIAGMLCFKQKQLYLNLVVEKDSPQINLGGIEIQKDILGIDRGINNILVCSNNLFYNSKHLKKIKGKYQYLKAVLQKKGTNSAKHHLKLLSRKETRFVSDTNHRLSKWIANSGFKVFVLEDLKDMKHKKNGRKFNKKLGSWSFKQFETYLKYKAEERQKLVISVNPKYTSQTCSHCDYKDKLNRKRSNFKCLQCGFEIHADLNASRNIAELGKPIFSRLLVNQPIVVPMVTTSQLISLVGN

SEQ ID NO: 16388 - protein, 449 aa, unknown
  TnpB Polypeptide
MLLAHSIRLGPTEAQCAYFARAAGTARRVWNWALAQCLQLSARGLPVRIFDLKKHFNSIKYVDPAWLNEDDQPWLRGIHRDAHAQPFANLNKAFARYFEQRRAGVRASPPRFKKKGRCRDAFYVANDKFRLEGKTAVLPKIGRVAMCEQLRFAGKIMGASVSREANAWYLAIQVDVPDQHARRSRQSNGVVGLDVGITTAATLSTGEKIPGPNPLRSALRRLRIRSRRHSRKKVKGRENMPSALAVDDQPPRRKSSNTIKAANVLARLHARITHIRKDWSHKLTTRLCRENQAIAIEDLNVQGMLRNRKLARAISDVGWYRIRSQIAYKARRYDTLVVVADRWYPSSKLCSACGARNDGLILAVRDWTCSHCGMHHDRDVNATLNLKRLATGALAARTALPVASPTATSDTAAGILLAGGGKVTPVRHEHGQQDGSGQEENAEHICSRF

SEQ ID NO: 16389 - protein, 438 aa, unknown
  TnpB Polypeptide
MDMEQTITAKLRLHVDAAQTAALRRTQLAYRDALNQVSVHAFAHGKQAGAARLQRETYAEVRGRYGLPAQLACNVPRQVAATYKTLWTRAKANAAAVKAGVTKRRFKGMDKPPTYSAPTVTYNEGRDYGFKRDGRVSVMTLDGRVVVPYSGYDRHTALIRDGARIGAAKLWYDKSKRRFYLLVSLTLERPDVTPTSLTGVAGVDVGQRYLAVTSDTRGQAAFHSGTEVRQKANHLARVKKRLQHKGTRSATRRLVAIGQRERRQQAATNHTIATRIIAANPTALIGVEDLTHIRERIGPRTHGKRASQKQRKANRITSKWSFAEMQAMLAYKATLAGSQVIWVDAHYTSQACPRCGHTSRDNRPHTGLLFVCQACQYTLHADLIGAKNIALRTLLIRQDWVSTGALSVRPDVSDAEAKAARLSRYAELRWSPGASPAL

SEQ ID NO: 16390 - protein, 395 aa, unknown
  TnpB Polypeptide
VFITYQYRLLPAKRQHRALEQILESQRQLYNAALEERIGAYRKAGLTRTYIDQTKALTEWRRSDPEACALPVSLQRATLKRLDDAYSGFFRRVARGGNPGFPRFRGKGWFDSFGFRQFEGISLKAGRLRFKGMPGSLRVHIHRDLPEGAPIRSCTFKRDTKGWSVSFAVAVEAAAPRKSQRAVGVDLGISTFAALSDGGHIPSLKAARRAERQLRIAQRALSGKQRGSLGRCKARMALARCHAAVARQRSEHLHQASARLVRDYDAIVVEKLNVKGLAGSRLAKDVHDASWARFISMLRYKAEWAGARLIEVDPRNTSQECSGCGTKVPKGLADRQHDCPHCRLSLDRDLNAARNILNRAGVGPGLRNVAGCCGMRAGKNLRWSLRPRQEPVAPS

SEQ ID NO: 16391 - protein, 410 aa, unknown
  TnpB Polypeptide
MVRIRRSYRIRIYPNGAQRRLRDRWFGAYRWLWNTALEIRTEAYRHCGLTLNGNDVSRWLTQWKATSGHEWLKLVPATCLTQCLRDQDTAFRNFFAGRAQYPKFKRKERSGSLRFQGVGAAWKRGTLTLPKLGVLKLAEELPRVDRPDLVTLTMDAAGRYFVSFSAEVEKAPPSLSFRCPAVGVDLGLKHLATLSTGEKIDNPRHYQARLRYLRQQQRGLSRRVKGSQRRERQKLRVARAHANVKQARQYALHELTTRLTEEFDLICIEDLNVKALSRGRNARSINDAAFGEIRRQLTYKSEWRSKILIEVDRWYASSKTCSKCRHVLDELRLDQRNWTCPKCKAIHDRDVNAARNLLMEGLRQLAGRDDRDLRVDARETSPEEILWEVLAHEARSGQCNRACMEQARWH

SEQ ID NO: 16392 - protein, 374 aa, unknown
  TnpB Polypeptide
VKLTLKIKLLPTDEQAELLLDTMKEANTVCNAISDVAWEKRIFNNFKLHHEVYHSYKATFKLSSQILVRCIAKVADAYKLDKKTKRTFRPLGSIGYDSRIMTYKPNDIVSLWAIGGRLKIPFVCHNRNYLPYIKGEADLVYKKGKFYLFQTVDVPEEDVADVETFLGVDFGLVSLATLSNGKEFNSKKLQDYREKRQKVRSSVQSKRTRGSKKLLKRLSGRERITASIINHTIAKQIVQIAKEENKGIAIEDLKGIRFSSLKKGKRFRTRVGKWSFNQLRQYISYKSILNGVPVVLVNPRYTSKTCSNCHHIGNRKGKVFECNNCGNNMDADINASKNIATLGCSVNNSEKSSMYSCALHYSDLKPTPSLCVGG

SEQ ID NO: 16393 - protein, 494 aa, unknown
  TnpB Polypeptide
MSGMRTVKIGGKRVVHAIGVSEMWYNVEVNAVLATKAERIKNTLRETKERRRTQRVFVYELKLQNLSKRKVALLERAFLEAKWLYNWLLSDIERLNMPVHKVKAVEVKVGDHYEQRELTVLGSQIKQETANRIKDNLRALGQLKRNGRKVGALKHKSFVNSIPLRQYGNTYKLDFERNRVRIQILGVFRVLGLHQIPDDAEIANAVLVRKPSGYYLHVTCCRSKERCVSSDKIGDAVGVDFGVCSKLTLSNGIKIDFELREPPRLKRLQRKLSRKRAGSKNRERVRLLLNKEYEKLNRRRRDAQNKVLAFLKHYGKVVFQDDCVKGWSSLFGGAVHSSGIGGLKSRLRHSLETPISVERMETTTRECFACGLRHDLSLSDRVIVCECGWDCDRDVNAALVIMRKGLGLSRNQAVGVGRPELTPLERETAARILGSNPYIRVSFLDEGGSLSQETGEDHPSRGSRIPFLALLPRIRGRRKHVPRDRRRPRRPPHA

SEQ ID NO: 16394 - protein, 366 aa, unknown
  TnpB Polypeptide
VEKAYKYRIYPNKKQQEIIAKTFGCCRFVYNKYLAKRIESYEESKEAFTYVQCANDMKKLKSELEWLKEVDSTALQSSLRDLDSAYQKFFKEHAGYPKFQSKKTYRYSYQSKNNKTTIQYCDKYIKLPKLGMVKTKNKLIPEGRILNATVSQEPSGKYYVSLCCTDVEMKPFEKTGNSIGLDLGIKEFCITSDGEMIPNPKYLRKSLDKLAKLQRELSRKSKGGSNRNKARIKVVRLHEKISNQRKDFLQKLSTEFIRQNDIICIENLQVKNMIKNHNLARSISDVSWSEFVRQLQYKAAWYGRNIVRVDKFFASSQTCSICGYVNKETKNLGIREWDCPQCGTHHDRDINAAVNILNEGLRILAA

SEQ ID NO: 16395 - protein, 386 aa, Streptosporangium sp.
LRPTARQVATLTACLDDHRVLYNAALEHRRTAYRKAGVSVRYGDQSADLKHIRADDADGQGRWSFSSQQATLRRLDKAFAAFFARLKAGRTPGFPRFKGKGWFDTVEWPKDGDGCRWDSQPEHPSATFVRLQGIGHVRVHRHRPVHGTVKTISAKREGDRWYVILSCDDVPAETLPATGAVVGIDMGVASLVTTSDGEHLDNPRHLAASADRLAAAQQDLARTQRGSKRRRKAIARVAALHAKVRRRRLDGAHKAALHLVRDYDVIAHEDLRITNMTRSASGTVDAPGRNVAAKSGLNRGILDAGWGVFLRILADKAESAGRELIAVNPANTSRTCARCGHCAKENRLSQAGFRCQRCAHAAHADVNAAINILRAGLALREAVEAA

SEQ ID NO: 16396 - protein, 415 aa, Lactobacillus sp.
MAQLPYHYGVKVRIFPSSRQKQLIKKNSDASRFIYNAMNGMNRELYELRQVKLLISLVLQRIKTLEDRLKRPSTGISNLHGWLNDPDLDSLMKANAIKNYRAAWKLFRQVHHAGTPVFHKKRIAQKYQTSAQYAAQISQPSLYNGSVRLLDKHFVRLPKLGKLRFKGWPSRLLTSDTAIRIGTTTVSMDATGRYYLSMQLGAEQPFVKQLPATKSALGIDLNTENFLTDSQGNVVANPRYYRSIKGRLAKAQRKLSRRARRAKREHRSLRSAANYQRQRVLVANLQRRVANQRKNFLHGLSTTLIKNHELVVAEELRSRNLLKNHALAMSIADVGWRTFLSMLSYKADLYGRRFVAVNPRNTTQTCHACGFIMGTANTAKLTLRDREWTCPHCGTHHVRDHNAAQNILAKGLARA

SEQ ID NO: 16397 - protein, 440 aa, Natrialba sp.
MKYSPRYRLFPDEAQREAMDWQRDTVRQLYNHALREFNQIPEDTGTLRQRVWMVRDTIPALKDWWTDLNKVYSTVLQKAVERIRDNINNLGKLKEHGYDVGSLNWKSPREFRSFTYRQSGFELDKKSGPDGRGLLTLKKLKGETRKIPVRLHRDLPAHDAIKEVTVKKDATGAWYASFTIDTNAPTKPEPEDIDAEDTVGLDLGVLNFIHDSDGRSVDRLDLSCDRKRLEREQRSLSRKQEGSNNWENQRRRVAEIHQRMSNKKRDFKHKLAHFYTTEYDAVFVEDLNVKVMLESSQNARNKAEVGWRNFLTMLEHHGDKNGCHVVEVKARGTTKDCAECGVETAKPLWVREHSCPSCGFELDRDWNAALNIQQRGWTRLGVVHSEVTPAETATVLRTEGSDGPHENSVLVDAVDTLSVSASRVVETGSPCLKERAQASE

SEQ ID NO: 16398 - protein, 421 aa, unknown
  TnpB Polypeptide
MKYHFAAELRIYPSSQQKHIIAVNDGASRFVYNRMTANDRELHRLKKTAHLCPAYAGRIEYLEQVRSSKRELVNTIPFLNEKDVDSLAVDNAIKNHNLAWKRFREVPGTGIPGFHRKSYTQSYQTNAHYRKDAAFWEEGNVHFVKRSAGEQVPHFISLPMLGTIRFRCSGKVLAMLTSHKEDTRVGTVTIRRDNCGDYNASLQLSSDIPFTEPFLKTGSGVGIDMNLTNLYTDSDGNVIPNPKYGRGMKKKLAKAQRKLSRMKEAAKKENRPLNESSNYQKQRLRTAVQQRKVSRSREDYLQVQTKRLVESQDLIVSEDLKVKNMLRNHKLAYSIADVSWGRFFILLSQKAVLYGKEYMKVPAKDTTQTCSGCGHVMKGEEKIPLGMEEWICPKCGMHHQRDHNAAKNVLQRGLAVKALQI

SEQ ID NO: 16399 - protein, 859 aa, Escherichia sp.
  misc_feature (706)..(706): Xaa can be any naturally occurring amino acid
MSTGLRFTLEVDGLPPDAFAVVSFHLNQSLSSLFSLDLSLVSQQFLSLEFAQVLDKMAYLTIWQGDEVQRRVKGVVTWFELGENDKNQMLYSMKVHPPLWRAGLRQNFRIFQNEDIKSILGTMLQENGVTEWSPLFSEPHPSREFCVQYGETDYDFLCRMAAEEGIFFYEEHAYKSTDQSLVLCDTVRHLPESFEIPWNPNTRTEVSTLCISQFRYSAQIRPSSVVTKDYTFKRPGWAGRFDQEGQHQDYQRTQYEVYDYPGRFKGAHGQNFARWQMDGWRNNAEVARGTSRSPEIWPGRRIALTGHPQANLNREWQVVASDLHGEQPQAVWLTHDPAYPDEQPTAPLARYTYTAGGELRAVYDRSGTQVRGFTYDAEHAGRMVAHHYAGRPESCYRYDDTGRVTEQVNPEGLDYRFEYGESRVIITDSLNRREVLYTEGEGGLKRVVKKEHADGSITRSEYDEAGRLKAQTDAAGRRTEYSLHMASGAVTAVTGPDGRTVRYGYNSQRQVTSVTYPDGLRSSREYDEKGRLTAETSRSGETTRYSYDDPASELPTGIQDATGSTKQMAWSRYGQLLAFTDCSGYTTRYEYDRYGQQIAVHREEGISTYSSYNPRGQLVSQKDAQGREIRYEYSAAGDLTATISPDGKRSTIEYDKRGRPVSVTEGGLTRSMGYDAAGRITVLTNENGSQSTFRYDPVDRLTEQRXLHKVTTTVSKNHAMIVIEDLKVSNMSKSAAGTVSQPGRNVRAKSGLNRSILDQGWYEMRRQLEYKQLWRGGQVLAVPPAYTSQRCACCGHTAKENRLSQSQFRCQVCGYTANADVNGARNILAAGHAVLACGEMVQSGRPLKQEPTEMIQATA

SEQ ID NO: 16400 - protein, 429 aa, unknown
  TnpB Polypeptide
LKTQCRPCLISLSSLIDQEYDCAMQRLQAFKYELKPNGEQARSMRRFAGSCRFVYNKALALQSARYARGEKKLGYAGLCKQLTEWRNSADTVWLATAPVHPLQQTLKDLERAYANFFAKRADFPRFKKKGQHDSFRYPDPKQIKLDQGNSRLFLPKLGWLHYRNSREVLGTVKNVTVRQSCGTWFVSIQTEREVERPMPQGIAVGIDMGVARFATLSDGTFYAPVNSFKRHETRLRKAQQALSRKVKFSNNGKKAKARLQRIHSRIGNVRRDFLHKTSTTISKNHAMVCIEDLPVRNMSKSAAGTIEQPGRNVSAKSGLNKSILDQGWFEFRRQLDYKLAWLGGWLVAVPPQNTSRTCPCCGHVSADNRQTQARFACVECGFEENADVVGAINVLRAGHARFACEVSDAVGSPAAGTHRSDSGAARCRA

SEQ ID NO: 16401 - protein, 386 aa, Gracilibacillus sp.
MSVHLSIIRKRKEEKTVLRHKAYKYRIYPTNEQAILIMKTIGCSRFVYNHFLDQWNTSYAETGKGLTYSACSKRLTDLKKQPDTEWLREVDKFSLQNALRNLADSFTRFFSLQNGKPQFKSKKHPIQSYTTHFTNHNIAILDKSIKLPKLGFVKCAKSREPQGRIVKATIRKQASGRFFVSILCEEEIHELPKTDSAIGLDLGITDFAVFSDGHKENNHRFTAKMEAKLKREQRKLSKRALVAKKNGIRLFEAKNYQKQKQKVARLHEKVMNQRNDFLNKLSTAIIQNHDVICMEDLHIKGMLRNHKLAKSISDVSWSSFVAKLQYKAEWYGRVIIKVDQWFPSSQSCSECGHRDGKKSLDIRKWMCPACHAQHDRDINASKNIRD

SEQ ID NO: 16402 - protein, 374 aa, unknown
  TnpB Polypeptide
MLKAYKFRIYPTKSQKTKMEQTLDLCRWTYNKTLEIRKTAWEKEGKSLNKYETNNMLPEWKSKKPELKEVFSQVLQNVHERVDLALKAFFRRVKAGEKPGYPRFRGKGRYDSFTYPQKGFKLEPGKLYLSKIGEVKIKLHRTIEGKIKRLTIRRAATGKWFACFSVEIEDILLPPWKDGSMVGIDVGLESFATLSNGEKIANPRFFREEEKELTRVQRKLSKASKGTSERRSALKVVERVHERIANKRYEFAHRVSRDLVNRFGLIAFEDLNIQNMIKNHNLAKSIGDVAWNMLVTLTSYKAANAGSMVVLVDPRNTSKMCSRCGILVEKDLSERVHNCSQCGLSLERDWNAAINILRLGLQSVGIKTVEARSL

SEQ ID NO: 16403 - protein, 519 aa, Blautia sp.
  misc_feature (188)..(188): Xaa can be any naturally occurring amino acid
  misc_feature (500)..(505): Xaa can be any naturally occurring amino acid
MQTVSSYGVELRKQNIPVRQTLEIYRSVVCYLTEIYEQVWEELAEIPDAKRRFNAAEHLVHTTKKNPARFDFDLRFPQMPSYLRRAAIQHALGSVSSYETRMDLWEKSGEKAGKPRLAYENHAMPVFYRDVMYREEKEEKEGKDEAYLKLYDGHDWKWFCVRLNHTDMEYLRRNWSGKKASAPTLEKXVSSYGVELRKQNIPVRQTLEIYRSAVSYLTEIYEQVWEELAEIPDAKRRFNAAEHLVHTTKKNPARFDFDLRFPKMPSYLRRAAIQHALGSVSSYETRMDLWEKSGEKAGKPRLAYENHAMPVFYRDVMYREEKEGKDEAYLKLYDGHDWKWFCVRLNHTDMEYLRRNWWGKKASAPTLEKRHHKYFLRFSYTEEVTLTKTPVKEQIICSVDLGINTDAVCTIMRADGTVLGRKFINHPSEKDRMYRTLGRIRRFQREHGSAQSRGRWAYTKRLNIELGRKIAGAIVKNAEENHADVIVFEYLEMQGKISGXXXXXXALRSHGEDGHIRNA

SEQ ID NO: 16404 - protein, 299 aa, Blautia sp.
  misc_feature (299)..(299): Xaa can be any naturally occurring amino acid
IPVRQTLEIYRSAVSYLTEIYEQVWEELAEIPDAKRRFNAAEHLVHTTKKNPARFDFDLRFPKMPSYLRRAAIQHALGSVSSYETRMDLWEKSGEKAGKPRLAYENHAMPVFYRDVMYREEKEGKDEAYLKLYDGHDWKWFCVRLNHTDMEYLRRNWWGKKASAPTLEKRHHKYFLRFSYTEEVTLTKTPVKEQIICSVDLGINTDAVCTIMRADGTVLGRKFINHPSEKDRMYRTLGRIRRFQREHGSAQSRGRWAYTKRLNIELGRKIAGAIVKNAEENHADVIVFEYLEMQGKISX

SEQ ID NO: 16405 - protein, 376 aa, unknown
  TnpB Polypeptide
VNKISVKYRVFPKHTQQRTLIETLAVCRDVYNSLVHERTVTYTVLGKSPTLYQQQKAMTAWKPSHPELATVHSQVLQNIAVRVELAFQAFFRRVKAGEEPGYPRLKGKGQYDSITYPQGGYSVGESTVTLSKIGKVKAKIHRVCPGTIKTCPGTIRTCTVSREGNKWYVCFSCDYQAERLPASTECVGIDVGLKTFAALSNGEFIENPRFFRNEENALAKAQRRFDNVKNNHGSKERKAAKKVVRRVHERVKNRRHNFVHQQSRKLVNRFGMIAVEKLNVKGMVKNHCLAKSISDASWTQFRSALTMKAENAGRLVVAINPAYTSQDCSACGYRAKKKLSERWHHCPMCGLVLDRDINAAVNIMALGQQCLPVATG

SEQ ID NO: 16406 - protein, 463 aa, unknown
  TnpB Polypeptide
MIFKSKYNKQFVSNSLTKMKYEELYAFAMYLRKYKNILSKKICDNILLYLDMNKFEFLKYIRNNFPIKINSNFDSHAIIDVFISYQNKFNALQKTLTFYNVEFKGFDFYKRNCKNHKKGDFKKVNNKKTKSPLTTTLTYLARYGNDNTVEYIIKQLTNSDLNTKQRDYYSNILNHVNKFGFERLLLLSLQKRERIIKRYSSKPIEFKSLTFRGRSRKRKIIDYNKSYKSTINAFISLSWESRKSLDIPIKFAKNYHGSMKDYYKDNNPNYEYVVLFDEKHKQVRINICKDGERYAPSVTNEDKLVGIDVNVKHNLFSLSNGETYDYDRNLVNDFCNLSMEIDKLKSKNKDYKIGKRKQFKLDALRLKIKKKNQELISSMCKTLQVQGVRHIVMEDLNNGFGKSFVKDKNNGDINFNRVVKFLNISSLKDEVEHIARNYDIALSTVPIQVRCAPFVVVLRMRIG

SEQ ID NO: 16407 - protein, 419 aa, Holophagaceae sp.
MLRKVTYALYPNATQEAALLDMKGSHLRLSNAALEQRISAYRRCGVTVRFKDQCKDLTDLRAADPEFKALNAQSSQVTLKRVDLAMQAFFRRIGRGETPGFPRFKSFDRFSGWGYKTHGDGWRLTPGKDFHHGRLRLAGIRNLRIRGKARLKGEPVTCEISHKAGRWYASISLEVRPNRECGAGAAGLDWGVETFATLVHPDGRIQEIQNPRWVKQAEDALAEAQRVMARRQGPVGRKPSKGWLKAKREVTRIQRKTANKRRNFLHQESNSLVKALGLIATEVLSVKAMTASAKGTVEEPGKNVQQKAGLNRGILDTAPAAFLSITKAKAEEAMAEWVDVPTKSVKPKQTCRKCGSQRKKTLADRTHVCEVCGHTEKRDVNAAWVMLNWALWGSATGRVSARHGGATRVAPSCETPSIP

SEQ ID NO: 16408 - protein, 364 aa, unknown
  TnpB Polypeptide
MRFRLYPTPAQEVLLSEQCSHARYVWNLGLEQRLMWARWKGPTPGYVEQSRQLTEARAAQPWLAQGSQTVQQQALRDLDQAWRNFFAGTHNRPTWRKRGAHEGLRIVGPQALRIRQDNGRWSAALVPKVGWIPFRRTRAVVDWKSYRINRDRAGRWHLAFAMVPEPVPGPGTGGVVGVDRGVIVAVALSSGEMTSPSKLAAKESERLLRLQRHLARAQRGSNRRARVTTQIARLKARETDRRKDWVEKTSTDLARRFDVIRVEDLNTAGMTRSARGTIAEPGRNVAAKAGLNRGILANGWGLLITRLEQKAPGRVEKVQPRVHVANLRRLQTHRPRVPQEPSGLQVCGVWASGQRRRERGTQHR

SEQ ID NO: 16409 - protein, 371 aa, Hungatella sp.
MSGYCKDKGLKIAYKFRIYPDNHQQELLAKQFGCCRFIWNRMLSDKIFFYEQMGETLNVTPADYKDEFPWLKEVDSLGLANVQLILDRAYKAFFSKKAKFPRFKSKDQKQSYTTNCVRDNIRLEAEGLRLPKLGVVRIIRHRKIRKSGVLKSVTVSKDTDGRYYASILFSYPDEEPASTLDRTKAIGLDMSMKELYRDSNDYSPKFPKPYRKSEAKLKQLQKGLSKMQKGSNNYKKQKRKISSLHAKAKRQRQDFLHKESFRIIRENDYIFLEDIDLRAMSGCLNLGKSVHDNGFGTFRNQLAYKAAWNGKVVYKVSRYFPSSKTCSSCGYIHKELKLSDRTYICPACGNIMDRDYNAARNILEEGLRCCI

SEQ ID NO: 16410 - protein, 196 aa, unknown
  TnpB Polypeptide
MCRDRTLVGDVKTVTIKRDALYDLYLCFSVEVDDPKLRPTSGKMAGFDFGLKSFLTVHDGFESYEIASPELFKQSLKSVKALSRCLSRKAEGSNNRRKARARLARAHRAIANKRLGWFFKLSHDLTERYDYLFFETLNLKGMQRLWGRKVSDLAFGMFLNVLQYVANKKGKVVALIDPFFPSSRLCPHCGCINEHL

SEQ ID NO: 16411 - protein, 413 aa, Thermoprotei sp.
MRGKTTHAYWVVPRGEYMLTLKARGELVEGSIEELREELYLTRRATQYVIEALWELDKLPTINQAHQMFYKILREQGFRAHQCKQIYKYALGIVKSAKENGGKKPVLKKLSARLDKYDAKVDLENQLVVVKLRNKMFKIKLLHNRDYIKKFLSRKWYEVIISIDKQNRIWICIPFRWVYNPYKHKKLISLDINLKKIVAYNGKKVRRLNTRFTEALYLKHHAEEVQKKHNYAWRRNKKWLETIRALHRRSRNIVVDWSRKFAKYVVLKAKRMKSAIVLEDLEKLWFNSSQKSSSLADKLSRFAYRKLQHAVVTKAIEYNVPVIFVNPRGTSSLCPRCGAMLVYSHRLAICTRCRFIADRDVVGAMNIYLKAFQTLAPRLGSWGIHPMTNETRAKGGLHKNEPMIAYIHSYKNI

SEQ ID NO: 16412 - protein, 384 aa, unknown
  TnpB Polypeptide
MTRNFQYRIYPTGKQTRQMDAVLTVCQRLWNYFLEQKSVAYKTTKTSISCFTQIKEIPKLALKDESIREVYSQTLQDVPRRLDKAFQSFFRRVKQGEDPGYPRFKGKDRYNSFTYPQNNGSFKLTEDGRIYLSKIGCVKIECHREAKGIWKICTVKRTSTGKWYVVISSILPDVKVAKSTKPAVGIDLGLKVFAVLSDGSVIKRARFFKREEDALAKAQRKLAKQVKGTPERKKVKKVVARIHERIADKRNDFTHQNSRRIANAYGIICIEDLNIKGMQMKPTIVIQGKEKSARGIHRSILDVAWNQFDNQLSYKAEEAGGLVVRGNPAGTTKKCSACGKSRSMDLSQREYVCFCGHKEDRDSNSSKNILSVGLHTLEAFKKVS

SEQ ID NO: 16413 - protein, 246 aa, Homo sp.
VKTYKTEIELNPLQQEKFLRTIGTCRFVYNLFLQKNIELYAKNKNTNLLKYMDNFEFSKWLNNDFVSNNPEYKWIKEVSSKSVRYTIDNANKAFKRFFTHKSNFPRFKKKNKNDCNMYFVKTDKNAKIKCERHKIKIPTLGWCKLKEFGYIPTDKIIKSGIITKHARKFYVSVLVDEEIKIQKYNKCDGIGIDLGVKDFVILSDNTKYKTLKKKKLNKRLKREQKALSRKYEAKRKIKRRLPLVKI

SEQ ID NO: 16414 - protein, 416 aa, Paenibacillus sp.
VKLVYKWSPSLTAEQLSILEDLAFHTTKLYNIANHRCREEGFLPYVKLEKELKSNWHHDYLHSHTYQQCLKMVEQNWKSFFASSKDFKKNPHKYKGTPQPPKYKHVNNRKNEIIFTKFAIRLQENVLKLSLSKKMQERHQVDSFHVVLDPDNMPFDVTTLQQIRFQWRQSLRTWEMVMIYKQKERVLPKTFTNTMSIDLGVDNLAALTFLEGEDSYLINGKPLKSKNSYYNKEIARLTSIVMKQTGTSEDFIRTRRIRSLQGKRNRYVHNFLHQASRQIVDLAVEHQCRTIVIGKMKGIKQEHPCKMFVQIPHARFVDLITYKAKLAGIKVTSQNEAYTSGCSALDEENISQKSYAPERRIHRGLFVSNMGLVINADVNGSLNILRKYMKQKGSPDLIRSARDNGCLKHPKRILVG

SEQ ID NO: 16415 - protein, 134 aa, Paenibacillus sp.
MKLARLHEKIANCREDFLHKLSIRLIRENQTICLEDLQVENMLKNHKLARSIADASWSRFGEMLAYKAEWHGRNVITVNKSFPSSQICSVCGQRNPDVKDLKVREWTCPMCGAEHDRDHNAAINIEREGLRLLE

SEQ ID NO: 16416 - protein, 372 aa, Paenibacillus sp.
MQMTITAKIKINPTSEQIELLRNTLHAYRMGCNYVSALVFNTKQLAQAKLHKITYESLRSCFSLRSQMAQSVMKTVIARYQSLKSNGHDWTKVQFRKPEYDLVWNRDYSLTQGLFSINTLGGRVKVPFETKGMEQYFDGTWSFGTAKLVNKFGKFYLHIPMTKEIPTASEHTISQVVGVDMGIHFVAVSYDSQGKSLFFNGRLIKNKRSIYKHMRKQLQQLGTASARRKLKRIGQRENRWMSDVNHQVSKALVERYGANTLFVVEDLSGVRQATERVRVKNRYETVSWAFYQLRQMIEYKALMSGSRMIAVDPRFTSQTCPKCGHTEKGNRNKKKHTFCCKTCGYQSNDDRIGAMNLQRKGIEYIVEVTAQA

SEQ ID NO: 16417 - protein, 368 aa, Paenibacillus sp.
LHKAFRFRIYPDREQQTLIHQTLGCCRFIYNRFLALRTQVYENERKTLTYKACSRKLTLLKRESGFDWLRKVDATALQSAIKSLDDAFKRFFTKQNDYPQFKRKRASGQSYTTKNNNDAIRVEGNRIQLPKLGLVRFAKSREIEGRILSATVRRNPSGKYFVSVLCEMLYCPYVRVDKTKSVGIDLGLKHFAILSTGETIYNPKYLRKYETKLAFWQRRLSRRQKDGQNRAKARMKIARLHEKVANCREDYLHKLSTRLIRENQTICLEDLQVENMLKNHKLARSIADASWSRFGEMIAYKAAWHGRNVITVNKSFPSSQICSACGQRNPDVKDLKVREWTCPMCGAQHDRDHNAAINIEREGLHLLE

SEQ ID NO: 16418 - protein, 368 aa, Paenibacillus sp.
LHKAFRFRIYPDREQQTLINQTLGCSRFVYNRFLALRTQVYENERKTLTFSACSRKLTLLKRESGFEWLREVDATALQSALESLEDAFKRFFTKQNHYPQFKRKRSSEQSYTTKNNKNAIRIQGNRIQLPKLGLVRFAKSREIEGRILSATVRRNPSGKYFVSVLCKMLYCPYVRVDKTKSVGIDLGLKHFAILSTGETIDNPNYLRGYETKLALWQRRLSRRQKDGKNRAKARMKIARLHEKIANCREDFLHKLSIRLIRENQTICLENLQVKNMMKNHKLAKSISDAAWSRFGDMITYKAAWHGRNVITVNKSFPSSQLCSVCGERNRDVKDLKVREWMCPMCGTQHNRDHNAAINIEREGLRLLE

SEQ ID NO: 16419 - protein, 389 aa, Paenibacillus sp.
MIRCLKTPFRTSAADLNRLFECNRISAEIWNQCLSVAKEYSLQRGGKWIGQTELQAALKQQFPLHSQSVQAVSHKYLFARDSARQLKKQGLACKYPYKKKKYYNTKWVDKSFKIKGSVIELSLGLHSGKRQQPIKITVPHLPDADIKEIELVFDRKLMISMSYDDGKEAPVNEGEQVAGVDLGEIHSIAATTTSNQSLIVTGRKVRSIHRLRNKKLAEIQKRMSKCIRGSRQWKKYNRARKYMLGKSERQLHDAIHKTTRAFVQWCADQEVKEVVVGQVEGIQRNTKKKRRKTVNQKLSNWSFGKIRKQLAYKLEAYGIGVQTIDERYTSQQCPCCGRRKKSSARIYTCCCGYNEHRDVHGSKGILSKHLYSEIRYLGKTEAIKYLRIA

SEQ ID NO: 16420 - protein, 346 aa, Paenibacillus sp.
MQTVTVQIRIFPNDVSLLKEMGNEYIQTVNRLTEQAETAGVFPKLTSKDVEANLPSAIRNQAIRDARSIHKKTKKQGKRPILKQRAYYVNNQNYTIGQNTVSFPVMADGKVRRLTVSARIEEREQHVLDSGKSGLLKIVEKSGKWYVHLSIELQVKEAAGDITMGIDLGLKVPAVVVTSTGKTRFVGNGRQNKYIRRKYNSRRRKMGKLKKLSAIRKQQNKEHRYITDQNHKISRTIVNLAIEEQVSVIKVEKLTSIRQTTRTSRKNAKNLHNWSFYQLQKFIAYKAALAGIKVMEVNPAYTSQTCPACGKRNKATDRTYRCLCGFHSHRDRVGAVNIMRQPVTDG

SEQ ID NO: 16421 - protein, 244 aa, Paenibacillus sp.
MDNEFLKAEFVRDVRAVYRAFIIFGALSPSLRNRPVELLGNTETLEYIDRYESGKSGIQQAQSSSKYQHVLSTSIFRFFSIVKLSLQYQTLSNRYVHNFLHQASRQIVDLAVEHQCRTIVIGKMKGIKHEHPCKMFVQIPHARFVDLITYKAKLAGIKVTRQNEAYTSGCSALDEENISQKSYAPGRRIHRGLFVSNMGLAINADVNGSLNILRKYMKQKGSPDLIRSARDNGCLKHPKRILVG

SEQ ID NO: 16422 - protein, 402 aa, Escherichia sp.
VKRLQAFKFQLRPGGQQECEMRRFAGACRFVFNRALARQNENHEAGNKYIPYGKMASWLVEWKNATETQWLKDSPSQPLQQSLKDLERAYKNFFRKRAAFPRFKKRGQNDAFRYPQGVKLDQENSRIFLPKPGWMRYRNSRQVTGVVKNVTVSQSCGKWYISIQTESEVSTPAHPSASMVGLDAGVAKLATLSDGTVFEPVNSFQKNQKTLARLQRQLSRKVKFSNNWQKQKRKIQRLHSCIANIRRDYLHKVTTAVSKNHAMIVIEDLKVSNMSKSAAGTVSQPGRNVRAKSGLNRSILDQGWYEMHRQLEYKQLWRGGQVLAVPPAYTSQRCAYCGHTAKENRLSQSKFRCQVCGYTANADVNGARNILAAGHAVLACGEMVQSGRPLKQEPTEMIQATA

SEQ ID NO: 16423 - protein, 366 aa, Candidate divison MSBL1 archaeon
MMVEKTIVCRVLNLTMRKKGLLVKEYSNAQGYIRGETEDLYSATKQAMDRYVEKVQNEEYPLFLRNDTFEVERAEVTEEFDYWARVPISDVWGGVWVPIKPHQEIREDMDVHDSKIVWKSYGFELHLSVSFEVTSQAPETVLAVDLGERVMATTVLSADNGNPKFYGRRVRGIRRHYAWLRKRLQEKGLNKKVKELSDKEKRKVEDVLHKISRKIVDRADKENSLIIVGKLKGLGNRDTGKGKRMNRIVNSMPYYKLTKMIEYKAKEKGLWVVKVNERDTSKTCHKCGSENTSRPTQGRFDCNTCGLENYNADLNGAKNILQRFLAYMVRNGAPVNRPITEAYSKKHKIERLEKILGNPLLKSKTS

SEQ ID NO: 16424 - protein, 352 aa, unknown
  TnpB Polypeptide
MIIQKTVKASIFGLTKTKEAMLREEYNNFQAYLRGINAPLYSATKQQAERLLRKIGKPKQKEYPLILRRDVFNIRETKNKLAKFWVKIPIHHVRGGVKVPIQIPYNQEKFLSLDMGEGKLLWKKDHWGIHITVMKEAEVKPQPPSTILAVDLGERYIATSVEYADGVMKNPKFYGRNVRGIRRHYAWLRKRLRERGCLKTIKKIGRKESRRVSTVLHKISKDIVHHAKDSNAVIILGDLKDIRKRAKGKRMNRIVSNMPYYHLTQMVSYKARWEGIPVHIIKETNTSRLCHKCENKGIRPTQGFFICSTCGLEYNADLNGAINIAKRFSEQVLGNGAAFDTALNSGVVSHAR

SEQ ID NO: 16425 - protein, 341 aa, Microcoleus sp.
LTRWRSCSHWGELLRRHWNYALGQRLDWLRHTRTQIDCCSLMSEPIGEIPERVDYYSQAADLKETKRLFPEYKDIYADCQQQNLMRLDRAWKRWLIPDKTGKRGGKPRFKKQGDICSFTFPRVNSPKAGAHLIDTTLKLSKIGEIPVILHRRIPEGFEVKQATIVSKADGWYVSFSLEDSTVPSSVPVEEIQSACGIDVGLEKFLTTSSSEAVAVPQFYRKAQAVLARQQRKLARKEPRSKNYQKQVNKIAKLHLRIARQRKDFHYLVAHWLCASYDLIGFEKLNIKGLARTRLAKSILDVAWGAFLNILQAVAVRRGKHTQEVDARGTSIEMLQLWRKSG

SEQ ID NO: 16426 - protein, 485 aa, unknown
  TnpB Polypeptide
LVGLASEVRDVSAYATYVVRNDEALGDELARITATVPAVAGCRAGVTMPDFLASGRTGRSRKERLVQYNVVASYRSWQERADAANGDSSKYVSQGWKRTASAAAPSYGGDYVSLGAVDRQYAVIENDPFADGEIVLRMVIQGAWHRLIFDFDNKRFTEGKVTLPVIKVEDGQPVFIFTVATDNPVVQFSGDHVIGVDVGINNYATVVVRDVKTGRIVHETTLSQRVHSLWNSVRASRRQVRDLRNKAATLLCDRQGRMSVLDEAQLHREAASRKKRELAILAAQEIADLSHLWGNAVVAVEDLGWVANTMQNGRWNRGALVQWLTHYITQNGGWVVAVNPANTSQKCHACGAKVSHPTHELSVCPEHGTMDRDVNAAANIAARAIPRVSKARVTRAKNRKLQPQSTLRTPPARASLKYPGRDRTKSKPTPRRKNRRPFSKGVILPVCPARAQADCLEASVLADQGTQRPGDQQGGTQTRRRSLRM

SEQ ID NO: 16427 - protein, 403 aa, unknown
  TnpB Polypeptide
MRVFVFHLSCFFCYICIDIERLGKMMTYTYKLYRSKRTAKLDAMLREACFVWNHALALQKRYYSLFGKYVFCSRMKAHFAKRIVRRLLHSQTTQEILERLDASYQRFFKHLSRRPPKFRKARDFSSIVYKQGGFKLNGNILVVNSIRQHFQFSYSRPYDGNVRQIRIKRSRLGEYYLYIVTDAAAGSYTRRKSHEGVSVGMDFGLKTYLTLSDGTKVENPQFLKSDLNELRRRSRALSRCEKKSHHRVARRRELERCHERIRNRRDDWQWKTCHELCRRYGTICVEDLNLTGMTRLWGRKVNDLAFGLFMQKLEHVAAKYGTEVVKIDRFYASSKTCSVCQYVSELLTLDQRKWTCPQCGTVHDRDLNASVNILRQGIASSGSTRKTALARQGASATGESPVF

SEQ ID NO: 16428 - protein, 440 aa, unknown
  TnpB Polypeptide
MPKSKKLMGVQQILLHPDKGTEAILRYLCEQSGKLYNTGVYFARQIFFKTGKILTGKFDLAYEPSVSKSIVAQSLPSTPAQQTLLSVLEAFKSFKKLREKYLKEELHFKPKIPDYLKGNKLFKVAYPNSGGQKPKLIDGQLRFSLGLTVRRWFGLSDLKLPMPSNFDCSRVKEFTILPKNGVFYLELSYNIDQESHDLDINEALSIDLGTADNLAACVDTLGNSFLIDSRVMKAMNQLWNKKVSTRKEGKPEAYWDSWLDRVTRKRNHQIRDGTNKAAKLIIDHCLKYGIGTLVIGWNDGFKANADLGNLNNQKFVQMPLAKLKDRLKQLCELHGIRYQETEESYTSKASYLDGDSLPKYGEKPAGWKASGKRVQRGLYRSAHGFVVNADLNGAANILRKVARKLGLDLSQLGRRCLTTVARVRLWTIPKSTLSAESQCL

SEQ ID NO: 16429 - protein, 373 aa, unknown
  TnpB Polypeptide
MLLAHKIELNPNNKQATYFAKACGVARFAYNWALAEWKRRYEAGEKPSEPLLRRELNAIKREAFPWMLEVTKNAPQMAIIQLGEAFKNFFKKRARYPQFRQKGRDDRFTLTNDQFALNGPTIRIPHLGWVRMHESLRLIGKILSATISRKDDRWFVSIALETPKPLPGTCENQAVIGVDLGVSDFATLSNGETIRGPKPHQALMNRLRRLSRSLSRKQKGSRNRNKAKIKLAKLHYRIGTIRRDAIHQLTTYLTRHYAVIGIEDLNVQGMMKMRSLSRAIADMGFYEFRRQLEYKAVINNSQIVVADRWFASSKICSVCDYRVTALSLSVRAWICPSCGSFHQRDVNAAMNLRKWAVSSTVTACGASSSGTAV

SEQ ID NO: 16430 - protein, 370 aa, unknown
  TnpB Polypeptide
MQLSETVKLYPTKYQKELIFATMDEYINTVNSLVYVAINGTSISKYTTADINCNLPSALANQCIRDAKSIVKKHYKSCHKTILANRKQNKKSTVPKLPILRKPCCYINNQNFSVNSNSIDFPVMINGKSKRISVYAKLTARQQDLFNDAKFGTMRIVVKNNSVVAQIVYNVDEPVYPDDGNIMGVDLGIKCPAVSYCSDGSAKFYGNGRKNKYIRRHYKYLRKMLQSAKKQEAVKRINNKEQRIMKDIDHKISHDIVETAVAHNVKVIKLEQLTNIRSTTRTSRKNNHSLHNWSFYRLTKFIEYKAALAGISVEYVNPAYTSQKCPICGHVHHADDRNYTCKCGFHIHRDLLGAMNICNSTEFVGNRQTA

SEQ ID NO: 16431 - protein, 252 aa, Archaeon sp.
LSLCIARDVAPVECASTVGVDRNLRNLTVGNDVETRHYDLSETVRIAKTTVRIIASFRRDDARIRTEIASKYGQRRTARTDHVLHNATKTIVKLAARRREAIVLEEIRGIRALYRKGNGQTRKYRGRMNGWSFREAQRQIEYKARWAGLPVFRLSRRETRCSSLSCPRCGERLQSDRRLARKLWCGNCRIVIDRDVVAAVNLSRRGRVRFARSRPLILLEAQGGAVEAVKGNPTPTVIPGVDAPKTTQPTKS

SEQ ID NO: 16432 - protein, 425 aa, unknown
  TnpB Polypeptide
MVWEVTRTVRVRLDVPDDRKSDLHATNSKFQYCANRTADWAWRYPHEDCVTSKSEAEAAIYDDLREETDELHANLVQKAIKRATKDIDNCVDRLAESQNTSQPEYDTFSIVYDKRAATYYRDKVSLATVNGRVECDYDLPDNPEGTPHDEYLLNDDYSFSTSTVQYDSDADEFYLHAAMEKVVGADSPEKAEDSKVLGVDCNVDDHIAVTSTGQFIGNADYLNHKRREFEKRRANLQQTGTRSAHLTFQRIGDKFGRWSEDYLHQCSKALVEEAERHGCTHITFEDLEQIRERISDNKKFQQWAFNTLQTQTEYKAELVGIVVETIEPAYTSQQCSKCGCTLDENRDGQQFECLDCSYTANADYNAAKNVARKLALKLQRGQKSPAGGAFCQYALKLGVMTVNATEVASDTPVRQNESPPASTPL

SEQ ID NO: 16433 - protein, 360 aa, unknown
  TnpB Polypeptide
VPVTQVASVGFALITYKKENKYNELWSKCFNTNFRVFKKGTKYRFNFMIKTDGVSCCVLFVKTDEMGNPLSKTWQNKKCCQEENIDYVEKNPITKELQSMKVVCADPNMSDLIYCGSKNIDGKLETFRYTQNQRRLETRTKQYSKIIDKVNKETIIDNQTIKEIEAELSALNSKSCDYNKFEIYCMEKNKMNSKLNSHYQQFFFRKFKLNAFTNMQKSENKMVKNFGKKFGNPEETIYVMGDYDKGNFHMKGKEPTICKKFRRIFRNAGYKTFLVNEFRTSKLCNGCHNDLEMFMERATNKPKRKGEKEMCHGLLRCQSVKQCCEVIHNRDKNAVQNMLNIVNSVMNTGKRPEVFCRSIL

SEQ ID NO: 16434 - protein, 290 aa, Microcoleus sp.
LTILLFCAKIVRTTDANGAMLVLEFKIKGKPHQYAAIDEAIRTAQFVRNKALRYWMDTPGVNKYDLNKYCRVLAREYDFARELNSTARQASAERAWSAISRFFENCRQSVPGKKRCDPAPSYGARERAPREGYPRFKKNGRSVEYKTSGWKLLDPKHIVFTDKKNVGRLKLVGTWDLAFYGIEQIKRVRLVRRADGYYAQFCVKVEVREELKPSGNTVGLDVGLLEFYTDSNGECEPNPRFYRNAEKKLKRAHRRVSKKQKGSANRKKAVNRLGRVHLKISRQRVGEACA

SEQ ID NO: 16435 - protein, 410 aa, Microcoleus sp.
MKARYKYRFYPTDQQQESLAQLFGCVRVVWNDALASCQSDKYPGYNRLSKALTQSKKTEERRWLKDVSSVPLQQSLKQLDTAFKNFFDSLKGKRKGKKVSQPKFKKKTKRQAATFTKAAFSVKGDVVYLAKIGDLKPIWSRKLPATPSSVTVIKDCANRYFLSFVVEGKPTNIEAESQSIGIDLGLKTFAVMSDGEKVKSPDYSKLDRRIRQRQRQLARQQKGSKRRNKTRLRIAKLHNKIADTRLDFLHKLSTQVVSENQTIVLEDLNVSGMVKNRRLARAISQQGWREFRTLCEAKSEKFGRDFRVINRWEPTSQVCSECGFKWGKLDLSVRSVLCLSCETEQDRDENAARNIETVGMGHRHDLKRTGSDCKTSSEASCWEPSRITEASAGVSMSINQYLWSWDFRYL

SEQ ID NO: 16436 - protein, 390 aa, Microcoleus sp.
MLKVVKIRLYPNEQQKQSLEQSLGNCRWLWNYSLNLMNQTYQETGKGLSSYDIKKKIPSLKQEHEWLKLTYSQCLQQVCINLGTAFNNFFEKRARYPRFKSKHGKQSIQYPQNVKVLENALKLPKVGEIKAVVHRPIEGKVKTVTVTKNRCDQYFASILFEDGKPNPDSSTEGKAVGVDLGLNYFAVTSDGSKFDNPRWMAKHERNLKRKQQDLSRKQKGSNNRNKARKKVAKVHNKVARCREDFLHKLSRRIVDENQVICVENLNVKGMVKNPNLAKAISQVGWGMFLTMLKYKAEQEGKIYIEVDRFFPSSKTCNVCLNQIDSLSLDVRNWTCSSCGTRHDRDLNAAINLREEGLRLLTCGTRGQAYCPDVRPNRRFLTSSTVRQSVG

SEQ ID NO: 16437 - protein, 415 aa, unknown
  TnpB Polypeptide
MLSHAGAARFTYNAALAHVKAALETGEKLDWSYYSLRRWWNANKDVLAVGPDGVIWWHENSKETYSTGLESLAKALSNWSKSRKEKRKGPRVGFPKFKSKDRETPRFAYTTGSFGLIKGDPKALWLPRIGRVHCMENVTARVDGVRVVRMTISRRAGRWYASLTVERDEPTVKQAPKGGAVGIDLGVKTLATLSDGTVIPNPHSLAADEQRLRRAQKALSRKTKGSKRRAKARGRVARIHARVANRRSDALNKLTTRLAQTYSDICIEDLNVAGMVKNHHLAKAVQDASFYELRHQLEYKTAKTGARLHIIDRWYPSSKTCSNCGSVKAKLSLNERVYRCDECGLSIDRDLNAAINIMVAGSAPETLNAHGGTVRRSDPSGRATLDPVKCEPSRHESAVRLGAGGRKTTLQAGTH

SEQ ID NO: 16438 - protein, 402 aa, unknown
  TnpB Polypeptide
LALDEGQFDLLTRVAEQYNRLWGEVVAWCDQNHTVNRTRIHRENYRRLREQFPTVLSEFVGIAMRDAAGAVRAWNSNRPKRRWSLKATRKALVINYDLRTMSVRGNMLTLSTVRGEQRIRTLMPETPDWFSARYPSRKLNAATLILDPRTRTARIALIYHVENETPVADGDVLGVDLGQHSLYVDSRGGETKSSKIWGTKRKYAHNRKTLQEKGTRSAHRRLKAMSGREERFIRDVNHCVSKRLANSPNVKAIAFEDLTYIRRQATKRTKTGKRRRNMLNQWPFSQLQEFAAYKAAANGVRVIMVDPSYTSQRCNRCGYVDVGNRNGARFDCKRCAWSDNADHNAALNIRDRAIASLEHENTSTDRPVDRVPSTTRMDGTPTMTSPSEDGAESWGPRSRPNR

SEQ ID NO: 16439 - protein, 415 aa, unknown
  TnpB Polypeptide
MIILRGFKTELDLNGAQKTACARHAGAARFAYNWGLARKIAAHRAGEKVPTAIQLARELTALKRTELSWLYAVSKCAPQEALRNLDQAFVHFFRRVRLKQRGQWRGAVGFPRFKSKKSGHNRFRLTGSIHVYEQAIKLPRLGRLRLTERDYLPTTGARILSATVSERVGRWYISVLVEIEIADPEPAQESIIGVDLGVKALATTSEGLVIPNPKALQQRLRKVKRLQRAVSRKTTGSANYRKACLKLARLHQHVANVRRNALHQATTRLAKTKSAVVIEDLNVSGLRGNHKLARAISDVGLREFRRQLIYKGTWYGCRVIIADRFFPSSKRCSGCGHIRKQLALGERQFKCEVCGFSCDRDLNAARNLEQWPGTTASSAESHACGEEKFMAVPLNGQVLFSETGTGHHLDSVPDG

SEQ ID NO: 16440 - protein, 389 aa, unknown
  TnpB Polypeptide
VIRGIKVQLKPNNKQKTKLFESAGVARFAYNWTLNRQQENYKNGGKFISDKDLREEFTKLKQTKRYKWLNNFSNNITKQAIKDACNAYIRFFKGESNFPRFKSRRRTKPSFYVDTDKIQFTDTHVKLEKLTTSRKKNKQQFNWIRLYEHRRIPYGKGVKYINPRVSFDGVNWWIAVSIEYPDNIEIPTNEGIGIDVGIEKLAVVSDGNIYKNINKTKEIEKLEKRKKRLQRKVSRKYEKGREGDRYKKTKNIIRLENQLKKLNQRLTNIRHNYSHQITTEIIKRKPGFIVVEDLNVLGMMKNKHLSKAIQYQGFYEFYRQLQYKSEWNNIKFIVADRFFPSSKTCSQCGSYKKNLKLSDRKYICEDCGSILDRDLNASLNLKNYGQEIA

SEQ ID NO: 16441 - protein, 391 aa, unknown
  TnpB Polypeptide
LTRVEKVRIYPNPTQIRAFERILWTCCNIYNGALQERRSAYGRYKLAGKPKDFSWPTMRSQTDGYLEAREENIWLQNTYSETLRDVLKKIEVSMSAFMRRAARGEKAGYPRFLSSRRYDTFTYPHGKRAIKIFDKTLKFPKEIGYVKYRKSGRAMPEKFGVVRISRSAGKWYACFEHVIEARPLEASGREVGVDVGIANYAALSTNDFILNGKWDRKGNSEFHHQSVSSKKKRSKRRRKAVLLLSKSKAKEKRQRDDFLHKQSRKLVNEFDLIALEKLQILNMVCSAKGTIDEPGAKVSQKSGLNRSILDAAWGKFTNMIAYKAEEAGRKVVFVNPKNTSLTCFSCGHVIKENRKSQSDFLCVKCGYRDHADVNAAKNILERARLGLAAAA

SEQ ID NO: 16442 - protein, 379 aa, Lentzea sp.
LHHCAHARYVWNLAVEQHSHWQPGRAWAPNYVEQARQLTEARAGFDWLRAGSQTVQQQALRDFAQAVGNFFGGTHRKPTWRKAGQHEGFRQVAVRPEHVQRLNRKTGRVWVPKVGWVRFRWSRNVATGVKSFRVTRDHAGRWHLAFATIPDSIPAPGTGEVVGVDRGVTVAAALSTGDLLTCPALSPGEQRRLTRLRRALARAKRGSHRRRRVKTAIAKLAAREADRRRDWVEKTSTDLARRFDLIRVEDLNIRGMTRSARGTVQRPGRNVRQKAGLNRGILAAGWGRLVARLEHKAPGRVEKINPAFTSQTCSACGHCVPENRESQAVFRCVACGHQANADVNAARNIAAGRAVTARGGRALAGPANREPQLEPPSAA

SEQ ID NO: 16443 - protein, 370 aa, unknown
  TnpB Polypeptide
MEYSYKFRLYPTAAQQEQISRNFGCCRYVFNHFLAQRQEQYKETGRTPTRFQQDKSLTSLKQEYLWLKEADSTSLQATLQDLDVAFQNFFRRVKQGEKPGYPRFKSKHDHRQSYKSKCVGTNIKVLEKTVQLPKLGRVKCRISKEVKGRILSATISRSPSGKYFVALCCTDVEIEPLPSTGTAIGLDMGIKSFAVTSDGIEYPNHKHLSKSEKKLVRLQRQLSRKTKGSKRREKARLQVARLHEHIANQRNDMLHKLSTDLVRQNDVICIEDLAPKNMIKNHHLAKSISDASWGEFRRQLTYKADWYGKTVSVVDRFYPSSQLCSACGAQWQGTKDLAVREWICPACGAVHDRDINAAKNILNEGLRLQA

SEQ ID NO: 16444 - protein, 380 aa, unknown
  TnpB Polypeptide
MYQYRLYPSKRKKVKIINSLKVCKAIYNELLESSINAYKTTKKTLRKFDYNKLIKGKYPVHSQVAQNVSDRVHKAFSNFFRRVKDKSCKPKGFPRFKSRVNSITFPQSGFKILSHKRLHLSKIGNIPIILHRIPKGKIKTLTIKQNKIGQWFAIFSCELPDKAVVHTSKDKVGIDVGLENFATLSNGEIIANPRHLVQSEHRLKLLQKRLSRKKKGSANRRKARFRLAKQHLKITNQRSDFLHKLSRTLTQRFAIINVEKLNITSMLKSHWLAKSIGDASWNTFIRNLEYKAVTSGSKLVKVIARNTSKTCSECGTITKMPLAKRKFSCPKCGFVCHRDLNASINIRNGMGGLPKTYTPAETTPLQLSNQLQVLPMNQEL

SEQ ID NO: 16445 - protein, 318 aa, unknown
  TnpB Polypeptide
LVAWIYISHHNIYIIAYVIFTRLLRIPPCIKPHQIREVTILPVHGGNAYKIEFCYKVPAKPQNLDPAQYLAIDLGLNNFATMVDTATGAAVILDGKRIKSINRWYNKENARLQSIKDKQGITGITKRQARLLKKRDCQITEAMNRYVTWIANYVLQHRIGTVVLPRWDGIKDKIRHGRRGNQNFVQIPFHKFRQKLKSTCEMYGIRFDDSHSEAYTSQVDALALDPIRKPPYGRKRRIKRGLYRSALGTLINADVNGALNHLRKVAGDSVVPRIIGRGRVNRPVRIRTSFEPSTFAPIKLQPCAPQGAPLQAPGFNRG

SEQ ID NO: 16446 - protein, 485 aa, unknown
  TnpB Polypeptide
MSQLAAEVRDISAYATYVVRNDVTLGERLALAGAVQPATAGRRAGVTMPEFLVTGKSGRSRKEALIQHNVATSYRSWQERINAAEGTSSRYVSQGWKRVVDASAPAYGGDCINLGAVNKQYAVIENNPLKDGEIVLKLVIQGKWHRLIFPFDNQRFTEGKVTLPVIKVEGNQSVFIFTVVTDNPVVQFSGNYTIGVDVGINDYATVVVRNSATGQIVRETTLSQRVHSLWNSVRASERQVKQLNKKADKLLYDRQAHMSAIDEAQFHREAASRKKKELAILAAQEIACLSHQFNNAVVAVEDLGWIKNTMQNGRWNRGAFVQWLTHYVTQNGGWVVAVNSANTSQVCHLCGEKVEHPEHKVSACPKHGDMDRDINAAANIAARAVPKVAKARKTRAKNRKLQSQARLKTPVARETLKYPGRDRTKNVPTPKRKKKCKGVILSLSPARVNMTTVIADCGTYGAVETNKAAVNQDYATHECRLCNLN

SEQ ID NO: 16447 - protein, 245 aa, unknown
  TnpB Polypeptide
MLSAQFECARPTPLPASEVVVGIDLGVSTLVTAFDGTGFEEVAAPKHLRKAMKRLRRAERAKSRRKKGSARRRVQARRVAAIHRKVRERRKDLLHQVSHRLTAKAGVLKVETLNVRGMARNRHLALSVADAGMSRLVTFCRYKADWRGRRLVEIDRWFPGSQTCCRCGAIHPEMRKLSRDVMICDCGNRMGRDRNAAVNHYSYPEEPGKRGSAPTRAEIGGQGLAPVPVGEARMLAGVVSDHESQ

SEQ ID NO: 16448 - protein, 370 aa, Bacteroides sp.
MKLTLKIKIIPTDMQRQALLDTLKEANAACNLISEIAWQNKTFNQFKLHHLCYNDIRTKFNLSAQIVVRCISKVADAYKLDKKNQRNFKELGSISYDSRVLSYSGDYVSIWAVNKRQKIQFVCHNTNYLPYIKGEADLVFKKGKFFLFQTVEVPEEDVEDVEEFIGIDFGITDIVCTSEGNTYASQSLNQYRDKQRKIRGSIQSKGTKGRIHECKRGCARLLKRLKGRERTTATIINHTISTQIVADAKLRGVGIAIEDLSKIRSTSKRRNKTFKKELNSWSFYQLRAFLEYKAKMAGVPLIVVQPAYTSQTCSKCHHLGTRKNKSFKCGYCGNDMDADINAAKNIALLGAVVNQPEKSGMCSCSLHITA

SEQ ID NO: 16449 - protein, 522 aa, unknown
  TnpB Polypeptide
VPKLAYIGIIPSYSKSAQEYFKLLKKYNEDVKLKKDNLKKPIHPYYLEMSKSPEKFLLCMLKMSNELEQTNKSQLQVLPMRSGFVPKYITLDTSSLVSLLYETPKENIKITKQRTVKQNKNNSLKTTKINKPLTPKQETRAKLAKLLEEEKAKKMKEREIQLKFQEDNKSQFQNKSEMLNNLTFNAPKIWGQIFKFNKNKIKTNRKHYIFDYLIKTDGISTTLQFKIKSENDYAIHHNKKIDNIDEVLDEFRYLDKLDKLKLKDLNNKYNIVGVDPGKKNILYMRDFKGEQLRYTSQQRRVECQMKKSNRVIHNEKLKVSHIQNLETELSKYSLKTVDIKKYKQLLQLRYIHTKALRYFYERDIYRKLRWRRFTAGQRSEMKLVNNIKETFGSDAVLLYGNWSRNTQMKYFYPTPNIGLRKRLGVHFKIYMIDEYKTSKTCHECKHENENKIYHKDKRHWKNNQQKLVHGVLCCTNINCNTTWNRDVNGSLNILEIGQAILNGKERPEVFRRTTISQTIQPT

SEQ ID NO: 16450 - protein, 383 aa, Actinoallomurus sp.
VLTEHCGHARFVWNLAVEQHAHWRSGLRSAPGFAEQGRQLTEARAEFGWLAAGSVVVQQQALRDFAQAMANFFAGTHRRPTWRVRGRGEGFRIVAVKLGDVRRLSRHVGEVRIPKVGWVRFRRSRAVPEAVKSFRVTCDRAGRWHVAFAAIPEPIPGPGNGDVVGVDRGVRVSAALSTGQLLSAPGLRKTEAERRLRLQRRRAKARRGSNRRANLSAAIARLKAREFDRRKDWVEKTSTDLARRFDVIGVEDLKIVAMTRSARGTLAEPGRNVAQKRGLNRGILASGWGRLVARLEHKAPGRVVKVSPRYTSQTCNTCSHTAAESRESQAFFRCVACGHAANADVNAARNIADSAAGRAVAARGGSGLPEPANREPQLLLLPG

SEQ ID NO: 16451 - protein, 181 aa, unknown
  TnpB Polypeptide
MALRRHREDGHIRKRLNTELGKKIAGAIVRYAEENHADVIVFEYLEMQGKISGKKKQKLHLWRKRDIQKCCEHQAHRKGMRVSRICAWNTSRLAYDGSGAVTRDWENHSLCTFQTGKRYHCDLSASCNIGARYFIRELLKPLPATERSLLEAKVPPVKRRTSCVYADLRKLHSEMERLKAA

SEQ ID NO: 16452 - protein, 358 aa, unknown
  TnpB Polypeptide
MILTYKYRLKDGHAKVRLHSWAWAINQVWNYCVETQRKVQLMRQQGASCSWPSNFDLSRLTTGTSKDLMVNSKSIVEACTQFTRSRDRSKKCPRFRASSGSKRALGWIPFPQDGYRVRGNSVVYLKHHFRFFGTNCRPIPSVVKDGCFVEDAQGKWWVCFHVEVGTLSAGTGEVGIDLGLKTLATTSAGEKIENPNAFRQLEAKLATAQRAGNRKLTKAIYRKISNIRKDHLHKTSAKLADANRLIVVGNVNAASLAKTRMAKSVLDAGWSMFRNMLAYKARRHQATFLEVDEKFTTQTCSTCGSIPESRPKGIAGLGIREWVCSDCGANHDRDVNAAKNILRLGQGVLPRVDESQLS

SEQ ID NO: 16453 - protein, 358 aa, unknown; identical to SEQ ID NO: 16452
  TnpB Polypeptide

SEQ ID NO: 16454 - protein, 554 aa, unknown
  TnpB Polypeptide
LCEDAAVIVDMAAPAAPFGRHVSRYYNQSLQPQYDRALLTPVAGSYTVRKTITPCAYRGLTHTLIKTPVAPLATRLMADAFQPLTVASSSILVPSRPCFAPFPTNVKKRKMNAMVQKKTDLSDGEHYRAYKVRLHPTPEQTEVLRTWMAAKRLFYNETVAAINHHPWDEEQPGYSEFREHVRTNVNAMNPWVEDVRTTVKAAGSAAAWEAYQTNLAKHRLNPNHRFRLQFQSLRRLDITPTEVVSLGPPGLNKNGNDTGQCLLNGFFPAASTRKVGGSRMDMECRLMGGMPGTIRAADSTETVMRLLSEKRPTTTPLILWEKRTHRWYLILRRVVTRPPDTRPTAEREVLALDPGARKFAAFYRSDGTHGELLRGADSYIQKQCRKADLERSRTDTAANHDQWHRHRGRMLRTFARIRNWTRNAHYEAIKSIFTLADFIVAPIFESQRMVRRAERVFGNDTARRLYTWSHYGFSQRLYSKVQTTTNKQMAFTREPGTSKTCDRCGAWNAALGGSETFTCRACAYEADRDHHASRGNLLAALGAAMNVGPVGVER

SEQ ID NO: 16455 - protein, 303 aa, unknown
  TnpB Polypeptide
MQGSTYGVFERTRVEPHDVPLTLLASELRFKILGKKVIAHLTFTREFDVNYDPKNVTAVDVNENNVTVALFKDGVLADAYRVETSLGRIVIAYSERRKRMTQGKSTKTREVRRRLKNLGEKERKLDVLRKTARFIETLATENGAVVVVGNINENAKKRMEESASNKLRHRIHQWSVKKLIELLDEKPIHVVKVSERGTSSRDPFTGRRVRRFKPLVIRSAVKGVKRVKVVKVALRVAWVNGGVLERDVVGAVNIGSKYLNSDGSPVALGSTGTHGVWMKLVIPHRGPTPLTELQVFTNTIKYR

SEQ ID NO: 16456 - protein, 397 aa, Herbidospora sp.
MSRYRLSPTPVQEAALAEHCGHARFVWNLAVEQHSYWKPGRKSAPGFAEQCRQLTEARLEFEWLRNGSIIVQQQALKDFAQAMANFFGTTHRKPTWRKRGRGDGFRIVAVKPGDVRRLSRHVGEVRVPKVGWVRFRWSRAVSGDVKSYRITRDAAGRWHVAFAAVPESIPAPGTGEVVGVDRGVTVSAALSTGGVETVPGLREGEKDRLLRLLRKLARAQRGSNRRGRVKAAVARLKARESDRRKDWVEKTSTRLARAFDVIGVEDLKILDMARSARGTLEMPGTNVRQKAGLNRGVLAAGWGRLVTRLEQKAPGRVVKVSPRFTSQICNACGNRAPENRESQAVFRCRACGHQANADVNAARNIRDIAAGRAVNARGGDPVAGPVNREPQLVLLSG

SEQ ID NO: 16457 - protein, 386 aa, unknown
  TnpB Polypeptide
LKATLKLRLHTCSQSLGSGTSTCRETESILLETLRQSTACFNAVTAQGWDTAERNGTRLHHATYKTLRGNYPDLPSQLHCAARVKATEALKSVDERLKQGRKAGRPTSQLCPVRYDARSYWVKLEEGMASLASVAGRVCVRFNLCGYYRRYLGWKPCSADLCFDAKDRRFYLHVVVETDAPKASCEAVLGVDLGITEIATDSEGNQYSGEAVKSVRRRVRRIRRLLQAKGTKSAKKHLKRIRQKQSRFSRDTNHVISKRLVATAANSRKALALEDLKGIRDRAETVFGREMRWLMGNWAFDQLRQFTAYKAEAAGIPLVSVDPRNTSRTCSKCGHCEKANRKSQAKFYCLSCGFETNADANAAVNIGVRASSSESLLSQLRLRPSA

SEQ ID NO: 16458 - protein, 415 aa, unknown
  TnpB Polypeptide
MRRTNTFILDPTVEQERMLRDKTTNCTKLWNEVTYRKRQAYMNYQPLDWECKDLYQKYSPLIDSSTAQQIIRKSNESWKSFFALKKMEREGKLPPNIEKICMPGYWKNNGKYKLMMVLRNDCYSLKDEVMRLPKKLEVPIKGKPRWSGRQGRAEVIYDDLDGKWRVFQAVNVKPIFKPKGSKTCYIDIGIINLFTIWVEGWRQPIAFSGRNLLSDWWHWNGRIAECQSILETINGKKSSKRLSRFYKMRQRRFRQAINTMMRNIVIDLYDLGVSKIVIGNLTGIRENNDNGKKSNSMIHNFWSFKYIIQRLKCTAQEYGIRVKEVSEYKTSSICIRCGSENIERKGRLFKCLECGLEAHRDAIGVLNMANLHNGGTAIRVMTHPKLLKWDGMKWQPKRAMTHQPMNMIEARIPCL

SEQ ID NO: 16459 - protein, 393 aa, unknown
  TnpB Polypeptide
MRAKKLLKSYKTEINPTLEQIQKINKTIGTCRFVYNFYLAYNKDFYEREKKFVSGMGFQKWINNEFIPSNPEYKWIKEVSSKSVKKSIMNADTAFKRFFKSQSGFPRFKKKGKSDVKMYFVKNNPKDCRCERHKIKVPTLGWIKLKEKGYIPTTKQGYIIKSGTISYKAGRYYISVLIDIPEIKKSQLNDFGIGIDLGIKDFAVASNGMIKKNINKTAKLKELEKQLKREQRSLSRKYEDLKKRNKKKGVATRQNIQKQVLRVQKLHHRIDNIRTDYINKTIAEIVKTKPSFITIEDLNVRGMMKNRHLSKAVASQRFYDFRTKLKAKCDENGIELRIADRWYPSSKICHCCGAIKKDLKLSDRIYRCDCGYVEDRDFNASLNLRDMRTYKIA

SEQ ID NO: 16460 - protein, 288 aa, Lactobacillus sp.
  misc_feature (278)..(281): Xaa can be any naturally occurring amino acid
MLVSLTVKAKLKLDNATDAAKFQETSEQYRSACNHVSEYIFNNGFKLSGNKIQKKLYPDLRQRFGLKSQLAISAIKTTVANYKTVQTQLRRKPMAYPTGKKDKKGKEIYLKVPRDLHWLWKPVYFQRPQADLVRNRDWSIVANGEKLSINTLQGRVKAGFVLKTGFEQYLDGTWEFGGAKLIKSGANWFLHIAVNKEFPELSRTDMQHVVGLDRGIRQLVTTYDDQGKTAFFNGQAINRKRRHYKALRTSLQRHNTRNAKRRIRQMGNKENRWMTDIXXXXDQIPCLF

SEQ ID NO: 16461 - protein, 409 aa, unknown
  TnpB Polypeptide
MLKARVDKKMISYKFRLYPRPEQEKRQLWTLEKCRFVYNKMLEGLNRQEGKPNRLELQNSIPELKEKHPELKKVYSKVLQYESCRLFSNLKSLARLKKNGKKVGKLRFKGKGRFKTFTYNQSGFKIIETGKRHDLLHLSKIGNINIRVHRKVKEGKEEEEIKQVTVKRHSSGRWYAFICCKQTVPDKKEVKKVVGIDVGIIHYLTDTEGRQVEPPLYLNKSSKSLRRKQRKLSRKKKGSNNYKKQKIKVARIHERIKNRRDDFLHKLSKFYVQNYDFITVEKLNINGLKKTSYNPRNIMDSSWNQFKQFLSYKAERAGKTVVEVDPRGTSQECYKCGKEVEKSLAVRTHKCPHCRLEIDRDYNSAFVVLKRGLENVLGQGLSEFTPGETEPLPREIPASSVVETGSSFR

SEQ ID NO: 16462 - protein, 642 aa, unknown
  TnpB Polypeptide
MDVKENPPEDYMKGVKVPIKHVLKNPEINLPKITEAVIKCNKIYIQTLQFMKLYLLDYYNKHNKLPIIDDEFINTCMKIQCVESGTGRPPKKEIKELKDKLKLFYDEHYKQVISDEKLDYTHLNTVLDYLTISILTVYENNIKQHYVEYVERYVNVVWKKNYIVNKIKNKLYLTKKEKDIKVSKLCNQLRKIKNDILNVNNKIKYKSDKSYHKWINEQKKVIIPTKNKFMKDSIYYDIQCTPQEYYTCIIFMMKQVDNQNLFINNVFPMRTEIIPKHIKIDTTTLIHLLMIKKQGNKTDYLLKGNLKKNEDKIWKFFFRTERQCFSKSEYKFHHMIETDGVSCSILFTRNDLVGKRLPKNKIINKELYIDEITDYSEIKNKKIIALDPGKCDLYYAVDGDTNNANHFRYSQDSRRKETKSKKYGKIILELKKEKIDGKTIIEYETELSKLNKKTLDIDKFKIYLKKKNEVNKKLFMFYETFIFRKLKLNGYINRIKNEQKMIRNFKKIFGEPKDVVVNFGDFEQKHQMKYKEPTKGKGIRTLFRKNGYKTYLVDEFRTSCRCAKCGNETKKFMKRENPRPNKNNIKLVHGLLKCQICKSVWNRDCNGATNIYKIANNSINELERPNYLCRNNNNSAVFDDIA

SEQ ID NO: 16463 - protein, 638 aa, unknown
  TnpB Polypeptide
LVAKGSGQKVKGIDLERLMRHFEKYVTVVNMMLDRVYASPTRAETIGKALSEYRGRAYTLLRREKDLCYEKNDEFKTLIYERLHRNALEQVGRMVLADYSRRQLFTAAVTVLVKDPDDALSLMRRKRIPGALIRKVRDACDAVKDNGSGFHYAMGVLRQLRYAVDQHVLDTMGIKLQWRGTQRKKIASLLRTSSPDYGQVSGMVLQLLQHWDKKGYPFTTPQLRNYSLDFSASTENSIGQGYWFTVDEDRPKEILLHLKLPPGIDGRDHDASPYKKRTLSFRFLNWLSRAANDDRGMAEKTADLQRKDQLLFRAAKFDDMHHQLINTIQFQHAAHLLARLKARRNRDEEQITELEKQVHILRQSRRSAPPRILVDGRRVTLQIPFMAPDDTLIEEVLGERDYDAKAGVDRGLRSPVAISIERDTKDGREFVDRLIGAARLIQKRELLRKQAYTLISESKRKKNNWDRKRSGQVYPGHILKKDRHIDALWRKVRRLDREVARTVASETVWVCEEHRVRKIFFEDLRSFQAHGGSKDLSYNLSSNLWGKIIDTVRYMREQVGHSPYSVWTVNPWHTSQLCHQCGQKGVRVKDAHATTETRGGEYFYCSGCDEHFHADVNAARNIIHVQDASSSAVAGRTA

SEQ ID NO: 16464 - protein, 473 aa, unknown
  TnpB Polypeptide
MNYVITLLLKTEIWQEHIIEKRSNIARHIYNCCLREITKRYKKLKKDKEYRNIINSNDKKLKNKILKELDEKYKLSKFSLNKFVKDMAIRYKKNIGSQMAQEISERAYSSYHKLRFGNVKKVCYKKYEEFYSIREKTNNTGLRYDKVNNVITWLGLVIPVIIKKNDKYILHSLKDKIKYCRLIRKEIKGKYKYYIQITIEGVPMLKHSVGTDEVGIDIGTSTIAIVSDNKVIFDRLAYGLDNIDREKRLLQRKLDRSRKSNNKDKYNSDGTIKKNKSKWIFSNNYKKIRARLKELQRKLKEKRKLSHNKLANKILELGIKVKVEDMNYQGLQKRSKKTEISIKTGKYKKKKRYGKSLLNYAPAMLLTILDTKLKYYGESLIKIDTINVKASQYNHIEDTYKKKKLSERWNILGDDKIQRDLYSAFIIKNVEDDLKSIDRDKMIRGYSKFLELHNKEIERIKNIDLKTLKCMGF

SEQ ID NO: 16465 - protein, 476 aa, Shigella sp.
  misc_feature (34)..(73): Xaa can be any naturally occurring amino acid
  misc_feature (301)..(372): Xaa can be any naturally occurring amino acid
MVKNLASVFGDKDQVNMHQENTMPSTPDIGFFFXXXXXXXXXXXXXXXXXXXXXXXXXXXXXXXXXXXXXXXXGGQQEREMRRFAGACRFVFNRALALQNENHEAGNKYIPYGKMASWLVEWKNATETQWLKDSPSQPLQQSLKDLERAYKNFFQKRAAFPRFKKRGQNAAFRYPQDVKLDQENSRIFLPKLGWMRYRNSRQVTGVVKNVTVSQSCGTWYISIQTESEVSTPAHPSASMVGLDAGVAKLATLSDGTVFEPVNSFQKNQKTLARLQRQLSRKVKFSNNWQKQKRKIQRLHSXXXXXXXXXXXXXXXXXXXXXXXXXXXXXXXXXXXXXXXXXXXXXXXXXXXXXXXXXXXXXXXXXXXXXXXXILDQGWYEMRRQLEYKQLWRGGQVLAVPPAYTSQRCACCGHTAKENRLSQSKFRCQVCGYTANADVNGARNILAAGHAVLACGEMVQSGRSLKQEPTEMIQATA

SEQ ID NO: 16466 - protein, 460 aa, Kandleria sp.
MAVITTETRLDMRGSPDVIEYIKSYRTDYGIMQRYVWRRIVQSKGKFDKSKLNTETQRKFGVTKRTANSIIYDMKGRYKALKELKKTELSQMSYKISALEEKICRLAKSVDEMSKKASKNELSEKQLGYYRSKKKSLFYKKQRLQKLKDRYRQLELDVKNCHFKLGFGGRKNFGNQHRLEENGFKSHEGWYIDFVGKRDGNIFYLGSKDESCGNQMFHLEPCDNGAYTIRIRKDGKYVADNKYVFGTCRFSYMDDEIRNIVTNGEKAISYRVKIRGTKVYLQAIFTFDTEKMPIVTSNIYGCVGLDFNDGHIELSETDSKGNLVNIKTYPLKFHGTGGKAENEMRTVISEIGKYAVSVGKDIVKEDLSFLKKKSKVNRAKSKRGKDYNRMIHTLDYTRYEDALENMTARYGIGLIEVNPAYTSKIAKQKYCMQKKISVHSGAAYVIARRGQGYTDNYFVS

SEQ ID NO: 16467 - protein, 390 aa, unknown
  TnpB Polypeptide
MDRTMRLRLSPTADQATALAQTAAQFTHAFNHVCREGWSAREKNGVRLHHATYRESKALAPGLVSDLHIQARVKATEAVKSALDRQKKGRPVVCPQSRACPPRYNVHTYRLDWGSGVVNLATAGGRLHVPFQVSAYAARYAGNPTATADLVLKKGQWYLHVVVDMPAPEVVPTDSVVGVDLGVTRAAVTSDNRFHGQRRWRALEARDFRLRRKLQKKGTKSAKRHLRRLSGKTARRRRDHDHVVSKQIVQGLPEGSTLAVENLTNIRSRVRAKRANGGQRRLHSWSFATLRAFLTYKAAERSIRVEGIDPRHTSQTCSRCGYQHRRNRLSQSEFRCRSCGYQTNADRNGARNIAAKLLVSRGMTVAGGVQSITLPSPTSVEGQAPLFRAG

SEQ ID NO: 16468 - protein, 336 aa, unknown
  TnpB Polypeptide
MHRHAAVRTGERMTLSVSAQPAPRAVLTRVGGVDKRDSDTRHLGLRLDGGTDGAKLPERQTATQRQTSGKSLLRPLHLQVLKHEHGIDGSPLYKALGRDAGEADLLCDHKGRWRLKVCAHFPDPAQQTTTDVLGVDLGIVSIATDSDGMRYSGAKLLGLRARYTHMRTKLQKKGTSSARKLRRKRSKKERRFQADTNHVISKKIVQQAASTGRAPAVEDLTHLRTRVRLKKSQRRTHSSWAYADLRAKIAYKATMDGLSLFVVDPAYTSQTCSQCGHCEKANRPTQAFFLCRQCGFAAHADGNAAQNIRALGRVAVMLPNIPRSGVLNRVGTSPLL

SEQ ID NO: 16469 - protein, 417 aa, Methanobrevibacter sp.
MYLTQTNLIRGLSKREYLMLRMMCFFSKNLYNVTLYNIRQYYFTEKKHLRYESNYHVTKDNENYKLLQAGVSQQIMKIVDRAFQSFFALIQKARRGEYRFQDIKLPKYRDKGSLFNLVLQSNAISIKNGFLTVPMSMAFKQIYGNEKIKIKVPERVPVKKIKEIRIIPIANGKKFKIQYVYEIEEENLNLNQSETLAIDIGLENLATCISTVGTSFLMNGRAIKSINRLWNKRRAELQSRLPKNQHTSSLICRLTLKRNNRVNDCIKKTARYIVNHCIENNIGTIVCGYNPNFKRGINLGRKTNQQFTQINFGSLREQLENLCRRYGMNYLEQEESYTSKASFLDLDEIPKYNADNPKEYQFSGKRIKRGLYQSSDGRIVNADINGAANILRKSSQNFNFEKLGRGLLASPLRIKLT

SEQ ID NO: 16470 - protein, 441 aa, unknown
  TnpB Polypeptide
VKITSSYGVELRKQNIPIRQTLDVYRSAVGYLTEIYAQVWEELERIPGTKKRFNEAEHLIHTTKKNQARFDFDIRFPKMPSYLRRASIQNALGSVSSYKTRLGLWEKTDRLEGKPRLVYENHAMPVFYRDVMYREDEVGKDAAYLKLYDGHDWKWFHVRLSHTDMEYLRKNWSGKKASAPTLEKRNRKYFLRFSYTEDVILAKIPAKEQIICSVDLGINTDAVCTIMRSDGTVLGRKFINFHSEKDRMYRVLGQIRRFQREHGSVQVKSRWAYAKRLNTELGRKIAGAVTKYAKENHADIIVFEYLETKGKISGRKKQKLHLWKKRDIQKRCEHQAHRNGMRISRICAWNTSRLAYDGTGTVIRDPGNHSLCVFQTGKRYNCDLSASYNIGARYFIRELLKPLPVTERSLLEAKVPAVKRRTSCVYADLRKLSSEMNLRAA

SEQ ID NO: 16471 - protein, 379 aa, unknown
  TnpB Polypeptide
MIKSYKYRLYPTGKQTKALESQLDGHRLLYNQALAQRKEAYEQTAKGIGYSAQATGLLPKLKKEAEGLALCNYSSLQQTLRKLDKSFNAFFRRMKAGEKAGYPRFKSADRFNTITYATLGDGCQIKENRLYLQNVGCIKVKWHRPICGDIKTVSITRRNGKWYVSFAVEYETEHLPETGKVVGIDMGLRAFITSSDGQQIPSPKYLRLAEKKLAKAQRRVSRRKKGSARRRNARILVTKHHEKIANQRLDFCHKLAHSLVQKYDGFAVEALNIKGMVKNRHLAKSISDASWGMFLLILRSKAENAGRWYQEIAPNGTSQECSFCGNTVKKSLAVRVHNCPHCGLSLDRDINAAQNILQKARTEPSWRGGVVMPLIEARS

SEQ ID NO: 16472 - protein, 372 aa, unknown
  TnpB Polypeptide
MKLTVKIKLLPTKEQQGILLETIKTFNNVCNYISQRAFETKTFNQVKLHHLVYRESREKFGMSAQFIIRAIAKVADSYKISKKTLCRFKPYSAVVYDRRLVSFKGLSIASMNTIAGRQKIPIVFGNYASLDRNRMRGEADLIYKHGKFFLHVVIEVPDGTPIDPKGVLGIDKGIVNIVATSDGDTFSGQQVDAVRERYSKLRQSLQKAGTKSAKRHLKKVSSKQSRFQKDLNHCISKQIVSKAKDTQRAIALEDLSGIRLRQTVRRADRQRFGNWAFYQLDNFIEYKAKLAGVLVVKVDPRNTSRTCSVCGFVSKSNRKSQAVFSCISCGTTMNADFNGAVNIAFKAIVNQPIAVHANILYPPTLGTASHLL

SEQ ID NO: 16473 - protein, 375 aa, unknown
  TnpB Polypeptide
MRKTYLYQAKINKQTEANCNQWLELCRNLYNQSLEQRIKAYKEDGRSISAYTQMAQLPALRKSSAEFRQVGSQVLQDVIQRLDKAYKSFFQRVREGNNKAGFPRFKSKSRYDSFTLKQTGWKLEGRYLHVKNIGRFKLFLSRQIEGDIKTVTIRRSSTGKWFIAFSCDDVPIREFPKVTDEVGIDVGIKSFCVDSDGNQIQNPKFLKQSLKLLRRKQRSLSRRKKGSNRRSKARILVAKTHEKISNQRKDFLHKIANYYIEAYSAIHIEDLNIKNMIQNKHLSRSIADSSWGMFFNLLAYKAEEAGRNLIKVTPNGTSQICSGCGEKVPKSLSVRIHQCPFCNLVLDRDHNASLNILRLGQSLQTLTDRFQTTVV

SEQ ID NO: 16474 - protein, 431 aa, unknown
  TnpB Polypeptide
MTGLKNLPKYEKRERQQRRCKTVKMNVQIRLYPNKTMKTILDSLCDYRRYCWNQGLELWNTLYEQRLIGLTDELRAKIRASLTDKTIEFSEEEQDLRTLFPVPSERVVRDELVAQKADWQFELSARALQLAIKDLAVAWNLFFNNPKTANKPSFQSRKKPKQGFKTDRARIINGRLVLDKPLTHKGEWSSIRFKGASIPDGKLKLCAITRTKGKYIATITVDVETVALPKTGKKTAVDANVDHFDTTEGQTSLKPESLDRLYERVRTYQRQLARKRKVNKNYRHSKGYQATRAKLQATYERIRNIQNDLLHKFTTDLYRQFDTVVIEDLDVKGMQMKKKAKNLHRSLFGRFRQLMEYKAEKFGQTLIIADRFYPSTQRCSNCGHIKTGDEKITLSGNAKHGTKHYEYVCYQCGYEDDRDHNAVLNLLALAK

SEQ ID NO: 16475 - protein, 392 aa, unknown
  TnpB Polypeptide
MQRVERHIVIGNKNLDKLCFLSKNLYNYANYLIRQEFTQNNKLLSEYELTTKLAKEKQADYIALPSQTSQQVIKILFKNWKSFFKLCKKKDKLKGRPKMPKYKHKEKGRNISVFTSQQCKLKDGYIHFPKKARIEPLRTKVGNVCQVRIIPQCSCHIIEVVYEKECIKTSGLEPDSYLSIDLGLNNLVTSYDSLNHKSFIVNGKTLKSINQYFNKKKAYLMSFIGSRGISNRIGKLTLKRNCKVNDYLHKTSRFIVDYCVDNHIETIVIGNNKDWKQNCNMGKRNNQNFVSIPFEKLISQIQYKAEEVGVKVVITEEGYTSKIDHYAGEEMCHHDTYMGKRIKRGLFRSSTGKVLNADLNGAIGILRKVVGESFQQVVNRGEVVTPSRIYMV

SEQ ID NO: 16476 - protein, 357 aa, unknown
  TnpB Polypeptide
VKLVKTLRAKVHSPTRRKREALLALHSEWQRALGLPRDYGYLRKHSSLPSYYCRDIRWCVVKGNHSPVILGQNALNLRPGGRFAPWFASISTPLGRVRVPLRLAPEHSRLLAEPGIKLGMSRLVKKGPDLYLHIVVEREVPDIPIPVNAPVLAVDIGEKTIATSVTLGPGGRIAAPPAFMGRRVRGIRRHHGWLRKRLGRRKALRAIKRIGSAEHRKVDAELHDISRKLVDRAKALGAVLAIGDLSGIRERTRGKGRRKNRITNAMPFNRLTLLIEYKAAWAGVPVVLVDESWSSRECHVCGQDGLRPTRGRFVCPACGEWNADLNGAMNIGIRAMGYMSIAGAPCIAPARVASSNG

SEQ ID NO: 16477 - protein, 134 aa, Okeania sp.
SIQYPQKVEIIDDGLRFPGPVGIVKAKLHRPIVRTIKTVTITMTPSGRYFASVLSKQQADKPSPSTEGKVAGIDLGLKNFAIVHDGFKTSKHHNPKHLARHELNLARKQGKLARKQKGSNSRNKARKLVARVHE

SEQ ID NO: 16478 - protein, 442 aa, Lactobacillus sp.
MAKKNKQVPRNDLQYEQLASEYLIKANPKLDEYSLVAHNLYNRALFDLRQGFFKKRYIKGYSQLDQIFKERYQKRELMLYHSLGYVQSAQQTLREVTTVWQAFFKALKAYKANPSKFSGKPRLPRYLRDKRHTFFVTNQNAKVKDGYLIVPKLDLKLKLAPNIEKIGRVAFKPVANGYKVIVPYKANKEIKYLPDNGKYIGIDPGIDNAFACASNTGNRPLLINGRGIKSVNQYYNKKRAELRQLQARHHQLERIINTKQGKKVVYQDTQAMKKITAWRNDKIRQFAHKASKRIVDYALNCEANTIVIGKNKSWKRSSNMGKRNNQNFIGIPHQVMIDMIKYKANLAGITVIQTNESYTSQTSSLDHEQPCWENGNKSRKRQGKSPVNRRIKRGLFKANDDRLINADINGALQIIRKVFSNFQVNDEIAGVVLRPVKWSPKF

SEQ ID NO: 16479 - protein, 241 aa, Photobacterium sp.
MTLRACKYRFYPNADQARMLNQTFGCTRFVYNNALAYSKEQYELGNKTNFNDWSKNLTILKKNPDFVWLKDVASVPLQQSLKHLDKAFKSFFKSGFGYPKFKNKRGKQSVCYVGTAFRFNRDKCEIELAKMKQPLKIKWSRSFVGIPSSVYVSKTKTGKYFISILVEEEIIQNKPTDKTVGIDLGIKSLAVCSDGVTFDNPKSTAKYAKKLAKEQRKLSKKRKVRLTSASNGLRLPRSTKR

SEQ ID NO: 16480 - protein, 527 aa, unknown
  TnpB Polypeptide
MIKEEQTEKPKKKQGKNKEEKANLLCKTYRFRVREKQVSSSLWQFMRQSVGNQRFVYNHFLNRMNQFWLQQITLKQELESQNKPLPEGFKTFLTRYEMEAELTVLKQTKIIKEITDENGYTEVMEFRHFLNDTHSQPFQSTIKQASEAMAEFAKKKRGKPQFRKKGECTESVFYKQLYPHTVNRKKGYVILPGSKEKLPVHFHRTFKSREIPKTMTLKCDNGKWFICIQTEYKLSRKDHDKLEYNKNNVSADNTLAYDLGVNKMIVSHEGDYIDYSSKTRATLDKLAKRLIVLQRKLSHKYEVRKKQKLKFKDNNEKIAILKYSSENYKKLQSRIQKLYAKIHRIKVDFLHKVSHHMSKSHTHIVREALVIPKMTKSARRLKLENAPGYKEKLAQRFLDKPWLAKVYSERKQNRKLLNKNWGMFNLFLEYKLAWNMGFMHKVNPAYTSQTCSVCQHKSKDNRLSQSLFICQQCGVKAHADVNAARNILFKAFSPLREVVGTGIPQLKRINNYLQRNALSSNQTEILI

SEQ ID NO: 16481 - protein, 201 aa, Bacillus sp.
MPKTESAIGIDVGLKDFAILSDGTTYSNPKFFRTLEEKLAKLQRIMSRRIVGGTNWYKAKRKVACIHEKITNARNDYLHKISTDIVKNHDVIGMEDLSVSNMLKNHNLAKAISEVSWSEFKTIIEYKAKWYGKQVVTVAKNFPSSQLCSCCGYQNKDVKNLGLREWECPKCHTHHQRDINAGQNLKNEALRLLTVGATGIA

SEQ ID NO: 16482 - protein, 224 aa, unknown
  TnpB Polypeptide
MMDHPQSTRAELFLSDTQWFHKQKAKYVSILTKGHKNRYATSKRLADLSYHHANFVKDQCHKISRSIIDFCVDHYAGTLIFGVNPLWKQNSRIGKINNQKFVSMPIAFLRAMITYKALNAGIKIIEQEESYTSKADITTKDHIPTYRVDDENAQFSGIRIKRGLYRCADGTILNADCHAAANIMRKAVPDIWDRTTDFSFLTSPKVYGFHELNPKSIPVKGIAA

SEQ ID NO: 16483 - protein, 350 aa, unknown
  TnpB Polypeptide
MIITKTLKLRVKDKHAIKLNHMAKSVNFVWNYINELSQRSIRERGNFLSGYDLHPYTKGAGKELGLHSQTLQCVAAEYVTRRIQFKKAKLNWRKSGGSRRSLGWIPVNTGQAKWKNGQVFHNGQYYGVWDSYGLSQYKFRSACFNEDARGRWYFNVVVSVEVEQSQGVETVGIDLGCKESATDSNGEGVKGREYRRLEKNLGIAQRAKNKKRVKSIHAKIKNRRQDSLHKYSRKLVNENAAIFVGNVSSLGLAKTKMAKSVLDAGWGYLKTILEYKCDHAGVVFEVVNESYTTQTCSCCGSRQNSPKGRPGLGIREWTCECGVTHDRDINAAKNILALGHERLAVGIPVL

SEQ ID NO: 16484 - protein, 372 aa, unknown
  TnpB Polypeptide
VKLTVSLKLLPSSAQVVALRQTLEAANAAANAVSAVAWREQTFSQFKLHKLTYAATRATTHLSAQVVVRVIAKAADAYKADHTRQRRFASLGSLAYDDRILRYRTDEVSIWTVAGRQSIPFVCGQRQHALLAQRQGESDLVYRDGTWFLYATVNVIEEPPAEVSDVVGIDLGIVNIATDSDGRVYSGAHLTGLRHRHRRLRQRLQRKGTRSARQLLRRRRRKERRFGTWVNHTLSARIVAEAQGTARGIALEDLGHIRERVSARKSQRATLHSWAFDQLRRFIAYKAQRVGVPVVYVDPRNTSRTCPACGLVDKRNRLSQARFVCVGCGLAGHADTIAALNIRARGRGVCNASVRRGVGSRVEASSGKSCLL

SEQ ID NO: 16485 - protein, 484 aa, unknown
  TnpB Polypeptide
MLAVEMSRHTTFKFCLDPTVEQCRVLARHAGAARFGFNQCLRMVKSALNQRKNDADTDVPWTGFDLINAFNAWKKTPDAGRAFAVDVTGKATIVVTGLPWRGEVCQQVFEEAAVDCARALAAWSDSRSGKRKGKRVGFPRFKKKTDVAKSFRLRNKHSRSGRPAIGVGENNRARSVTLPGIGQFGVREDTRRLRRMIAKNRAKILFATISHHAGRWWVSLNVEAAELHPVHQHTPRDRRDGSGWVGVDRGLAAFVVAADAQGREVARVSDAPKALAIGMKRQRRLAKSMSRKQRGSHNRRDATAKLRRHHNHVANVRRHFLHRVSNALVKTHDRLVIESLNVSGMLANNRLASAISDAGWTEFARILAYKEAWRGGTLLVADRWYPSSKLCAACGAVHSDLTLADRMFTCDCGHCADRDSNAAVNLARWGQNHHQEHHPDPRTPKQRGRATNARRRDGADQHPSCAGETSPDDAGTDVHPAPAA

SEQ ID NO: 16486 - protein, 410 aa, Candidate division AD3 bacterium
MAHRYRLDPTAAQEVVLHQHCGEARFVWNLALEQFKQWHPGRRSSPRPAERFRQLAEARRETWLGNGSSSVQQQALRDFDRALQNWHKGSHRRPRWRKRGQSEGFCVRDVRVRHLNKKWSAIQVAKAGRIRFRVSRPLPAESGMARITLDGAGRWHVSFPAPQAPVDREPTGSRVGIDRGVTTTLAYSDGTFLQAPQWSQRRARRLTRLQRQMARQRKGSNRRGRTKTAIAKLHQRQRDRLKNWTEKQTTKLVRTHDLIVVEALEIRNMVRRPAPKPDGMGGYEHNGARAKAGLNRGIHRQGWGQWGRRLREKAEASGVTAIETPTHFTSQTCRACGVIATESRESQAAFHCVACGHQNHADRNAAENILARGLAFPALAQTPGPGACRPSAGARRSRRRGAAGTPGGLG

SEQ ID NO: 16487 - protein, 385 aa, unknown
  TnpB Polypeptide
MLAVKTVQQHYTASAEILYMLEQFRRMINDCIQVGLTESLTSLKALSLKVYKQLARYDIMSYYKLCAISAAAGILRNHRRAVRCGKKPTSPYVWSLRLTTCYGFKIRDGSLLLPHRRGESIRIPLTSHVQATMAGHLIRSVTLTRDKLSLMYAKQVAEIKPRGFISMDRNLDNATLAATDGTVVKHDLSETTRMKTAYREVCSHMRRNDVRIRRKITAKYGRKQRERVKQILHNASKLIVQQAKQKQFGIVMEDLTGIRRLYRRGNGQGRWIRGRMNSWSYGELQRQIQYKASWEGLPVIRVRPHGTSAKCSICGSRMTRIPEENRQLHCSTCGVTVDRDVNAARNILARGVRFAPFALPTEAMVQEPSNKVILKVDGSELTQRL

SEQ ID NO: 16488 - protein, 408 aa, unknown
  TnpB Polypeptide
MKLVEQHVIKRSDPRYPRLDAAAFASKNLWNAANYLVRQSFIFQGIYLNNTAVFHLIKEHAAYQALPRKVSNQVLLQLHQAWIGFFEAMEEWHQHPERFTGRPNLPGYKHKTQGRNLLVYEKGAIWKRQLDQGVVAVTELGALVPTAQNRETVCQVRIVPKGDHYVIEVVYQEEARPASVDPAWFVAVDLGVSVLAALISNKPGFIPRLVNGGPIKSLNQFYNKQCAHHQSKLAKANRFTSRQLRRITTKRNRRILHYLHTASRRIIELLVAEGIGTLIIGKNALWKQEVEMGRRNNQNFVQVPHTRFIELLTYKAQLVGIGVILTEESYTSRASFLDRDEIPVYNPSRAEEPRFSGKRDGRWYYASNKRMIHSDVNGSYNIGRKVVPTAFDGPGIAAPAVRPRRLAV

SEQ ID NO: 16489 - protein, 521 aa, unknown
  TnpB Polypeptide
MKRAKTPTFLIELPLRIDWSQEDHLRAHLEAARCLYNALLSEANKRLKCMRSDPAWKEARAIPHSHKQKRAQAFSALRKKYHFSEYDLHEYAKCARVSWIADHIDSTMAQTLATRSYQAVNRVCVGKAKRVRFRSKGRGIDSVEGKRNDVGMRFMRDHNAGDGGFLIWNEQVIPAMIDWLDPVVQHGMRHKIKYVRLVRRKASSPQAQGADHEGNRYFVQLVLEGHAFVKPKHEETGTDTVGLDIGPSTLAIVPREGKADLVTFCEELAPDTRKKRRLQRKMDRSRHAKNPENYDEKGRVKKGRLRWKESKRYKATRRQHANTERRLAAHRKSLHGHLAHRIAQVGTTITIEKISFKGWQKLYGRSVGLRAPGMFVAHLARIVAKTGGTLTEVSAYQTKLSQYCHQCRHYHKKPRSQRWHKCPCGFGPAQRDLYSAFLLAYLEPEQTLPSITQHVWAGAEPRLRAVMEALQQRANEGQPLPRSMGLVAQRKAARAGARRLKSPAYPHQEPVGSSEPTGSGG

SEQ ID NO: 16490 - protein, 394 aa, Mycolicibacterium sp.
MSRYRLSPTPEQQARLLAHCRDARCVWNLAVEQQQCWQPGRKAPGYVEQCAQLTDARAAYEWLRAGSQTVQQQALRDFAQAMRHFFAGTHRRPKWRKAGVHEGFRQVAVKAHHVEKLNRRIGRVWVPKVGWVQFRLSRPVPAGVKSYRVTRDRAGRWHVAFAHIPDPISGRGDGSLVGIDRGVAVAAALSTGELLHVPGLTKGESKRLRVLQQRLARTKHGSNRRDDTKRAIAKLKGGEKDRRKDWVEKTTTDLARRFDVIRVEALDVRSMTRSARGTIEQPGVHVAQKRGLNRAISRSGWGLLVTRLQQKACGRVEQVPAAYTSQRCSACGHVAPGNRESQAIFECQACNAGRCNADVNAARNIAAGRAVTARGDLADRRSANREPQLATPAP

SEQ ID NO: 16491 - protein, 513 aa, Streptomyces sp.
VGGKFRRRSGCVVQAYRFALDPNVGQERALRSHCGAARAAYNWAVSWVTASWWQRRAEATYGISEEELTPWRSWSLPALSREFNRIKTTDPKYAGWWKENSKEAYKSGLTNAAVAFDNYVKSKQGKRKGPMMGVPRLKTKRKARLACRFTTGAIRVEPDGRHVTLPRLGTVRSHEPTTKLLTRIRAGTARIIAATVRHEHGRWFVAFQVEIIREIARVARPDAVVGVDLGVKHLAVLADSTGMVRYEPNPKHLDGVLKLLRFHSRRVSRRQGPDRRAGQKPSKRWEKANRERNKIHHRVANRRTDALHKLTTRIRDEYGTVVVENLNVAGMLRNKRLARRVADASFGEIRRQLTYKGQWNGCHTVVADRWYPSSKICSACGAVKTKLPLHVRVFTCDVCGLVLDRDANAARNLAALAAACATGTGVAGDQDTPRVSKPRGADRKTRRQRPDRNIDRGGRAGGATLPHQRQAEARDRRQDTEALRFGDTGTNLFGRNAEIVERRCKTVPQQRIP

SEQ ID NO: 16492 - protein, 444 aa, unknown
  TnpB Polypeptide
MEKRKFTVVTQLHEENNLDIIEYIERSRFEYGKVLRETFHKIKYEAFDKSKYNRYLQLKYGILKRTANSIIFDAQIRFNALKKTKLYEKKRLILKIAYLENNVIPKLVDKRNRNSTILRNGGFVSLIKQRNLRLKIVSKKSKLNRLKQRLSNLNYQLNSNKLKFCFGTKRLFQQDYNRFTDRRDSQMTFLGAREEKTCNQILQLTYNRKNNQFLIRLRKDFCGYKTAKNNDKFAYGKVYFNHYRESIVSILKFETGPLSYKIIKRNNRYYLHCMFEIQVDNKDFITHSNNGVIGLDFNKGFIVSSETNKYGHLLQTQFLPYRFNSGNKTKTDLQRISSYVTELAHQTGKDVCIENLDFKTKKSKTETKQSKKYNKMLHSLAYRQFIEVMESVAYRNKVKLIKVNPAWTSWLAKQRYCPNMKLNTHVGASYVIARRGQGFKDTLK

SEQ ID NO: 16493 - protein, 374 aa, Symploca sp.
MKALKFKLYAHKRNRYLKRCLHAAGVIYNYAIALHKRYYRIWGQHLSCTKLQKHLAKLRKRNQFWQLVGSQAVQDICQRIEKGYQLFFKNHKKGARPPSFKKVKKYKSFTLKQAGYKFLGENRLKIGKRVYQFWNSRPIEGIVKTVTVKRTALGELFVTVVVDNKTEPTIKVETSRIAGFDFGLKTFLTCSEGFKIESPQFLKQSLSKVRNATKKLSQKVKGSKGREKARLHLVRQYEKVFNCRRDWFWKLAHQLTNRFDVLCFETLNLKGMQRLWGRKVSEYAFGEFLQILEWVALKKGKLVVYIDQWYPSSKTCYHCGHVLESLDLEVRRWRCPSCHLENERDGNAALNIKRVGSSTLGVGDVRQAVPAISA

SEQ ID NO: 16494 - protein, 216 aa, unknown
  TnpB Polypeptide
MRSDGTVLDRKFINFPSEKDRLSHVLGRIRRFQKEHSSKQIGSRWAYAKRLNTELARKTARSIAEYAHENHADVIVFEYLEMKGKISGKKRQKLHLWKEREIQTMCEHKAHRYGIRVSRVCAWNTSRLAYDGSGPVSRDPKNHSLCVFQSGKQYNCDLSASYNIGARYWIREIIKTLPETERSSLEAKVPAVKRRTSCVYADLLILQNEYGCLKAA

SEQ ID NO: 16495 - protein, 394 aa, unknown
  TnpB Polypeptide
MSRYRLVPSPAQEVVLRGHCAQARFVWNLTVEQHRHCRPGRKSAPGYLEQCRQLTQVRAEHPWLAAGSQMVQQQALRDFARALANCFGGTHGRPSWRKAGRNEGFGVVALKPRDVRRLSRDVGAVRVPKAGWVRFRWSRAVPAGVKSCRVTRDRAGRWHVAFAAVPAPVPAPGNGQTVGIDRGVAVSAALSTGELLGVPGLGGAERTRLLRLQRKLARARRGSNRRGRVRHAIARLKARQTDRRKDWAEKASTGLARRFDVIRVEDLNITGMTRSAGGTAEEPGRNVRQKSGLNRAILAQGWGLLVRRLQDKAPGRVEKISPVFTSQRCSACGHVDPKSRQSQARFVCTACTFTGNADVNAARNIAAGHAVTARGGDGAARPMNREPQLLLQSA

SEQ ID NO: 16496 - protein, 423 aa, unknown
  TnpB Polypeptide
MLILEAKLKGTQAQYTKLDEAIRTGQFIRNSCLRHWEDNKGVTRNDLQKLCAVLAKNKEFPWANKLNSQARQAHADRAWSAIQRFYENCRLGKPGKKGYPKYKKFSRSVEYKNTGWKLSADRRQIIFTDGFKVGTLALWSSRDLVWYSEKQISRVRVIRRADGYHAQFLVDWDRKEEHEFQGKMTGIDLGLKEFYTDSEGVTVENPRFLRKSERRLKMLQRRVSKKHIKGKKQTNRYHKARKALAKQHLKVSRQREDRARKDALALVRSKDLIVYEDLKIRNMVKNHHLAKTISDASWYQFTQWLKYFAKVHGVIVIAVPPHYTTVDCSCCGAKVKKTLSTRTHRCNKCGTVLDRDHNGAKNILAKGFKLLAEHLNSTQGHWESGANSSKAQGETNLWLKNGDALALSWLDELRTKSLGNPPL

SEQ ID NO: 16497 - protein, 418 aa, Halobacteriales sp.
MANRQVTRTHVASIRNRRQVRSGLDSLGFAASKLWNVARWTAERIWSETGHIPGHAELSSYLKSKERYADLNAQSSQRVIQELAEAFKSWYGHRQNGDQNANPPAYRKHGDQHPRSTVTFKEDGFKHDPENGRVRLSKGRNLKYGWSDFILCEYAADPGVDIENVQQVRAVYGRGEWRLHFVCRHEIDPEPPGDGVAGIDLGISNVAAVSFGDEGVLYPGGALKEDEYWFHKKRAECDDSSSTEAERLDRKRTERRSHFLHTLSKDIVAECFERAVGTIVVGDLSDIRNREDRGDHGNLDLHGWAFNRLTSMLEYKAEERGIDVEQVDERGTSKTCSSCGTEGDGQRVERGLYVCESCGTVANADINGAENIRQKVLPSLAPDGGDRDNGWMAQPAVRLFDKSTGRVRSQEQVVDREP

SEQ ID NO: 16498 - protein, 367 aa, unknown
  TnpB Polypeptide
MEKAYKYRIYPNKKQKEIIAKTFGSCRFVYNKYLAKRIEMYENNKETFSYVQCANDMKQLKSKLEWLKEVDSTALQSSLKDLDMAYQKFFKEHFGYPKFKSKKTHRFSYKSKCVNKNIQYCGKHIKLPKLGMVKTKNKLIPQGRILNATVSQEPSGKYYVSICCIDVDITTLENTNNYIGLDLGIKEFCITSDGEMIENPKYLKKSLDKLAKLQRELSRKSKGSSNRNKARIKVARLQEHITNQRKDFLHKLSTKIIRNNDIVCIEDLQVKNMIKNHKLARSIADASWSEFVRQLEYKANWCNRKVIKVDKFFASSQTCNVCGYVNKGTKNLSVREWDCPCCHTHHDRDINAAINIFNEGLRMSQVA

SEQ ID NO: 16499 - protein, 468 aa, unknown
  TnpB Polypeptide
MSNNNSENKAFTLSISKKKIDDLNLEISLASSELQLVKKVKVTDVNDVFCCLLLSNTAKKLYNSSLYLFKQQYKQNQTTLTYEKLDKLMKNELLHPNFARLYQDLSAKVSQQVLKLFFQNIKSFFGLKKSEKLTEEERKKVNLPRYYTKNGLIPICYTNQALSKKAFNKEGVLHFSGTDLKIKLDESLLKEIKSFSQINQVRIVPSTRNDKNKRLSDLLNERDLFTIEIVYTAPVSEKRSNNKSLELFYRTSVIHKINPRSKTNKITTIEKEKLAEARYTEDFLKSVAGIDQNLDQLAVGVVLENQKTLAFNYDIKYLKSVNQYWNKQKAKLQEEISKQEKLLEELKYAKLDFYQTFLTEYTASRLIEDTKILIKRLKNKIKKITKKRNRKIDNFTHQLSRKLINHLSELGIKNIIYGKNVNFKKEISVALGKVTNQNFVNIPFNQIIERLRYKALLAGINFMTVDES

SEQ ID NO: 16500 - protein, 423 aa, unknown
  TnpB Polypeptide
MVTVTSGPRGTVANVCLVRAYRHRLYPTRAQAIALNAQLASCCDLYNAALEHRRTLWREHGVSVSYGDQSAELRALRAAGLLPADANFWSQQHTLRRLDRAFAAFFARLKTGEKAGYPRFKSRRRFDTLLWTLKGHAGGVTIKNGRLGLQGVGAVKVRWHRPLPEGATFGEVKVTRAGDGRRWHVSISVELADPGERQHPHPEAMVGIDLGVRDFAAFSTGERVAGPNASKRNAAATRRAARKVARRKRGSHRRRKAAVLLARHREREANRRRDHAHKLSRRIASEFALIGMEDLKIGNMLRSAGGSLAEPGTAVARKRGLNRSISDQGWGQFAHFVAYKAEEAGGQTIKVNPARTSQTCAECGHVDRRSRHGKRFCCIGCGGTTDADVNAGQEILARALKLAGISRPGWGRQTQTTALVAVV

SEQ ID NO: 16501 - protein, 397 aa, Hapalosiphonaceae sp.
VLKAIKVRLYPTIEQQEALAKSFGCARWYWNYALNVCIQHYEETGKSLKLSVYKAYLPQLKVAHPWLKEDCYSAVLQCVAINLNKAYSNFFEGRAKFPRFKSKHHEQSIQYPQNVKVVGDYLEVPKIGTVKAVFHRPIEGKIKTVTISKTPTDKYFASILCEIEEVFGQSTGDKTIGIDLGLKDFAIVHDGNEVTKHSNPKHLKRHEKNLARKQKKFACKVKGSNSRNKYKKLVAKVHERVSNSRQDFLHKLSRNLANESQVIVVEKLNVKGMVRNRKLSKSISDVGWGMFVNFLDYKLKAKDGQLVEIGRFFPSSKTCSCCGHVLGELTLDIREWDCPKCNTHHDRDGNAALNIRNEGIRILSMDGGNPVLAMPRRSKTNKPKGGKASVNEAGSLH

SEQ ID NO: 16502 - protein, 402 aa, Polyangium sp.
MTSSKCLLRTFRYPLHPTYAQEKILTQWLEACCDLYNAALQERREGWRRGLRIRFNDQTASLTVIRHEDPKFAAMPVMVLRSALARLQVAFEAFFQRCNNGEKPGYPRFRSRRRYDSFSWPAPNGIDNLIQGKGRSGRLAVPKLGDLRFNLYRIPRGVPRTVRIQRESTGKWWVSIACDLGAAPAPVDAAAISPDRVVGIDVGLQSLAALSTGTIVGNPRHVKRAETILARRQRVLSRRRNGSASRKRAVKLVARAHAHVKNQRLDYARKFATKLVRDFDFIAHEDLNIASLAASTLGKHVNNAGWRILLHAIACKAECAGKVVVQVDPRGTSQECSACGGVVQKSLAVRVHDCQCGLRVDRDVNAARNILARGMRVVSKLGDSNPSKARRSRGRGSSADQT

SEQ ID NO: 16503 - protein, 467 aa, unknown
  TnpB Polypeptide
MPHLYGPCKTLRVRLILGEKTAGHLERTVSLFRQVVSYYLQVFHDHMELLERSDWLKQAELLTHCTKDNPEPLYPFDREFPDLPSGLRRAAIAEARGLALSWKSNYERWQRKKEKHEQRNRKRAEEGKKPVPFTERPPQFPDEVSSWPTWYGTAYKTLDERRILLKVFTGRSYGYRKVVLAGSFAIPAGYAAGSPTLVRKRYGWGLHIPLFQVTSLLSDEKLKALFFLLAEAEKFGDASRASGLRKAFLKHLIRTDPSLRVCVVDLGVDHHAVMTVRDTEGRVLAARFLPGAKDSRLRKRYLEKVVRLQRETRVIPEGESFARDLWEKIANFNDYLAHLISRQIVDFAVEHGAKIIVFENLKTLRPEKGTKSHYLNQKLGYWVRGRVYRYARYKALHAGILVVRVSPADTSRRCPLCGKLTIERYTPGRRNGKKLARCSSCGKVRDFSADFLATENIFDRFLCVYAS

SEQ ID NO: 16504 - protein, 357 aa, Asanoa sp.
VLVTETLKLAPSQSQATALVATLEACNAGANRVAEVAFMHGTANKIALHKLVYARLRADFGLSSQMAVRAVAKACGAYKRDKTVRPVFRPHGAIQYDQRILTWKGREAVSILTLEGRTIVPVVYEGRWFKRAGTVVRGQADLIYRDGMWFVAVVIDVPEPPRGAKPDDWLGVDLGVVNIATDSDGAAHSGKGVRNVRRRNARLRAKLQATGTKSAKRLLRKRRRKESRFVRDVNHVVSKKLVGVAKDTGRGIKLEDLSGIRRRITVKKAQRADLHSWAFYQLRMFVAYKAAIAGVVVAFVDPRNTSRECYECGHIDKRNRPTRDDFRCTGCGHAGPADHNAARNISRRAEVMQPNAA

SEQ ID NO: 16505 - protein, 429 aa, unknown
  TnpB Polypeptide
MIYIGKKYNVDAVFALTKAEDIWRGMEKCLYGNGNILHFSKYGDLPCIRAKQMNRGIPIFVKDNKLQYKLGRTVFGIKINDRFQTDEVNAVLDYLAEPEIMNNKAVQTLMDEAYCIDTYRPCYAVLVPKLIRGKYRVYLHLTIEGRAKPKYDRFGNPRHKFGRGIIGADIGTQTVAYTSDTEVGLKNLSERGRSIQKSERLERLYYRAMDRARRATNPQNYNEDGTIKKGRKTWRYSNHYKKLKEKHSELCRINAINRQLAINEDANYLRSLGDVFITEPKNAGRLMKRAKETTVNSKGKINKKKRFGKSIKNRCPSGFQAAVEEKFKTTGGTYIEVPNDYRASQYDHTADDYIKKKLSDRMYHLSDGTLVQRDWYSSFLLYCYDYSTKNIDRDRCILKFEKCYSKERALIKRIKTNRIKVLNSGIKIA

SEQ ID NO: 16506 - protein, 314 aa, unknown
  TnpB Polypeptide
MMLRPTKEQASLLTSTTKEYISLVNDILDHAVAIGGLPKLSSKSVYAALPSALRCQCVQDAGSIYRKVMKHNGKMPVLKKPVAIWNNQNYSISNGAIAFPMLVDGKSKKLKVKAAIPDDVVGMLHTCKLGALRITQKGKKWVAQIAYEKRAVPNNGDGVVGIDLGIKCPAVAVFSDGTTKFYGNGRQNKFVRRHYAKRRKKLGKAKKLDAIRKAGNKEQRWMRDVDHKVSRAIVNDAIAHGVGVIKLEKLSNIRSTARTSRKNNHSLHSWSFYRMAQYIEYKAALADVPDMRAAAPRKGQALCLPGLWIPRPQG

SEQ ID NO: 16507 - protein, 439 aa, unknown
  TnpB Polypeptide
VVEEAFQYRAVPEDATTGKTAWQAIQTCREVYNHALTQEYRPAPDYDKPSYTTMQNKLPQWKQKWPEWGTVYSKCLQMAVRRIKHSENVLDSLKERGFNVGTLKWKRPREYRSITYNQSGFDVDRNTGRTGHAVVNFSKIGDFHLNYHRPLPGDATIKEIILKKPKTGDWTVSIVVEYDADYPDKPAVEDIAVEETVGIDLGITKFVHDSENRTFARLDEEDDRERIEKRHRSLSRKQHQSANWNRARQSLARAYERVKNRREDYREKLAHWYTREYDAVFLEDLDVASMTQQDRNARNIAAMSWRATLQAFERHGEKNGCHVVLVDPAGTTKQCANCGVETEKPLWVREHSCPSCGFTADRDHNASLEIHQRGLQQLGVAFEQSELGLGQSEVTSVETGVPAGSRHRDALLANTVVKAESPLQEHGSPTLKEPATAGE

SEQ ID NO: 16508 - protein, 639 aa, unknown
  TnpB Polypeptide
MNIGFWDQSCSQFTTKLWKPPLKRIFTFPSWESDHPLLPIHYHHNQSNLPDVNLLPVKLYDNSVDKLKKFNMLFGREIGRLDKLIIRKKFDFPFFSNYVTKLQTQLDKIRNETPDDKIKLCFEFSNETFAAFKINFKKKTNVPVDVAQSINAHFDVFDSILIKMKQLDKVLRCYPIRLFPTGVQYQKLARWFIRANDLYNDLVGFFEIHYINCEEECDELYPNDPNRSRKLGKLLEKKNNFFPLNATKIRDMYNSHFSKKHKLPNCVSADIISGFMSNVKGNITKLKKGSINEFKMQRRSFQDICSIPIQQKYTNNEGFYSSIFGPIDTDENNKFSWSDIEHDYKLIYNSSLNRYYVYVPFHKDTKIINNRNPIGIMDPGSAVFQELYGLDHTVSFGVGLHKPIMKRINKIEYLQKCIDDPAFNKQEKAKRTGIKRIQELERKKRYEKEKKEYQALLKIPKKETKDAKNKRVQKFKRIERQEKRELTVNVPNKSSKKKSLNKAIARERRKIKGMVTELHNKTCLYLCKNYDRVMVTNFSCKKVNSKFGKLNKDVKKVLSELSHYRFRQRLQNKCAEYRCQYLEVTEEYTSKTCCNCGNIKHDLGSLREYKCEKCSKEINRDVNGSINIFIKNRAKVVEE

SEQ ID NO: 16509 - protein, 403 aa, Symploca sp.
MIVLEFKAKGKTTQYAAIDEAIKTAQFIRNKCIRHWMEHQGVGQKDLYRLSTALRAEFFFVKTLNSSACQASVERAYSSIARFYNNCKKAVPGKKGYPRFKKNCRSVEYKTSGWKLSQTRKQVTFNDKKGIGRLKLKGTWDLNYYQLEQIKRVRIVRRADGYYVQFLIKTDKTETLEPTGNTVGLDVGLKEFYTDSKGETQVNPRFYRVGEKRMKFHQRRVSRKNKGSANRKKAINKLSRTHLKISRQRQEHAKRVARYVIQSNDLVAYEDLRIKNLVKNNCLAKSINDAGWYQFRRWLEYFGIKFGRISVAVNPAYTSQKCSSCGTLVKKSLSTRTHVCRCGEVLDRDQNAAINILKEALSTTGHVGTWVLDPNASGDLASTVLGASLKSQAGSRNEESHVL

SEQ ID NO: 16510 - protein, 476 aa, unknown
  TnpB Polypeptide
MILVKKGGAFMATVSYGLKIASAYHIFDETIKIYRKAVKYITDVALFRFDEISVIDAYEGYTKQQAQRKYVESLIHATKENPACYERFDMEFYKFPSYLRREAITTAIGIVSSYKTNLQKWEANGKKGRRPHLNRNQNVMPCFYRNNTFLDSEETNIVSLKLYNGKDWIWETFVIRDCDFMYAYNHMKEWKASAPVLVKRNHRYELRISYELAGSKFPKFKKDKEVETVIGVDLGINTDAVCSVVHKDGTVTGQRFINHPVEKDRMHGLLNTIKKAQQNGNHKTPRLWRLANNYNEAIAVKTAVEIVSFAMESKADVIVFEHLNMKKKKRGNKQKLSLWRKRDIQHRVEALAARNGIRVSYICAVNTSRLAFDGSGKVIRGKDAGFNTYELCKFTTGKVYNCDLSASKNIGARFFIRVLLKSLSAKEELLVLAKVPELNRRTSCCLATLINAYAVLCASKAKPEASAEGNAARQSH

SEQ ID NO: 16511 - protein, 279 aa, unknown
  TnpB Polypeptide
MVKAIKVMLIPNNVQKTKLFQYAGASRFAYNWALAREIENYEKGGKFISDAELRKEFTKLRHSDEYAWLLNISNNVTKQAIKDACTAYKNFFRGLQKFPRFKSKKRSMPKFYQDNVKIRFSNTHVKFEGFSSSRKANKQKMNWVRLAEHGRIPTNAKYMNPRISFDGLNWWISVCVEFPDCREILNDDGVGIDLGIKELAVCSDGTKYKNINKSQKIKKSEKQKRRLQRSISRSYEKNKKGESYCKTNNVIKKGDADKILDQLRVRRFICILTKTASVL

SEQ ID NO: 16512 - protein, 314 aa, Fischerella sp.
  misc_feature (259)..(262): Xaa can be any naturally occurring amino acid
  misc_feature (295)..(298): Xaa can be any naturally occurring amino acid
LNGLPDFCKSVPYQIKSIAIKDACKAVSNAKKKFKNGGGISKVKFRSRKDPIQSCYIPKSAVSDKGIYHTILGEVTFKEALPQSFGDCRLVKAYGDYYLTVPEEVSRQQSENQGRVVALDPGIRTFITFFSESSFGEIGISANIQIQKLCFRLDKVISKIAKAKCKSKRRLKLAATRLRGKIKNLVDELHKKTARFLVDNFDIILLPTFETSRMSKKAKRRIRSKSVRQMLTLSHYRFKQFLKHKAFETNKVVIDVNEXXXXIKNLVDELHKKTARFLVDNFDVILLPTFETSRXXXXVLSSFSSIKLLRLVKW

SEQ ID NO: 16513 - protein, 300 aa, Gottschalkia sp.
MIKSVKIRLLPTKEQEILMFKSVGVSRFAYNWGLAKWEEEYKSGLKPNSSSIKKKFNNDIKKQEQYKWLYEVSAQITSQVFKDLQNAFNGFFKKTAKYPRFKSKKKSRQSFYVRHDALKIKDNTVNIEKIGKVKFATSYDIPILDSYNNPRCSYDGKYWYLSFGYEQGENQAKLNQDLSIGIDLGISVLAVVNKLDKPIKNINKTKTVRKLKKKLKRQVSRKYEMNKEGTKFIKTSNIIKLEKKIKLIHRRLSNIRQNHIHQATNKIIKLRPIRIVMEDLNISRMMKNKYLSKAIADVEK

SEQ ID NO: 16514 - protein, 371 aa, Gottschalkia sp.
MILAKKVRIIPNTEEEQQLWKSVGTARFIYNWTLKRQEENYENGDKFISDGDLRKEITLMKQTEEYKWLKGVSNNIAKQAVKDACNAYKRFFKGLADKPRFKSKRRSKPSFYNDNEKLKVKYKQILIEKVGWIKTSEQIPMDVKYTNPRVSFDGKYWYISVGIEKKYPKIELTGESIGIDVGIKDLAICSNGMVFKNINKTRLVKKLEKRLRRLQRKVSRKYELNKEGRKFVKTSNIIKLEKQIRLLHRKLSNIRNNHLHQATTKIVKTKPSRVVMETLNIKGMMKNKHLSKAIAKQGLYEFKRQLQYKCEYYGIEFIEADKWYPSSKTCSECGHLKAKLSLSERTYICEECKTIIDRDLNASINLSRYSA

SEQ ID NO: 16515 - protein, 382 aa, Gottschalkia sp.
VVIRLIKGLNIRLYPTREQEILMYKHIGSMRFVWNWALNKQIKHYKETNKKLSIVDLGKELTKLKQLKEYTWLYEVSNATLKESIRDLDKAYQRFFKGSGFPKFKSKKKSEPRFYSRYEKIKFTRDVVNLEKIGKVRYRADYNIDLTQIAKFSNPRVKFNGRCWVLTLGIEIEPQKANLNDFSLGIDLDISQLAITNIDELGIKNINKTHRVKKLNKKLKRLQRQCSRKYEMNKEGSRYQKTRNIVKLEKKIKRLHNKLKNIRLNHIYQATNKMVKTKPSRVVMENLNVSGMMKNRHLSKAIAEQGLCTFISQMKYKCKKDGIKFIQAPRFYPSSKTCSKCGTIKKDLKLSDRTYKCECGFICDRDKNASYNLANYGLEKSS

SEQ ID NO: 16516 - protein, 371 aa, Gottschalkia sp.
MILAKKIRIIPNTEQEQQLWKSVGTARYIYNWALAREEDNYKKGGKFINDGNLRKEIILMKQAEEYKWLKEVSNNIAKQAVKDACNAYKRFFKGLADKPRFKSKRKSKPSFYNDNVKLKVKHKQILIEKVGWIKTSEQIPMNVKYTNPRVSFDGKYWYISVGVKKQNPRVELTDESIGIDVGIKDLAVCSNGMIFKNINKVGSVKKLEKRLHRLQRKVSRKYELNKEERKFVKTSNIIKLEKQIRLLHRRLSNIRNNHLHQSTTKIVKTKPSRVVMETLNIKGMMKNKHLSKAIAKQGLYEFKRQLQYKSEFYGIEFVEADKWYPSSKTCSKCGHIKAKLSLSERTYICEECGSTIDRDLNASINLSRYSA

SEQ ID NO: 16517 - protein, 371 aa, Gottschalkia sp.
MILAKKVRIIPNIEQEQQLWKSVGTARFIYNWTLAKQEGNYKNGGKFISDGDLRKKITLMKQTEEYKWLKEVSNNIAKQAVKDACSAYKRFFKGLANRPKFKSKRKSKPSFYNDNVKLKVKHKQIIIEKVGWIKTSEQIPIGVKYTNPRVSFDGKYWYISVGTEKENLKVELTDKSMGIDVGIKDLAICSNGMIFKNINKTRLVKKLEKRLRRLQRKVSRKYKVNKEGRKFVKTSNIIKLEKQIRLLHRKLFNIRNNHLHQATTKIVKTKPSRVVMETLNIKGMMKNKHLSKAIAKQGLYEFKRQLQYKCEFYGIEFIEADKWYPSSKTCSECRHIKGKLSLSERTYICEECGAVIDRDFNASINLSRYSA

SEQ ID NO: 16518 - protein, 389 aa, Gottschalkia sp.
MKLKRAYKIEIKPTGEQKIKVHQTIGICRFIYNFYIAHNKEVYEKEKRFVSGMDFSKWLNNEYIPNNQDKKWIKEVSSKAVKQSIMNADKAFKDFFKGKTSFPKFKKKKNQNIKAYFPKNNKTDWSIERHRVKIPTLGWVRLKEYGYISTNSIVKSGTVSQKADRYYVSILVEEDIQISQKPTNEGIGIDVGLKEFAICSDGKKFKNINKTSRIKKIEKKLKREQRKLSRKYESLKLRNKNIKEGRATRQNIQKQVVKVQKLHQKLTNIRTDYINKTISKIVKQKPSYITIEDLNVSGMMKNKHLSKSISNQKFFEFRTKLSSKCKQNNIELRIVDRFYPSSKTCSKCGEIKKDLKLKDRVYRCECGINIDRDLNASINLKNAKKYRIA

SEQ ID NO: 16519 - protein, 370 aa, Gottschalkia sp.
MILSRKIRIIPNTEQEQKLWRSVGTARFIYNWTIAKQEENYKNGGKFIKDGNLRKEITRLKKGELSWLNEVSNNISKQAVKDACNAYKRFFKGLANKPKFKSRRKSKPSFYNDNTKLRVKTKRVLIEKVGWIKTSEQLPIGVKYTNPRVSYDGKYWYLSVGIEKEKPKMELTNESMGIDVGIKDIAICSNGMTFKNINKTRTVKNLEKRLHRLQRKVLRKYRMNKEGRKFVRTKNIIKLENQIELINRRLSNIRNNNLHQITAEIVKTKPSRVVMETLNIKNMMKNKHLSKAISKLGLYEFKRQLQYKCEFYGIEFVEVDKWYPSSKICSVCGHKKAKLSLSERTYICEQCGAVIDRDINASINLSRYSA

SEQ ID NO: 16520 - protein, 148 aa, Gottschalkia sp.
MNKLETKFIKTSNIIKLEKKIKLIHRKLSNIRQNHIHQATNKIIKLRPIRIVMEDLNISGMMKNKHLSKAIAEQKFYEFIRQMKYKCEFNGIGFVQADRFFPSSKKCSKCGEIKKDLKLSDRVYKCICGLEIDRDKNASINLGEYKLV

SEQ ID NO: 16521 - protein, 258 aa, Gottschalkia sp.
MNIKEDTVNIEKIGRVKFTTNYKIPILEKYNNPRCSFDGKYWYLTFGYEHGENQVELNQDLSIGIDLGISILAVINCLDSPIKNINKSKEVRRLKKKLKRLQRQVSRKYEMNREFNKFIKTSNIKKLEKQITLVHRKLTNIRNNHIHQATNKIIKMKPYRVVMEDLNISGIMKNKHLSKSIQEQKLYEFTRQMKYKSEFNGIKFIQVDRFFPSSKMCSKCGNIKKDLKLSNRLYACECGLEIDRDKNASINLGNYKVS

SEQ ID NO: 16522 - protein, 343 aa, Oscillatoriales sp.
MEQVLTVACKIEVSPEVAPKLEATLQAFSDACTYINQTVDPKLTNKPRIQGLVYEQVREQFGLSANLAIRAIARVSSNRKTAKQKGNPVRAFKPTSVDYDARIFAFREKDWTVSLTLVGGRERFKLAIGNYQVGLLKGANPSSATLCKRQDGSYYVNIQIKSEATDPIPSKRVIGVDLGRRDIAVTSLGDQWDGKQITDVRDKFARVRASLQQKASKGTRSTRRRARQILQRLSGRERRYQTWLNHNISKLIVLSALQHNAIIAIEDLTGIRERTNQQPRSKTERRRSLLLGILSTAMVSELQSREIRGGSGGCQSCLHQPNLPQVLAHSSDKRQVLSKWQSV

SEQ ID NO: 16523 - protein, 350 aa, unknown
  TnpB Polypeptide
LLKLKAEGRLPPHVQKVKPPRYWKDRESGKRKLQIPVRCDCYRLKDNTIKLPRGLEVPFRGELRWAGRQGRVEIVYDDLDGKWRVFQAVETRPSIEPKGSKTCHIDLGAINLATIWVEGWRQSIAFSGRRLLSGWWYWTKRIAKYQSQLKRVNDRHTSEQLRRLYRIRQRRFRHAVNTMARNMVEDLYELGVSRIVVGKLRHIRDNNGYNGHRTNSMIHNFWSFQYIVQRIKDIAEEYGIEVEEVSEYKSSTRCPRCNSENTMRSGRFFKCLSCGLEAHRDAVGVLNIGSRQGENINGVVAYPLLLRWNGMRWEPKRAMNNRSNEHSRSKNLPTLVVESVKSANTTPWGS

SEQ ID NO: 16524 - protein, 386 aa, unknown
  TnpB Polypeptide
MVDMGYRFRIYPNRRQRLLIERTFGCTRWVWNHFLNKRQVEYEETGRSSRAFRQMKDLPKLKDANPWLREVDSVSLQAVIQHLDRAYDNFYRRVASKKKGGYKGTTGYPRFKGKHNRHQSYTTKNVGHTVYVADDKHVRLPKLGMVKTRVSRPVTGVVKSATVSRNPAGEYYVTIKCAGVHKSMAPAKGDAIGIDLGLKDYCITSEGVKHPNHRYFKQSEKRLRHAKRKTSPENQKGRATTVKNSASKSPDSSRRWRASGATRWTNCPPCSSADIRSSAWKPSCRRTWSKTTGSPNTSATRRGASSRACSTTRPDGTVARWSTWTGSIRPASSATTADTSTRRSRTSMCANGHARNAACSTTGMSTRPTTCATRGLRILGQLETAA

SEQ ID NO: 16525 - protein, 666 aa, unknown
  TnpB Polypeptide
MCQFLLFFYVLTSGVILLKIKMYLKNTNLNIIMSSLENKKPPDKHLDYFKCVKVPLKHIVKHPEINIPKITNAVVRCNKIVINTLMFMKLYLLDYFEKNNGLPAIDRLFVNSCMKIMCKETLNGRPPKKEVRELKEQLTAFYNTDFKPFIQEETLDYTHLNNVLEYLTISIITMYENNIKLHYVEYIERYINVVWKKKDTIRKIKEEHSDTITQTNLINEFCRQLRKIKLDVLDVSNEYKSDEKYHIWIKEVKEYITPNKEKYQKDNLYYDLQCSSQDYLPCMIRMMKEVEKEGVMMYNVFPMRNDVIPHSIKLDTTTLVNLLFTDRQGKKHHYLTEGNLKKNEDKIWNFFFRTERKCFHKLKYSFHHMIETDGVSSSILMLRNDMIGKRIPNAKVNLNTEQYIDELKDYSSIKDKKIVAIDPGMSDIIYCVDHDTKDANEFRYTQDSRRKECKIKKYSKLILQFKEEKIDGKTIIQHETELSKLNRKTLHADAFKEYIKTKSLLNNKVYSFYQRYIFRKLKLNAYINKKKHEQKMINKFKKVFGTQEDVIIAFGDWEQKQHMKYKEPTKGKGIRKLFRENGYKIYLVDEYKTSCMCSKCCEGKCEKFITRQNPKPYKKADILVHGALICKKCNAVWNRDVNGATNIFRIVKNMIQKKERPKYLCR

SEQ ID NO: 16526 - protein, 436 aa, Methanocaldococcus sp.
MPKRKTKLPTEIVLTYKVRHGYNLDNLPNEFIKIAQKAVDIIWENINWKEKKVKHRYKVGRKYKYYTTIRLIPEIPKDKTFKRELRSILLKNWNFASHYVDGAIKVAYSTIESWKSNYLNGKRGRNKPIFKRPFVRVKTTLIKYDKENGLIRITIKPRKEYLTLNIKNEWFFDKVRDFTIGEVILKDKEALITFKKPLNLSDKRILIGVDSNLKSLDLYHPEKGWIRIDLSELHRIKKVYDAIIDKLKSIYKKAPKRIGKLLKKYLNRRKNRVNDFINKLTSQLSKLFPNAIFVFEDLDKFNMYDDNSSFNRSLDRSSWREIARRLEYKSIVFYVNPHYTSKTCPVCGSKMKSQEGQVVKCDKCGVFDRQFVGCFNVFKRGVELVKEFLGGVGVPVAGVKGDDLLPNEPRGELNPMPPNPNVVYYVDLNGKYLKCL

SEQ ID NO: 16527 - protein, 381 aa, unknown
  TnpB Polypeptide
MVYLLPKMQNFNQGEVMERTVRIKIENEDLRETAEQYFEAYKFCIEKSFELHTSNKKKLHNATYYPLRKMYPKIPSALLQTVRDIACENLKAVKLKIKPIPKNKFIRFDKRTFSFKNGLVSVSTTNGRKKFNVSIPEYFKKYLNWDCKAGVLVLKGNQLWLNLIFNKEKEVNNHPKDILGLDRGINNIAVCSDNVFYNSKQLKNIKGRYQHLKAKLQSKGTPSAKRHLKKLKGKEKRFVRDVNHVISKQIVNKNYDYFALEDLKKLPRNKGKKFNRKLGNWSYNQLGNFITYKAEELGKTVTKVDPRHTSQMCSQCGYVERSNRKGNAFRCRKCGFELNADLNASRNIAQLGMSELGRLHVIQPIIAQMVATSPHSSEVGR

SEQ ID NO: 16528 - protein, 375 aa, unknown
  TnpB Polypeptide
MVTKTIKAKMMFLTKSKAEKVTKELINFQKALRGENVKLHSVTKQQAERLRGRLKKKFKRKKEYPLIIRNDCIRVKETNNKLCKYWARIPVYKKSIYVAIAFPYKDKELLFSGKIRETKLKRHRNNWYLLITVEREVNTKYGISSVISCDLGEKHLLSTVLVEDNSMKPKFYGDEARGIRRHYSWLRKRLQEKKLLKKVKENGRKERIRVNQICHEISKEVVEIAKENKSVILLGDLKGIRNSTKGKRFNRIVSNMPSFKLSKFIEYKAEAEGIPVVKMREWNASKTCHVCNNEGRRVSQGLFRCPTCGLEYNADLNGAINLFKRFGGYMLSNGVVFDTAQNLEMKQADALQNQESPIFREENVNSLQLLSHPHL

SEQ ID NO: 16529 - protein, 475 aa, unknown
  TnpB Polypeptide
VVRNDVELGDELARVAATAPAEAGRQAGVTMPDFLVSGKSGRSRKEKLFQYNVVASCRSYQERVKVVSGESPKYVSQGWKRTANAAAPSYGEDYVNLGSVDRAYATIENDPFADGEIVLKMVIQGQWYRLIFNFDNKRFTEGRVTLPLIKVQDGQPVFIFTVVTDNPVVQFSGDYTIGVDVGINAYATAVVRDVKTGRIVYETTLSQRVHSLWNSVRASEQQVRDLKKKAGGLLSQRQKRMSALDEAQLHREAASRKKRELAILAAQEIAYLSHVWGNAVVAVEDLGWIRNTMRNGRWNRGAFVQWLAHYASQNGGWVVTVSPANTSQKCHTCGQRVTHPTHKLSVCAKHGVMDRDVNAAVNIAARAVPRVAKARVTREKNRKLRPQRPLRTPPARDSLKYPGRDRMKNAPTPKRKSHRRTAEEVILPLCPARAQATCLEARVLADGGAPCVAGTSKAALKQGNAAYECRLCSLI

SEQ ID NO: 16530 - protein, 489 aa, unknown
  TnpB Polypeptide
LAGLASEVRDISAYATYVVRNDEVLGDELSRVTVVQPATAGRRAGVTMPDFLASGKSGRSRKEMLVQHRAVTEHRSYQERVKAANGESSKYVSQGWKRTVDASPPSYGGDYVNLGAVDKCYAAIENNPFADGEIVLRLVIQGVWYRLIFDFDNKRFTEGKVTLPVIKVEDGTPVFIFTVVTDNPVVQFSGDYTIGVDVGISNYATAVVRDTKTGRIVYETTLSQRVHSLWNSVQASERQVRFLKKKSNRLLSQRQERMSALDEARFHREAASRKKRELAILAAQEIAYLSHLWGNAVVSVEDLSWIRNTMQNGRWNRGTLVQWFAHYVSQNGGWVVAVNPANTSQQCHMCGAKVSHPTRKLSVCPEHGVMDRDVNAAVNIAARAVPRVTKARVTRAKNRKLQPQAALKTPIARNSLKYPGRDRTKNKPTAKRKNHRLISKGVILPVCPARAQTWCLEARVLADQDARSVLGTNTAALKRGCITYKCMLL

SEQ ID NO: 16531 - protein, 423 aa, unknown
  TnpB Polypeptide
VTAYRSYEERVKAARGESSKYVSQGWKRTVDASPPSYGKDYVNLGTVDRAYARIENDPFTDGEIVLKMVIQGAWYQLVFQFDNDRFREGKVTLPVIKVENGQPVFIFTVVTDNPVVQFSGDYTIGVDVGINDYATVVVRDVKTGRIVYETALSQRVHSLWNSVRASEQQVRDLKAKAMTLLCDRQARMAALDEAQFHREAASRKKRELAILAAQEIADLSHLWGNAVVAVEDLGWIRSTMQHGRWNRGALVQWLAHYVSQNGGWVVAVDPSNTSQKCHVCGAQVAHPTHKVSVCPEHGTMDRDVNAAANIAARAVLRVAKARVTRAKNRKLRPQGALKTPVARRSLRYPGRDRTKGKPTPKRKNHHTRAVGEVILPSCPARAQTYSLAARVLADQGAQSAPGTSTAALKQGNAAYKSRLCGLI

SEQ ID NO: 16532 - protein, 434 aa, unknown
  TnpB Polypeptide
MLVQHRVVTEFRSYQERVKAANGESSKYVSQGWKRTVDKSAPSYGVDYVNLGTVDKCYAVIENTPFTDGEIVLKMVIQGAWYRLTFNFDNKRFTEGRVTLPVIKVQDGQPVFIFTVVTDNPVVQFSGDYVIGVDVGVTDYATVVVRDTKTGRIVYETTLSQRVHSLWNSVRASQRQVRDLKKKSDGLLSQRQARMSALDEAQLHREAASRKKRELAILAAQEIAYLSHVWGNAVVAVEDLSWISNTTLHGRWNRGTFVQWLTHYVSQNGGWVVAVNSSNTSQLCYKCGSKVTHPTRKLSVCAEHGAMDRDVNAAANVAARAVPKVAKARGTRAKNRKLGPQQPLRTPVARRSLRYPGRDRTKSKPTPKRKNHRRVSKGVILPVCPARAQAHCLKATVLADQGACDALGTSKAALKQGSATCECRLRNAILIPVM

SEQ ID NO: 16533 - protein, 503 aa, unknown
  TnpB Polypeptide
LNGELLDSVPVLAALASEVRDISAYATYVVRNDEALGDELARITATAPAEAGRRAGVTMPDFLVSGKSGRSRKEMLVQHRVVTEFRSWQERDKAANGESAKYVSQGWKRTANGSPPSYGEDYVNLGAVNKQYAAIENDPFADGEIVLKMVIQGTWYRLIFNFDNKRFTEGRVTLPVIKAQDGEPVFIFTVVTDNPVVQFSGDYVIGVDVGINNYATVAVREVATGRIVYETTLSQRVHSLWNSVRASEAQVCDLKAKAATLLHDRQGRMAALDEAQLHREAASRKKRELAILAAQEIADLSHLWGNAVVAVEDLSWIGNTMSSGRWNRGALVQWLTHYVSQNGGWVVAVNSAHTSQRCYKCGAKVTHPTHELSVCPEHGVMDRDVNAAVNIAARAVPRVVKARVTRAKSRKLRPQTALRTPVARKSLKYPGRDRTKNKPTQKRKNHRLVSREVILPLRPARAQTWCLEARVLADQGACGALGTSRAALKQGNAAYKCRLCSLI

SEQ ID NO: 16534 - protein, 522 aa, unknown
  TnpB Polypeptide
LAKNQTYKAFVARPSHVLDLDGELLDGSSVMAELASEVRDISSYATYVVRNDEALGDELARVTDTQPAAAGRRAGVTMPDFLVSGKSGRSRKENLLRYNVVTSYRSYMERVQAANGESSKCVSQGWKRTANGAAPSYGGDYVNLGAVDSAYARIENSPFTDGEIVLKMVIQGAWYRLIFNFDNKRFTEGRVTLPVVKVQDGQPVFVFTVVADNPVVQFSGDYTIGVDVGINAYATVVVRDTKSGLIVYETTLSQRVHSLWNSVRASQRQVRTLRKKAATLLHDRQERMAALDEAQLHREAASRKKRELAILAAQEIANLSHTFDNAVVAVEDLGWIANTMQNGRWNRGALVKWLAHYVSQNGGWVVAVNPSNTSQLCYKCGSKVTHPTHKDSVCAEHGVMDRDVNAAANIAARAVQRVVKARATRAKNRKLRPQAPLKTPAARNSLKYPGRDRTKSKPTPKRKSLCRVAGEVILPVRPARAQAHSLEASVLADQGTRVTLGTNVAALKQGNVAYKCRLCCLI

SEQ ID NO: 16535 - protein, 432 aa, unknown
  TnpB Polypeptide
LEAVKVALDPTPAQERRLLSHAGGARFAFNATLAHVKGAIDAGENIGWSPYALRKWWNKNKGKLAVSEDGEPWWQENSKESYSYGLESLAKGLSNWAKSRRGDRKGRKVGFPKFKNKAGSVPRFAYTTGSFGLVKGDPKALKLPRIGRVHCMENVAKRVGDAKVLRMTISQRAGRWYASLTVERDDKPAVEPPKCGAVGVDLGIKTLATLSDGTVVENPRYLKKSERKLKKAQRELSRKTRGSNRRNKAKDKVARLHAHVANQRQDAMHKLTTWLANKYSDISIEDLNVSGMVKNHHLAKSISDAAFGEFRRQLEYKTARTGARLRVVDRWYRSSKICSKCGTVKAKLSLSERTYRCDSCGLTMDRDLNAAINILVAGSAPETLNARGEDVRRNQHTVGNADLGEARTKQAHKSAVRLGAGLGNEAMQTKTN

SEQ ID NO: 16536 - protein, 409 aa, unknown
  TnpB Polypeptide
MKRSNLFQLAPTADQHHTLRELGVNCAKLWNEVNYLHRQQYQNYLRLDWNPRVYKKYVPLVGSATAQQIVRKNNEAWRSFLALKRMESKGKLPPTMRWVKPPGYWKRDGRYMLRILFRCDSYHIRQGRVNLPHDLSIPFKGELKWTGKQGRLEVAWDSLSQKWRVFQSVQVKPIITPLGSKTCYIDMGVRNLATVWLTEWRQPIAYQSGRLLADWWYWTSRIAQHQQRLSVVNGRKKSKQLSKLYRIRKNRFRHAVATFARQLVKDLYAKGVSTIVIGELTGIRDKCQHGRQGNAMVHNYWSHKYVADRLRWTAEEYGMEVRTVSEAYTSQTCPRCRSRHSQRVLRGLQCLDCGLQAHRDVVGVVNMAARCGEYAVRPMAWPMLLRWDGCGWNRNNGMPTQAKRIRVEA

SEQ ID NO: 16537 - protein, 432 aa, unknown
  TnpB Polypeptide
MIRSVKHKISYANTGKRDKLEELLRESKRVASIYLDYLWDYGYSWEIKDRKTGKTVCKAFDVSRDLLDHPRMLSNVGLESRLSSFSTNLSARLRKCILTQVLGMIGAAVEKQRKRLYQVEKDRKEGRYNRQLHKAIDRNKSRKPRLDNYRVELNSICADFEETQDGEFLGFLQLKSLGKGFPKLRIPVNNHRACNKYTDWNRKNSFLISDREIHIRYDKPTPDKRKEGKTLGCDQGLKTTVTLSDGTTVPDTDPHGYNLENVTKKLSRKKKGSKAFKQTQSHRKNLINYQINHTDFSHVKQINLEKIWNIRYKRRTNRYLSHWCNTLIRDKILKTAEEQGVLIKQQSSTYRSQRCCECGLVRKANRKGKVYKCSCGNEIDSDLNASRNHVIELPDIPYELRKLEKNRKGFYWKSAGFFELTGEELTVPHSRY

SEQ ID NO: 16538 - protein, 526 aa, unknown
  TnpB Polypeptide
MTKSNEPTPTYVVKILLDLKANDYRTVEKSMNVANSIYNDMLSEGKKRINKLRADENYWKLIKDYNDAKEHNEKRSKIKDKAKKAKIPVIDTKPINASINNLIKSYGLTDSDFKTFLKDRRHNVESYKILSSAEVQVIASHVFNTIENVLEFKSKIKNLKFKSKYKDSSFRNCRNDTGLRLVNNNNDKYVYKLVLGNKHEINIKRNAFTTYQQNCMLRAEKIKYIQIQKSKIKGKFRYYLVIYLQGTPPSKHTVGTGVVGCDNGVSTLAYVSDSKLKLVDLVPEKCLRMEEGIKCLNKQISRKLRLLNPDCYDENKKQVKGKKMNNRSNNLTKIMNRVQKKQRKMRIYRNELQNKVCNDLLSQGNVIQLEKMNVKALQKCSKNIRINPKTNRPYSKKRFGKSILKASPSSLVTLLKTKATSRGAIVIEINPKDTKPSQYNHILNKDIKKILNTRIYDLSDEYPNIQRDLYSAILNKYTIQHTKNNKTTYTIDKTKLTNEFEAYYKLMQNEITKIKNKNKRLSWYVS

SEQ ID NO: 16539 - protein, 404 aa, unknown
  TnpB Polypeptide
MNISLRRGMRKMIKGIKIMLVPNNKQNTLMFQNAGTARWAYNWALGREKENYANGGKFICDNDLRKELTQLKKTDELGWLNSVSNNVPKQAIKDACGAYQRFFKGQAKFPQFKTRRKSPPKFYQDNIKIQFTMTHVKFEGLAKSKKENKQKLNWVRLAEHDRVPFGKDIKYINPRISHDGLNWFISVGIEYPDSIDTPMNKEIGIDLGIKDLAICSDGKIYGNINKTKKMKQLEKKKKRLQRQVSRKYEDNRDVLKYIKTKNIIKLELKIRTVQHKLNGARNNYIQQTTSEIVGREPSHITIEDLNVSGMMKNKHLSKAIQQQSFYEFGRQLKYKGLWNHIEIRIADRWYPSSKTCHECGQINKLLKLSDREWACTECGSILDRDLNASLNLRDTERYEIFKVS

SEQ ID NO: 16540 - protein, 275 aa, Bacillus sp.
VIPQPKHIDFHTIKSAEIVWHKNQYWMHLAVEVPKQKQVQGKKEAGCDLGIIHAAVLSNGKSHLIVTGKELRSLQRYRNKRLKEFQKLISRKKPGSNKRQKLILRKRRFLEKLERRMEYLLHSISKMITDWCVENQIKTLYIGTPDGAQKNTKKKKKTRKEIRQQLSNWSFGQLIEKIKYKLKLRGGKVQLVEESYTSGTCPSCGEFHKQWNRNFHCRCGSEGHRDVVGAINILDKSVNNRLTKNRDLPKIEDTKYRRVLLAPIVSHNEAKRAVA

SEQ ID NO: 16541 - protein, 376 aa, Sulfodiicoccus sp.
VKVERKEVKKGEKATNVKVTLPKKKEVYKTLRDELEEINVLASHYVDEAINDAYSTLKSWRRRAEKGRSLRKPRLKRVYVRVKSTLRKVEGESVRITVRPYEYITFSWSHTWFSKRVKWLELGEPIIKEDEVYLPFRYKLSWSSPIDFISIDSNLYTLDAYDGEKFVTISLKELYSLKYGMQLKRSKIQSFTSKHSKKGKVLMEKYSHREKNRVLDYVHKFVNSLLEMYPLTAFAVEKLNKQSMFRDANDSLSKKISKTVWRSIHRVLKYKAPIYGSFVKEVSPYLTSKSCPRCGWVSRKVGRTFRCERCGFTLDRQLNASLNIYLRMCGFPHVREIPRVWVGVTPLKGRRGVNGLSRDSGEAQGLRIDIKYYEIL

SEQ ID NO: 16542 - protein, 374 aa, Sulfodiicoccus sp.
VLKVNAQQVARKNAEDWRSFFSLIEEKKEGKLPKWFRPRPPGYWKDENGKYKLIFIIRNDRYEVNESERTIYLKDFKLSLRFKGKLKWCGKLGRLEIHYDDARKARYAHIPVEVESTVESRGSLRASVDLGIVNLATVYVEDGKWYIFKGGGVLSRYEYYGKRTSEVQKVLARHGQRRGRKLKLLYDKRRGFLKHALNSMVRKIMEELGQKGVSEVVIGYPREISRNHGNKLTVNFWNYSYVVKRFEEIGEELGIKIVRVNESYTSKSCSLCGEAHESGRIKRGLFRCPRMGKVINADLNGAINILHIPESLGSGSGGQLPVRDRGNGPKARPVVHLWTNGAGWVLLAPTSYEAMKMKAVNHEPMIRPKGTLAL

SEQ ID NO: 16543 - protein, 411 aa, Sulfodiicoccus sp.
MPDVGFRFRAYTNERTLRALKAQLRMACELYNTLRWADSYFYARDGKGLNQTQLRQLALDLRKQDEQYQQLHSQVAQNVADRFYEARERFLDGLSRFPKERKPHKYSSLVYPQSGWKVLSSREIRGKSREAREGHPKKLMKLNLSHLGVFKVLVHRDFPLDKVKRVVVKLMPSGRVYISFVVDYEFPKLPQVNKVTALDVGIKTLIMTSDGEYFPNVKPYEKALLKVRHLHRVLSRKVFLSKNWFKAKVKLAKAYEHLRNLRKDIYMRLGKHFARNYDVLVMEDINVKKLVGKSPRKLRMRLHDVAFHELNISKYQMEKHGKSIVLVDPAHTSKTCAKCGYVREDLTLLDRVFSCPRCGWITDRDYNASLNILRRSGSVRPSVPVELRPLPVLRYWQGGAGKQEAPSVRAG

SEQ ID NO: 16544 - protein, 409 aa, Sulfodiicoccus sp.
MPSVGFRFRAYTDGQTIRALKAQLKLACEVYNTLRWADLYFYQRDGKGLTQTELRQLALDLRKQDKDYQQIYSQVVQQAADRYYEARDRFFKGLARFPKEKKRHKYYSLVYPQSGWKVVETREVRTESRKNKKKLVTLRLSNLGVFKVVVHRDFPLDKVKRVVVKLTRSERIYISFVVEGVEFPQPEKTNKVVAIDVGIEKLLTTSDGYFFPNLKPYEKALAKLRELHKALSRKKFLSRNWFKAKVKLARAYEHLKNLRQDLYMKLGRWFAKHYDVVVMEDIDVKQLVGKSERKMKMRLHDVAFHELKRTLEYQLGKYGKRATLVNPAYTSKTCATCGYVKKDLTLYDRVFVCPECGWVADRDYNASLNILRNAGWESPSVPVELRPLPVLPYWQGGVMKQEAPPFRAG

SEQ ID NO: 16545 - protein, 153 aa, Sulfodiicoccus sp.
MGEYDAYEELSCERRILFNRLQKRFVHLYRTLSSKMVEELHNLGVSTIYVGYPYNIGQDKGNKFTVNVWSYRKLIRAIELKAQEYGMKVYEVIEYNTSRLCAHHDVEVKRQPRGVVHCPFGHKLHSDLNGALNIRKKAVNKIVTAVKNRFPSL

SEQ ID NO: 16546 - protein, 280 aa, Sulfodiicoccus sp.
MARRVKAIRATVSMKIALSEPLLALVNNYVKALRFTLFWLKENVKNPEEKGVLGKVHEELYTRLREECDLPSKVAEDCYRDALATYEGWYNNPRRGRFPRVYKPTLWLTPKASYSVDFERMTVRIASVGELPILGYPRNLREYLSWKMREARLVVEGDNAFLKVVFEREEESAVPKSSIAVDINVGEVVVGKDDKHYVRIPTRIEEVHHWKSLAENLQKKYSRRWRENRRILYRIHSFHQKARRIMEDFARKVGKWVVEIARTIGANVIKLESLKNLIKS

SEQ ID NO: 16547 - protein, 381 aa, Sulfodiicoccus sp.
MARRSKKAIRATVSMKIALSEPLLALVNNYVKALRSALFWLKENVKNEEKGVLGRVHEELYTRLREEYSLPSKVAEDCYRDTLSVYRGWCNNPRRGRFPRVHKPTVWLTPRASYSVNFETTTVRIAGVGELPILGYPRNLREYANWRAKEARLVVGDGKAFLKVVFEKPLEEVEPKSSVAVDINMGEVVVGKDDKDYVRIPTRLEEVHRWKSLAENLQRKYPKRWRENKRTLYRVCSFHRKAKRILEDFARKVGKWVVEIAETMGANVIKLENLKNLIKNVNKLSKEFRDKLYLMQYRRIQCWVEWQARKRGMVVEHVNPSYSSVSCPKCGKKMEEVAHRWFRCSCGCENDRDVIAVVNLNGRGSLTLSTAPQMRYVVPNR

SEQ ID NO: 16548 - protein, 209 aa, Sulfodiicoccus sp.
MENGTLILEKPFVKYEPVTPIGIDLGERNLATVVALVNEKPTKGTFFEGSRIKEIRHEYFNIRKKLQEKKRLDVVKRLRGKERRMVNHELHVISKKVVDYAKKFPSPVIVVEKLTGIREKFKESKKLDRRFHSLPFRRLQSMIEYKAKINGIKVVYINPRNTSRTCHRCGHVARTDGREYRRKCGVVRNRDLNASINVARASTRGTGRG

SEQ ID NO: 16549 - protein, 277 aa, Sulfodiicoccus sp.
MEELVESKIVELGKLRKIYSDVQYLRSYLGVLRKSGTPSGLSPPDGMPKQLFSLVINGAPPRLGPLPIEGNNPYLVKDLGCMVSTDRKDKPLGAVIDLSQGVKVYLVFERPQTVVGIDIGLRHLITAVAVTNGRPVKTRMWGDEKLNMEFMRFLGEPQGLARVGGLRQRVEKMLEDVVVYIASWNPKTVALENLRETTGRMGTSLRIVQETLERVMYNHGVKYKRMSPLNTSRICSNCGYRKGELTGSLFQCPVCGYVADRDFNAALNLALKCYYTC

SEQ ID NO: 16550 - protein, 401 aa, Sulfodiicoccus sp.
MKNDEREESEVLLENYRVLLQKALDWLWDRTKVERKEVKNGEKATKVKVTLLKKKEVYKTLRDELERINVLASHYVDEAINDAYSVLRSWRRAEKGKALRKPRLKEVYVRVKSTLRKVDGESVRITVRPYEYVNFSWSRTWFSRRVKGLELGEPVIKEDKVYLPFRYKLPRFTPIDFLAIDSNLYTLDAYDGEKFVTFSLKELYSLKYGVELKRGRIQSFASKHGRKGKELLRKYSHRERNRVLDYLHKFVNKLLEMYPITMFVVEKLNKQGMFEDANRKLSKKISKTVWRSIHRVLKYKAPLYGSFVKEVSPYLTSKSCPRCGRVSRKVGGTFRCGRCGFTLDRQLNASLNIYLRMCGFPHVRDIPRVWVGVTPLRGRRGVNGLSRDSGEAQGLRIDIKL

SEQ ID NO: 16551 - protein, 352 aa, Paraburkholderia sp.
LRDGQEWLDEAAREVNMVWNFANETTAKAARPFYGKPRYLSGFDVEKLLTGVHSELKYLQANTVIRIAHEHADRRLQFRRSKLRWRSSGGSKRSLGWIPFRHPQVKFVKGAIRFCGKRFRVFDSYGLDKYELRSGAFSQNALGEWFVNIAVKTATKAPDMPRRAVGVDLGLKASATTSDGQILAAGDFYRGIERKIAEAQRRGHKRHAKRLHQRAANRRNDALHKFSTAMVNNYGAIYVGDVSSLKLAKTKMAKAVLDSGWGMLKTMLHYKGHQAGSLVEVVNERFTTVTCSNCGQHTGPRGLRQLHVRGWFCSACETDHDRDINAARNILARGLTGPSAGTNFKEQKHHVH

SEQ ID NO: 16552 - protein, 372 aa, unknown
  TnpB Polypeptide
MNKSFTKNFNKSFKVRIYPNEEQKVLIDKTFGCTRYIYNFFLNLKQKWYMYHNISLSFYNMSKILTELKRHKTWLKEVDKWSLINAVKDLDFAYQNFFKRGYRYPKFKSKKRDRLSYRTNDKLQLDQNNKKIRIPKVGWIRFRDKSNFNGLTKINNITISKSSSGKYFANISAEVDITSFEKNNQNCGIDFGLKDFCILNGGTKFKNPKFLVHNEKRLKLLQKSLSRKVYGSKNYEKAKIKLARFHEYIVNSRKDYLHKISLYLVKNYDIICAETLRVKNMLKNHKLAKSISDVSWYEFCRQLEYKTMWYGKKFVQISTYFASSQICSNCGYKNSDVKNLNVREWTCPSCNTYHDRDINASTNILNEGLRLI

SEQ ID NO: 16553 - protein, 411 aa, unknown
  TnpB Polypeptide
LEEKSNSNDNKIYRSVKIRLLPTKEQEILFWKSVGVARWSYNYFLSESNRVYQEWLEDNSKPKHISEQEVRKYINNHLKKTTHTWLKEVGSNVMKQGVKDANIALQRFFKLKEGYPKFKSKKKSKPSFYVNYEHLKRLPNGFQGERLGYVKTKESLPKVSKNQKYLRPRISFDGRFWFLSVSFEVSKLDVRLSDTKLGIDLGIKELAVVSNQSGTVVKKYHNINKTYEVKRLERKLKREQRKFSRKILMNTSHYIDSGRRPIYSKDLESCKNIQKQKGIIQTLYRQLLNIRTNYLHKTTTEIVRAKPSRIVLEDLNVRGMMKNRHLSKSLMCQRLYEFRRQVEYKAELYGIEVVLADRFYPSSKTCHKCGNVKKDLKLSDRIYRCDCCGNIVDRDVNASINLANYNIESIN

SEQ ID NO: 16554 - protein, 212 aa, unknown
  TnpB Polypeptide
VRKINRAVKIRIYPNAEQRVQIEKTIGCSRFIYNYMLADKMEHYKKEKKMLRNTPASYKKEYPWLKEVDSLALANVQMHLESAFHKFFREPSAGFPRFKSKKSSRKSYTTNVVNGNIFLEGKYLKLPKMTAVRMKLHRPISEKWKLKSVTVSREPSGKYFASFSTNSYTFVPGAISVGVFPAPSLILLFAYRIASLGFPYFIKIVKMSFMFF

SEQ ID NO: 16555 - protein, 343 aa, unknown
  TnpB Polypeptide
MLEAVKVALDPTPVQERLILSHAGAARFAYNAGLAHVKETIETGGKLEWTLYALRRWWNANKGTLAVDADGTPWWRENSKEAYNSGMEALSDALSNWSKSRKGEREGRRVGFPRFKAKDRETPRFAYTTGSFGLVRADPKALRLPRIGRVHCMENVAGRVDGARALRMTVSCRAGRWHAALTVERADPTARRTPREGAVGIDLGVKSLATLSDGTTIANPHTLKANERRLKRAQRSLSRRQPGSHRRAHARERVVRLHSRVANQRRDMLDKLTTWLADTYSDISIEDLNVAGMVKNHRLAQSIQDAAFAEFRRQLTYKTARTGAGLHIIGRWYPSSPARTAGR

SEQ ID NO: 16556 - protein, 371 aa, Clostridium sp.
MKVRLEPNNKQIAKLFQCSGTARFIYNWTLARQEENYKNGGKFISDSDLRKEITQLKKTEQYQWLNSISNNVAKQAVKDGCEAYKKFFKGLADKPGFKSRRKSKPSFYNDVIKIKFSSTHVQLEKLGKVKLSEYGRIPTGVKYSNPRISFNGVHWYISVGIESIQESVELTGESIGIDLGIKDLAICSNREEPYKSINKTKRVKKLEKKMRRLQRKVSNKYQLNKKGGSYVKTSNIVKLEKNIIKLHKSLDNIRTDYRHKVTTEIVKTKPSRIVMESLNVKGMMKNRHLSKVVAKQGFFEFKTMIQYKAEKYGIEFVEADKWFASSKTCSACGYIKPKLSLSERTFVCEHCGSAIDRDKNASINLSRYKVA

SEQ ID NO: 16557 - protein, 404 aa, Clostridium sp.
VVERLKVNRVEQHQINKNHQLFQLLDEYSFKSKNLYNYANYLVRQTFIITSNLKDNKELTQEQQSFLNWINLKVDEFNVKKQEVLKKKQFKGKNLDKQLKALDYFHGEHKYLGYDFLEFLCSNSEDYRVLMSQVAQQTLRVLDKNWQSFFQSMNKWRKCKDGFTGRPKLPKYKHKTKGRFNVYFTNQNCKFVGDSIKFPKCLNQYLLKTKINGKLQQVRIKPLGSKYLIEIVYQKEIGNLEFESKNICSIDLGLDNLPTLTNNAGIIPVIINGKPLKSINQYFNKQKSKIVSILKTNNNKDWCRSLDILTTKRNNKVKNYLHKASKIIIDYCIKNNFDTIVIGNNKGWKQEVNLGSRNNQNFVGIPYHIFIQMIAYKAENVGIKVIITEESYTSGTSFLDGNCL

SEQ ID NO: 16558 - protein, 388 aa, Clostridium sp.
MIRGIKVRLYPTKEQEILMWKSAGVARFTYNWGLAYLNSYYKENKKSLSIGELRKIFTELRNSEEYPWIREVSSEIPQQALKDLGDAFEEFFEDEHGYPKFKKKNKCENSFFHLNNKFVVKDKFIKLERIGFVKMKDEGRLPIGNYKKDKIKVTNPRIKHNGHHWYLSLGFEVENTHKLCLTGESIGVDLGIKELAVVSNIDKPFKNINKSKKVKKLNKRLLKLQRQISRKYDKLKSEKAFKKSEKPNKTNNIIKLEKKIKLLHKKISDIRLNHIHQTTNAIVKTKPSRVVVEDLNVTGLLKNKHLSKAIQEQSFNKFINTLEYKCEWNGIEFVKADRFYPSSKKCSCCGAIKKDLKLSDRIYKCACGIVIDRDKNASIDLANYKLVG

SEQ ID NO: 16559 - protein, 462 aa, Clostridium sp.
MAAIVKTVKQYSYELDVQTLNEVLFIANQYKNVKNYVYSRYSGINSIPLLGKDRQVRDEWVRTNFYSQWKLPARYWKLALSEAMSNIKSQWTNTKRRIREQVKVNDNLSNEDKHYINYVLKFDNYYWKVLTNQSFDIPRIFENKDLNYKYLHGLIKRYTRRYKGQIPYSKIGRTFSIDEGLYSYKEGHIRITCTKKGKRLPIKLTDNNKHSKTLITKIVNNKMEIHRPLKVQIKKNDNQENIIGLDKGYRYLFVVSSGNFYGDKLNNFLNEETERLNRVNSQRNRFWTLYNQYLEQEDVKKAATIKENNLGKVKYIHNKQKYEQTVKSYINHSLNQLIKKERPTEIVMEQLDFVNWSGRYPKSVKRKLSRWIKGYVRERLEYKCEYNNISYTYINPAYTSKVCNVCGSFGKRTLDVFTCPKCGKLHSDINASKNILNRKYDKKITLYTNYKKVKEILENKIS

SEQ ID NO: 16560 - protein, 395 aa, unknown
  TnpB Polypeptide
VTQKAFKYRFYPTPEQETLLRRTMGCTRLVYNRALAARTQAWYERQEKVGYAETSTLLTSWKKQEDLQFLSEVSCVPLQQGLRHLQKAFSNFFEGRAKYPNFKKKHHGGSAEFTKSAFKWKGGQVFLAKCSQPLDIRWSRQLPERVQPSTITVKLSPSQRWTVSLLVDVEIEALPESLNSVGIDLGISSLVALSTGEKVANPKAFKAKYRKLRQAQKALNRKKKGSNNRHKARLKVASLHQEITDARKDFLHKLTTQLVRENQTIVVEDLAIKNMVKNHKLAQAISDASWGELIRQLVYKCEWYGRELIKIDRWFPSSKRCGNCGHIVEKLPLNIREWDCPMCSAHHDRDINAAQNILAAGLAVIVCGANVRPDRHESKRQLRKTSNGKKQKPKS

SEQ ID NO: 16561 - protein, 389 aa, unknown
  TnpB Polypeptide
MIRTFKYRLWLNRNQERELGIMLETHRHLYNTCLEQRKSAYENEKRSITYGEQSSWYKSQRASNPYFARLNFSSAQATMRRLDKAFTAFFRRIKTGDKSGYPRFKNADRFFSIEFPAHGDGIRLTDNRLRIQHVGIVKVCLHRHLPEDAQIRTITVTRESDKWYLEVCFKTPDMAITQSTLPAVGIDVGIEHFLTTSDGEHIPNPGYLKSALPKLRIVQRSLSRKQKNGRNRAKAKIRIRNLHTRVKNHRSEYRHKTSLDLIRRYGTIAVESLNIKDMLGNRRLARAISDAAWSAFITTLTHKAERAGAAVVQVSSQNTSQECSGCGQIVQKKLSERWHSCPSCGLYLHRDVNAARNILSRAFALPGSGKWDRTVLNQGTVSQEAVCFS

SEQ ID NO: 16562 - protein, 412 aa, unknown
  TnpB Polypeptide
VERRKVTFKLYPNARESDRLAGWVRLHCELYNAALAERIDAYRKAGKSISYFDQQNVLPEIKADRPEFVELGSHALQQTLRRLDLAFQAFFRRIRAGQTPGFPRFKASKRFSGFCYPDPVGWKLHQQGQRGGTLRLGSGKGAMMIRLRGRHRFGAQAKPNDLTIIRKNGEWFASVTLRVPEAACARARHDHQHRGVDFGLTDWATFDNGETIANPRWTRNELPRLADLQRQRARKKIGSLRYKRLNLQAAQLHARIGNRRRDFVHQKTSMLVRTCAVIATEELTPKNMSRSARGTVESPGRRVRQKAGLNREILSAAFGMAHQMLSYKAVEAGTRLYLANTRQLKPSQRCAGCWAIDPKTLARQRAKSKSMTRETPATTEKVWRRESHPCADPILSKTARSPRTCPIRPPAA

SEQ ID NO: 16563 - protein, 393 aa, unknown
  TnpB Polypeptide
MNVIKSYKYRLYPNSEQQELLNKTFGCVRFYWNNLVEGFNSYEKESNPSPEFKTQKELKKEFEWLSEVSAAALQQKKRDFDEARKQYFNKNRKSLIGRMNFKSKKNKQSYRLPNQKFKIKDSRIRLEKIGFVKMVMERELPINSKLLSVTVSRNSSGEYYASINFEIEQEVKNKKSKENVGIDLGLKEIATLSNGLQFYNPKVFTKSQCELAKAQRHLSRKKKGSNRYEKQARKVAKIHQSITNRRDWYLHNVSKFIVENFNEIGMEDLHIKGMVKNRRLSKSISDTSMAKLKQFITYKQQKYGMEVKLLNRFEPSTKECSECGHNQTMMLSDRTFVCQNCGVVKDRDWNASIVIRNKTVGVNTVQQTWSDIKTKLHHDVKWQLLRSVETIIE

SEQ ID NO: 16564 - protein, 478 aa, unknown
  TnpB Polypeptide
MVIMIQLIPKEEIVSTSKWIPITKSYKYEMKPTKNQEVKLNQTLNTCRHLYNNILSERKDGYENDGWNIQYNDQQNYLPTLRNKNDEFGKELREVYAQILQNVIKRVDISYQNFFRRVKNSKKGSNGKKEKPGFPRFKGYGRYDSFTFPQYGNGCDSRSIKEVNASKDGIKSKNKKIDVVRLSKIGDIKFIKHRNFNPNPYLIKTVAIKKEIDKWFVMFTVETFTEINIPTIPKEVNQDKIVGIDVGLEKLTTLSNGKIIESPEYLRESEKKLAKYQRRLSRKKKYEKIVEINKKINQGQKIDKEIEKKKIKVNSKNREKQIIKVRKIHRKITNQRRNFSHEVSRTLVDKFDVISFEKLNIQNMVKNHRLAKSISDASWYQIQMFTNYKAEWAGKKVIFVDPKRTSKECHVCGNLEDMKLSDRTFRCSKCGLILDRDINAAINIKNRGIKELNITPGTGEGACLSSPNRDTMIQEALL

SEQ ID NO: 16565 - protein, 454 aa, Cyanobacteria sp.
  misc_feature (353)..(449): Xaa can be any naturally occurring amino acid
MSYNTFMTQSLSVKCKLIVPVGFRSKIDETLRGFADACNQILAVAKRDNCWNTTRLHHKVYKPVREATGLKANHVCQAIRRVIGNAKAVKQIHKFRPTSISLDVRTFRYVEETQTVGVTLKCGRVDFKLSIGGYQMALLRGQNLTSATLCKSKKGDYYINFVVEVDTPPTGKTPKVIGVDLGRRDIATTSTGKSWSGEQIQWVRDRFSRTWANVAFGNGFAEQRKRTRNSRRLLRRLSGRERRFQEWLNHNISKQLVQEAKSRDAALAFEDLTGIRDSLNQKPRSKMSRRQANNWAFYQLRNFVGYKAALAGVLVVFVPPAYTSQTCSRCRHVHPEKGKSYRNGKKFKCGHCXXXXXXXXXXXXXXXXXXXXXXXXXXXXXXXXXXXXXXXXXXXXXXXXXXXXXXXXXXXXXXXXXXXXXXXXXXXXXXXXXXXXXXXXXXXXXXXXXPKVQG

SEQ ID NO: 16566 - protein, 385 aa, Sharpea sp.
MFQCCIKEAKQIYSKHKTNKVIFGGKANFFNRLKSKISKEEYKANRLSPIYSIGEESKKGNRLFRIQNDMSIIFQPNRNTHYMLELIGIGNNRMKYISKLIELQNNRQIGITYKLDSTYIYISFDETKIELHKHNKIENRILALDLNPNYIGYSIVDWHDDNKYDIVAKGVYSFEKYNIIESKQHKLKLTSCAKQRIHINNKRHHDIIDICKNIVDKAIHYKCQIIGIEDLNIKPSNRGKGTNFNMRNLFTTNLTKRCNVNNIRLVKVIPNYSSFIGNIAFRHEELPDMILASLEIGRRAYEYNLQYIEKKKNKIKNIVFPKLEDFYDSYVKSLEEEFNIKEKFSTWIEMYQYIKEAKIMYRFPFNRCKYLKVFRFKSSLCYILQ

SEQ ID NO: 16567 - protein, 473 aa, unknown
  TnpB Polypeptide
MKVVTRIYVYDERVSKIRDFVLKCLELRNLLIFFIKRYHELTREWLISEGLLYSLMSKLNKRTLNNLDKMEKLSRISSVVGSDNELGMILDKLKVMKSELGNVSVVVSVLRQVCRDFKSYFEALKEWHRNKKKFTGKPNPPKVKDFDKVDKFSVEVMSFKRKGGRLEIKLNNGKKIKVKIPEFVGKVSSVRVVYFLGFGYVDVVWDKFIPELKPLGNKRAAIDLGVRNFVTLVSEDKRIPSIVIKSSNVIAFNQWYNKLLTKLRSEHDKLKKNNPNCEEVKVLRKRIRLLHLHRKQWMESMMHELSKAITLFLHKTGHSVVYIGMNKDWKRNVKLGKRNNQIFVQLPFRDFVNKLKYKCKWLGIEVVEVDESYTSKCSCLSDDIFEVRKSEGKVPMSGNRISRSLFKDMKLGKVFHADVNAAFNILRVGAKIKELFNDIDKFVMLKLCNPLVYRFREFCKLVLCKRQLPSPLG

SEQ ID NO: 16568 - protein, 278 aa, Ktedonobacter sp.
MKTIHIYRLDHLSPALFEHLREVQMEAAQVWNLCVSLHKEARMSHTRWPGRNELQQATKGRYALHSQSVQMIVHAFLANIETTRKLRREHPEMRMKYPWREKRFYPVHWPAQAVALEKGRVILPMGRGRPSIVLPIALPDNAGACTLVWNYGFELHVCVETEQAAQAPGAVQATVDLGEIHLAAVSTNAGKALIVTGRGIRSLKRGRAKQIGQITRKQSRCSKHSRRWKKLQRAKNKVCRRAQRAHVLVGIRQGYRLLDSQVHASPHLVLHRLRTRNQ

SEQ ID NO: 16569 - protein, 437 aa, Oscillatoriales sp.
MSQVLTVSCKLEVLQHQVEKLDAVLRAFANCCEYVNKNTDRKLTNQIAVQSLIYKEAREYSGLSAQMTIHAIRRVCANRKTAKQKDRPVKGFAATSATYDARTFTFREKDWTASLTMLKQREKFPLHIGNYQRHLLTGRNPKSAVLVKRKDNTYYLQIQLESEPPNPEKTDRVLGVDLGRTDIAVTSESEKFSGTAITEIRDRYSRVRASLQKKASKGTRSSRRRCRQLLQRLSGRERRFQAQVNHTVSYRLIQHAKKQAQTIALEDLTGIRERTNQQPRSKTERRRSNSWAFFQLRQFLCYKAVKFGVNLVFVDPRYTSQTCHKCLHIHPVRGESYRSGKKFRCGHCGWVGDADENGAKNISVLGLLLDQPGGSGLACSLEQHVLGLLKSPTDRASRSGKFKTPGKGDPELQSTIVMSHPQAQIANCIRCLKFDCK

SEQ ID NO: 16570 - protein, 522 aa, unknown
  TnpB Polypeptide
MKGELNMTRNNETTPTFVVKVLLDLKANDYRSVEKSMNVANSIYNDMLSEGKKRINKLRADKRYWKLIKEYNDAKEHNEKRSNQKIDIKPINNQLKNMVKSYGLSQTDFEHFLRDRRHNLDFYKTLSTPEIQVIAKQAFDTIKNVIYFKSKIKNLKFKSKYKDSSFRNKRNDTGLRLIENESDKYAYKLILGNKHEINIKRKAFNEYQQNCMLKAEKIKYVQIQKSKIKGKFRYYLVIYLQGTPPTKHKIGNGVVGCDNGVSTLAYVSDSKLELVDLVPEKCLRIEEGIKRLNKQISRKLRLLNPDCYDENNKVVKGKKMTNRSNNLTKLMNSVQKKQRKMRIYRNELQNKVCNELLSQGNVIQLEKMNVKALQKRSKNIRINAKTNRPYSKKRFGKSILKASPSSLVTLLKTKATSRGAIVIEINTKDTKPSQYNHILNKDIKKSLNTRIYDLSDEYPNVQRDLYSAILSKYTIQHTKNNKTTYTIDKTRLTNEFEPYYKLMQNEITKIKNENKRLSWYVS

SEQ ID NO: 16571 - protein, 633 aa, Streptomyces sp.
VVEKTGEVLPTAALTQRVGWAADLVNGMATELLATHWNDADVDRLASGVDAGGQSLPSNAWMALRRLGWAAAPAAGIRVNDRIVRMAQEQAGRTLRSVKWRTDLTAGVIKTWPAEPGRRTPGEWDAVREAVPDGRHLPSSVINSRTRQVVAYVKRHGRRPADVFELEAAPHGARMLLLSACDGQQASIARGDDPGRALLRLQLPVRPDPRSYQDWAWVACPITLPPTIPPGAVLHLPTLRVHQGRVRADLAYTHAVPTARRSGHAVALGVDWGLNTLLSAGAVRLHDNGKISALGAGSMFRAAGVLAKQHRLRRESEHLHAKTGHYERLMAGDAQHPLTGRQHVLAEEIRYVSGRRSNLNDALAWAAARWAVDQAITAGASVIYVEDLRSMEARGMSRTLNTRLSQQVRGKVVERMRHLAAETGIAVVAVPARGTSRHCPRCLVPLRHRKAPDRPTAPGWKWAICPNPDCGWQGDRDTGAWQRIAARGLTHQTKTVVDRTDGSMVIRSVVDELETKAVVTPTTTKTSRRDRSKTGPTRPRSTRPAPRRRRAPSPTGPSGPAGKRPEGHASTGRRWLPRAAHRHQGVTTISTPTTGHRPRGAALGAGFHLHAHATPPRWAHSMPDATSCMGSLN

SEQ ID NO: 16572 - protein, 402 aa, Escherichia sp.
VKRLQAFKFQLRPGGQQEREMRRFAGACRFVFNRALALQNENHEAGNKYIPYGKMASWLVEWKNATETQWLKDAPSQPLQQSLKDLERAYKNFFRKRAAFPRFKKRGQNDAFRYPQGVKLDQENSRIFLPKLGWMRYRNSRQVTGVVKNVTVSQSCGKWYISIQTENEVSTPVHPSALMVGLDAGVAKLATLSDGTVFGPVNSFQKNQKTLARLQRQLSRKVKFSNNWQKQKRKIQRLHSCIANIRRDYLHKVTTTVSKNHAMIVIEDLKVSNMSKSAAGTVSQPGRNVRAKSGLNRSILDQGWYEMRRQLEYKQLWRGGQVLAVPPAYTSQRCACCGHTVKENRLSQSKFRCQACGYTANADVNGARNILAAGHAVLACGEMVQSGRPLKQEPTEMIQATA

SEQ ID NO: 16573 - protein, 415 aa, Selenomonas sp.
MYSAVVSMDCANTRKKSRRNTRMLKSYKTEILPTREQRDKIRRSLGICRWLYNEYIARNKRLYHMYQRGCLDERQKHFLTAMDFDKFVNHHLKNTDELAWINECGSKARKKAITNAETAFQKFFHGKAGFPKFKKKSRQSVGIYFPKNNKGDWTIERHRIQIPTIGKVRLKEFGYLPAGAMVKSGVVSQKADRFYVSVVLNMPAPQYAKPRGEPLGIDLGLKDFAILSDGTKFKNINKTVDVRRLEKKLRREQRRLSRKLECKKKKGSDKPAAFFANISKNVLKVQKLHHRLFSIRTNYTNQVIHEIMKREPSFITIEDLNVSGMMKNRHLAKAVAACKFYEFRTKLMAKCHERGIELRIADRFYPSSKTCHNCGHVKSDLKLSDRVYICECGYVADRDQNAAMNLRDAKEYKIA

SEQ ID NO: 16574 - protein, 416 aa, Rhodococcus sp.
VGAVKRIVVVKLVPTADQFAALESTLVLCNDVANEVAGWAQSMDLRSRRALQVALYPMVKARGLSAQPTLQVLRKVADAYTTRQANLTNGNHGRPGSTRYTAVAGTAVKFRPHAAQPFDDRCLSWQMDSSTVSIWTTAGRMRGVRFVCAPWQHTLLAARKGETDLVYRDGHFYLYATVDEPAPEPTPPPDTAEGWLGVDLGIVNLAVTTDDDPATLDVRWSAGAVTARRKKNAALRATLQRVGTKSAKRKLKARRRKEQRFATDINHQLSKTIVAKAQRTGRGIAVEDLSGIRDRVRLARGQRTQLHSWGYAQLRAQITYKAERAGVPVAVVDPRNTSRTCSQCGYCDKANRVSQATFRCRHCQWTGHADHNAARNIAALGHRTYRAAQSTAPIAATPPAASGNVSSKPSPSGPSS

SEQ ID NO: 16575 - protein, 410 aa, unknown
  TnpB Polypeptide
MRRQAVKVRLYPTDEQVQVLAQHFGCARWWWNYGLNQCIETYKATGKGLSQSGLNSLLPALKKDKETEWLGECYSQVLQSVSLNLSRAYQNFFDGRAKYPKLKSKHHRQSIQYPQKVKQVDDCLKFPGKLGVVKAKIHRPLDGTIKTINVSKCPSGKYYASVLMEYKGDYPASSNDGKVVGIDLGIKDFAITYDGEKVSKYPNPRHLSKYEKKLAVKQRIAARKKKGSNRRRKANKTIARVYEQVSNVRQDYLHKLSRKIADNNQVVVVENLNVKGMVRNHKLAHAISDTGWGTFVNFLNYKLERSGGKLVEIDRWFPISKLCSNCHYQISELPLDVRTWVCRQCGTHHDRDGNAAMNIRAEGIRMLSSSGTGEANANGEDVRPIRGRKSKMWQSSVKLEAHTVLSRQCG

SEQ ID NO: 16576 - protein, 584 aa, Streptomyces sp.
MVVMLEGSVSERERGFACRMRDLRRVVVVGWSGRFVTAEWGCEVAGLRELAAPFVVPGPSGVAVRTRLKQLTGMDVEVLWQVGVHLGSLASRDLKARCRDGLGHDAGAWAVRKRDLTPVSSARWAGAITKTSHDQWALARRGAHAHIQSLEAGVRTLEHRLSLPIGEEGSKRAPGGYRSRREWHAKARRLHVLEDRLARARADWAAGRVRVVRGGKWLARVRHHLTAAGLTEAGWRERWEAARWFAQADGESGKRFGNETIRVTPDGEVSLRLPAPLQHLANAGHGRYVLTGRIRFAHRGQEWADRVAAHRAVAYRIHHDTVRGRWYLAASWQKPVTRTLPLAAALAEGVIGVDMNADHLAAWHLDTHGNPVGNPHRFSYDLTGPADHRDAQVRHALTRLLHWATTCGVKAIAVEDLDFTTEKTREKHGRRKRFRQLVSGMPTGRLRARLTSMADATGITIIAVDPAYTSRWGAQHWQKPLTSSTRRTTRHDAASIAIGRRAQGFPIRRRTAPPRTHQSDGCGHRTVQAGPDSTGREGPRPPYPRTTDTIRATGHGANAGDQDIQHRSGCPQRPGLGPGLTPAH

SEQ ID NO: 16577 - protein, 617 aa, Actinophytocola sp.
LSVVAGTVIVDECGLTPSLNWSAYSLRKDWNRAKGEVAPWWGENSKEAYSSGLANLARALKNWGESRNGKRNGRRAGFPRFKGRRAGLSCRFTTGSFGLVEQDRRHVKLPRIGVVRTHESTRKLARHVERGTARIRSATVSHRAGRWFCSFSVEITRHDPAPTRPGTAVGVDLGVKALAVLSTGEVVPNPKHLEVAQRELRRLQRQAARRVGPDKRTKQRPSKRWRKSQTRISKLHARVADARRDGLHKLTTRLVRTCGAIVVEDLNVSGMLANRRLARHVAGVGMAELRRQIEYKATRAGVRVRVASRWYPSSKTCSACGAVKTKLRLSERTFTCQSCGFTLDRDLNAARNLAGLLEASSPSCGATLNEPAGNPHKTRTTRRGPAPTRQRVGSGHRSTRFLNGCGDDHASQYDRAMPKPNHGSDARRRIVEAARRMVAERGVHASTMRGIARDAGVSTGAVTHYFADKADMMTAVLRENNTVFVKRIGKAAAGSRGLAALEAAMGAILPLDGEMLKCWTVLIAFWGHAPAERFVEAEGSTLGYHGLRTYVMSVLQEAADDGELIEGVELEHEAERILALVGGMGLMVGGFPKQLNLIRSRALRMLSELVAALRATG

SEQ ID NO: 16578 - protein, 239 aa, unknown
  TnpB Polypeptide
MDVKYTNPRIIYDNKYWYLSIGIEQEQPTIQLTDESLGIDVGVKDLAVCSNGMTFKNINKSKEVRRLKKSLKRKQKKVSRKYEMNKIKSGGENRCQFKKTNNIIKLEKEIRLLHRRLNNIRSNYINQTTNMIVKSKPSRVVMETLNIKGMMKNKYLSKTISEQCLYDFKLKMKYKCEFYGIEFVEADRYYPSSKICSKCGHIKTKLSLSERTYICEECGCGIDRDFNASVNLSRYELVV

SEQ ID NO: 16579 - protein, 406 aa, unknown
  TnpB Polypeptide
MLVTKAYRYELDPNNRQKSSLHQHAGVARFVYNWGLEQRINLFKTNQGKDRFTDAMKQHKLLTSLKRTQFPWMYECSKCAPQEALRDLHKAFQNFYRGRKMRESVGFPQFKRKGERDSFRLNGTIRFEGRRIQLPRIGKIRIKEKRDVYFNGRILSATVRRRADRWFVSVTVKEETPDPISVKGQAVGVDLGVRTLATLSDGTVFANPRALGKKLRKLRQLSKSLSRKKKGSKNHEKAKIRLARMYLKIFNIRQDTLHKVTTYLAKSHSRIVIEDLGVSNMMKNKKLARAIGDVGFFEFRRQLKYKCQWYGSQLIVAPRTFPSSKLCSCCGHKKKELSLSEREYACEQCGVRIDRDLNAALNLVAVSLPETENACGENVRLLTDSLNLQRAASMKQEPNISPGSNA

SEQ ID NO: 16580 - protein, 344 aa, unknown
  TnpB Polypeptide
LYKKSVSCFTLNTHLAKLKKLSKYAWWKQLGSQAIQGIAARIDKGYKAFFAHVKARKAGKISRRVSPPTFRKVRNAKSFTLSQAGWKLLGDNRLKIGSTVYKFAKSRETEGTIKTVTIQRDPLDDLYVYFSCLIEPQPIVRVMTGKSAGFDFGLTTYLTGSDGTEFQAPQPFRQRLKDVAQANHKLSSKRKGSCNRRQARLHLDRMHKRVANQRQAFHWELAHTLCAQYDFLAFETLNLQGMKALWGRKVSDLGFATFVQTLHDVAKKTGTLIQQIGTWFSSTKLCSACGCINQHITLRDRVWTCGDCGTTHQRDVNAAVNIFREGASSPGGIHVSQASACRGC

SEQ ID NO: 16581 - protein, 274 aa, unknown
  TnpB Polypeptide
VRNAKSFTLKQAGWKLLDGNRLKIGATVYKFAKSREIDGTVKTVTIKRDPLGDLYVYFSCLIAGQPIVRRMTGQSAGFDFGLTTYLTGSDGTELQAPQPLKHSLKALAKANLRLSTKQKGSCNRRQARRHMDRIHKRVANQRQAFHWELARDLCTTYDTLALETLNLQGMKALWGRKVSDLGFASFVDTLHHVANKTGTIVQHISRWFPSTKLCSTCGCLNQAITLRDRAWTCPDCGTTHRRDHNAAINIFREGASSHGGNPVSLAPASVDCRS

SEQ ID NO: 16582 - protein, 381 aa, Frankia sp.
VPWTLPALRLAWNVAKHQVAPWWVECSKEAFSAGLDQLARGLKNVSDSREGKRKGRRVGFPRFKKRGRARDSFRYTTGAYGPACDRRVKLPRIGRVKVCEPMGALTSRLAEGRARLLGATVARTAHRWYVSFTVEVDRQAPPGPSRRQRDAGPVGVDLGVKHLAVLSTGEMVVNPKHLAGSLRRLRTTSRAHARSRPGSARRRRRAARLARIHARVAHQRRDGLHTLTTRLAKTHSVIVVEDLHVAGMVRNRRLACSVSDTGMAEVRRQLAYKTGWYGSTLVVGDRWYPSSKTCSGCGWRNPSLTLADRTFTCQSCGLVTDRDLNAAVNLRHLVAASTSETVNARGADHKTRASGQVAGKREPGTATAGQTGSASLHGGAA

SEQ ID NO: 16583 - protein, 425 aa, Streptomyces sp.
MFGLSSVFGMQLRYAFRLYPNAGQRTALARAFGCARVVFNDAVRAREDARKAGQPFPTAGQLSRKLITEAKRSKERSWLGEVSAVVLQQSLRDAESAYRNFFASLKGARKGPKTGAPRFKSRKDARQSIRFTANARWNITGSGRLSLPKIGAVKVKWSRALPSAPTSVTVVKDAAGRYFASFVIDTDPAADQARMAQTNRTVGIDLGLNLPQTPSGGTPIAVLSDGTKIDSPRFLRRAEKKLKKAHKELSRRRKGSKNRAKARLKVARAHSRVADARREFHHQLSTRLISENQGIAVEDLSVAGLARTRLAKSVHDAGWAQFIRMLEYKAERYGRTLVKIGRFTPTSQTCSTCGVVDGPKPLNVREWTCSACGTVHDRDHNAALNVKTAAGLAVSACRAPVRPEPVLAQREETGSHGFPTGNRAA

SEQ ID NO: 16584 - protein, 381 aa, unknown
  TnpB Polypeptide
MRASVTAKVKITATPEVVATIKAFSKALQFCVDSAWDSNIKNNIKLHHIVYKDVRSRFRLPAQLAVACIKQACGMIKASIRSFDKLSARKKAIKGGPTKPLINRASVRYNFPRSANLKGDVLILRLLDCRQEFKVTVPDCYIRYFAWDLSESLLRIDKRGRCHFLFTFSKEVDVRDTCSQQRVLGIDLGVNNLAVVSDCRFFHSAAVKQAKRKFKHLRSKLQAKGTRAAKRRLKALSGRETRYMAWVNHNISKQIVDGFDGNRIVLEDLTGIRKKRRGKRMNYWISNWSFFQLQSFIEYKAVRKGIEVVKVQPRFTSQICHRCGALGDRSGASFSCHCGLTSYSADLNAARNLAHPMLGERQAAVNQPYLTCDDAEASVSG

SEQ ID NO: 16585 - protein, 352 aa, unknown
  TnpB Polypeptide
LFNEVNYERRQQFFQQHQVDFQGTCKKYYEKYKDILGVNAQQVINKNNEAWSSFFSLLKLKKQGKLPPHMNHVSPPRYWKDRETKKRKLLLVIRQDRYVVDEQNHKLILKDFGLEIEFVGRLRWYGKQGRLEIYYDDTENACYASIPVEVGVEVTRTGKKSKWVVRGERKSIQVKAPKEIKVASIDLGINVLASVVVDDGTWLLYKGVRAKEDYFYFQKKIAEVQSQADEARNIGEYEAQEELNREKRKLFKKLTRRLLHLYRNLASHLLKQLHDQGVSTIYLGYPYNIAQEKGNKFTVNLWSYRKLVNAIELKAQEYGMKVYEVVEYNTSRYCAHHDVEVNRHPRGVVRLP

SEQ ID NO: 16586 - protein, 331 aa, Homo sp.
MYLAGEKPNERKVRNKYTKEYKQDWEKSYSSNIFENAVTHLGYAWSRYFKGICNKPILKSRKRSKDSFTLHRKTSATIRIKGNRLYLPKFKYGVKMAELPRFTGVIKLATVTKRAGKYWVSLSIDLNEPQYLYRVSPNLPAVGVDTNIGHFDISEEENSRWKTPLESLNPLYERIAFYQKRLSRKVKGSKKYEVTKTKLQKTYLRIQNIQDDWLNKFTTYLVYNYGKICIEDLNVKGMLSNRKVAKNISRSMFYKFRVQLQNKCTVGGNDLIIASRWFPSTQTCSECGCRKEGDDKLSLSDRVYKCHECGALLDRDYNSACNLKLYAERVG

SEQ ID NO: 16587 - protein, 368 aa, unknown
  TnpB Polypeptide
MNMAYRFRIYPTREQKNLLAKTFGSCRFLYNQMLSDKIREYEVSKKMLRNTPAMYKKEYPFLKEVDALALANVQLHLEKAYKNFFRDPKSGFPKFKSKHRSRKSYTTNRVNGNIQVEDHRIKLPKLKWIRMKKHRDIPEKYRLKSVTVSMEPSGKYYASLLYEISDCENQTGGVAYEDAKILGIDYAMRGMAVFSENIKKEDAGYFRKSEERLAREQRKLSHCEKGSRNYFRQKKRVALCHEKIRNQRRDFLHKLSRRIADEYDVVAVEDIDMKAMSQCMHFGKSVMDNGYGMFRELLEYKLKWEGKKIVRVDRFFPSSKKCCKCGRVKKELKLSDRVYICACGNQMDRDLNAAINIREEARRMLLAG

SEQ ID NO: 16588 - protein, 236 aa, Peptostreptococcaceae sp.
  misc_feature (5)..(5): Xaa can be any naturally occurring amino acid
MLDMXKYTNPRCHFDGKYWYLTFGFEHGESQASLNEDLSIGIDLGISYLGVVNHLDNPIKNINKSKEVRRLKKKLKRLQRQVSRKYEMNKKGSKFVKTNNIIKLEKQIKLVHRRLNNIRNNHIHQATSKIIKLNPYRVVMEDLNVSGMMKNKHLAEKIAEQKFYEFKRQMKYKCQFNKIEFALADRWYPSSKACSHCGNIKKGLKLSDRTYICNECGLVIDRDKNASINLGNYKLA

SEQ ID NO: 16589 - protein, 415 aa, Thermoprotei sp.
MREKTTHEIWVVPRGEYMVTLKSQGVLVEGSPEELREELYLTMKAIQHVIDALWELDKIPSINQLHQMFYKILREQGFRAHQCKQIYKYARALAKSARENNGKKPILRKLSARVDKYDAKVDLENQLVVVKLRNKEFKIKLLHRRDYVKKFICRKWYEVIVSIDKQGRIWISIPFRWVYKPYGARRLISLDVNLKKIAVYNGRKVRRVSTRFTEALYLKHLAEEVQKRHSYAWRRNDKWLGIIRNLHRRSRNIVVDWCRKFAKYIVIKAKRTRSTIVLEDLERLWFNSSQKSSSLADKLSRFAYRKLQLAIMTKAIEYNVPIVFVNSKDTSAMCPRCEAKLVYNRRLATCPRCGFMTDRDTIGAMNIYLKALKHLAPSPGSGGTRSMTDETRPKSGSPKDEPMTIHIKSYKHIKR

SEQ ID NO: 16590 - protein, 594 aa, unknown
  TnpB Polypeptide
MAVITPRKERPKRRALRGGRRRAKGGRLPRRSTRRRKQLKNSPQIRTPFLFRSQFIQKRKPSRRAAKEAKGGKMNPGMPKGAAPKLYLGVHARLVFLKEEDEQAVLDLMRRFSSATRFAYNRLLEGQDRKELKREDGPLCTLFGLNTRYADGAIEKAQAALDSARELGQDPRKVVFGGRKLFEQLKRKHLSGKARERLRREWKERRRGLLYSRGDATKKGNANLHLEPQGDALWLRVNLGNGACVHARVRTSHPQLKVLLQRAYASLPYNVTLRLEDGKVYALFTWSERLPPPVHTKANGVLGIDVKGDPYHLALAVVGRDGKLIRHLTLSLEEADRAPNKGAKELALWKVAHQVVAVAEEHGVAIATERLKYLRKSRRGDGSGRRFRRREHRFAYRSLLEKILSLARKRGVEVLEVNPQYTSTIGMLKYAPGLSLSKDVAAAYVIGRRALGFEEKLPKGYEALLKDESFLREAQGFYEARMAHLGAKCKAEKNPHLKRRWSRELRRAQRALASLSSPWGSPGSRKGITKGRNPSGAHPWRVLREALFLPLLGREVPRDLSPLKPVLLGPWERWKGSLGSHPGWESARRNVRFG

SEQ ID NO: 16591 - protein, 440 aa, unknown
  TnpB Polypeptide
MICHRGYRFRLKPTQDEAVLLRRFVGCSRFVWNELLAINELRYERGEKSLGFKAMCEYLVYLKDEHPFLRQVHSQPLQQTLKDLAMAYRRAFDPKLAARFPRFKKRGKPQGIRFPQGFQINGSGVFLPKVGWVGFRNSREIKGMRKNVTVSFDGQHWYVTIQTQREVTEPVHASDSVVGIDLGVARFAVLSDGTFVDGANAFKKHEKRLAFYQRRMAHKVKFSANWRKAKAKVSRLHRKIANLRNDVLHKASTTISKNHAVVVLEDLRTANMTASAKGTLERPGTNVRSKSGLNRRILDQGWREFRRQLEYKLAWNGGTLLLVDPRDTSRTCSSCGNVSRENRQTQAAFRCSACGHAANADVNAAINILRRAGQARIPCGDSPLGGIVEAGNSARRMSDTWKNPRPSGRGVCQPYAWFRTCAGVATCRLSGPLFVRWVPS

SEQ ID NO: 16592 - protein, 422 aa, unknown
  TnpB Polypeptide
MKGENRMYLTVKQQVKHLSKEDYITIRELCHTAKNLANEAIYNVRQHYFTEGEFLKYEKNYTLLKNSPNYKALNSNMAQQILKEVDGSFQSFFGLLKLVKQGKYAFMDCKLPHYLPKDGYTTLIIGFVRLNGNKLILPFSNSFKKTHKSVEITIPPILLDKTIKEIRIIPKANARFFEIQYIYEAECIQRNLNTNNALALDLGINNLVTAVSNIGKSFIIDGKRLKSINQWFNKENTRLQSIKDKQHFGRKPTNRQKAAAHNRNNKVNDYMNKTARKVIDYCIHNDIGTLVVGYNETFQRNSHMGKQNNQNFVNIPYGQLRNKLEYLCKLNEIVFVKQEESYTSKSSFWDRDNIPVYNADNPKEYPFSGRRLHRGLYKTASGKTINADVNGALNIMRKSSVVDMNILYSRGEVDTPIRIRIA

SEQ ID NO: 16593 - protein, 367 aa, unknown
  TnpB Polypeptide
MPSKLKQLYGFMAEYHNIVTMNISDYEIDILGGKRKFDLVKMSNKTQSWFTARAKQVVMAETYDLISGTNKSCKALKQPYVTPKHNENRFVLSEQIVKINCNPNLKDFDLLVELNCFDSRKRGVKIAIPLKKNRVFNKWNNLGKLAKSIILTDKYIQFSFECEKSKRKEGDILGIDPGAVNLLTDSNGKHYGNANKNLLTKLKRKGRKSKAWNKCKKEIKYYINKTCKELPFKQLQLICLEDNSNIKRNSKVKGRLTKNMRSFLDGWTSGVLDKRVEMLCEENGVSLRRVAPFNNSRTCPVCGCIKKENRCSQDVFRCQSCGHTDNADKVGALNTLGRFSLGKYGSEFKGKFFEKHPDYFCSLDKFQ

SEQ ID NO: 16594 - protein, 294 aa, unknown
  TnpB Polypeptide
VCDKFNKIEKNAYKPYTYNLFPNERQKEDIDHLIKESQVEEKKAGIVYSYEPDKPIGSIIKYREQKAYVDIMDVGEVEADMFDYPVGNCHEIHVKKVSGVYRITFYCYKRVVGIDLGERAVICSTGERFELPQIELKKQSKYWEIKQQWKESVAMQLLLDYDILFLEYLENDGNTRQGFEDMITFSDVLVEKAEIFNKGNPKESYKKEIYKLKSKYPSTQICHICGYQNEDMAANLQKRNWMCPYCGTKHDRDINAAINILRHGMEEKILNNKMEENELSSIDLSKVHFDVTLD

SEQ ID NO: 16595 - protein, 154 aa, Halobellus sp.
LDKKGGQAVLSLSKLADIPIRLHLAIPDDANLGQVTVKKEPTGEWFATFGVQMDREPPEPPENPEKCVGIDVGILNYAHDTGGTAVGALDLSDERERLEREQRKLSRKEQGSNNYEKQRRRVAECHADLRWKRRDFLHKLSNYYAREYDLVAVD

SEQ ID NO: 16596 - protein, 199 aa, Halobellus sp.
VLSLSKLADIPIRLHLAIPDDANLGQVTVKKEPTGEWFATFGVQMDREPPEPPENPEKCVGIDVGILNYAHDTGGTAVGALDLSDERERLEREQRKLSRKEQGSNNYEKQRRRVAECHADLRWKRRDFLHKLSNYYAREYDLVAVDPSSRAPIGRCVRVDASEVSPGSGAQERGNRTAAERELDAGMRTQYFGSAPVTS

SEQ ID NO: 16597 - protein, 564 aa, unknown
  TnpB Polypeptide
MSRELRPIAPPFVVVPPQGARVRARLRLDAHDEEVLRAVGTHMGSLAGADLIKRCGEGKMDAAHRRASRARRKRALTAASSSRWAGAITRTSEDSWGLASRNLTAEARSLRSRVARIQRRLAEPVGACEGRVGGYHDRTERFFKQQRLQALRARLSAVEARLDHGAVSVCRGGRRLANSHHHVMDFALTEDQWRARWEAARLFITADGESAKPWGNETIRWHPDDGWLELKLPAPLSHLANRPHGRYRLSCVVAFSYRGDEVSAQAASGAVRYDISFDAARHRWYLDASWRMPDTEPATFETLRAAPMLGVDLNLDYLAAVLTDPSGNPRGAPTSIGLDLAGLPAQTRDGRLRAAISELLPLARAHGCAAVAIENLHFAELRDEGKEYLGKRPSRGARDRAFRPGISGFPAGQFRDRLTQMAANAGLWVVAVDPAHTTKWGAEHWLGAMQEISAGASGHHAAALVIARRGLGHRARRRERCDSTPAEHGRERATDSAVWAAPADAGLSEQRTRDSVAHEARGQPYQRRKTQRADLCAAEDQVPQDRSGAPTEQDSVLLSALGTV

SEQ ID NO: 16598 - protein, 258 aa, unknown
  TnpB Polypeptide
MQQIITAKLKLTTTKEQFEALRQTQLAYRDALNAVSRYAFSQGKTSNVTRLHKGMYAELRVRYHLPSQLACSVERQVASTYKGLWTKLKKNVEHRRAKITKKRFKGLDKPPKYSSPTVQYTYERDYTFQCDSQVSVGTLNGRISIPYQGYDKHIARIQQGATIGDAKLWYDRQKKTFYLLVSLSIDVSEPTYEQFKEVVGVDVGIRYLAVTSTETGNASFHPGKRTRHKANHDARLRKRLQHKGTRGAKRRLRRIEQR

SEQ ID NO: 16599 - protein, 413 aa, Streptomyces sp.
MDDQAHAARAMWNLLHDWWTMTPKCRRSLKAADEAIRQARKEIDWLGVLPAQAAQSVLKTYFQAWRNCWDGRAGEPSFKARLRSVMSVDIPQGRDLNIVRVHRRWGMVNIPKVGRVRFRWTKDLPVGKRADQENRITGARLVKDALGWHIVFRVQTLEPTPEPRHGLEVGIDAGVNLPLALSDGNHQDHGRPPRLPDGKADRDKWLNTGEKARLLRLERRAAHRKSFRKPGQKTSHRLKRTYDQIKQLRARATRRAVDWQHKTTTALAKQYGVIVVEDLHITKMVKSARGTVEKPGKNVAQKAGLNRAISQEAWGRTVTMLTYKTARHGGLLVKVPAPGTSLRCSVCGFTTPGSREDQATFVCKNPGCGWSGNADWNASRNVLHLYRMGHALIPAAGRAVVRRARRVKPATAR

SEQ ID NO: 16600 - protein, 307 aa, Nodularia sp.
LHPNTLRKYADNGKIESIKNEAGQRLFHVESYLRGATRTSFVCYCRVSSTKQRDELGRLAYMQSLVTFKEALPQSFGDCRLVFAYRDYYLTVPEEVPLQKSDNQGRVVALDPGIRTFITFFSECSFGEIGTSANLQIQKLCFRLDKLISKFTKAKCKQRRRMKLAASRLRGKIKNLVDELHKKTARFLVDNFDIILLPTFETSQMSRKAKRRVRSKSVRQMLTLSHYRFKQFLKHKAFETNKVVMDVNEAYTSQTVSWTGEIIPNLGGAKFVKSPSDGLVMSRDINGARGIFLRALVDTPSLKECIC

SEQ ID NO: 16601 - protein, 403 aa, Thioalkalivibrio sp.
MVQRKVTYRLYPTAEQLAALEHQRWVHCLLWNEALAERRRAWGERRESLKFSDQCKILTKWRHQSKLLRGLNAQSEQVTLKRLDLAFKHFFRRVQNGETPGFPRFKPLHRFKGWGYKNHGDGWSLITNERMKHGTLRLSGIGKVAIRGKPRTPGTPKTCEIIRLGGRWYASITLDCEPERERGDQLGGLDWGVETFATMATPEGTETIDNPRHMARTLGEIRRVQRDISRKEEAAKKASGRTRRFPVSNRLQRQYERLRRLHRKVANQRNDFLHQTTARLVGQFAVLGLEALNIRNMTASGGPYKKGLNRSILDAAGGAFHQRLGYKAEEAGAWAMEAPTRQLKPSQTCHACGRQEKKPLGQRHHACACGASCSRDENAARVLMAWAEQQVIRSGTGPTRGGR

SEQ ID NO: 16602 - protein, 441 aa, unknown
  TnpB Polypeptide
MKMYTTYSVKIKHYNSIFKETVAIYRHAVDYILNVCLENWEEISSLEGRNKLSYVERLIHITKNNPVPAYNFDSKFYKMPSYMRRGAINEAIGKVSSYKSNLANWEEKPNGRKPSCPKTGCVFPSMYRSVMYNQTGDYTAQIKVYARNTWDWINIGLRKSDMDYIARHCHDRKQCAPTLQKRGHEWFLDFPFEEKCMLNNASVFDRTIVAVDLGINTAATVSIMQSDGTILGRHFCKLSEETDRLMHSVNRVKKAQQNGNHKTPRLWAKVKGINHDISVKTAEFIIETAVSYNADAIVFEHLDKTGGVRGSKKQRTKLWRSQEVQSIVANRAHRLGMRISRVCAWGTSALAYDGSGRVLRGKDAGFNTFEICRFPNGKVYNCDLSASYNIGARYFIREIMKSMDESSWLLIEAKIPQCSKRSTCTFTTLINLNAELMSMAA

SEQ ID NO: 16603 - protein, 328 aa, unknown
  TnpB Polypeptide
MKHHQAKRVKRNLLGAQTVQEILERLDIAYKRFFEHLATRPPKFRKAKDFASIIYKQCSFSLYGNEIAISKIHKSYKFSKSRNYEGNIKRVVLKRNRLGEYFILIVTDAEPQSYGKTLKGASVGIDFGLKKYLTLSDGTAYDNPQFLKESLVELRRRSRNLSKCKKDSNNRERKRKELDRLVNDICNRRSDFQWKLAHELCRKYDRIFIEDLNLKGMNRRWGRKMNDLAHAKFVQKLEYIATKYGVVVHKIDRFYPSSKTCECGFINKELKLSDRQWVCPECGTYHDRDLLAANNILRRGIYELESDSKSSERTAKRLSRLHPRIQRL

SEQ ID NO: 16604 - protein, 429 aa, unknown
  TnpB Polypeptide
LNKQSKTLKRTVVLEGWTNRYGRQALREIIGAYRDMLQEMIEYAVEHKASQATIHKVFYHKFRGKYPRLPTRIIKGCYRDAVRRAKSFRELKKKGLAKTNKPVVRKVTLTYSDSQDWRLRNGVVEVRTHRGWVKICYRDHKQLHRYLYNGWKLSSELRLKLNGRKVIVYLTFTKDFEVTYNPSNVVAVDVNENNVTVAVFKNRELCEVYRIETGLGRIVISYSERRKRITRGRSTKTRSVKKALRKLREKKRKQDIIYKTARIIEELAIQNNAVVLIGNVHRGKKKLVEKTRKSTLRHRIHQWSVSALVEALDSKPLHVVEVSETYTSSIDPSTGRLIRGFTLSMTRFAVRRRKRVRVIKVQLRLAKLDNGLILDRDIIGATNIGLKYFTSDGRLVALASTEPHEVRVKLVNSHQGLTPLTELKVIRSS

SEQ ID NO: 16605 - protein, 343 aa, unknown
  TnpB Polypeptide
  misc_feature (279)..(282): Xaa can be any naturally occurring amino acid
MKINKAYKFRLEPNAEQELVLNKLLGSARFVWNQILAVSFEMLANNERINKVNLVNKIPELRKKPEYAFLENSSNGVSLQQKVRDLGDAWGKFFDPKEQAKLKQKPFKAKKPRFFKLPDGREVQLRPLMPRFKKKSNGCDSIRIVQFNRYCWVKGNQVKLPNDIGVVKFRKSQNIVGEIKNVTISKHVGKWYVSFGAENTVEAPVHPSKSAIGIDLGIKKLITTSSGQVFDPINSFKANQVKLARLQRKLRKKNKFSQNWGGVLKSMLTLNEAIIDVKXXXXVFKLFGEITTSSKTTPYSMPYFAIITFNSYSKKLTNTLLAVFKSSDETVPMITCNSGVVNT

SEQ ID NO: 16606 - protein, 402 aa, Escherichia sp.
VKRLQAFKFQLRPGDQQECEMRRFAGACRFVFNRALALQNENHEAGNKYIPYGKMASWLVEWKNATETQWLKDSPSQPLQQSLKDLERAYKNFFRKRAAFPRFKKRGQNDAFRYPQGVKLDQENSRIFLPKLGWMRYRNSRQVTGVVKNVTVSQSCGKWYISIQTESEVSTPVHPSASMVGLDAGVAKLATLSDGTVFEPVNSFQKNQKTLARLQRQLSRKVKFSNNWQKQKRKIQRLHSRIANIRRDYLHKVTTTVSKNHAMIVIEDLKVSNMSKSAAGTVSQPGRNVRAKSGLNRSILDQGWYEMRRQLEYKQFWRGGQVLAVPPAYTSQRYACCGHTAKENRLSQSQFRCQVCGYTANADVNGARNILAAGHAVLACGEMVQSGRPLKQEPTEMIQATA

SEQ ID NO: 16607 - protein, 491 aa, Moorea sp.
LYKTIPVKATFSDEENAFWVFQCQRANSLINCAIYYIRQKHYDWLKEQQEAYYPYWRGDELRLGWKTYKCNAKYPELDKALKMNPNYKAMAAQSAQQTLKSVGESISSYNQLVGHYYKGKVDRPRLPRYRQKGGLAAVTFPRQALTYKKGVFYPSVSKESKPELICEITLTPPDFIDSDSVKEVTIRPNFGQLWIDWVIDDGKQPVNSNPHLDYSQAWSFDHGVDNWLTGVSTHGKSLIIDGCKLKSMNQGYARLVAKYKAGKSDFYWDSHLDRVQRKRNNQMRDAIRRSRRYANNKAARFIINRCLNDLIGNLIIGWNERQKNSSNMGKRGNQNFVVIPTKTLINRLEQLCPEYGIKLTVTEESYTSKASFLDEDPLPKHGEKPSEWKPSGKRVKRGLYKTSSGYLINADSNGAANIAKKVATQLNLDLTKVSRGSMTVPHRYDIFNSLKKSYRMRSVREASAKADSSTVSTCCVTSSENPLLLSRGDVK

SEQ ID NO: 16608 - protein, 230 aa, Ruminococcus sp.
MKAGRYYVSVLVEEPEPEKPVLNNFGTGIDLDVKEFAVCSDGRFFANSNKSAYIRKLEKSLKRQQRKLSRKYESLKKLPNNLKGGATRQNIRKQTLKVQKIHHILDCIRTDYINKVVSELVKTKPAWITLENLNIRGMMKNRHLSKAIAQQKFFDFRTKITSKCKEYGIELRLVNRFYPSSKLCHQCGCIKSDLKLSDRIYTCSECGYIADRNFNASLNLRDCQIYQIAS

SEQ ID NO: 16609 - protein, 436 aa, Nonomuraea sp.
LEVGVRRSFKFLLRPTAGQVAALTACLDDHRDLYNAALEHRRTAYRKAGVTVRYGEQSGELKHIRADDPGGQGRWSFSSQQATLRRLDKAFRAFFDRVKAGRTPGFPRFKGRGWFDTVEWPKDGDGCRWDCRPEHPAATFVRLQGVGHVRVHRHRRVLGTVKTISVKREGSRWFVVLSCEDVPAETLPATGVVAGIDMGVASLVTTSDGAHVANPRHLAATADRLAAAQRDLARKRRGSRRRRTAVARVAALHAKVRRGRLDAAHKAALALVRDYDVIVHEDLKIANMTRSASGTIERPGRNVAAKSGLNRSVLDAGWGVFLRLLAYKAESAGRELIAVDPRNTSRTCARCGHRARENRVTQAEFAHGRTASPRPSSRVRRAGTPRTPTSTRQPTSSGQGLPFAGLRKRLSEKPPPSGGGGVTTTAYQVTGRRCTP

SEQ ID NO: 16610 - protein, 138 aa, unknown
  TnpB Polypeptide
MALEDLTGIRERTNQLPRTKTERRRSNSWSFYQLRQFLVYKCIKFGVKLVFVDPRYTSQMCHSCLHVHPNRDKSYRSGKSFRCGHCGWSDDADLNGAVNISALGAVVNKPRGSGLACSLEQHVLGLLKTSTVTRSGSR

SEQ ID NO: 16611 - protein, 205 aa, unknown
  TnpB Polypeptide
MQSLCYHDVRARFGLSAQLAIHAIRRVSGNRKTAKKDGKPIKKFAPTSATYDARTFSFREKDWTVSLTLLGGRKRFTLHIGNYQLGLLKGQKPKTATLVKRNDGSYYINIQLESTPDSSIETDKVLGCDLGRTDICVTSENDTYSGKEITKVRDYYSLLRAKLQQKASRGTRSSRRRCRELLQQLSWQGATLSGTPEPYNQLPIG

SEQ ID NO: 16612 - protein, 415 aa, unknown
  TnpB Polypeptide
MQLSERHIIKEDHLYFKECDNITFKSKNLYNSCLYTIRQPFINDNVNVSFDLHHLIKNHEAYKELPAKVSSSVILMVQKNFKSYFKATSAFYKTPEKFKGKPKLPYYLNKLDGRFVASYTNQAISKISFNKYKKIKLSNTNIELNTKIKQFTDIDCVRIVPKLGYFVIEVIYTIPDTPLLEDNNNYLGIDLGINNLATLSSNEKSFKPIIINGKPLKSINQFYNKKLSKIKSTLEVRNKKSKSKKLYKLTNKRHFKVETYLHKASKEIVKLAKNNNINTIIVGKNEQWKQNINIGKVNNQKFVSIPHSRFIEMIQYKCEKEGLNFKINEESYTSKASFLDLDEIPTYNSKNKETYNFSGYRKYRGLYKSKITGKQINADVNGSYNIIRKAIPNVFKNDGIEGVGVHPIIKQISFN

SEQ ID NO: 16613 - protein, 358 aa, Gammaproteobacteria sp.
MTLTLAHKICLDPNNEQEQYLKQACGIARFTWNWALEEWKNQSENGLKPTAFALKKQFNAIKPVDFPWMYDVTKYASQQPFIHLQTAFNRFFNGLGGYPKLKKKGHHDSFYIGNDHINIDGKYFKLPKLGWMRMRETLRFSGRVISATISPRANKWFVSLNVELCQAPKSCNSQAGVGVDLGIKALAALSNGEAFEAPKPLKKSLKKQKRMQRSLSRRLKGSNNRQEIKEKIASVHAKITNIRLDSIHKLTSFLTNHFGGIVIEDLNVSGMLKNRKLSRAIADIGFYEFRRQLEYKSKYKGNYLLIADRWFPSSKICSNCGNKKEQLALHERVYHCEACGQSLDRDLNAAINLKNLLY

SEQ ID NO: 16614 - protein, 327 aa, Okeania sp.
MRTSYQYKLRPTKSQSEKIDKTLEMLRLQYNYMLSQRFDWWEKNRCSINVCPLVCHLPELKEQPTYYSQKQSLPQLKIDRPWYKEIHSQVLQEVPKRVDLAFQRWLKADKSGKRFGKPRFKGKNQYKKFTYGQFKQHHFVNNKVKLSKIGDVKVIVHRPLPDGFAIKTVSVTKKYNCYFVTFSLQDDTVPKIKPDIKRGKIVGIDVGLIDFVVDSNNESLPAPRYLRKAELKLKSVHRKVSRRKKGSKRRQKAIKQLAKKHRKVANTRKDFHHKTANKLLSKSDIIAVEKLNIKSLAKSRLAKSVHDAGWGQFQAILTNKAVSAAPP

SEQ ID NO: 16615 - protein, 276 aa, Actinomadura sp.
LLKPATVSPLRCHDAGVKLVVQVKLCPDAATEAALRETLHARDRAANHASRRAFDTGITGRTGLQRLVYRELKEMGLSAQPAIHAARKTAGAYATLAENLKAGHCGPQGARRRRAVEGKPVRFRKDAAQPFDDRSLSWRLDAGTVSIWTVRGRLPGIAFQCSPAQLELLTEHRRGESDLVYRGGNWYLYATCDIPEPDIADPANGFLGIDLGIVNIATTSDGTVHAGKHLNQVRHRNRRLRKKLQKKGTKSARRRLRHLAGREARFAANTDHCVSK

SEQ ID NO: 16616 - protein, 413 aa, unknown
  TnpB Polypeptide
MLKAVKIRLYPTKTQISYINRLCGSYRKVYNMCLEKKINAYNTDKTSLGLTELGHYFHNELTKTEAFSYLNEHNTKVLKQAVLNLTDAYKRFFVNGNGFPKYKSKHDNQSARFPIEGISKYNIYSDNRVTLGKSLKKVKFECSDRDKDYLTKHKDKIKSATLSRTKSDKYFLSILIENIIEPMVNPTNDIIGIDIGIKDFMACSDGQVFSNLKLRKNNEKTLVKLQRQLSKKVVGSHNRYKAKVKLAKKHEELNNIKINYIHNITTQLVRENQTIVIEDLNVKGMLKNHCLAKSIQDLSINETFRQLKYKCEWYGRDLVVIDRWFPSSKLCSNCGFKYKNLSLKERDWVCPDCGTHHSRDFNAATNIANEGKRLIGSRSTEFTLVEYPLMDEHSEMNLRSNDTMKQEEKVTQV

SEQ ID NO: 16617 - protein, 179 aa, Okeania sp.
MYGRCIRASLGNRKGKPIRPPDCFVPRNAPRFKSRKSKQTARFTKGGFKVGQHKVYLAKIGKLKIVWSRELPNVPSSVTVIKDSANRYFLSFVVEILPETVPKTENSVGIDLGIKTFATLSNGQKIDAPKPLKKRIKKYRKLSKLLSKKTQGTNRYEKARLRVAKFHAKLKDRLNRFST

SEQ ID NO: 16618 - protein, 385 aa, Moraxella sp.
MTVIRGHIIRLNPTDKQATYFAKACGVARLAYNWALAEWQTQYQADKAYRDDCLAKGIEIDITKLNKPSQGSLRKQLNATKRTQFPFMLEVTKCSPQLAIMQLGDAFKRFFKGEAKYPQFRKKGVNDRFSLSNDQFRIDGKRIKIPNLGWVKMSENLRFDGKILSAKIFKKGGEWFVSIAVELSQAITLKPKTGKSVGIDLGVKDLLVLSNGIKVQAPKPLKTQLTKLRRLNKQLSRKQKGSNNRAKAKTKLSRLHAKISNIRQDFSHKLTTQLVKGYDVICIENLNVKGMVQNRKLSRAISDLGFYEFKRQLIYKANQWGKVVKEVDRFYPSSKTCSNCGFVMAKADLTLAIRNWQCPSCHTQHDRDINASINILNNATKVLTV

SEQ ID NO: 16619 - protein, 280 aa, Moraxella sp.
MKTLKLRIKDKHTDQLNRLSGLVNFVWNYVNDLSFKYRQRTGKFFSAYDLNEYTKGSGELLGLHSQTIQAINETHAKSRRQFKKAKLNWRTNNPKAKRKSLGWIPFKQSAIKLLATHQTGKKGLKSTLQLSLAKGQKLIIDLWDSYNLALYDLNTVEVVQDSRNRWYACITVKEYPKTQCGAGSVGIDLGLKDSATTSKGDKLQIKQTQAWAKKLAIAQRAKNKQRVVVGDVKTTQFNSKKGKLAKSVYDAGWFELKRQLTYKCENAGCRFEIVNEKYTT

SEQ ID NO: 16620 - protein, 368 aa, Moraxella sp.
MKTLKLRIRDKHTDQLNRLSGSVNFVWNYVNDLSFKYLQRTGKFFSAYDLNEYTKGSGELLGLHSQTIQAINETHAKSRRQFKKAKLNWRTNSPKAKRKSLGWIPFKQSAIKLLATHQTGKKGLKSTLQLSLTKGQKLIIDLWDSYNLSLYQINTLEVVQDSRNRWYACITVKEYPKQQCGTGSVGIDLGLKDSATASNGDKLQIKQTQAWAKKLGVAQRAKNKQRVKAIHAKIKNTRQDLIHKFTTGLFKDNALIVVGDVKTTQFNSKKGKLAKSVYDAGWFELKRQLTYKCENAGCRFEIVNERYTTQRCSCCGEITANSPKGRKSLGIREWTCAKCGTWHDRDINASKNILAVGLDRLVEGIPSL

SEQ ID NO: 16621 - protein, 398 aa, unknown
  TnpB Polypeptide
VRRADGYYAQFAVKTDLIIKTKPTGKAIGLDLGIKYFLADSNGNTENSPKFYRKAERQLNRANRKKSKKYRKGAKPQSKNYSRARKRYARKHLRVSRQRKEYCKRVAYSVIQSNDLVAYEDLNVKGMVRNRHLSKSISDAGWFTFRQWLEYFGHKYGKVTVTVDCHPDNPLLALAFKITDEDTGQLTYTRLYSGTLRQGDTVKNSRTGKRVRIGRLVRMHANHRQEITEATAGDIIALMGIDCASGDTLCDLGSNLCLEGIVVPEPVVTLSIIPKHQDDVARMSKALHRFTREDPTFRVTVDPESNQTLISGMGELHLAIYIERMKREYKAEVDVGAPAVAYRETISQGASFDYKLKKHAGGCRDTESVSGAGARGSLRQTGFTVGFKDNGRVFSDSG

SEQ ID NO: 16622 - protein, 366 aa, unknown
  TnpB Polypeptide
MKGNKAFQFRMYPDDEQKTMFAKTFGCVRFVYNKMLEDRIDHYQKTGKNRKTTPAKYKEEFPFLKEVDSLALANGQMNLETAYGNFYRGKGKIGFPKFKSKHRDKDSYTTDWVNGNIAVADGWIRLPKVGRVKIKQHREIPDGYRLKSCTVARTPDRKYYVSVLYEYEDQIPEHKAESATGLDFSMKELYIDSLGNSPEYPKPYRKAQEKLAREQRKLSKCKRKSNNYYKQRVKVAKIHRKVANQRKDFLHKQSRQITNAYDAVCIEDLNMKAMSQALNFGKTVADNGWGMFVAFLGYKLEEAGKKLVKVDKWFPSSKTCSVCGRKKDDLELSERVYVCECGNILDRDVNAAINIRKEGMRILGMA

SEQ ID NO: 16623 - protein, 362 aa, Blastochloris sp.
MKVIAQLKLHPTPDQAAALDLTLTTANAAWTYISDVAWDHQTFKQYDLQKRVYRIVRDHYGLSAQMTVRCVAKVGDAYKLNTQTKRTFKPHGASAYDSRILSFRPADQTVSIWTMHGRIRVPFVGGARQWAYLRYQQGESDLVCHKGTWYLLATCDLPDPDEQEVDGVLGVDLGITNLAVDSDGHVHTGDHIEQQRQWYATRRQRLQQVGTKSTKRRLKKLAGRQRRFQRDINHCISKHLVAKAQGTRRALALEDLKHIRQRTEHTVRHTQRSRHSNWAFAQLRQFLTYKARMVGIPVYLVDAAYTSQTCCVCGFVSRDNRKSQSLFWCGSCGASHHADSNAAGNIAYRAACHTAYGFQFSD

SEQ ID NO: 16624 - protein, 422 aa, Blastochloris sp.
MIGAYRCYFIKKCGRKPLPSGTRRNAAPPFVVAHTFGLWHNTYMTISFSTRTICCKVHVDDTADAALQYTQQAFNQAATYCASVAWDQCVTNKNTLHKLVYGPTRVTYGLGAQLACCARDKAAEAVRRARHDPDATCPVFRDDGSIRDDARTYRLKSLDRVSLNTLSGRVVGQLVLGDFQRRTLYDTSWQIGGAELIRRAHVWYLHITQTKADPEPDEPTGVIGVDLGIVNLATDSDGETYSGQQVTQVRERRFKHRQRLQQANTRRARWRLRQLAGTEARFQRDVNHQISTRLVQKAKQQRKALALEDLTGIRKRVTVRRSQRRQHASWAFFQLRQFVSYKAQRDGVWVYLRDARNTSRTCHVCGYCDKRNRKPRDLFVCGQCGHTQPADENAAINISRVDVNPPMVLRHCGEGASTSHLL

SEQ ID NO: 16625 - protein, 275 aa, Thiodictyon sp.
MREPSKFSVDIKALRIERLKTKIEMRQPLRFTGPAKQATISKQAGKFFVSVLLETDDYNPHAPSEPSVGVDFGVTSLAVLSTGEVIPANNALKRNIKHLKRRQRNLSRKVKGSRRRAKAKLKVAKLHERISNQRRAVLHELSDQLTRTYQVITIEDLNVSGMVRNRRLARSISDAGFGELRRQIEYKAAWRGVIVVIADRFFPSSKMCHACGQIHDMPLAQRTMECDCGSVMDRDLNAARNLDRYGLDRLDALKPDVKRTQESGKTVSAALALTA

SEQ ID NO: 16626 - protein, 415 aa, Campylobacter sp.
MQITKGFKYRIYPNKEQQKLLNHQCFIYNQAYNICLNLQKEQWEKNKDLDKKERTYLKASEIDSKVKELLKQRELSYKSVTTQQARINANRALEQALKDKNKGFPKFKNSKFAKQSFNWNNQGYQIKDSDNSKFKIFHLMKMPLKMRYHRELPKEYKLNQITILKSHNKYFVSFSITYENKVLLMSKENLNINKAIGIDLNINDIALSNKELIPTNSKNFNSAKYSKIFKRLQRKQSRRFLKSKKEKTKLGVNFKKTQQRLNKIYEKSTNIKSDYYHKITSKLSNEFDLIVVEDLKTKNMTKRVKLKNVKAKSGLNRSILNTSFYQFTQMLEYKLRHNGKFFVKVNPQYTSKTCNVCGNVKDNLTLKDRKYICEKCGNAIHRDINASLNILERGLKSFGLGISLEDYKLKAFRVS

SEQ ID NO: 16627 - protein, 415 aa, unknown
  TnpB Polypeptide
MSIYKAYKYRIYPTFDQRRTLDRNFGAVRFVWNQLVANFNSYGTDDHVKNMSETHVKSEHDWLKECISYGIQQKRMDFYQTTKQFFNKKRKTKSGKPNFKKKGVARDSMRIPGQALGYNKAVDFEAGTIKIPKMTPIKVSYHREFKGELRSATISKTKTSEYYVSILVKQEIQEKPKTGKDIGIDLGINHLAILSDGTKFTNPKYFRETQAKLKKMQQHLSRKTKGSNRYNQARLKVAKLYEKITRQRNWYYHQISNYLVTNYDSIFVEDLAVKNMVKNRKLSKAIADVAWSTLVGMIGYKASWYGKEVCKVNRFFASSKTCSCCGHKLDKLDLGTRDWTCPSCYTEHDRDINAAKNIYKEGMLKQHGLLSEELPDMNNRGEDIRPEWFLCRNHSANLIEATSKPVEFIELCRPA

SEQ ID NO: 16628 - protein, 376 aa, Nocardiopsis sp.
LRPIQVPYLVPAPTGVSVRDRLTGLTGLTIQDETVLREVDAYLGSLASTDLATRCSHGTDHDKDTWAARKRELTPVSSARWAGTLTKTSNEQWALARRGHHDVDRGRWYVTASWTHQAVPQVPWETALARGVVGVDMNADHLAAWRLDTHGNPVGDPHRFDYDLSGTSTHRDAQVRHALSQLLWWATGHGVAAIAVEDLDFHKEKTREKHGRRKKFRQVISGMPTARLRSRLTSMAHAMGIAVIAVDAAYTSRWGAAHWQKPLTSNKRQTSRHAAAVAIGRRAQGHAIRRRTAPPHDDQSDRRGHRTAQAGPRARGREGTRRPATDRAQDARRRAGTARTRATSASSTVRDARYRDVAPDVTPGHRLGTVSSPASR

SEQ ID NO: 16629 - protein, 498 aa, Marinospirillum sp.
MIAYLIMKIVRSQQMNIKVTKEQAAMLEETLSQYRGMVRALMLLINAQWKTLQHCKEKDVVRSVEALMHPTKKRPLVKHRYFQSRFFKFPSYLRRVAINYAYGQVSSFQTRYDDWLINGYREKRIKVKVQNPKKGEQKYRQEVKLLRNKPPTLNCETKAFPSLYGGQCIRYTKDRQAAEIKVFHKKDWIWIRVQLTGKTRFDGLFLSPTLVQRNKRFYLSEPVKSDIQLKSKKQFSGKVLAVDSGINTTAVCAVVDKDGTVHDRFFIDRSDKDRENKRCARIAKAARQYTRHNHQSKKTHKLPKGFCAHDYERLRHLASNQAHHISKKIIQLALKHGCDAIVFEDLKGWKPKAGRKGGQTKQNFHRWHHRMLHDRVKSKAEEKGLRFIDVFARGTSSEAHDGSGKVARDKDNYSLCTLQSKNSKGQNKRYHADLNASYNIAARGILKLYHPELCKLLWDALERKSPSITRNPWILATLWNRNAIEEQLRQESTTQCAA

SEQ ID NO: 16630 - protein, 258 aa, Escherichia sp.
LPIEARLHREITGMLKSITLSRSATGKYYASLLCDDGMEAPAKPALISNVTGLDMGLAHFVIKSDGNKIASPRHLINASRNLRRKQKALSRKKKGSANRRKARIQLAAVHERVAGARADFQHKLSRAIVDENQAVIVETLKMANMMKNHHLARAIGDAGWSGFITKLEYKATEKGVHLVKLDQWFASSKTCHCCGHKMSEMPLHKRIWQCPECGVEHDRDINAALNIKRKGILELQAAGLVVSAHGGQRKSVTQTVAA

SEQ ID NO: 16631 - protein, 418 aa, unknown
  TnpB Polypeptide
MYLTQSNQIRGLSKQQYKVLREMCWISKNLYNVALYNIRQYYFQEKKFLSYETNYHNCKANENYKLLQAGVSQQTLKVVDRSFKSFFNLIKKAKKGDYRFQDINMPRYLAKDELHNLILSTNAINIKNGYINIPFSRAMEKKYPGVDIKIKFPTRLEGKKIKEVRIIPNYKGKHFKIQYVYENTVNNLGLNKDKCLSIDVGLENLATCVDSDGSSFIVDGRKLKSINHYYNKLKSKKQSILDKQGYKYSNSMCQLIKKRNNKTNDYIKKSARLIINHCITKDIGTLIVGYNSDFKRNINLGKTTNQQFTQISFGALRAQLENLCEQYNIKYIEQEESYTSKASFLDNDDMPTFDPHNTNEYKFSGKRIKRGLYKSAEGLIINSDVNGALNIMRKSKQNIDFDKLCIGLLASPIRLRIL

SEQ ID NO: 16632 - protein, 377 aa, Thalassotalea sp.
MYLNRGISDGTTKITVRPKGFFKPKLLLKYWEFSPQVAVCHLFDFPNMFRDAVSWAYPHQYMNIFFVYFNLLDFKISFKQKKLHNDSFRSANTNENLKLANRCITIPKIGAVGIVQHRKLVSKIKSATFQMRHGKWQVSFTQEVECKAAKQLLSSIVGYDINSQFTVVGSNDWYVKNPKVFKKSSVKLKQIQVQLSRRQKGSDRWHKTKERLNKLHGQISRQRLAFAHEVSCSIAKASDIIVFENLNVKGMQQFNGLMVNDNVMGMITTLAKYKVGLNGGIYCEIGRYVKSSGICYECKHEHKFDLNVRSFVCENCGFEQCRDLSAAKSVASTGEKDLMAVGIIVRVRPKSQQKSSSQTKVFELSKFDVGTEKKEAS

SEQ ID NO: 16633 - protein, 296 aa, Bacillus sp.
  misc_feature (115)..(135): Xaa can be any naturally occurring amino acid
  misc_feature (179)..(180): Xaa can be any naturally occurring amino acid
MIKQNKAFKFRLYPTGEQAHLIRKTFGCVRFVYNKMLAERKEVYEKYKENKEKLKKEKFPTPAKYKTEYEWLKEVDSLALANAQLNLQTAYKNFFSGQSDFPRFKSKKSRKSYTXXXXXXXXXXXXXXXXXXXXXRVVGLDFAMAELYVSSEDEKANYPRFYRQMLEKLAKAQRVLARXXLHHKSKKLATSFDVVAIEDLHMKGMSRAFRFGKSVADNGWRMFTTFLAYKLQEQGKQLVKIDKWFPSTKMCSNCGSKKEMPLCERTYACLCGLTIGRDYNAAINIKKEAIRLLVLA

SEQ ID NO: 16634 - protein, 398 aa, Actinomadura sp.
VKRAYKYRFYPTGEQSDELSRTFGCVRLVYNRALEERTRAWYGERRRVSYAESSAALTAWKKTGEAAFLNEVSSVPLQQALRHLQAAFANFFAKRAAYPRFKSRRNSRQSAEYTRSAFRWRDGQLILAKVPGPLGIVWSRPLPEGAEPSTVTVSRDAAGRWFVSILCEDRIVRPAPAKNAVGIDVGLISLVTLSTGEKVANPRHERRDGERLARAQRELFRKAKGSANRDKARRKIARIHVRIADRRRDLLHKLSTRLVHENQVVVIEDLGVRTMVKNRSLARAISDAAWRELRAMLEYKAGWYGRELVVIDRWFPSSKLCSECGRAAERMPLAVREWRCGCGAVHDRDVNAAKNILAAGLAVSACGDGVRPQREPSRTGRSSVKQETQRVTAGAPRL

SEQ ID NO: 16635 - protein, 350 aa, unknown
  TnpB Polypeptide
MKSPPVVLSAEHRLGQIQAESLHSRQGQECDGFRQADGWHVSIQTEYEMEPPKHAGDSVGIDMGCVRFCTLSDGTFFEPCGALKKEQKKLAWMQRRLARMQKFGKNWRKQKAAIARLHQHIANVRRDFIEKVSLEICKNHAEIFREDLKVKNMTASAKGTVEEPGTRVAQKSGLNRSILDQGWRIFFTKLDWKALRLGGHVHAVPPQNTSRTCPICGCVSKDNRKTQAWFKCVSCGHQGNADVVAAINIKERGRSSLACGESEKNAQAQVNSGRSKKPAPNQQQEFTEVISSASSADAVENLRRSRRRKRQRPRRSNRSGRLVQSASAPYPKSFWASAGSSIVQAMTPQP

SEQ ID NO: 16636 - protein, 690 aa, Streptomyces sp.
VACVTASAFRGLDMVTGEVLGAGALAERVGWLTDLVELLAAGVIAAHWSRCDLGRLASGRAPSGEKLPSNAWMALRTLGWRATVPEGVYVPDRVRRIAEEQAGRVLRSAHWRSGIVDAVLATWPVNNPDPMRRTEAEWDALRAACPDGAGLPASILRGRTRQVMRFAAARHRMPDGVCELEQAPGAGRHVVLAAADKQLSTLERCAQDPVRYAVLTVRLPMRPDPRTRADWHPVLMRFCLPPTIDASAALHAPTVRLRDGKVRLDLAHTHPAPRTKRDGHARAVAFDYGLNTLLTGGTLTLSGGLQPTVLTDAHPVFLRMNGILAKADRLRVHAEQLWAKTAHLERLIDAHHAAGTRPDPLTVAKLGVLRQEHRRISRRRERLGRATAQAAARFMVDHARTADATVIYLEDLRDMEARGKGRTLNTRLSSSVRGQIVTDTVHQAARYGIAVVIVPARGTSKHCPRCLAPFRHHAPRPQRHRAGNGPPAPSGVRLQRGQSRGMAAHRRPRPPAPTSDRPEPDRRQLHAAPDGSGAGPTGPAHPPPGSLSVRRADSCCGPDEERADEKPPRPQQATRGPPPPRTPGHRASGHGAGWPASGGAAAPVSPAPQPAASGAAGTAHDEQPHTAPATRGPTRRRIPPARPRHPHHPKRGHGTTQAAETTFLGGRKPSLIQENLSSSETLSYALATNE

SEQ ID NO: 16637 - protein, 382 aa, Oscillatoriales sp.
VLKAVKVRIYPTQEQQSHLAGAFGCVRWVWNQSLATMSQTYKETGKGVSALTMKKQIPVWKTEHEWLKECYSQCLQSSVLNLSQAFINFFDGRTQYPTFKKRQGRQSMQYPQNVKILSDREIKFPGNLGVVKARIHRDCIGTLRTVTVSKMPDGRYYASLLMDDGIDNPVTNEEGKAIGIDLGLLDFVVTSDGSKYQNPRHLKKHERNLKRKQRKLSRKKDQTTNRRRKAKLAVAKVHGKIARVRADFRHKLSRKIVNENQVIVVENLAVKNMVKNHNLAKSISDAGWGMFCTMLKYKAEAEGKVYLEVGRFFPSSHLCSNTLLRDINAAINIKNEGLRLLTLGTSVTAKGGNVRPKRYGQKSTVAEAVALELGSPHSTRFG

SEQ ID NO: 16638 - protein, 369 aa, Clostridium sp.
MERAYKFRLYPNSEQEILINKTFGCTRLVYNHFLNERIEHYKQTGKSLTYNSCSNLLTELKKQKLFLKEVDKFSLQNSLRDLDNAFKNFFNGSGYPKFKSKKHHHHSYRTNLTNNNIEVFEKHIKLPKLGRIKRKGYKNIEGKIISATISKSSTGKYFCSLVVEKEIIPLPKANSNIGIDLGIKAFATLSNGEIITNPKTLYRYEAKLKREQRKLSKKVKGSKNFNKQRLKVSKLHEKVANIRQDFLHKVTTKLINENQVICLEDLNVKGMLKNHHLAKTISDVGLNKFLTYLSYKADWHGRTIIQVDRFYPSSQLCSKCGYKNPLVKNLGIREWECPSCGTVHDRDINASINILQEGLRIYKEQNSVA

SEQ ID NO: 16639 - protein, 403 aa, unknown
  TnpB Polypeptide
MLISYKFRIYPSKTVEAKLNEQLEICRWLYNKLLEEVNKARKEGRKIMWKDTQALIVKLKQEKPELKNVYSKVLQMVNYQLWSNIKALNELKKKGKKVGRLRYKTGNSFKTLNFNQSGFKIDFERKKLVLSKVGEIPIKLHRPVEGKIKGVIIKRTKTGKWFAIVQAEADEKPLPPTGRAVGIDVGVKHFCVDSDGLAFENPKFIDKTLEKIRRVQKQLSRKQKGSRRREKVRLRLAKLYEKLENQRLDFLHKLSCYYVRNYDVICVEDLNVKDMVENGKPSTLNRHILDSAWSKFLSLLAYKAERAGRRVVRVKPANTSKRCAKCGHVVEDLRLNDRWFVCPKCNWEADRDLNASLNILDVGLGRSRTPVGREPLPLVISYRNVIDGQVLSVKREAPCVSKG

SEQ ID NO: 16640 - protein, 393 aa, unknown
  TnpB Polypeptide
MPSETIKLTAKFKLKEFSEELNNLFSTYREIVNYLITFAFENNITSFKRLKKETYKKLRGKYPQLPSHYLYTACQMATSIYKSYRKRKRKGKANGKPVFKKEVIMLDDHLFKLNLEKGIIKLSTPKGRTFFEFYPAKYHEKLRDWKVGQAWLIKTPKGVFINVVFSKEVEIGEPFTFVGVDLNENNVTLSLPNGEFVQIITHEREIRTGYFVKRRKIQKKLKTGKRRRELLEKYGERERNRLNDLYHKLANKIVELAEKYGGIALEDLTEIRDSIRYSAEMNGRLHRWSFRKLQSIIEYKAKLKGVKVVFVNPAHTSSLCPICGSKLSPNGHRVLKCSNCGFEADRDVVGSWNIRLKALKMWGVTVPPESQPMKMGGWKPTRYEINTLHTING

SEQ ID NO: 16641 - protein, 439 aa, unknown
  TnpB Polypeptide
MKRTITVKLQASKETERILFQLADTGAKAWNEINYLRRQQFFNHKPVNFNITEKTVYEKYKKEIGSATVQQICRKNTEAWKSFFTLIKKKKNKELPKWLKPRPPNYQKENGKRKPLIVLRNDQYRIEGNRLILKGLGKFGKLEVQFKGRIHLKGKQGRLEIIYDEVKRKWYAHVSFTVEGKLVKNEWIKVPRKPLSNLTAGIDLGVNNLMAVYIENGEGFLVNGRPLKSIAFYWQRRIAEYQSRLSKSGCKTSRKLKGMHLKAKLQAKHYINTAVRQTVERFYYSGVSKIVVGYPKEIARNSNKGKRQNFIVSHVWRFNTIIQRLKEVAEEYGIQVSLVNEAFTSKTCPFCGKPHNGARFVRGLFKCLAEGLVMNADLVGAFNILKKAVETITPSLPGLTAGRGNGGKTVPEELRSLTRGFDEAPQTFPSTARRSVQWL

SEQ ID NO: 16642 - protein, 387 aa, unknown
  TnpB Polypeptide
MRYKFRCYPAPPQARELARVFGSARHAYNWALRLRTDSYKGGKTVNYVGCSSEWTRHRNASEFSWLKRTSSVPQQQALRHLQTSFKNFFERRTGYPAFKRKHGKQSAEYTKSAFSWDPVNRNLRLSGVGRLDVHWSRRFASSPSTITITKDRAGRYFVTLCLDEQVTPMPKTGESVGIDLGVSRLATLSTGERVANPQHLGRNLAKLGRMQRQLSRRHRGSGRWSRKRLAVARLHAHVADSRKDYLDKFTTSLVRRFDVLAIEDLNVRGMMANHCLARAIGDAGLSTFRRMVTYKCLRYGKELKTVDRFFPSSKRCHRCGHVVETLPLSTREWDCPECGAHHDRDENAAINILAAGHAVPARGGTVRRVKASALKRKFRRTVNQPAL

SEQ ID NO: 16643 - protein, 387 aa, unknown
  TnpB Polypeptide
MIRAHKIRLNPTPEQVNYFAKAAGTSRFVWNWALAEWNRQCEAGERPTAFKLKKQFNEIRRQQYPWTWEVTKNASDQPFRDLGKAFTAFFEGKAHRPRFKSKKRNKPSFYLANDQFELKDHQVWIPKLGWVNMAENLRFTGKVTGARITRTAEWWFISITVEVPNEVPQKRPAAVGVDVGLNRLATLSTSEGYENQAFLKTALVKLRRANKRLHRRKLGSKNRAKARRQVARLHYRITCMRDDVLHKLTTRLANCYGIIGIEDLNLKGLLKNRRLSRSFADAALGKLLCMLSAKVEQRGGQVIKVGRFFPSSKTCHCCGWKWEEMQLSDRVFLCQNPHCAYYHVGQERDYNASLNILHEALRLIGLIDQAVSGTGLDEDVNLAVDAG

SEQ ID NO: 16644 - protein, 397 aa, Sphingobacterium sp.
MKIIFRTYQFELQPTQEQKVLLDKHFGCIRYVYNYFLNEKKEQYQANKKSDNYYKQAATLTALKKKEETAWLKEVNSQSLQFVLRCLDTAYVNFFRGNAKFPRFKSRKKKNSFTVPQFAKLEGGRFFAPKFKEGIKVNVHREVKGEISKCTLSKTPTGKYFVSILSEEEYQVKEKTGAFCGIDLGLKDFAITSDGVKFKNNKYTKQYEKELAKAQKHLSRKTKGSNSFERQRRKTARLHQKITNSRMDNLHKVSHQLVSNYDIIALEDLNVKGMVKNHKLSKHISDASWGTFVRLLEYKADWNDKQIVKINRFYPSSKTCCECGWINQDLNLSIREWTCKNGHVLDRDLNAAKNILKEGLKIISSGTGDYTGGDSNKTLATKHKSVKPEAHLSLANG

SEQ ID NO: 16645 - protein, 488 aa, unknown
  TnpB Polypeptide
MRGRRKKKSKETSQWRTQAPEDHHSRQTEDNTSAALVSLKGDEARMKQRKHRHTGPYDPQTITRAVTHIRLEAANAGKLTALDDLAQVYLPLCQQYITLFCTEERPNKLRAPLFATSLSERWQRVAIQQAAGIAQSWRTNRAQAYQDYADDLLDYHEQETEGTLDTEAKEPVWREWHIPTLRQTCIQANVNVVELEPAQDSTFDYWLTISTLAFRKQLLIPVKLADYHREALKGKTINTSVTLNKRGDGWWLTLSYDQVVPVQTAPSALVVGVDVGIANFLTTSDGEHYGTFHGKLRERQKRDREKRRRKAKLRKCLEKKGVKKLPSTSSKSGQRLARHVRQEINHAVNQCFAKHEGAQFAYEQLSVATMKYKARAMNAYLYASNLAHIPRQIAWNAAKRGVAAIRVKSAYTSQECSVCHYPDRANRPNQQTFCCVVCGYSTHADLNAAINIEHRWGDGELRACKDRKAVKALLLQRHEVWKRQNGWP

SEQ ID NO: 16646 - protein, 411 aa, unknown
  TnpB Polypeptide
MLVNYYTTHMERLKAFKYRLYPTSTQKVLLEKHFGSVRWVYNWALNRKTEAYAIDKTSLSKFDLQRELTALKVLPETLWLVEVNAQTLQSAVAQLDSAYTSFFRKIGKFPKFKSKKTSSRAAEFRQGSRINLTSKKLFITKFKEGIRCNFHREFTGEIRTVTVSKTPTGKYFASILVNKTIPDIQQRPLEFDKALGIDLGIKSLAVTSDNQVLENPKSLGKSLRKLAKAQRRLAKKKSGSKNRDKAKLKVAKVHEKIANQRKDNLHKLSRNLVNDNQVTTYCLEDLSVTNMLKNRRLAKAIADAGWTTFVSFLTYKAAWAGKNIIKIGRFEPSSKTCDACGCLNHNLKLSDRTWTCSCGTTHDRDFLAARNIKNFAFHPQNLLRQDLPDVKPVEKPSHSGRSAKQEAENFQ

SEQ ID NO: 16647 - protein, 399 aa, unknown
  TnpB Polypeptide
VKLRVEVDHNTYSALKEVEEEYRKVLEGAINYGLSNKTTSFTRIKAGIYKVEREKHKLPSHYIYTACEDASERLDSFQKLKKRGRAYTDKPSVRRVTVHLDDHLWRFDLDKISISTKRGRVLISPTFPKIFWRYYNKGWSIASGARFKLLKGNVVEFYVIFKRDVKPYEAKVSIPVDLNESSVSVLVDGKPILLETNTKRITLGYEYKRKSITTGRLTKDREVKRKLKRLREKDKKLDVRRKLAKFVVVEAFKSRSAVVLEDLPRNTPEHMVKDVKDKQLRLRIYRSAFSSMKSAILEKAGEFGVPVILVDPSHTSTVCPVHGTKIIYQPDGGDAPRVGVCERGERWHRDVVALYNLRKRVGDVSPVPLGSKESHDPPTISRWLRVKSSHLMVIEDEMK

SEQ ID NO: 16648 - protein, 253 aa, unknown
  TnpB Polypeptide
VPFQKQSRQIEGNSVWYLGKRYRFFGGKRRPLPNTAKGGMFVEDSLGRWYVCFHVEVAKRLPQSNGAIGIDLGLKSLAVMSDGCKIEAPQHYRKLETKLAIAQRAHNKQRVHKLHTKIKNCRRDFLHKLSTELADQNALIAVGNVSSKQLAKTRMAKSVLDAGWSTFRSMLKYKSAGYVEVDEKFTTQTCSECGALPPERPRGIAGLGIRQWECSSCGASHDRDVNAARNILAAALSAQRPVEGSRNIALIGQ

SEQ ID NO: 16649 - protein, 365 aa, Methylococcaceae sp.
VYQSFRFRLYPTKKQFRELEAILNGCRFIYNKTLNLRKTTWEETGESLTLYETSAFLRLWKQDDEYLYQMYDDVLRDALKRVDHAFKLFFNKIKTKENQGYPRYKGITRYDSFTYQKGFYLKDNILDLPKVGCLKIKQHRDLIGKIKILTIKKTPTNKWFAIFVCKVDDKLPQDINSSVGIDLGLTTFATMSNGETIPRQRFFKEYEKRIANASRKRESLPKGSKERNKAKLIESRIYEKMTNKRKDFIHKSVNSLINKYDLICLEDLNIKKMQQTDMKNIRKGIADIAWNQFIRFTSYKAESAGKIVMLVNPKNTTKTCSRCGSLVEKELSERIHNCSCGLILDRDVNAAINILRRGLSSLAKA

SEQ ID NO: 16650 - protein, 524 aa, Streptomyces sp.
VAIRDRLKHLTPQDESVLRAVGEHQGRLASRDLRARCADGLEHSKDTWASRKRDLTPLSSSRIAGAITKATHDQWALARRCQAAHMKTLEAGIGTLRHRLSLPIGEPGTKRAAGGYRSKGEWFHKSRRLAALEARHAAVVADRQAGRVRVVRGGKRLLNTRHHLAQARLTEAQWRERWEAERWFIAADGESGKRFGNETIRVTPDGEVSIKLPAPLAHLANARHGRYVLAVRIGFAHRGQEWADRITANRAVAYRIHLDTDRRRWYLTASWQRPVVQTIPLEAARARGMIGVDTNADHFAAYHLDRHGNPVGDPHRFPYDLSGTADHRDAQIRHALTRLINWAKQAGVAAIAIEDLDFTAEKTREKHGRKKQFRQLISGIPTGKLKARLVSMAAEQGLSIVAVDPAYTSLWGAQHWQKPLATPHRRMSRHDAAGIAIGRRALGHPIRRRTAPPPHDRSDRAGHRTAQAGPDTRGREGTRPPATDHAPRDVPPNGKRKRQPSASNTVRDAPRTQQRVQDSLVRTG

SEQ ID NO: 16651 - protein, 249 aa, unknown
  TnpB Polypeptide
LTEEQLCISYAKDAKPIQPRGLIAIDRNLDNLMAVNSAGQITREDLAKATEIKAMYREIRSHMRRNDMRIRRRVSGKYGRKQREKVKQILHHASKQIVADAKARQFGVVMEKLTGIRKLYRRGNWQSRWYRARLNSWSFAELQRQIDYKARWEGIPVTYVNPYGTSLKCSTCGSRMARIPEENRTLKCPRCGFTVDRDVNAARNILAAGGVRFTAFAPAKEAMVQEPRTAGNPESRWERVNSKAQAPIS

SEQ ID NO: 16652 - protein, 470 aa, Nocardioides sp.
VCDVGAVRHHAGVPKTATLKREKAETPPLVSHAGVPLTRAMTVRFTLDPTRDQHQQLLAHAGASRMAFNHQIARVKANLDQRAAERSYGVADAGLTPGQSWSKVSLINHMNRWKDGRDPSAHVNDDGTRGLTWRGEVSADVFETASVNAAQALQNWTDSKKGTRAGKAAGFPRFKSRHKTTPAFRLRSKYTEGEAPPVRPTGPRTMRFPKLGELRVHEHTGRLAKMLDRGRFHAYAASFRYERGRWVVSITGVAAEFHHQCRTAPDRHPARVGVDLGVKTLAVVADEHGRQLQAHEGVKALQHAQARLRLADQAYSRTKKGSGGRAKAARRLGKMHGRVAAIRKYLLHRITTELARAYVSVTIEDLNAAGMLQIRSLARHVSDAAFGEFRRQVAYKTAWYGTELIVADRWFPSSKTCSGCGNIDPDLTLSDRTYGCSGCGLVIDRDLNAAINLARYGQDTQTSPPLPAAA

SEQ ID NO: 16653 - protein, 458 aa, unknown
  TnpB Polypeptide
MKTEKTPNQVFAVKFRIYPNKNGTAFLRKCFAASRKYWNWQVDRQVKMWNSREERREEWIKQGKDEKDFRLLDIAEADKDFRKLRNGEDEEFNWIQDTPSRLVGGIYKRQNVAWREGFKKRKKKGFWKSKKDFAKKPLKGFPKFRSWRDNQYFDCESNQMKWDWEKSLFKLPKNENWIKFKQHISIEDVLKEYPNAKLGMCVFTCSPTGKYYFIIPIDTGVPLPEKKEYDESNTVGIDVGIRNYISLSDETKIDNSTFLQKFGLDFEGNKLSPYKTSPSLTRRKKIRQRRLSRKESKSKNYNKQRVACSKIDEKIKNRRDDFTHELSRALANLQFNAYAVEDLDINQMKEKMAPVKGKDGKYKRNGQKQKRQLNHKISDVAWGSFFTKFEYKLDQSGKSMVRIDRYEPTSKKCLCGYINRDLKLSQSSWDCPKCGRKNDRDLLAAVQIKNYVLGGLND

SEQ ID NO: 16654 - protein, 471 aa, unknown
  TnpB Polypeptide
MTDSMPMYRTHQVWVKPSHRLFAYLDQACQNAKNLYNTTNFYIRQVFTSFGQKESLQPLQQQVMNTLEAHIDAMNERRSEKNHSHPFKLPSKEKPFVSYNFMDALFKVMDHTDYRALPAQSSQGIMKIAFQNWLSFFASMKDYRKHPEKYSGKPHIPGYARSKVKEVVFSNQDCVIKEQKYLKLPKTKLQLNIGKLGCTDGQLKQVRVVPSHSQFVVEMVFVYPLEKKKAAKANVLAIDLGVENLATIVTTTGSKPMLVKGKMIKAINQYYNKMKAHYIGILRQGKKSHEGAHTSRRLERLHLKRHRRIKDLFHKVSCHIVQLAVEQQIGTIVIGHNDGWKQASAIGRRNNQSFRHIPHQMLIAMIRYKAVEQGIAVTLTEEAYTSKASFLDQDPLPRFDEEGEWIFTGKRIHRGLYTSTKGLIHADVNGAANILRKVFPNVSAQGTDGIEGLDGNQPINVSTPLVLSILK

SEQ ID NO: 16655 - protein, 245 aa, Lactobacillus sp.
MSFYRENGRYFVAIPYKIPKNLFNAKESTGRATGVDLNVGHFNYRDGDQRILPKKLEHTYEKIKHYQRILARKCEANGRKEAVKSNKYLKTKTKLQAAYEQAANIQNDLMHKFTTKLVNDYDSIVIEDLDVKKMMMSHVASKGMHRSMFGKFRQVLTYKCDWYGRKLILADRLYPSTQRCAVCGSVKKGGEKITLTGNSKHGTKHNEFVCYNSDCPNYNKKVDRDINAMINLTLLVKHPELNKAL

SEQ ID NO: 16656 - protein, 366 aa, Anabaena sp.
LLIGFKTELNINNDQRTQLIGHCGVARHAWNWGLALTKQILDHNKQYPDSKIKFPTAIELHKWLVALVKSENSWYYQYSKSAPQEALRALKTAWDRYFKKISGVPKFKKKGKHDSFTLEGTVKVLGSHKIQVPKIGVLKTYERLPQKEIKSVTISRKADRWFISFRLDIEKQENNVNSIVGVDLGVKNLATLSTGEIIEGAKSYKKYESKLSRLQWLNRNKIINSNNWRKAQLKIAKLHLKIANIRKDTLHKLTTLLAKNHSKVVIEDLNVSGMLANRKLAQAISDMGFYEFRRQLTYKCELYSSELVIVDRWYPSSKTCSNCGTKKENLTLSDRVFKCEKCGFECDRDFNAAINLSKIDLSKVAL

SEQ ID NO: 16657 - protein, 404 aa, unknown
  TnpB Polypeptide
MGKINRTYKFRLYPNKAQTELLAKHFGCSRFVYNYFLNQREEQYKLTGKTDNYYAQCKTLTTLKKQEETSWLKEVNSQTLQFAIRSLEAAYTNFFKKRAKFPKFKSKHSKNSFTVPQSASVAGGRLFIYKFTEGIKCRVHRNIKGKIGKVTITKTPSGKYFVSVFTEEEYVAPLNKTGKSIGVDMGLKELLTTSDGETFKNNRYTRRYEHKLAKAQRHLSRKKKGSRGFENQRLKVTRLHDKIANSRADYLHKCSISLVRRYDTICIEDLNVKGMKRNHNLAKSISDASWGSFVSMLTYKAEWNGKKVVKVDRYFPSSQTCNVCGYVNKQIKKLYVREWECPECHTHHNRDINAAINILRFGLNNISAGTVDYTGGEEVRADLWESLSSVKPEAYESLTHGKST

SEQ ID NO: 16658 - protein, 263 aa, unknown
  TnpB Polypeptide
MHRPPNGRIKNLTMKYDAGEWYTIFVCELPDQPKVPIEGIPEDHLKGGDLGLIRFLTLSDGRFTDCPRYLRKSEEKIKRLQRVLSRAKINSKNFRKLTLRLARLHRRVFNQRKDYQNKTMASLFRENDVVVLEKLGVDSMLRNHSLAKSLQDAAFGAFVQKVRFKADLLGKWFVPVDPWGTTQLCHNCLEWVPKDLSERQHICPNCGIDLQRDENSALLIRRLGLTWLSYAPGRGVKTPMEPGPLPSLRGMASLGEEVGSSRL

SEQ ID NO: 16659 - protein, 216 aa, unknown
  TnpB Polypeptide
MLHVKLLKCSKCGEEHDPSEGYRDNSSSKAGLKLKRLSGRQRKYVKTRMWQIVSEIVKLAKRFNANIAIEKLRHIRKNKEEWSKKSRRKVNRIPYGFFRHALKHVAERENVFVKEVKPSYTSQTCPRCGHVGRENWKGYVQFKCVKCGYGADRDRVASLNIALRAAPKVGVPKRYFWSQPPEGGASVSRRVLKDEGCVWKMASDHPELQAHGFIRG

SEQ ID NO: 16660 - protein, 502 aa, unknown
  TnpB Polypeptide
VPLRVSPPQEKALLARLEAARQLYNACLGEAVRRIRLIYQSRLWQKAWKVEDKELRNVLIREACSKYGFTDAALQHYAVEIRRSCWIGDHLDVHVAQKLGTRAYQSARRVLFGKARRVRFKGKNQMDTVEGKSNEAGIRWRNGCVVWRGLVLPTVTDPEDPVIRHALSCRVKYVRLVRRKINGRNRFYAQLVCEGTPYQKPENALGEGVVGIDAGPSTVARVNGTEACLDRFCEELAKKEAEIRRLQRRLDRSRRANNPENYNFDGTVKKGSKQWKKSRTYLKTQARLAEIWHRLAAHRRSLIGRMVNETLRMGNVFKFEKLSYRALQRMFGNSVNTRAPGKYFQELTRKAESAGGKVLQFPTRLKVKGTETHIGLSSYCICGEQKKKSLSERWHICSCGVKCQRDIFSAYLARFVDNDFELDAGSAARQWPGAEPLLQAASGRVPNPRVSGSTGQPREGTEGVAAEEGIAKAEARDAVAPSPGGGESPGEVAVVPLRTPQL

SEQ ID NO: 16661 - protein, 306 aa, unknown
  TnpB Polypeptide
MQLVEQHVIDRNDPRYSVIDEAAFKSKNLYNAGNYEVRQSYIHHGKYLNYNEVQRRMQSHEAYKALPAKVSQQVLMQLHHDWDAFFKARDAYNEDPSKFLGRPKLPGYKHKTEGRNMLVYTIQAISRGKNGLKRGIIKPSMLAIEVQTKQKDVDQVRIVPRKGFYVVEVVYGKEVQQAEVNPAYYAGIDIGMNNLVALTSNKPHFKSIIVNGRPVKSVNQFYNKRKAELQSKLGHTGTTKRMERMTNKRNRRIDHYMHTASKRIIDVLVKEGIGVLVIGKNDRWKQEANMGKRNNQNFGAPHKRRT

SEQ ID NO: 16662 - protein, 421 aa, unknown
  TnpB Polypeptide
MLRALRIKLYPSATQVDYLARLFGCCRKIYNLALTESERLYKDTGKGMTSRTDLVNYMHQVLLKDPKLPYLREHNTKILKCMMGNLADGYSNFFKSLSGERKGPKMGLPEHKSKSNRQSVTVCREALAKKAFHEHGKLFISKTFGKLTYRCSDQYHHLIAKHADEVRSVTLMRNPSGSYYASVLVDCELLRKPKATDHAVGVDLGVKTLMVTSDGELMENSHPFRRKERRLRLRQRWTSRKVKGSKNRGKARVCLARTWEKVNDYKRSRIHELTWRLIDDNQVICIEDLNVKGMMRNHKLAKSLSEVNFGECRRLLEYKASWYGRDLSVIDRWYPSSKTCSVCGYKYEGLTLNEREWTCPECGTAHDRDVNAASNILAEGMRILGGRSAEVTPVETQPTCGDEIPGALRRGSRKKLHGATS

SEQ ID NO: 16663 - protein, 431 aa, Saccharopolyspora sp.
MRTAYKCRAYPDSEQAAQLGRTFGCVRLVWNKTLDARHRRYHVEGRTISYKETDAQLAAWKRTDELAFLSEVSSVPLQQTLRHQHTAYQNFFAGRAKYPRFKNRTGKQSAHYTRSAFKLRNGQLTLAKQSTPLRFVWSWPGIDPATINPTTVIVSREPDGRWYVTFAVDTDDSEPAAPTGESIGIDLGVKDFAVLSTGETIANPKHLDRKARNLARYQRRMARKQKGSANRRKAKRKVARAHRKVRHARADFLHRTTTNLVRRADTIAIEDLNVSGMTSSARGTREQPGRNVKQKSGLNRRVLDAPLGEFRRQLEYKTTRAGKTLAVIDRWYPSSKTCSACGHLLNMLKLSTRTWTCPGCRTRHDRDVNAAKNILAAGRAVVGQQPGEACGVDVSPQGSSLRQSASKQELSGASPKGIPALQGGEAVNRLS

SEQ ID NO: 16664 - protein, 258 aa, Saccharopolyspora sp.
MVLQAYRLAPGSTAEQQAMLASHRGAARFAFNRRHVRLPRIGTVRTHESTRKLARHVERGTARQQGPDKRAGQKTSARWRKTQVRIAELRTAIANARADGLHQLSTRLVNEFDAVVLEDLHVAGMLRNRQLARAVPGAGMGGARRQVTYKAAWSHRALIVADRFCPSSKTCDDCGVVTATLSLRQRTFTCDHCGCATDRDLNAARNLASPAETTGSTSSPSCGATQNEPAGNPRKTSPAGTGYRYGKTSTHRAGADAA

SEQ ID NO: 16665 - protein, 337 aa, Saccharopolyspora sp.
VYPGSEQEAQLGRTFGCVRLVWNKTLDQRHSRFHIEGKKTSYKETDAALAAWKRTDELAFLSEVSSVPLRQTLRHQHVASSNFFAGRAKYPGFENRPGCQSAHYARSAFRLRGGALTLAKRTAPLEFVWSWNDIDPTAINPTMVVVSRDPDGRWYVTFQVDADDPEPQPETGHAVGVDLGVKDFAVTSDGERIANPGHLDRKARNLARYQRRMARKQRGSNNRRKARAKVARAHREVRHARQDFLHSTSTNLVRGCRRDRHRGPLRGRHVPLSAGHRRPARPQRHGEGRAGPVDPAMPRWASFDARWSTKPHVRASASRSSSGGTRRRRRARAAGTC

SEQ ID NO: 16666 - protein, 272 aa, Saccharopolyspora sp.
MSRTQVARAYKYRFSPTAQQQQELLRTFGCVRKAYNLALNARSRAWFTEQRRVNYAETSAMLTEWKRSEELSYLSEVSSVPLQQVLRHLQGAFTNFFDKRAKYPRFKSRKKSRQSTEYTRSGFTWRGGQLTLAKMREPLNIVWSRPLPEGGEPSTVTVSRDAAGRWFASILVETSTEHHAPSDQAMGVDAGIESLVTLSTGEKVTNPQHEKRDRRKLAKTQREMPRKQPGSNNRAKVAQQVARVHARITDRRTDHLHKLSSRLIRDNQTVVI

SEQ ID NO: 16667 - protein, 353 aa, Chromohalobacter sp.
MKQTKTLKVRVKDKHAAELNRMARSVNFVWNYVNELSSRSIRERRVFLSAYDIQKYTNGVAKELGLHSHTVQEVGREYATRRKQFRKSRLAWRKSRGVRRSLGWVPFKSGAAKWKSGQVFHNGSYFKVWDSFGLSKYAFRSGSFSEDARGRWYFNVVVEVDVQPSVGQGAVGIDLGLKDVATCSDGKRLKSGRFYHDLEDKLTTAQRARNKRRVKAIHAKIKNRRKDALHKFSRRLVDQHGEIVVGDVSPTKLAKTRMAKSVLDAGWGQLKTMLEYKCDHASIVFREVREAYTTRTCSSCGSLSGPQGVNGLRVRDWMCVECGALHDRDVNAARNILSLGAGRCPQEVGIPVL

SEQ ID NO: 16668 - protein, 468 aa, unknown
  TnpB Polypeptide
VKEQLDKKRAIKNSIRLYIKTKKWIKPYPKCQSKVRGFKIILFNKMMANLDEYERKVEADIRKLKTRLALVTEARKRKAKKLENLEKLPPERIVFGGKKLYSEKDVVEVTKSDDSSNDKDQKTSKKASNKWRQEFFEKRHQSMALPGRHTSKYGNFLCKYDGKDLSVTCIDGSVTIFHDFKLPRNEESFQKNFTCKPEDRQSLCYNFILKRDKENKQYLIVSVTMKLKAYENSYYGNGAISMDINYDHFALAELDETGKLLDQKLIRFDFMNKSTGQVTNILGAAVKDIFDWCAEKDKRLIVEDIDLTIKLASRKYGKRKGNHHMTLFAYQRIASSIENQSLKREIAFYKIAPAYTSQMGKFLFMRKYVISIHQAAAYTIGLIGLGLYEKLVPDSRMLNLLKTKEGTVPEFSQETYKNIWARITNTFSGIRKHFFYRSIPYEVLEERKRPSLRTLAAEMKIRYMPVFE

SEQ ID NO: 16669 - protein, 343 aa, unknown
  TnpB Polypeptide
LILTFKVRHGKDLATELQKARQIAEFALKTGARSSKDVKQFGLKSAIANQILRKYSRNRKLKRIGSVKLTVPSQSIQVKGNWLKIPCLKLNMPITFRSDFTKVNQVELDGEFAFVSVTIPETPMREISNWIGVDRNATGHVAVVSDPRSGKVFKLGKQTQHVHNKYRAMRKGLQETGKYRKVKAIRNRESRIIGNINHKVSRAIVGIAERTNSGIKLERLGGIRRSRRYGKSFNKTLHSWSFYQLQGFLQYKAKLRGIPIVFVEPRNTSKECSRCGSEGTRIGKGFACQCGHVDHADANAGFNIALRPSIGQFIADRDAMKGNTDIPRGATLWTQEPPEPHRL

SEQ ID NO: 16670 - protein, 648 aa, Escherichia sp.
  misc_feature (342)..(344): Xaa can be any naturally occurring amino acid
MKQQVSFKFRLKPDGQQERQMRRFAGACRFVFNRALALQNENHEAGKKYIPYTKMASWLVEWKKDTETEWLKDSPSQPLQQSLKDLERAYKNFFQNRAAFPRFKKRGQNDAFRYPQGVKLDQENSRIFLPKLGWMRYRNSRQVTGVVKNVTVSQSCGKWYISIQTEREVSTPVHPSASMVGLDAGVAKLATLSDGTVFEPVNSFQKNQKKLARLQRQLSRKVKFSNNWQKQKRKIQRLHSRIANIRRDYLHKVTTTVSKNHAMIVIEDLKVSNMSKSAAGTVSQPGRNVRAKSGLNRSILDQGWYEMRRQLEYKQLWRGGQVLAVPPAYTSQRCACCGHTAXXXAFPRFKKRGQNDAFRYPQGVKLDQENSRIFLPKLGWMRYRNSRQVTGVVKNVTVSQSCGKWYISIQTEREVSTPVHPSASMVGLDAGVAKLATLSDGTVFEPVNSFQKNQKKLARLQRQLSRKVKFSNNWQKQKRKIQRLHFRIANIRRDYLHKVTTIISKNHAMIVIEDLKVKNMAKSAAGTVSQPGRNVWTKSGLNRSILDQGWYEMRRQLEYKQLWHGGQVLAVPPAYTSQRCACCGHTAKENRLSQSKFRCQVCGYTANADVNGARNILAAGHAVLACGGMVQSGRPLKQEPTEMIQAIA

SEQ ID NO: 16671 - protein, 695 aa, Streptomyces sp.
VRRKIQLAEGQTQRIACASASAFRGLDTVTGEVWGAEVLAERVGWLTSLVETLCAEVTSAHWNRPDLAQLASGTDFCGARLPSNAWMAVRTLGWSASVPNDLYLPDRVRRVAEEQAGRALRSAWWRSEITDAVLATWPAGPDGDPMRRTETEWAALRAACPDGQAVAASVLRARTRQVTAYQARQGHLPADICALEAAPGGGRQVVLAAADKQLCTLTRCPDDPAHYGVLTVRLPVRPDPRTRADWHPTVIRFRLPPTIPVGAALHAPTLRLRSGRLRLDIAFTTAAPTTRAGGHTRAVAFDYGLNTLLTGGTLTLSGGQQPTVITDGRPVFFRPDGALAKADRLRILGEQLWAKTAHLQSLLNGRAAAGQRPEPSTTAKLAVLEAEHAAVSRRRSRLNEQVAKAAARFMVETARAARATVIYLEDLRDMEARGKGRTLNTRLSSSVRGQIVAHTRHQAAAHGIAVVIVPARGTSKYCPRCLSVFRHHTAPDNPKPGWKWATCPHTDCGYSADRDVAAWQRIGTRGLTHQHTTVLDRGSDTYVIRRTVKELDQPVRHTPHPGTVSSPGPSQPRAVADRTKAGPTRNRPVPRQRRRVPAPPANPAARTAVGSGGKRPAGRMPQSPRRHPQWRGRRQAPHTMGTPTRHQPRGARLGAGFHLHTHATPVPRAGRPTGQPRTFSQDRSRAENPAPPRKT

SEQ ID NO: 16672 - protein, 419 aa, unknown
  TnpB Polypeptide
MQLTERHIIKSTEHRFAQIDELAFKSKNLYNAANYVIRQNFIYGWGYVNYNEMNRLMKSQVAYKALPAKVSQQILMVLDKNWQSFFEAVKAYKVDSSKFTGRPKLPNYKDKVKGRNLLVYTIQAISSKQLKKGIIKLSGTELLIKTKAHPDQVCQVRLVPKCDSYVIEVIYNACTEPCDYAQGKLRRSEPESTISNANYIASIDLGLDNLVALTSNQPGFIPLLINGRPLKSINQFYNKRKSRLQSQLKGNRQTSPRIQRLTRCRHQKVENYLHHASRLIVAILNTKQIGTLVIGKNAQWKTEIALGSPTNQNFVSIPHSRLIEMLEYKARLVGITVIVQEESYRSRASFVGLDPMPVYGKTEKEPVFTGKRIKRGLYKTSTGQLINSDVNAAYNILRKAIPNAFSNGIGRGRSSAEAG

SEQ ID NO: 16673 - protein, 299 aa, Proteobacteria sp.
VNEGRYLAGVPRLTYYEAAWLLTQWRHSEAYGWLAAVSLHALQHCLRDLERAYTNLCAGRTAPPRLRKKCLSDSFRFPRDFQVHGHRLKLPKIGWMRFWQSREMEGAIKNVTIRRDGTHWAVAFQTEREVATPVHPSTSALGIDLGIATFAALSDGTRYPPLNAYRRLQAKLATAQQRAATQVKFSKHWQQCQTVIRRIQATSARCRKDLLHKLSTTISTNHARLVVEDLQIRHMSRSAKGTVEDPGCNVAQKAGLNKAILDQGWGLFRQMLAYKQLWRGGIVVAVNPRYTSQTCPQCG

SEQ ID NO: 16674 - protein, 436 aa, Neobacillus sp.
MEQMFRLEVKKEMEPCKKNMKEQKKKESKGDIVIQKFPLRLTGEERRLVDTLRKEAANLWNDCLDLHWWLYDVYKVWTSASEKKQWYNATTHKLHSQTIQSIIELHEETCKRTRELRAKGEKQWRYPWKYKKFFSVKYKKTAIKLTGKKLRFSNGKQQSPLVIPQPKHIDFHTIKSAEIVWHKDQYWMHIAVEVPKQKQVQGKKDAGCDLGIIHAAVLSDGKSHFIVTGRELRSLQRYRNKKLKEFQKRISRKKLGSNKRQKLILRKRRFLEKMERRIEYLLHSISKMVTDWCVENQILTLYIGTPDGVQRNTKKKKKTRKEIRQQLSNWSFGQLIEKIKYKLKLRGVKVQLVEESYTSGTCPACGEFRKQWNRNFYCQCGAAGHRDVVGAVNILDKSVNKQLTENRELPKIEDTKYRRVLLTPIVPHNGCKGAVA

SEQ ID NO: 16675 - protein, 375 aa, unknown
  TnpB Polypeptide
VRRAFKYRLYPNANQERELATMRETHRRLYNACLDERKTAYEADKRTVRYTEQSAQFTEARKTNPFYANINFSSAQATMRRLDKAYKASFKRAKGKEGQSGFPRFKGRDRFDSVEFPKYGDGVRLNGERLYVQNVGKVRVNLHRAVEGTIKTVILKREADKWYVVFSCALPDVPILPTDKPPVGIDVGLESFLTTSGGEKDPNPRYLKDALPELRRQARAVSRKRLRSKNRRKAVKRLRKIHARVRNLRKEHHHHVASQLVRRFGFIAAERLDIKEMLGNGRLSRSISDAGWAGFLLTLRYKAASAGIAYVEVDARGTSQCCSRCGAVVPKTLFDRRHECSHCGLSLHRDENSAREILRRGLLARIGPAGGNVDH

SEQ ID NO: 16676 - protein, 526 aa, Megavirus sp.
MFWNNQCAKLSKSLWIPSNIINLKSNKKKYFKCDNPNISFNYFTDGIKINKKIKFNDIKVTDNHDKKEKLRNKLIKTENTRYIKEQNNQKCKLNKQELNDKHKKFLDKIEIKVNQLDGFIRSRRIQILPNKKQQNIIQKWIYDTTSIYNKLVSSFNQIYDKCQKIVDNMNVENKFYHLGKIIKQNTEFPINFHKLRALKCSDFIQDYDRIPYCVIADIIKEFVSNIKSCITKISKGLITEFKFKPRKYNRIFSYIPLESHYTTVRGFYPSIFGKIKTNEKIFSWLDIKHDYKLIYDKYSNKYYIHVPKYVYRNDLTIKKPIAIMDPGARTFQTIYGLDHVVTIGDDLGSTFKKRLLKIDNLKSKLSKPGKYKHNKKLDRKTKVKKWKYKRAIDRHHKKMDHIQQELHYKTANYLCSHYDRVVVTNFSSKKVGSKKNDLDAITKRILGKLSHYRFRQRLLTKCEEYGSQYYEVDESFTSKTCCKCGNIHKTLGSSKIYDCIKCKNKIDRDVNASICILIKNKDILLK

SEQ ID NO: 16677 - protein, 493 aa, Megavirus sp.
MVYIKNRIPIHYPNKNCGLPNWVPSINNYYDCLNTNSWFDMNICKNPNKSSVKRHLIDAPIVPNESYKQQMKSIKRCKSNKEPVFIYTRKIRIYPTDDQKCILEEWFWAATRMYNITVKYIRDFLFKDHKLTCPFASKDILINFPFRTVLKEDRDKLMKSMKNPIVGHLLDEIIAQVVSNYKAAISNILVGNIKKFKISTWKYIREKYILKIEKNLFSNGTFCSRTFKELKSSEPLINIQHTCTLQYNRDIGKYILLVPTHKETKSYVTNDLDCGIDLGVRTFATVYSRNNVVTIGNKFKKIDSCHKKIDKINELLDSDNNKCKLRKAKRKYYRRIKDIITDMHYKSAYYLVTNYDNIHIGKLSTKGILSKNNKKISRHTKRMVGVLSPYLFRQRLNHMAHKYGATVFEVNEYLTTKTCSNCGKINELEAKKVHKCKCGMKTDRDVNAAKNILKVGYQYNSTLHQVNDIDIIETDNHIVTFNKVIKEYEVFEV

SEQ ID NO: 16678 - protein, 442 aa, Lachnospiraceae sp.
MLPCIDDRDSMLAKNLYNAAMFRIRQTFTGWDKTSRTDHENEVFEEIRITKQTYPGLKIKRVLSYKALDKILRVTKNPDYFAGLPMQTAEAVVHQAVNDFSSWLKALRDYKKNPTKYTGKPRMPKYRKGDRAAFVFTNQDAVLYHEDDKRQDFAILKIPGVPKFKKLTLFGIPTVGILKQITVTPMYGRFMMSFIMEDCAPPFYPDLPNMAGLDFGTDNIAALACTDGSSVVCKGGAVLSENRRFAKNKADSVSLLTQGKVHAHAESKHLTRLSLQHYCRQHDMMHKISCRIIEWCIAHRVGVLVIGTNKFWKQNADMGKRNNQNFVSIPHAELRQMIAYKAMIAGITVIEQEESYTSKSDVTANDPIPVYGHVEGKPSFSGRRISRGRYQTHSGLIINADCNGSANILRKAVPHAWADKTDFRFLAAPYSITYQRLQKGLA

SEQ ID NO: 16679 - protein, 385 aa, Lactobacillus sp.
LDQSVVIKAQLLNIDDETAQAFSNTMCKYRDACNFISQYIFEHAFELKQSKLNKALYHDLRDKFELKSQMAQSAIKTVIARYKTVKTQLFQHPFRYDTGKKDGKGRGIWAQIYRDLTWLWQPINFKRPQLDLQRGRDWSYLSATNQLSLNTLNGRRKVDFVCKGFDQYLDQTKWKFGSLKMLQLRGKWYIHLSATTAIPEFEAEQAVHVVGIDRGLRFLAACYDEKGKSILFSGQKILHKRRKYKKLRAELQAKGTKSAKRRLKKIGQRENRWMSDVNHRLTKTLIDHYGSNTIYALEDLTDVRFATEKSPKDQRYEIVSWAFYQFEQFLTYKANLNSSAVVKVPAKYTSQRCPKCGRIHKDNRDHELCISILAINVATSLMMIV

SEQ ID NO: 16680 - protein, 479 aa, unknown
  TnpB Polypeptide
MSRVTKTICQQLDYRPEIADWFEETQALFNRVAAFYFEMIEAHPEVLNLDGNGPRDTLERLTHRTKTNPEPAMPLAAVADNLPALMRRAAIQSALGAAHSFHSNLARWHREKEQAADKGKKFKKRPPAPPGRWNKSVTFYAGMWKQRTAADILLKLWTGTSWCWVKVRIKGRELPEDWEVKSPQVVQRGKRWWLHTFVEKNVSNPGTVKEQVTSTPDVRVCAVKLNVKDALAVCTIQTREGTALATRFIHGGRQLNGLRKSSLGRIARRRADTGLIAQGEPDNIRLWDRVRHLDEQVAHRVSRRIVEFAQAHGATLLVFEHLIPYHPKKGSFSQRGNEKCAYWLRSKIFRYSQYKAWAEGIITCRVSPRDTGRECASCNAQVTRYNKGQATSGSTPAAPLMLCTACGMRGNADRNASLNTGQRLFARYQSKEKPQTSPHAERLSKERGVPFPQAAESGARPPTELARHGEGDGHGTAQD

SEQ ID NO: 16681 - protein, 396 aa, unknown
  TnpB Polypeptide
MVRTYKCRVKLSMSGHEALSRVFGMCATLYNACLEERIDCYKKTGESRSYYDQCKALTEVRADDPEYASISVQVFRGAIGRIDKAYKSFFRRVKTKEKAGFPRFKSSRRWRTIEINDQCWRMLKREGNKLVLKIKGLPRMEVKSSRELPPSRLLKAIRITRKPLRTEVALSYDLPTPEAKPVSNPVGIDMGISKRLTLSDGETVEKREIDHRKIIRLQRSVSRKVKGSNNRRKAVALLAKEWQRVTDGERNYIHRLTAELVKMYDLIAVEKLKTKNMLWNRNLARSISEQAWGKFAALLNEKAESAGVKMMEVDPRGTSQECSSCGAEVKKSLSIRTHKCTCGLEMDRDLNAAINILHRGISVAGGKLKQSRMAGRMKMKRADVGPVRPRTVEITV

SEQ ID NO: 16682 - protein, 409 aa, Okeania sp.
MYSIQLELKLNNKERSLMAQCAGYARFVYNYGLNMVNGTKAIIKVNKRGKEVNFSYSQRINEAKKVFTNYVKNQPEYAWTNSYSSRIYQSAFQNLGEAFKRYKEGTSKYPRFKRKKGKESFTVYDGNGKVTVKAGYKIKIPTLGTFRLFEQVPLTTASQTFTISRTGERWFVSFAIEVEKLPINPLLDERHQETFGIDLGVKQFGTIASGEKNNTISVPESIKKEQLKLAKFQWRNRNKRLGAKGKLASKNAIKYYKKLAKYHGRIAKIRQDFIEKSTTDLANNIKHLCLEDLNVKGMMQNGKLAASVARQGFYEFRQRLTTKIVANGGTVVLADRWFPSSKTCHNCGRIYSELKLSDRIYNCPHCETVIDRDLNAAIVLSQYGEVNQKTRVGCARNYACELEGDDSPG

SEQ ID NO: 16683 - protein, 304 aa, unknown
  TnpB Polypeptide
MAERSRQPFTSKCSNEFADSVQQFFRSPKIGFPKFKSKKSNRKSYTTNCINGNILMENGYLKLPKIGFVKLKQHRQIPSDYKLKSVTVSQTPSGKYYAGVLFEYESQVQEKEPHNFLGLDFSMHELYKDSNGNEPSYPRYYRQAEKKLKHEQRKLSLMQKDSKNRGKQRVRVARLHEKVANQRKDFLHKQSRQIANAYDCVCIENLDMKAMSQALHFGKSVSDNGWGMFTTFLQYKLEEQGKKLVKIDKFFASSQICSCCGYKNPETKNLAVRVWDCPECGTHHDRDVNAAINIRKEGMQIVFA

SEQ ID NO: 16684 - protein, 374 aa, unknown
  TnpB Polypeptide
MADTLRKAYVFRLYPTPAQETALESVLSVCRDVYNSMVNWRKHDFEVKGQSPNYYEQKKALPVWKASHPELLSVHSQTLQDVVRRVDLAFQAFFRRVKAGETPGYPRMKGVGQYDSFTFTQGGYSLGADGLTLFKIGVVKAVFHRVVAGRVKTLTIRKRGNKWFACFSCEVAAEPLPASVEAVGIDVGLTHFATLSDGSTVPNPRFFRADEKALAKAQRRLSKQKRGTPARRKTRKVVSRIHERIRNRRHDFVHQLARRLVNRYGIIAVEDLNVSGMVQNHCLAKSIADSSWSMFRSVLIGKAASAARQVVEIDPAFTSQDCSACGFRVRKKLSERVHSCPNCGLVLDRDHNAALNILQNARTAQTALGLQSVG

SEQ ID NO: 16685 - protein, 394 aa, unknown
  TnpB Polypeptide
MINKAYKYRIYPNKKQQELLEKHFGCVRFVFNWGLGEKIKAYQQDKKRLNCFDLINELAELKKEKDFEWLSKVNSQSLQMSLRNLDNAFTNFFRKQNKFPNFKSKKRNINSFQIPQHLKLSNKLDIPKVKGINIKQHRKLEGKIKTATVSKMPTGKYYISILIEQDKELPKKRKIKEKTTIGIDLGIKTFATISDGRKIDNPKYLKNSLRKLKRQQRWLSRKVKGSNNRKKQIKKVALMHEKISNQRSDFLDKFSYQITHEKQVNTIAIEDLNVKGMVKNHCLAQAISDVSWGEFRRQLEYKTEWYGKNLLVIGRFEASSKTCICGQVNQELKLSDREWICKECGTKHDRDVLAANNIKKFALIPVERGKFTPLERTALAGSLKEEASWSLAKR

SEQ ID NO: 16686 - protein, 397 aa, Sporosarcina sp.
MRTYILLVEVNFMLINKAYRFQIYPNKEQRILIAKTIGCSRFVFNYFLAKWDSTYKETGKGLSYTTCSAELTQLKKQERTIWLKEVDSISLQSSLKNLADAYTRLFKKQNKAPRFKSKNHEVQSYTTKQTNGNIAIVGNKIKLPKLGMIKFSRSREVKGRIMNATIRHTSSDNYFVSILVETEVQEVPKTNSSVGVDVGLKEFAVLSDGTVYNNPKYFRSLEKKLAKAQRILSRRRELAIKRKCKLSEARNYQKQRVKVARIQESIANKRKDYLHKLSTDIIKNHDVIGIEDLQITTMLKNQKLAKSISEVSWSQFRTMLEYKAKWYGKQIVVVGKTFPSSQLCSKCGDRNKDVKNLALREWSCLKCGSHHDRDLNASINLEKEANRLLTAGAAGIA

SEQ ID NO: 16687 - protein, 398 aa, unknown
  TnpB Polypeptide
MEVKKLYRFRLYPSRTIENNMLKTLETCKRTYNEMLDICQATYEMTGKGQTKFDMNRCIRYGVDADISMIHSQVLQNVNDRLAKAYSNFFRRVKEKRLGRNIKVGYPRHKKYCKSFTYPQSGFSIKGKKLMLSKIGMVNIKIGKTQNRINGVVKTLTIKRESSRKWFAIFSCVDNIPEPQMVNDKKIGIDVGLEHFANLSDGQMIDNPRFLIQSERKLKMLQRILSRKKRRSMNRKKAKLKLALMHERISNQRNDFLHKLSHHIVREYGVIAIENLNIRSMVRHPYLAKHISDASWGTFVNMLCYKAESAGTKLVKVNPRGTSQMCSQCGHKVPKTLAQRWHFCPMCGLSINRDLNSAINIITEGTSGNYACGDGSSALAMLEHSPSRKQEATQLVGW

SEQ ID NO: 16688 - protein, 231 aa, unknown
  TnpB Polypeptide
VTIENVGQVKAVWNGSKGEWELHIVCKHEIEAESPGDETAGIDLGISNFAAVSYSTGDHELYPGNALKTDERYFAKEIAKCNSSRSNNALRLRKKRSERRSHYLHAVTKHIVAECVERGVGTIAVGNLEGIREDDETGEARNWGDRGNEGLHGWAFDRFTNVLTYKAKVEGFTVVIVSERDTSKTCSRCGQKRDANRVERGLYVCRGCEAVMNADSNGAENIRRRLDQAKR

SEQ ID NO: 16689 - protein, 378 aa, Enterococcus sp.
MIRAKKVRLRPTEEQEKQLWQSAGTARWIFNWTLKMQEMNHRFGGKLISNNDLRKHITKMKQRPKYAWLNHVSNNIAKQAVKDACNAYKKWFDGMTGKSRFKAEKPRFKSRKKSKPAFYNDNIKLKVRSKSVLLEKIGWAKTSEQLPMNTKYSNPRISFDGKYWYVSVGIEEEKPVQTLTGEILGIDLGIKDLAIVSNGKVYKNINKTGKVRKIEKRLRRLQRNVSRKYDMNKEGNRFVKTCNIYKLEKNIRHTHRKLANIRQNHLHQTTTEIVKTKPSRIVVETLNVKGMMKNKHLAKSVAQQKFYEFKRQLQYKCEDYNIELVEADKFYPSSKLCYECGHKKIDLKLSDRTYHCDKCGYTADRDYNASLNLASYSA

SEQ ID NO: 16690 - protein, 499 aa, Chloroflexi sp.
MYDCLKIPQAFRFELDPNRAQRVALAKHVGVARFAYNWGLQRCLEALTQGQPLPTAVQLHKEWNRWKRQHALWWQEVSKCAPQEALRDLEKAFRNWREGRAGRPRFKRKKSLEDNKARLTGTIRVFPRHVQLPRLGKVRTKERTDRLLTLLTAQKARILSATIAREADRWFVSLTCVVERPDPPPRQGKPVGVDLGLQAFLVLSDGTRVDAPQPLRRALRLLRRRSKHLSRKRKGSRNAARAALRLARLHRQVRNIRRDFLHKVTTGLAKTKEGAQGFDGQSLTVIVVEDLGVRGMMRNGHLSRSVADAGWGLFRRLLAYTCCWEGARLIVAPRDFPSTRRCSACGWVGPRLPLSCRVFRCAACGLMLDRDLNAARNLEHDGLAVLSGPTGSSPGRRRSPVETFSLWRSLWRRTGEKPVYELRVEEAGSNRSFCSPMTVKEMTMRCRTGSAAERCPTGSGYRWRSRRGPEYPAARRWTAIPPQDGAGGYLRALFWPPRR

SEQ ID NO: 16691 - protein, 390 aa, Deinococcus sp.
MRTREATLKAYKYRLYPTRAQEDALSLTLTLCQRLYNGMLEERRGAYKKAGKSLTAYDQMKSLPEVKAALPEYQGVNAQVLQDVAKRLDKSFKGFFRRVKAGHKAGYPRFRGRDRYDSFTYPQPSQHSVSGDGKHVYLPKIGNVRIRLHRPFSGKLKTLTVKREGQEWYAVLTCEAPRAEPLPLTGSAVGIDLGVNHLVITSDGEFVDNPRFLRSAQKRLRVAQRSLSRKKRGSNRRKKAKAAVARLHLKVKRQRDDLHHKVALKLVRENDLIAHEELNITALTRTRLSKSVLDAGWAGLLDKLRAKAEEAGRVVVGVCPKYTSQDCHQCGHREKHSLSVREFICKGCGAVLNRDWNAAMNILARALPSVGNVDQRVMRSPRSPAIHRGE

SEQ ID NO: 16692 - protein, 369 aa, Ruminococcaceae sp.
MQKGVKFRIYPSKSQRSLIDRTLGCVRLIYNKGLDMRKTSYEQGQRCGYKQTSSMLTTLKLQEDFSFLKEVDSISLQQSLRDLDTAFKNYFSHRSFYPKFKSKHDNHQSYRTINQQDNIRFAGKYLKLPKLGYVRIKQSMPVGHIHNVTVEKTPTGKYFAVLNVDFEPEDRPNAGCVVGIDVGIKDFFSDSNGNTIENPKYLEKTEKKLVREQRRLSRKQKGSNNRNKQRIRVARVHEKITNQRNDFLQKTSTMLLRENQTICIEDLNVKGMVRNHKLAKHITSTSWSKFFSMLEYKAEWYGNEIVRVPTMYPSSQTCSICGYKNPIVKNLSVRAWKCPNCHTKHDRDKNAAINILKMGMLMTANNLVG

SEQ ID NO: 16693 - protein, 408 aa, Nonomuraea sp.
LSVLIGRLIGVSRYRLSPTPAQEQVLAEHCGHARFVWNLAIEQHAHWKPGRKSGPGFAEQCRQLTQARAEFEWLRGGSIVVQQQALKDFAQAMANFFGKAHRKPTWRKRGQGEGFRIVAVKAGDVRRVSRNVGEVRVAKVGWVRFRWSRAVPGGVKSYRITRDHAGRWHVAFAAIPQPIPAPKTGEVVGVDRGVAVSAALSTGELLVVPTLRDMEKARLLRLLRKLARAKRGSNRRSKVKQAIAKLKARETNRRKDWVEKTSTDLARRFDVIAVEDLKVGYMTRSAKGTLEAPGRNVRQKAGLNRGILAAGWGLLVRRLEHKAPGRVWKIDPRYTSQTCNACKHTARESRESQALFLCVACGWRDNADINAAKNIRDTAVGHTVAARGGAPSGGPVNREPQRDLLLVG

SEQ ID NO: 16694 - protein, 292 aa, unknown
  TnpB Polypeptide
LDKAYKNFFNGSKFPKFKRKKKSKSRFYSRYDKVYFKENFVNLEEIGKVKCRVDYDINLSTITKFKNPRIHFNGRVWVLSVGVEIPVEKTKLNDFSLGIDLGITQLAITNIDNLDTKNINKTHTVKRLNKKLKRLQRQCSRKYEKNKKGGSYQKTKNIAKLEKKIKKLHSKLKNIRINHIHQTTSKMVKAKPFRVVMEDLKVSNMMKNKHLSKAISEQGFNIFINQMKYKCENYGIEFIQVPTFYPSSKTCSHCGSIKKDLKLSDRVYKCSCGFSCDRDKNASYNLANYGLV

SEQ ID NO: 16695 - protein, 374 aa, unknown
  TnpB Polypeptide
MNIAYKYRIYPNKKQQELFMKTFGCCRKVWNLMLNDKIENYKQTNTFGMFTPAMYKKDYPFLKEVDSLALANVQLNLQSAFRNCFDKNRKTNNKFPKFKSKHKAKERYTTNNQKGTIAIIDEKYIKLPKIGKVKIKLHRHPKDNWKLCNATISKEADKYYVSIVFEYNEDTINKTINKEKLIGLDYSSDALYVDSNNHKCDMPHYYRENQSKLIKAQKRLSRKIGSNKGETKSKNYLKQLNKVNRVHTLIANQRKDFLHKKSRELANTYDVVIVEDIDMKNISQGLRLGKATMDNGYGYFRELLKYKLEQKGGQLVKVDKWYPSTKTCSCCGNKVKSIPLGQRVYICDKCNTVIDRDYNAALNIKDEGIRILGL

SEQ ID NO: 16696 - protein, 514 aa, unknown
  TnpB Polypeptide
MRAQTPSYVISTKIQLSESIAKRLEKSLRISNSAYNEALSFGLKRFEALKQNPYYQELLKARRLAKAGIDKLKKAKKKTKGLAQQVKLYDKALFELRKAYGLTEFDLSAYLSKQRRKAGSPYQQFNSGEIQVIASQAMKTLEKVLFYQIKPHKVRFRSKFDLDVSFRNRVNTTGTRLEPSNRKGIAYRLYIHKASTFVDIPVKAFNKYQQMSLSRCEKIKYVQIIRKTIRGKKIYYLQIVCQGFPTSKVTKGQDVVGIDPGISTVAFASQREVALVDLVPKNITQKEKLLKRLDRKIERSRRVNNPECYKENGTIKKGARFKRPSKRQSRLRTQRRKAYRSLSEERKKLQGQLVSRIVSQASIIKIEDLNVKGLQKRSRDVRINPKTNRPFSKKRFGKAIFRAAPSAFRTALETRAFQLGIEVEVISPKDVKPSQYNHITQTFEKKPLSTRVYDLSDDVPGVQRDLYSAFLIGHIENDHYNQKQLHQDFPDFYEQMKIFLHQPIKTERLAWYLN

SEQ ID NO: 16697 - protein, 397 aa, unknown
  TnpB Polypeptide
MRTDYRRQSIIIKKNNPLYSEIDNLCFKSKNLYNATLYSERQHYFKNKKFMFFYSVNKKFASENNPDYRALPAKVSQQVQMSVNEVLTSFIKLKQNNLPAKFPKYLNKHSRYILRYQKGALSFKKEGFIKLSKTNIQIKNNIDKNQVQMVRLVPRNGYYVIEIIYKIQIKDKQQDLKYASIDLGINNLATLTSSEFNPRIYNGKPLKSINQYANKHIAAYQSELKNNQYTSKKIDYIRMKRDFKINDYLQKTAKDLVNYLVSQTITTLIVGKNKGWKQNTNIGKKNNQNFNSIPFYKFENKLKYLCKENGINYYEQEESYTSKASFLDNDILPIYDNSQNKKYMFSGQRIKRGLYGSSTRKINADVNGAYNIMVKENSNYIISKREQLGFNPTLIKL

SEQ ID NO: 16698 - protein, 344 aa, unknown
  TnpB Polypeptide
MHAFNAACTYIAGIAYEQRLASKFKLQRLVYYEVRQRFGLSAQLAIRAIAKVVEAYKRDKSQRVAFRPDGAVVYDERILSFQGLEAVRLTTLHGREVVPMQMGDYQRVQFHRARRQADLVLVKGTFYLLVTLDTPEEPPMVPERFLGVDLGIINLATDSDGHPYTGIDVETVRQRCMTHRQTYQATHTKSAKRRLKQLAGKQARFQRAVNHCVAKRLVAYAKDTKAALVLEELTHMRDRMTVRKAQRNKQHNWSFRQLRDFLVYKAQRLGVPVVCVDPRNTSRTCSRCGYVEKRNRRSQAAFSCLHCGYTTHADTNAARDLATRAGVARPDLCAPRRGQLAFAW

SEQ ID NO: 16699 - protein, 433 aa, Bifidobacterium sp.
MLEAVKVALDPTPAQERGLMSHAGAARFAFNAGLAHVRETIEAKGKPEWSLYALRRWWNANKDALAVDVDGMPWWRENSKESYNSGLEALSDALSNWSKSRRGLRKGRRVGFPRFRSKDRTPPRFAYTTGSFGLVGDDPKALKLPRIGRVHCMENVAKRVGGARVLRMTVSRHAGRWYASLTVERPDVRPIRPPRGEAVGIDLGVRTLATLSDGTVIPNPHALRAGERRLKRAQKSLSRKTKGSHRRHDARERVARLHARVADRRRDLLHRLTTMLASTYSDISIEDLNVAGMVKNHRLAKAVMDVSFAELRRQLEYKTVRTGARLHVIDRWYPSSKRCSNCGRVKAKLSLGERIYHCEACGLTIDRDLNAAVNIQVAGSAPETLNAHGGTGRRNDASRRATQDPVKCEPSNGDSRVRLGADARKGVLQARTN

SEQ ID NO: 16700 - protein, 395 aa, Deltaproteobacteria sp.
MKTIHKAYRFRLKPDVEQGRQFARIAGVCRLVWNLCLEQRKVVYSSLRITLNSYSQLPDVTILRGEYDWIREIPSQVLQQKVRDLDIAYKNFFEGRAAFPEQKKKGKSVDSFRFPQGFKIDNRHIFLPKIGWVGFFKSQDIKGKPKHMTVSRNGKHWFVSVCCEIEIANAVPKSKAAGIDMGIAKLCALSDGTVIENPACFKQYKRKLAKLQRQLARKVKFSKNFYKAKAKITALHIRIADTRRDFIHKETTTIAKNQGLVVLEDLRIKNMSRSAKGSIDSPGKDVKQKSGLNRSILDAGWGEFRRQLEYKVDWAGGILIAVDSKNTSRRCPVCGHTAKENRLTQADFVCVACGHAGDADITAAVNILRAGHARLACGETGAVRPLGEAGTLKAA

SEQ ID NO: 16701 - protein, 245 aa, Bacteroidetes sp.
IKGSVKTVTIKRDACGYLWVCFSACKEVPTPELPRTGHAVGLDFGLKCFLVTSDGDRIEAPQPLKENLEEVQNLHKELSRKQRGSSNRREAKRRLAKKYRQISNQRKDFHFKLARQLFSRYDTICIEDLHIEAMKELWGRKVSDLGFSGFVSILEHVAQKENKEVRKVGRYFPSSQTCSECGHRYSDLSLEERVWECADCGSVHGRDQNAAQNVLERALSMKDHNGPSEAGVRPSGTAARVATAK

SEQ ID NO: 16702 - protein, 425 aa, Bifidobacterium sp.
MDSSRIERAYKFRLYPTPEQESLLRRTLGCVRLVYNKALDARRTAWHEREEKIGYADTSRMLTAWKKTDDYAFLNEVSAVPLQQGLRHLQSAYMNFFNGIGAYPRYKQKRHGGSMEFTRSAFDYQWPYTLRLAKMMDTRLNVKWSRTLPKGAEPTTVTVSLDPAGRWFVSLLVRDDAVEHLPAVDRAIGIDMGLDAFAILSDGTKIENPRYGKRQCKRLRKAQRALARKQKGSCNYEKQRQRIARIHAHEADQRRDFLHKLSTRIIRENQTVCVETLNVKGLSARCKPKPDGNGGYAKNGQSRKRAMNRSIRDAAWGMFLTMLRYKAEWYGRVFQPIDRWYPSSQICSQCGHNSGRKPLNVRAWDCPNCGTHHDRDINAAMNIRVAGLAMIACGDARRSGMQRRAARAESVKQETHAARHGIPRL

SEQ ID NO: 16703 - protein, 395 aa, unknown
  TnpB Polypeptide
VQVRYRYRLCPSPGQQQALARAFGCARVVFNDCLRLREECRAAGERIRDGEVQRRVITVAKRTPERAWLAEAPSVALVQACNDARRAYRNWFDSLSGQRRGRRVGHPKFRRKHGRQSIRLTRNGFALHGSRLYVAKAGDIRVRWSRPLPSEPSSVTVIREADGRYYASFVVERQASPLPACEREIGIDMGLGRLAVTSDGEVVANPRFLQAKERHLARAQRALCRKRKGSANRARARHRVAVLHRKVREARLDHAHKTALRLVRDNQAVYAEDLAVASLARTRLAKSIHDAGWSQLLRLIEQKAENYGRRFRRIGRFEPTSQVCSACGVKDGPKPLSVRTWTCAACGAVHDRDVNAARNILAAGRADKSNVCGGGVRPPRAVAAAKEAGTHRSAA

SEQ ID NO: 16704 - protein, 359 aa, unknown
  TnpB Polypeptide
MVNDCIRIGLETRATSRNRLCQASYRLLKPYGLHTWYSLYAVSVAAGILKNYRCALREGRDERRPRARKLMAEIGSQAFKIEGGRLRIPIQPRKYEFIELDGHTRTALSDLAFKMGSVTLTARTFSISFSKEVTEIEPMGYAGIDGNVDNLTLATSVGEIRSYDLSEATAIKSSYRAVKSHFKHNDIRLRKRVFRKYGIKQRNRINQILHRVSKDIVAKAKNKQLGIVMERLTGMRRLYQKGNGQGKGYRARMNSWSYAELQRQIEYKARWEGIRVIYVPASKTYSTCAICGSEILECAERKVWCPKCRTLVDRDVNAARNILARGLRFGPFALPIEAMVREPFKVIPKVDGSELTQGA

SEQ ID NO: 16705 - protein, 363 aa, Paenibacillus sp.
LEKVNGILITTKIKLLPKQEQYQALKRTMEQFNQACNRISKIAYESNCFSKVKLQQLCYYPIRIEFENLSSQLIIRAIAKVCEAYKLNKKTKCQFKLDGAIVYDQRILSLKGLENVSLATVEGRIKVPMFISGYHISVMQDRRIRGQADLVFVNGVFYLLLVLEIHEGERINTSEVLGIDLGIVNIATDSKGEFFSGAKINNLRKRYSRLRTKLQSKGTKAAKRRLQQRARKERRMARDINHCISKNIVEKAQRHSSVIALENLNGISKNKQKSKTVMKSQRQRLSRWSFFQLRQFIEYKARMNGVPVVFVDPKYTSQECSSCGHTDKENRKTQDQFECVSCGFVANADYNASLNIRRRAIVS

SEQ ID NO: 16706 - protein, 546 aa, unknown
  TnpB Polypeptide
MIGVPSQQYRKKPTMQQTELADLHFVDAKRIKELGNAAELPAYRTMVRCLDETSVEKNREQLEALLRAFGKERQHFIDLLFTRDHRAFCIGNRWRKLRDALVMEKYRSCYGLQARHWKMALQTAAATVSNYWRLVQANALSRIRRKAWFARLNKLEQRYVHFLLGSLSEEFFTMLDGKCPSVVTDTEKEFVASRKGLCKAMVRTIHDEQGKRPKHGRDASVWFDCSCYKAVVVGDQVRLDLMSLTPGVRMTLYVKGSVPVSSTLKLVKHPDGTMALHVQKSLSKADIRPIDSPKASRGKLYCRALDLGLTEVATDDAGNRFGTCLGEKLTGYAQYLDAKLKERNKLMARAQKAGKAKRRRMLRCNLGSKKFTKELQRIRTEIQNTVNKALNDILKQSPAQVYALEDLSHRFTFEGKYSRKVRNLLSKWVRGTIKERFLFKAAKAGVQVVFVPAAYSSQHCPECGYTAGENRQGDRFECKHCGHKAQADQNGALNLLLRVNDPEYRRYMTKEAVKKLERGRYEAWCKSRQEEPIKESVNRKRLKKAA

SEQ ID NO: 16707 - protein, 369 aa, unknown
  TnpB Polypeptide
MPAVGFRFRAYTDQQTLGALKAQLRLACEIYNTLRRADTDFYHRNGRGLTLTELRQLALDLRKRSEGYQQLYSQVAQEIADRFHNARRRFLEGLARFPREKKPHRYYSLTYPQSGWRILSVRDIRVGSRNRKKLITLRLSHLGVFRVIAHRDFPVDNVRRVAVKLTRSGRLYVSFFVEDYEFPRLPGTGRAVAIDVGVEKLLVTSDGEYLPNPRPYRRALRRLRRLQRELSRKVFLSRNWLKTKARLARAYEHLVNLRRDTYMKLGRYLAERYDVVIMEDIDVRRLIGESSRALRRGLQDAALGMMRSIVKYQVGKYGKAFLLVDPRDSSRTCARCGFVNRDLALGDRASSARPAAGGSIAITTRPSTF

SEQ ID NO: 16708 - protein, 244 aa, unknown
  TnpB Polypeptide
MDGKSKRLQVPIILTDYQKRLLTNKLGSLRVSQKSGKYIAQIAIHVPESVARGNQAMGVDLGLKIPAVAVVKDGKTKFLGNGRQIKYSKRKHCSVRRKLGKLKKLEAIRKRDNKEQRWMKDQDHKISRQIINFAQDNNVSVIRLEQLSGIRQTARTSRKNEKNLHSWSFYRLAQYIEYKAVQAGIQVEYVNPKYTSQTCPNCGKRNKASDRKYQCGCGYKGHRDRVGALNIISAPVVDGNSLSA

SEQ ID NO: 16709 - protein, 414 aa, Clostridium sp.
MKLSFKYYSKLNQQQLDIIEELSYHTTKLYNIANYDCRENTVKSYVEMNKLYNNNYHKQFLHSHNYQQCLKLLEKNWKSYFASIKDYKKNPSKYKGIPRQPKFKNTSNKKNEIIFTQHAIRIQDSILKLSLSKEMKSKFQVQSLNFNMKNIKIPVDLTTVKQIKLQWDNSKKIWYLNIIWVKEETDTTKDYDNIMSIDLGLNNLATITFENNIDSYIIDGKYIRSKNSYYNKEIARITSIAMKQSKSSKYFKRTKQLNKLQTKRNNFIKDYIHKASKKIIDLAIFNKCHTIVIGDFKGVKQLNVAKSFVQTPQQQLVDKIKYKAELLGIKIIMQEESYTSGCSALDLEEICKDSYNKNRRIYRGLFKSNKGLLINADINGSLNIMRKYLKCTPRSLVKMMDNGFLNNPIRLRVA

SEQ ID NO: 16710 - protein, 448 aa, unknown
  TnpB Polypeptide
MFSYCADICRKSTYLYNRANYILRQYATAVRDFENLKPLTANQMEVYKSIKSVTESTKYEPKGKWLTYGTLDFYMKQTRDINYYDMYSQASQQILKLLLRNYKAFFNSLKVYKANTDMFTGRPKMPGYKTDGSYTTAILTNQICKIADGRYLKVPGYKYRLNLGNLDEGTSLKEVRIKHSADVFIIDVVLETEERAIMYKAYPELSDEQLMEQFKSCRDSLEYRIIGIDPGLNNFCAVTNNFGDRPFLVNGRTIKAVNNYYNKRLARLKRQAVLCNNREYTRRIGRLTYKRNCMIKDSLHKISRYIADYARDNNVDIVVLGHNVFQKQKINTGAANNQAIVQIPHLVFAGMLQYKLEEYGIRLVLTEESYTSMADFKAGDKIPVFSVDSTEEHVFSGRRIKRGLYRYGDGSTGNADINGAANIIRKVFPNIKEWDIGIVDIPYAVTVA

SEQ ID NO: 16711 - protein, 490 aa, unknown
  TnpB Polypeptide
MTEEKIIRTYAYPCSPNKGKAQKVERVLAEYRKTAQDIAKLQWHEFFRNGKFNKYLKIKALNSLLSARYKQTCQWQVVGVLDGYLARVQEEFEKIVHHSTLNQKSKRVLTAINSRKVWFGKDLETISWFERGDRIDYQVTREEMLLARKIFKSILRKWRRPRFKRIAMHLDAKVAMVEENESSVSFDKWLKLSTLDKGKPVLIPLKNNAYAEGIDGRYLNFYQVQEEDGDLIVRLVKELERRDYRPIVPEIGIDLGLNPLFATDRGDLIGRKFLGFLAKSDDQITKRMAYLQKIGRRPSQDKKYSKLVRRLRDFLENEINRHINRLVELYRPARIVVERLDFRGQNLSRRMNRLLSRFGKRIVGEKLKSLQELYGIEIVETNPAYSSQECASCGYIDEKNRKNTHGFECQACGRKRNAQVNAARNILRRRSVEGITVRTPKKQVLEVLVKRHLERLRGWRSAPLRVLKENPYYRDLRDFLDGLSKPLECG

SEQ ID NO: 16712 - protein, 361 aa, unknown
  TnpB Polypeptide
MLKAYKYRIYPSAEQRIYLAKTFGCTRFVYNKMLAERIKSYEENKTLDIKAIKYPTPAQYKSEFEWLKEVDSLALANAQLNLDKAYKNFFRDKSIGFPRFKKKTNTNSYTTNNQDGTVYIENNHIKVPKLKSMIRIKMHRQLNGLIKSCTISQVPSGKYFISILVETEIIKLPKIDSKIGVDLGIKEFAITSNGDFFSNPKHLKKSEKRLAKLQKDLSRKQKGSNNRKKARIKVAKLHGKISNQRNDMLHKVSSQLVNENQVIVIEDLKVSNMIKNHKLAKSIADASFAEFRRMLEYKAKWYGREIIVAPSNYSSSQLCSSCGNKSSQTKDLSCRTYICPVCGMIMDRDINASKNLLKLAI

SEQ ID NO: 16713 - protein, 404 aa, unknown
  TnpB Polypeptide
MLVKGVVFRLGDGLPPEARFLLEDFRLAVNNAIRVGLQARVTSRNSLSKLAYKDFRQEHPKMYAQHLVSAFEVAGSVLKNLRRRIRKGSAGHVPYVRRLFMKAENQAYKLDRVGGVVDLPIMSGCHVKLKLVLSDYHRAYLNDPSYTLGSLTLLSDRVIIAFRRDAPRSYVPESALSLDTNERSLDGVFARGDNVMAVTAEFPDVAMIQQRHHDRRKRLQKKKAHDRRTSRRLCRREGRREHHRIEYRLHQVANAVLSFAEDQKSAVVLEELKGFKPRWNKELNRRLSLWPRRKLHQIIEYKAQWRGIPVVKVDPRYSSRTCPICGRIQDSRMGTEFECECGWHLDRHINASLNLLQTAISKGVAGGLRFSPGAFQHDVMMILYDPVTGARSEPNGTSCMGVAT

SEQ ID NO: 16714 - protein, 424 aa, Aquifex sp.
MSRAREETKFLLAYKFRAYPSALLEYRMENWLYILCNLYNYALDERKRAWKEGRTITYSDQQNALPKLKEKDPVLKLVHSQVLQDCLRRVDNAFQKFFKKEAKYPKKKKLSKYNSFTFPQVWMKQKDRPVEVIRLEKKNSRFAYLHLPKLGGLKIRLHRQIDWTRAKTVTIKREPSGKWYVCITVEAELDEILREVQGKAVGIDLGVKSLATTSEGDFVEHPKFLSRLEKRLKREQKKLSRKEKFSVNWEKQRKRVARVHEKVRNARRDFLHKLSRHLVNNYDYISFENLNVRGLVQNSSLAKLILDAGWGTLITFATYKAVMAGARVVKVNPSYTTQDCSVCGFRVPKTLAERLHECPECGAVMDRDYNASVNILQKGLTRLKGGRVGATRTNACGEGKKPSLKQESQAGLLGGSNLYRKLLP

SEQ ID NO: 16715 - protein, 247 aa, Pseudomonas sp.
MQQSPGEQTYDFTHSQKKNMSKADRYIKRLQRKLARQQKGSNRRAKTKHRIAVHHAKKANIRNDFAHKTSRLLVDSSAKIIVFEALRTARMTRRPKAKQDEQGRFISNKAKQKAGLNKSILNVGWHVIETYTYYKAYSSSKAVFKIPAPTTSQECAKCGHTHPDNRKTQALFVCGNCGNTDNADHNASLVIKKRAINLILDTGTVLSGDGVLRTQSDSGRGGNRKTGRAKSSTSSAQRSVKKEKLAA

SEQ ID NO: 16716 - protein, 523 aa, Vulcanisaeta sp.
MLRRAVAVELEVTKELNKLLCSVEAAYLSIVREVAEYAVVNNVLSAKQLQGLFYSKYRSEYQDLHAHLIIQAIRQASEIAKSFLRRKRKGLVNKPYPEVRSVSIRFTEKAWSYEQFVGSIAPVRIAISPISTGRGVSGRFEVWLRPHRRFWQYWWRVLNGEAELASTLIVKRKVNKWYAIFIFELKPRVAKPQSIVAFDINENTVAVNRIDLPSTVGKVVDWNRRYLMPQLYAIRTDFGRLARRYERVRNAIIERLKQSFTLPNGKYVNITNTREFRKRVKRLREGDRKVGRVRQVANELTKAPAIIITEELGNNPQESMINEIRRNETRHRIKQTPFKALERVVEDKALERGSKIFRASSYRNSRVCPIHFTRLERTDDWHVLKCPLGHYVDRDYASVMNMAWKITPEAWIKGVWWDLRKKMGWREYEQKSNSLVPYGIVTLLQHIMENTKASLKQSPAVLARGKPMNPAGRADEGRARKPPKKGGGQHIHAYVVDSPKNLPKYYYRNSHKGEVKRQRKYYP

SEQ ID NO: 16717 - protein, 374 aa, unknown
  TnpB Polypeptide
MIIYKTYKYRIYPNETQIILLSKHFGAMRFVWNHFLNLRKQSYLESKKSLTFYDNSKTLTLLKKEEQYIWLNEIGSQSLEASLQDLDTAYGMFFKKLSAFPQFKSKNKCVDSFRCRQFIKFKKNNLVIPKFKEGIKVNIHRKMIGKICFATITHTPTDKYFASITCEVEHMPLVSTGRQIGIDLGIKNLAVCSDGTVFENIKTTKKFEKKLAYEQKQLSKKQKGSKKRQQQKKRVAKVYERIRNKRLDNLHKLTSSIISKNQTIIIEDLNVSGMIKNHKLAKSIADASWYGLCRQLEYKSKWNARDFIKIDRWFPSSKTCNNCNYINQNLTLKDREWVCPQCNATLDRDLNAAKNILKQGLMMLSGSGVESDIK

SEQ ID NO: 16718 - protein, 377 aa, Erysipelotrichaceae sp.
MYPTNEQVAKIMIFFKAKRFIYNNYINEMKKIEVARNKLEYLYSFEKFHEDLIKLKKEYPWLNDVDGCIIRTTLQDVNDAYEKYYHGEASYPKYKSYYQSQTYKTVCIYHNYRKNKSQSIEVNLAKKIIKLPKLNEVKISGYRKLINFEKLILSVTVKKIGKKYYAQVLVKENWKNEVSTKFSNNIVGIDLGVKNIVTTSDGVKYPGLNISRIQNQIKLLQKRLSSSQPGSKNHEKITLKIQRKYQVISNRRLDAINFITNDLVKKYDILVVENLSVKEMLQKSNSSLSDKMQNSSFYEIIKQLERKAYLYGKKVIKIDKFFPSSQLCSKCGYRNKELKNIDIRTWVCPKCNSHNDRDINASINIMKEGKKIMENNC

SEQ ID NO: 16719 - protein, 429 aa, unknown
  TnpB Polypeptide
MAIQLKAYKFRLYPTPDQETLLNKTFGCVRFVWNKLVENFNSWNPDFIPPRLDSKILKDNPEFSFLNEVSAGALQQKNNDFLDFKKQYFNKSRKKKLGKPNFKNKKSRQSYRLPGKKFTFNQESSTIRIEKIGKVSIRLDQKIPEDAEYRSVTISKNPSGKYFASILVKINIEPKPLTGKMVGIDLGSKDLVILSDGKTKVKNPKYYRENQAKLKRAQQHLSRKQKESSRRNLQRIKVARIHEKIANKRKDLLHKTSIELVTNFDIICVEDLNVAGMVKNRKLSKSIHDASWASFMIMLEYKCNWYGKTLVKIDQFYPSTKLCGHCGYKLKEIDLDTREWQCPECRTFHDRDINAAKNILAKGFSDLTGQPIEFPGISEKPGSVESIEYRRGENVSGQLVVPVLDEASRTLFSTGFPTTPHIFTKSGRG

SEQ ID NO: 16720 - protein, 494 aa, Bacillus sp.
MNDYRRTKTTISLINYHFVFYPRYIRKIFLNTKVEERFKELVQEICNELDIVIVAMECDTDHVHLFLNTLPTLSPADTMAKIKGVTSKKLREEFPHLQHLPSLWTRSYFVSTAGNVSSETIKHYVESQKTRGVKFVTQTITVKAKLLPTKEQIRLLKQSSSDYIKLINTLVFEMVESKQSTKKSTKDIEANLPSAVKNQAIKDAKSVFSTKVKKNKYKIVPILKRSVCVWNNQNYSFDYTHISIPFMVNGKPTRLKVRTLLIDKHNRNFDLLKHKLGTLRITKKSGKWIAQISVTVPTIEKTGTKILGVDLGLKVPAVAITDDDKVRFFGNGRKNKYMKRKFRSVRKKLGKAKKLNALRQLDDKEQRWMQDQDHKVSREIVDFVTNNTISVIRLKQLTNIRQTARTSRKNEKNLHTWSFFRLAQFIEYKAKLVGIKVEYVTPSYTSQTCPKCTKKNKAQDRKYKCQCGFEKHRDIVGAMNIRYATVVDGNSQSA

SEQ ID NO: 16721 - protein, 376 aa, unknown
  TnpB Polypeptide
MKLTAKVKLTPTDTQADSLKRTLETGNAACNQISGVAWDSQTFGKFQVQKLVYHDVKAIFDLTAQLVIRCIAKVTDAYKLDKKTKREFRPLGSIAFDNRILSWKLDKNEISIWTVDGRQKIGFVCHARAKELLLGAHGESDLCLIDGEFYLFTSCQVEEETPKDVDDFLGVDLGIAQIASDSDGNQYSGKQVNGLRYRHARLRSKLQSIGTKSAKRLLKRRRRKELRFAKNVNHQISKELVGRAKDTNRGIALEDLTAGAHWARERVTVKKARRRQHSSWSFFDLRAKIEYKAQLHGVAVVLVDPRNTSRTCSSCGCIDKANRKSQSNFVCVSCGFVSNADTNAAVNIRIRGRALVNAPNVSARKIASSQGQAHEL

SEQ ID NO: 16722 - protein, 202 aa, unknown
  TnpB Polypeptide
LDARVGTQATLHNRDGTYYLHHVAVEEEVEPADSGDEQTENGVVLGVDLNVDGYLAVTSTGAFLGNADSLDHHRDEYERRRGNLQQTGTRSAHLIIKSIGSRFARWSGDYLHRVSKATIQKAVENDCTAIAFENLKHIRERISNASQFQQWAFRELHRHVEYKAKEYGIDVDDVAPAYTSQRCSHGECGPTRTTVMVTSLSA

SEQ ID NO: 16723 - protein, 442 aa, Burkholderia sp.
MQRYQAFKYELMPTDEQQHSMRCFAGACRFVFNKALAVQKERYDRGEKNLSYAGLCKLLTDWRNGTETPWLKDAPIHPLQQSLKDLEQAYTNFFAKRADFPRFKKKSLGSSFRYPDPKQIKLDQSNNRIFLPKLGWLRYRNSRDVLGEVRHVTVCQNAGKWRVSIQTVREVKQPVPQAASAIGIDMGIARFATMSDGSFLAPLNSFRRHEAKLRRAQQALSRKVKFSNNWKKATARIQRIHARIGNARRDYLHKATTTISQNHAMVCIEDLQVRNMSRSAAGSPDAPGKNVRTKSGLNKAILDQGWFEFRRQLDYKLAWNGGWLVAVPPANTSRTCPACGSVSAENRQTQAAFHCVGCGHEDHADVVGAINILARGHRVAACGEPAQSGHSAKQEPTEAIRDTHHRSRRGRNPRSFRQMAAARGPEWGGCQRYVSMEDCALD

SEQ ID NO: 16724 - protein, 314 aa, Microcoleus sp.
MEKQVLTIVCKINPTPEQVVKIEATLQAFADACNYINEVIEPKITHNVTIQNQVYGEVRERFGLASNLAIRAINRVSANRKTAKRMNKPVKKFLPTSADYDARIFSFREKDWSVSLTLVGGRERFLVDVGSYQKGKLSGFTPTSAILVKHQNGTYSVNIQVKNDAPSPQKSQGVIGVDLGRRDVAATSEGESFSGQQITEIRDKYSRVRASLQKKASEGTRSTRRRARQILQRLSGRERRFQSWVNHNVSKHIVGKAKQSECSIAIENLTGIRERTNEQPRNKTERRRSNSWAFFSYECSWTTKLLVLELKSSK

SEQ ID NO: 16725 - protein, 394 aa, Streptomyces sp.
VKRAFRYRFYPTSAQAAELSRTFGCVRKVYNLALAARTEAWARQERVNYNATSAMLTEWKKTEELAFLKEVSSVPLQQCLRHLQAAFTNFFGKRAKYPRFKSKKKSRRSAEYTTSGFRFRDGRLTLAKMAEPLDIVWSRPLPEGASPSTVTVSQDAAGRWFVTLLCEDAAVQPLPAKGTAVGIDVGLDHLLTLSTGEKIANPRHERRDRVRLAKAQRALSRKAPGDGANRRKARQKVASIHARITDRRRDGLHKLTTRLVRENQTLVIEDLTVRNMVRNRSLARAISDAAWGEFRSLLEYKAAWYGREVVVVDRFFPSSKLCSHCGSLVKKLPLNVRTWTCENCGTAHDRDVNAARNLKAAGLAVSACGAGVRPQRRTPGGRSAAKQETLRREP

SEQ ID NO: 16726 - protein, 371 aa, Paenibacillus sp.
MAKYNKAYKFRLYPTEEQAHLMRKTFGCVRFVYNKMLAERKEVYEQFKDDKEALKKQKFPTPAKNKDEFVWLKEVDSLALANAQLNLQTAYRNFYSGTTDFPTFKSKKARKSYTTHVVNGNIMLMNGYIKLPKLKRVKVKQHREIPAEHIMKSCTISMTSTGKYYVSILTEYEMERIQKQVQTVVGLDFTMAELYVGSEGEKANYPRFYRQMLDRLVKAQRTLSRRVKGSSRWNKQRMVVAKIHEKITNPRKDFLHKESHKLAKRYDGVVIEDLNMKGMSQALNFGKSVADNAWGMFTTFLQYKLEEQGKKLIKIDKWFPSSKTCSCCGKVKESLSLSERIFHCECGFVSDRDGNASINIRSEGLRLLEQL

SEQ ID NO: 16727 - protein, 416 aa, unknown
  TnpB Polypeptide
VFAAAQWFAESPQSAYRHKGIMGVMERLQAFKFELQPNGEQAQQMRRFAGSCRFVFNKALALQQARHAQGEKKLSYAGLCKALTEWKAQPETLWLKQTHSQPLQQTLKDLERAYVNFFEQRTDFPRFKKKGTGDSFRYPDPKQIKLDQANGRIFLPKLGWLRYRHSRDTLGELRNVTVTQSGGKWFASIQTRREVPAEQPTGGMIGLDMGIARFVTLSDGSHLDPLNSFKKHQQRLKRYQRRLARKVKFSQNWKKAKAKVSQNHAIVCIEDLQIRNMSKSSKGNAETHGKQVKQKSGLNRAILDQGWGEFRRQLDYKLAWRGGHLIAVPPHNTSRTCPACGHVSKENRRSQAQFACVACGYQNHADVVGAINVLERGQRLLACGEDGSGRGRKTPTKPASVKQEPTEATMHEVSHA

SEQ ID NO: 16728 - protein, 463 aa, unknown
  TnpB Polypeptide
MTLKLNYQYRLYPYTVQIQKLNEWLRICRYLYNSWLGQCLDWWQRNRCPIDACPLVCHLPELADNPYFTDLKKQLPVLKKDLVIVLWSGELLDLSSVYSTVLQDVYTSRLKKAMDRFIQGDKLGLRSGRPRFKTQASYRSFKFPQANNDWIDTKNHVLKLPFIGGIQLRLHRPLPDGFELKTVQVIKKNDGWYVNLCLEDPTVPVFKPDEVIPTWDNSMGLDAVLYGEDYFATSDGEKFPAVKNYRSSELKLNKVKSRRSKAKRGGIARRRLAKRVAKEEQRIARARLDHAYKMSHRLVRTGKKVFFHEALDLRNLTKRNKPKQDESGKFLPNGQSAKAGLNKSWQDAAFGQAFQILEYIAEKAGARVIAVNPAYTSQLLAYRDEFVFTDCSIREYWDDVEKLWVDRDINSGINLKRVGLDVFPTINRRSRKITSSRTHSTAMEVLRSLRGFEKPTLTATAQV

SEQ ID NO: 16729 - protein, 154 aa, Halomonas sp.
MQAPQFLHNLLTSSLPAIHAKRHAKIADARLDHLHKLTRQIVNENQVICAESLAVKNMVKNRSLAKAISDVGWGELVRQFDYKAAWAGRQLVQIDRGYPSSKRCHGCGFAVESLPLNVRIWDCPDCGTQGIDRDVNAARNILQAGTALLAGAES

SEQ ID NO: 16730 - protein, 370 aa, Halomonas sp.
MKAERAYKYRFYPTPEQEILLAWTFGCVRFVWNAVLRYRTDAFYQRQEKIGYNDASAFLTQLKKQPDTAFLAEVSSVPLQQCLRHQQSAFKHFFAKRARYPRFKSKKQRQSATFASSAFAYRNGQVTLAKCQEPLSIRWSRVLPSAPSTVTVSQDRAGRYFISCLCKVETLSLGVVPKMVGIDLGLKDLFVTSDGKRVNNPRHTARHARKLARAQRQLSRKQKGSNNRAKARRTVARRHAKIADARLDHLHKLTRQIVNENQVICAESLAVKNMVKNRHLAKAISDVGWGELVRQLDYKAEWAGCQFVQIDRWYPSSKRCHGCGFVLESLSLDVRIWDCPGCGTQGIDRDVNAARNILQAGTALLAGAES

SEQ ID NO: 16731 - protein, 384 aa, unknown
  TnpB Polypeptide
MTTYKFKLYTSKKNKYLHNQIDVAAEIYNHCIALHKRYYRMYHKYVSNYTLQIHITKLKHLPKYKHWYLLGSQAIQNITTRIDRAYQLFFRNLRYNIKTAPPNFKKRRIYKSFTLIQSGYKLLDGNKIRLGIQVFKYSKSRDIQGNIKLLTVKRDKSGDIYIHITTDYIKTEVVPLTGKSVGYDFGLKTFLIASDYQDIESPMFFNKNRAAIRRANRNLSSKQRGSHNRRKALLNLERVHKKVVNQREDFQWKLANTLTDNYDTMYFETLDLASMKHRYGRKVSDLAFYSFMQKLQYVATTKGKIIICIDMYEPSSQMCSVCNYRYRDLTLDEREWHCPICNTQHDRDRNASYNILRVGASTLAVGSISLNPEQPPLIAESHEL

SEQ ID NO: 16732 - protein, 416 aa, unknown
  TnpB Polypeptide
MAIEVTRTYVGSIQNQRQVKSGLDSLGNSASKIWNVARWTADRVWDATGEIPNEGVLKSYMKNQACWKDLNAQSSQKVIEELSDAFQSWFDLRHKDDTANPPGYRKHGDTRLRSTVTFKIDGFKHDPKNDRVRLSKGSNLKESWSDFLLCEYQTRPDVDLSEVNSVQNVRAVWNGGEWELHFVCKVALETSDSAGDEVAGIDLGITNIATVAFPNEYVLYPGNSIKQDKHYFTRAEYDTEGENGPSEKSMWARQKLADRETHFYHALTDTIITECVERGVGTLAVSWPEDVRESDWGKTGNKKLHTWAFDHLYQYLEYKGEIRGVEVLKENEWNTSKTCSRCGDATKSNRVERGLYVCSACELVGNADCNGAENLRQKITSSPHGEDRSTGCVAQPSTHLFDRESGTFKTREQVVS

SEQ ID NO: 16733 - protein, 441 aa, unknown
  TnpB Polypeptide
LKAYKYRIYPNDDQKVMLAKHFGCCRYAYNHFLRLHNEMYEISGVSPSLFEMHRLVAEMRKDEDTKWLSEVYGHSLQAALRNLDEAFKRFYKAIKEGKAEPVIKNGEPTGRFKYEPKFKSKRDANQSATFPDNVKVRGESLILPKVKTPIKMKMHRPLGGAIRKTVVSVNARGKYYVSILCQEPCEPLPRNDNAIGIDLGIKELAVCSNGERIANPKFLERGERHSKYLNRQLSKKKRGGSNRWRARMELSRHYERVANRRRDYAHKFTTRIVRENQTVCVEDLNVQGMQSNHCLAKSVSSAAFGEIVRQLEYKCKWYGRDFVKVGRWYPSSKTCHHCGYVNHGLTLKNRVWICGGCGREIDRDFNASENIRDEGLRILSGAGAASDAKQKGGEASCPKDESASRRKFSGESTEAHELQPWVAHRRIPQLQRNRIQGRAAG

SEQ ID NO: 16734 - protein, 479 aa, Alcaligenaceae sp.
MQIGNRFRCYPTPAQAQTLLAWIGCQRFIYNAKVGEDRYFRRFARQSLSHTGAFAPIDQQYSHFKTEQTPWLGGVPSQILRNGAVLWKQAYGRYFSKLAGRPTTHRKTGEQSVWITSELFTFKPVLNKDTGEISSHTLHIGTPKFALGQIKFTAHKDFKPAASIHISIHAGRWHVSFNYDDGVPEPSVQQTTEYLMQFTERELAAVTVGLDRGINIPLAASDGQTFGFTAIQDKRLLAHERHKTRWQRRQARRSKGSKNWAKAKRKVARYQRYGADVRRDVAHKTSFNLATDPRYKLFVFEALKVANMTKRAKPKQDEQGHWIKNGAAAKSGLNKAILASTWGKTKEFLGYKARRSGKLAIEVPAFYSSQECAACGHTHSDNRVSQAEFVCQRCNHTGHADHNAAAIIAKRGVRLVLSGACVQKKSKKCGILKNKVGEVISEPVASVPSTLGETEVSRLGGNIPAHWSLTQETPATAKA

SEQ ID NO: 16735 - protein, 401 aa, unknown
  TnpB Polypeptide
LRAYKFRLYPSAEQEEMLSNQLELCRDLYNAFLLERRYAYRGSRKSLTYNRQQNEMPELKNTFEEYKEIHSQVLQDVARRVDRAYQNFYRRIREKEQGIKKKAGFPRLKGMGRYRSITYPQSGFEIMENGHLKLSKIGRIRMFKHREIEGEIKTLNISRDSTGKWYASFSVKQDIVALQPEKTGNSIGIDAGLLHLITMSDGTVIDPPKFLKKGDKRIRKAQRNLSRKKMGSNNRIKARINLSKQHRKVKNQREDFAHKLSNRLVQTYGLIAFENLNVTGMMKNHHLAKSIADASWSTIVQYTTYKAESAGREVVLVDPGNTSRQCQNCGYSKESMKLSERTFHCDSCGYEIDRDLNAAINIHNRGLEKVGRGTPEVTPVETGVQLSFRMVQPVREAGSPV

SEQ ID NO: 16736 - protein, 405 aa, unknown
  TnpB Polypeptide
MRRALPLKAYKYRIYPTDAQMDFFAKTFGCCRLVWNKMLDKKLHAYKKKERIPRPTPAKYKEEFPFLKEVDSLALCNVQLQLEKAFRDHFRNRKQFKLPKFKNKKDKQSYTTNNVQNSIRVDFEKSLLYLPKIREGIKIEPHRRFDGKIKSVTVSRTNDGKYYASILVETENRRNKVVEPKSKACGIDLGLAHFVIVTNDFRSYKVEHPKYLRRGEERLKRLHKSFSKKQKGSKNSGKARLRLAKQHAYITNARNDFLHKLSKAIIDENQVVVVEDINVKGLLKSRLSKSIADSGWSKFLSYLKYKAEWYGRTFIQIDRFFPSSKLCHRCGHKNEDLALHDRRWCCPECGETHDRDINASINLYFVGLGRPEVTYFEQALVDDRSPDGLSKKPSCDEAGSSTVKD

SEQ ID NO: 16737 - protein, 380 aa, Nocardia sp.
MGSRVVKRAYRYRFYPTTEQEQQLSRTFGCVRYVYNRALAERSRAWTIEQRRVTHAETDKMLTSWKRDPETVWLAEPSKGPLQAALRNLQSAFDKFRRKQAGYPKFKKKGWSTESATYFSNCFTYRDGHIKLAKQTEPLNIRWSRPLPEGTIPTQVTVTKDARGRYHISILVEDTVTGHEPTDTTIGLDAGITSLYTLSTGEKISNPRYEKRDRERLVRAQRILARKQKGSKNKAKARLRVIRIHARIADRRRDHLHKLSTRLVRENQVIAIEDLSVRNMVRNRRLARAISDASWSRFRTMLEYKASWYGRTIVTVDRFYPSSRTCSTCGHINKTMPLHIREWTCSCGAFHDRDVNAAKNIHAAGLAVLACGDGVRPSRS

SEQ ID NO: 16738 - protein, 508 aa, Caproiciproducens sp.
MTFKTLVLQIYKPTRQKKELMDTALLRYSQAFQFLMDRYRKELEELAESKSAITQRILFNLIDKETAKKLNDYDVQPFKDSLKIEFAAVSASYIAQKRKNPSARYPLLFLDDTRFASEIADCIRQFDGVRIPPQIFAYRCSKLISQKGNLRSLYFGRYAMNRNYCLLYDEFKDRFYAKLYLLNRKESIPVGNWASGLCLKYVWAGMPPLIPKPGRRSYIVVPLAFGKRQYADLKKTLENPGMLHSARLVKRERRYYLMINMECGQRDALTVATTMGVARNMPGGLHYTVCGENGEIQENGRICVAPNKEDLFHLANKIVGFAENYRSQVVMEANGGRNDQLPLLPEEALSADQYGALVKLLKYKLPERGLPAPIEVSANGLFHTCPACGKRTRRNLVSSELFICIYCGYASELEWIGSESLAKRLEQYHHDKIPLSIRKTEDGLLCFNKVLGFECLLPQGGTDYTPVYDRLRQFLENMDGEFIDDPKKYAVWRKLFYAANLKEAVRFC

SEQ ID NO: 16739 - protein, 384 aa, unknown
  TnpB Polypeptide
LLKSFKTEIDPTKEQKTKIHKTIGTCRYIYNFYLFHNKERYDAGKRFMSGKAFSVWLNNEYLPNHPEYSWIRKVSSKSVKNAIENACTAFLRFFHHQSGFPRYKKKGRSDVKMYFVRNNPKDCFCERHRIKIPTLGWVRLKEKGYLPTSKDGYVIRSGAVSMKAGRYYVSALIEVPAPEVGKNFSDGIGIDLGIKDLAIVSNGTIYRNINKTAQIRKLEKQLRRGQRKLSRKSENLKKGEFTQRANIRKQKLKVQKLYHRMENIRTDHINKAISEIVKTKPSHITIEDLNVSGMMKNRNLSKAVASQKFYEFRMKLKAKCAEYGIELRVVDRWYPSSKICHCCGCIKKDLKLSDRIYRCVCGYTEDRDFNAALNLRDAKTYEIA

SEQ ID NO: 16740 - protein, 382 aa, Bacilli sp.
MEIYKAYKFRLYPTYDQKILIDKTLGCKRFVYNYYLNYLKENKGKSKYDLYKNLPKLKEENEFLKEVDSTVLRSAIDDLCKAFNDYYAKRKGYPKFKNRFSKQSYRTSCIRSRHKEKKYSNIEIDLLTRNIKLPKLGKVKIRGFRTKDKIEGKILNATIIKDVTNKYYVSVVVVEDLLVEKVIPTNIVGIDLGIKDLVITSDGIKYCNEKVLTKYEKRLKRLQRKLSRQVKGSKNYLKTKEKIARIYSKIKNYRKHYLNEIANEIVDEHDIIVTESLLVKDMFKDKRKAFNKSLSDACVSTLRSLIEWKCKLKGKIYYKINTYYSSSQICSHCGYKNSKLKDLSIREYDCPNCGSHNDRDINASLNILFEGLKLHYNLVSLL

SEQ ID NO: 16741 - protein, 410 aa, Limnoraphis sp.
MLTVTYEYKFYPSQEQIATIEDMLAVCRKVWNYALRERKDWINSRKCAINSCSLQQEYIISADAPYPNYNVQAANQTSLKKTNPELKKVNAQVLQQVLKTLERAFNNMKEQGYGFPRFKNKYRMRSFVFPQLKTNPVSNDWIKLPQIGLVRMRLSRPMTEGFKLKQVRVVRRASGYFAMLSLQSPVNIPDTAASGHPLGIDVGLDKFLATSDGELIERPKFFNQLHSKLKLLQRRLKLKTSSSTNRHKLNQKIARLHQKISDSRKDFHFKLAHHLCDQAGMIFVEDLDFRTWAKGMLGKHTLDAGFGQFFNILAWVCWKRGVDFGKVDYRYTSQICPHCGAHTGKKDLAERIHKCRSCQYEINRDVAAAKVICNRGVTAVGQIVEEIDCVGVLSGVGNSLDKCRKSSKPK

SEQ ID NO: 16742 - protein, 395 aa, unknown
  TnpB Polypeptide
MRRTVKIKLELEGQEKLQETVRQFKYACNQVVDEGWSGEGLKTYNKNKLHEGTYHEIRDETELPANLVTQARDRASEAIKGCVEKLKNGEEASKPEFTSDSIRYDKRTFSVWLEDKKATFSTVDGRIRAELVYDENKEYYQKYLSEDWEVTSSTLEKHSYEEGSPYYLHLRVEKEIETKDVGNPRVMGVDIGLDNVAVTSTGRFWSGNNFTHQRRRYEEIRGKLQEKGTRSAHQTIQDMRGRENRYSCDTLHRISKEIVEHAEDKGVDVIVFEDLKEIRKDISKGKKFQQWCFNKLFRFVEYKAEEKGIKVEKVSSAYTSQQCSDCGHTTKGNRNGSKFKCVNCGKELHSDYNAAKNIAKKFLRNGQKSSMRKSHGQLALKSGTVNLNGGYTAYA

SEQ ID NO: 16743 - protein, 370 aa, Chlamydiae sp.
MKRTISIRLETCSLQDQKFYDLQDAYCKACNLIVPAVIENRCWNRFSLHHLVYSHVRQNSLLGSQMVCNAIFSVCKAYRVKVILPNEEVPLIEFRQNRSIHFDKRTYKIKGETLSLYTLEKRIQVKMRFGPFQKQYFSRGIPKEGELICKKGRWYFNLVLDFPDPPIQENLNLLGVDLGENNVFAVSSGKVVSGGKIRHKRDQFLAKRRRLQSNGSQSAKQLLKKISGREGRCMRQTNHELSKEIVEEAIREKAGIIVLEDLTNIRKRIKGGKRLKTRLHRWGFRQLQTFIQYKAEAKGLRVMYINPAYSSQECSLCGCLGVRERHLFTCLCGNQQHADLNASRNHCRFALGTPKATCAVNRTQVVALKG

SEQ ID NO: 16744 - protein, 431 aa, Persephonella sp.
MSVTILKKQKIKESLKKTKEKRKNQIPKVYQLKISYSNLNKDQKQWLERIFLEAKWLYNYCIADIQNRLNSKTEKSKQVEIKTPNGFETREITCLSSQMKQAVLDRIKKNLTDLSKAKQKGIKVGKLKFKSDYRNIPLKQNGITFKVLKDKNRIKIQGLKKPVRVLGLHQIPENSEIAKAELIKKPDGYYIYLTCFIDKNQTKEKKIKKPIAIDFGIKHQLTLSNGIKINYSVEETKRLKKLQKKLSKQKKGSNNYFKTKYKIQKEHQKIYNKRKDIQNKIFSLLKKYEYVLIQDEAVKQWQSGLFGKQVQNTGIGEIISRLKNNPETLIPVGRYEATTKICSNCGSRKEDIELSDRVYKCNSCGLVIDRDLNSAINILKIGLEKVETTTIKNLLTDCGEVTPVERKVSARILGSNPYIRVSYASVKQEAT

SEQ ID NO: 16745 - protein, 464 aa, unknown
  TnpB Polypeptide
MARSLGYWGARHHWEISRTRRFGTRAGFGRTHGISHGKVSGEVQRKHFLRNVPSAQKQQRIETYGCVAEWKRQQGYAVQESVTHVSMEIIKNMQGEIMEYSYKFRIYPSYSQTCLIQQIFGCCRFIWNYYLRMRQNAYEQDSKMMNYCECSADMTQLKKFLPWLRVADSTALQSSLKDLDDAYQNFFRRVKNGMPPGFPRFKSKREHRQSYKSKGGIKVFEDAVQLPKLGRVKCRVSKEVKGRILSATISKNPSGKYFVSLCCTDVEIEPLPKTGAVIGVDMGLKAFAITSDGIEYPNPRYLAKNQKKLARLQRQLSRKSKGSNRREKARIQVARLNEHIANQRGDIMHKLSTQLIRENDVICIEDLAPRNMVKNHHLAKSISDAAWGEFRRQLEYKAAWYGKKVIAIDRFFPSSQLCSCCGYRNTGTRNLAVREWTCPECGTHHDRDVNAAKNILHEGMRLLA

SEQ ID NO: 16746 - protein, 370 aa, unknown
  TnpB Polypeptide
MERAYRFRIYPTTEQENLICRTFGCARFVYNYFLAERIAQYRENGKAPTRFRQDKELTHLKESLEWLKEVDATALQSSLKDLDAAYQNFFRRVKSGEKPGFPRFKSKRDHRKSYKSKAVGTNIKVLDGAVQLPKLGKVKCRISRKVEGRILSATVSQNPSGKYFVSLCCTDVEIELLPSTGAVVGIDMGLKAFAITSDGVEYQNHKYLSKNQKKLARLQRQLSRKSKGSNRREKARVQVARLHENITNQRSDMMHKLSTQLIRENDVICIEDLAPKNMVKNHRLAKSISDASWGEFRRQLEYKAAWYGKKVIQIDRFFPSSQLCSCCGYRNTGTRNLAVREWTCPECGTHHDRDINAAKNLLSEGLRLLA

SEQ ID NO: 16747 - protein, 439 aa, unknown
  TnpB Polypeptide
MVTGRKYRAKAMGKESREMFITWSAAQMLTYNALVQEREYFLCFYQKFGGRLPPIDQKYAHLFNLKDEEFAWMSPLPAQVFRNGAVLHKKAWSNCFTGVTRKPRCKKISGAPRSLWLTRELFSVRQVSKRWYELSVGTKTIKGGKFLFKAHRPFTAPASIYLTGTASELFISFSCEEETEHYPETLEEKLARLSQYDQEELRGISLGIDRGVVIPFQLSDGRRFDYSQTQRDRLKAYERRKKHYQRMMARRIKGSSNWKKAKAKLHQCYRYSSCVRKDFAHQTSHVVVSDKTVEIIGMEDLKIKSMTSSPEAKASEDGKFLPNGAKAKAGLNRAILEKAWGLTENFIKYKSRRAGKLLIKVPAPYTSQTCSRCSCQAKNSRKSQALFRCANCGFSQNADRNAAENIRFCAVELLRAGGIKPKEVRKTMRLRRKRACAEA

SEQ ID NO: 16748 - protein, 440 aa, Microcystis sp.
MYGVQQVLIHADSEIRAILEFICEEANKLANCGLYYCRQMLFKAGRYVKKYHLDSQMKNHPHFRSLRSCCAQQLLHDVAESFSSYKGLLSLWNKGQLPNKPKPPKYRKKGGMAVVSYPSRYVKQSEKGLKFSLGEQVKAWFGIDSFYLPMPSNLRFEDIKEFRLVPRNLSFYLECVYEQPAQEKVKPNNKVLGIDHGLNNWLTCVSNTGKSFVIDGRKVKSQNQWYNKRIAQIKTGKPQGYWDQELAILTEKRNRQMRDNVNKAARFVINWCLNNDISTIVFGWNQRQKDSIELGKKVNQEFVQVPTAKLKGRIKQLCEQYGINFIETEESYTSKASFLDNDLLPKFGEKPEGWQSSGKRIQRGLFKAFNGQLINADCNGAANIIKKVATQLGVSLDKVGRASLTVPQRYKLDRLSKIYRNRIEAQFQPASIHHKESLLF

SEQ ID NO: 16749 - protein, 406 aa, Streptomyces sp.
MATHVKRAFKYRFYPTDAQAAELSRTFGCVRKVYNLALAARTEAWYQRGERVNYNATSAMLTAWKKTEELAYLAEVSSVPLQQTLRHLQTGFVNFFAQRAKYPRFKSRKKSRASAEYTSSAFRYKDGRLTLAKMTEPLGIVWSRPLPEGAKPSTVTVSRDAAGRWFASVLCDDPAVKPLTATDTAVGVDVGLDHLLTLSTGEKIANPRHERRDRDRLAKAQQNLAKKAKGDGANRAKARRKVARVHARIADRRRDMLHKVTTRLVHENQVVVIEDLTVRNMLKNHSLARAISDAAWHEFRTMLEYKAQWYGRELVVLDRWFPSSKLCSTCGTLADKLPLNVRTWTCDCGTIHDRDVNAAINLKAAGLAVSACGAGVRPRRRKPGGQSAMKQEVPRSDPGRASGGRP

SEQ ID NO: 16750 - protein, 383 aa, Oscillatoriales sp.
MLHKAVKIRLYPTQEQQILLSQHFGCTRWWWNYALNKLTTAYKNFFAGRARFPRYKSKHRKQSLQYPQNVKVLEGIVQFPGKVGKIKAKLHRNIEGTIKTVTISREPSGKYFASILTESEGENPAVSTEGKVIGIDLGLTHFAIVSNGSKISKYDNPRHLAKHEKNLKRKQQKLAKKQKASNSRIKAKKTVAKVYERVANSRQDFLHKLSRKLVNENQVVVVENLNVKGMVRNQNLAKAISDVSWGTFTNFLGYKLEKKGGKLVEIDRWFPSSKLCSNCYCQIDKLPLNMRQWTCPHCGTRHDRDGNAATNIRAEYRSPHYNRFDLAWVVHLSYVGLNTHDCKAMRQQRELISSPCDCFTSFRNDNSASCLLKRRSLNHWLKI

SEQ ID NO: 16751 - protein, 330 aa, Fischerella sp.
LQCVAINLNKAYTNFFEGRAKFPGFKSKNHRQSIQYPQNVTIVKDCLNIPKIGKVKAIFHRAIEGKIKTVTISKTPTDKYYASILVENNGKNNQVSGDKIIGIDLGIKDFAIVYDGEQVAKYSNPKHLKRHERNLARKQKKLARKVKGSKSRNRFKKLVAKVHERVSNSRQDFLHKLSRKLVNESQIIVVENLNVKGMVRNRKLSKSISDVGWGMFVNFIAYKLKAKNGQLVEIGKFFPSSKTCSYCGHIVDRLPLDIREWDCPACKNHHDRDANASKNIRAEGIRILSMGGGNPVLAEQRRSKTNKPQGGKASVDEAGSPHLLRQQKCG

SEQ ID NO: 16752 - protein, 1407 aa, unknown
  TnpB Polypeptide
VARGGPGAGGRAQRRALRARRRGLRPAGVLRLGHRDAEHRRSRRARGAARQLPYDRPLLTDPGVPPHRAQPPQQRHGSHRRPRHGLPRLQRDHPPGERLPLGDPGRPGLRHPRRRQVAPHAGRRDPHGGAARLVAGRSGLPALVRVPRRRDPPVRALALRGQPRHVPEQEHRGGLPPERGPGRPGRPLRGRPPGGRRGPAVLPLLLHRRLPLPPPRPEGVDRPLPGPLRQGLGRLARRDVRPAARAGRRPARHPALAAPAVGPGLGRPRPSRPAGGGPLHGVLRRVPLLHRRPDRSAARVPGHDRRPRQHGDRARVGQRGERRRRQARLDQRRPPREHGLVDPRGAPGPHRRARRAERPQQLPVGLDDGRQHAVQALEARGARGRGLRPVHRGPAGPVRRGRRRRATPVRPRHRRGADAPRADRDRGAGPPRLRPAAADRRHELRLPPRRRGGPGPGPPHDAVLRDVRLPGPPPRGLEGGDVQAHRPALQRRDRHEHAVRRRPLGALPRRRGPLRDRGPRREGARAARGHGGPLVGRGRAPPGAPARQPGPLDDPQPEARPPPAPSHVHLLPGRRPGPRGRVRRHPQPLAPGRRRRHGARGPAARRGAARRGLGPRRLVAPPPRRAADLRPQPLRQGALPGGGHRRRPARPPHPLLRLRPHGRAPGPRPAPRRRPGGGRGADPPLHALGLQQPRRRPHVRLRARAGHRRRLRGPVPLHRPRPLGDGDGRGPGGRGPRGPLHGHHVRAVGGPFRRPGRARHRGGPRAGRGRGPPVRGRGGDGRARRRARRARRGAGRRARGEDPLPAPRRGRRGRLGGDGRMDRRDPRPPRRAREQRRHLPGGPHRGHDPRAVPAHRDRQPGGLQARHEGGPPAHEGPWRVDRQHLLRRRPGGLRRYVSLRRLQVRGAGDDQGGGHRVRSPRDPRQLGAPRDDRHADDRHRPGRGREHVGRLPDGPPGPARGGGPPRLLPRLRRGLLLQRCRVRGRRRQQRRTWVTHPFGTFALVARCRTFRYLLQPTSRQQVALKSLLALQCELYNAALEERRGAWRWERRSVSYIDQCRTLTSLRGLRPELLSCGVVVCRGTLKRLDRAFSAFCRRCQEGGKPGYPRFRSKARFDSLQWEDGTGWKLDESARRLRLFGIGSVKLRLHRPLRGVPKAITVKREGTRWFVSVRCVEVPAEPLPSTAREVGIDLGICALVATSDGELITKGRYERRAAKELARAQQSLQRKRSGSNRRRRAAETVGRARRKVANQRRDLHHQVSRYLVNGYDLIVVEDLRIGQMVRRPKPRSDGAGGFLANGATAKSGLNRSIHDAGWAQLVTFLGYKAEDAGRQVVVVNPRYSSITCSVCGSCDQDNRRLQAEFRCQSCGHTAQADVNAARNILRAGRAQQARPVQGLKPDPLPSAGY

SEQ ID NO: 16753 - protein, 531 aa, unknown
  TnpB Polypeptide
VNEVTLEAAIRADQAGRNSLDPILAAVESLWGRLERKLFRQLYAGGQPDRARIAAAKREFIAVHRLSARQFNGMRLNLEGKVEAWRESRKVERERLAEALRKLGRRMAKLRDRRQMLGRRIAACRASGKWPMAQALQERRRRTAFQIHQKMRHRHALELRLQRAEVSLAGPPSLCFGGRVLFRRQFQLQANGFADHGAWLRAWRERRTSQFYAVGSCGEVCGNGECQFHPELGVLRLRLPHALEGRFGKRLEVPVDFYREVDLLASLAAGRAISYRFLRREDGRRVVLATTVREPVPVVTRAGAGALGADLNADHVAMVELDRSGNLLGHRRLPLEVHGLSSNQAKARVGDVVAELVAQARAAGKPLVIEALDFRKKKAALRELGHRQARTLSGFAFAQFQERVASRCAREGVELIRVNPAFTSVIGLAKFGGYKISPHGAAAMAIARRGLGFGERLATRSASPRLGAALSSRLREIAKGRKACEHVWKAWRALTPWLRTALRRPRSVQGGGASHPDGDASPPATIRPSGS

SEQ ID NO: 16754 - protein, 220 aa, Geoglobus sp.
VSTNPHILRVDHELRTIHTTYFCIRRIQKLAKFKPKTAERLMKKYSGRERRKVTDLCHKISRKIIDFAKQHGFSIVMENLRGIRNNINKGRMLNRRLHSWNFRRLQFYIDYKAKLEGLPVEYVNPKGTSSLCPVCGGKLAPNGHRRVKCDCGYEQDRDVTACLNMLRMRGVPFPLKALDEFERGKAVRVADSRNGSKALDAPTADATATCFTHHIIQRSL

SEQ ID NO: 16755 - protein, 385 aa, unknown
  TnpB Polypeptide
MERAHKIRLNPTPDQDQYFRQAAGNARFAWNWALGMLREARKNQTTLPLVGDLKAEFNRIKREQVPFMLETTTCAPEQAFADLQQALSNYFNDIKKRKNGKRRKDGTRVGFPKFTSRKRGYGSFYLANDKFTVQGHWIRIPKLGWVNMTEPLRFAGKIMSARISERAGSWFVSIQVQLPEPEQTAPERVIGVDLGVKALAVDSDGEVFENQKHLAAAQKKLRRLNRWLARKQKGSQNWHTAKRKLARLHVRIANLRADATHKLTTRLAAKASTIALETLNVVGMLKNHTLARAISDAAFSEMVRQLGYKAVQVVRVAPFYPSSKTCHACGHSNPDLTLADRVWACPACGTIVDRDGNAARNIRDEGLRLISAYKLTVPGSGYVGT

SEQ ID NO: 16756 - protein, 383 aa, unknown
  TnpB Polypeptide
MLIALKIKLNPTNEQEKLFWKSAGTARWAYNYFLSESERIYTEEGRTVKEDEVRKKINNELKPITHIWLNEVGSNVMKQAVKDADTARTRWFQGISDKPKFKSRHKSKISFYVNYESLKRTKDGFRGEKIGLVKTYQALPKLKSGEKYSNPRISFDGRNWFLSVGYEQNFEVCELTTESLGIDVGIKELAVCSNGEVKKNINKSKEVKRLEKKLKREQRKLSRKLEANIAYYTAKRKPIYKTPLRDMKNIQSQNRIIRNLHKRLTDIRTNYLHQSTSEIVKTKPFRIVMESLNVKGLMKNKHLSKSFAQQKLYEFKRQMKYKSIKYGIKFVEADKWFPSSKLCSNCGRIKKDLKLKDRIYVCECGLKIDRDFNASINLANYLI

SEQ ID NO: 16757 - protein, 446 aa, Virgibacillus sp.
MDVVKTLRHKISNHSRIFDDTLVIYNQALAFIMEVIDQEFERLDDYSTHSMVSAVEKLIHITKSNPLPKYKGFNTKFFKYPSYLRRSTISAAFGKVKSFRSNYKNWEKEKEIALLEGKKFKKNPPKLQLEHKEFPVFYKENMFKRADDTSAQIKIFHQNDWIWIDIKFKEQDLYKRDVWGWKECNPKLVKVGKKYFLHISYESNVELSKTEIKDQIICAVDQGITNSAVCSIIDATGTVLDRKFINQSKEKDQLYTMTNKLRKAQTISGQIQAPNFWRRINGLQTYIVNNTAHEIMKFAKKYNCDVIVFEFLDKMKMPKNHWGAKKLRFKLRYWRKKGIQNKVEEMAHYAGMRISRINARNTSALAFDGSGKVKRNYKRDLATFTTGKVYHADLSATYNIGARYFIRGILKSFSETTRLALQAKVPDLSKRTKQTLSSLITLHLAQ

SEQ ID NO: 16758 - protein, 378 aa, unknown
  TnpB Polypeptide
LKADIKIAVHGKILNPNKEKRHKLNVILEKYLNAIKFFASFNIKDKKLLQKKGYEEARRRFGLSSTLTQTARDKAVELVKANEEREFNIHKVSIRVNYRAFKLVKKDTKLTPYWLYLQLDGEGTWYPVQFGERQREMIDNVLSDHSEWSLQQVELIKRDGEWYVYFTLEKPFKDYEPQTPIGIDLGEKNLATVVALVNDKPVKGTFFKGTKIKEVRHKYFNIRKRLYEKMRLDLIKRLRGKEVMIVNHELHVISKKIVEYAKQFPSPVIVMEKLTGIRENFTRSKKLNRRFHSLPFRKLQKMIEYKAKLHGIKVIYINPKNTSKTCHRCGYVTRVESREFKCPKCGLIYNRDLNASINIAHALTRGMGRGYVNTPKGR

SEQ ID NO: 16759 - protein, 357 aa, unknown
  TnpB Polypeptide
MGAVLKNTPADYKDIPELSWLNGCDSLALCNVQLNVEQAFSEGLSGEKGKPRFKKKGLASASYKTNAQGNSIRLEDGKLKLPKVTGMVRLAMHREIQEGGILKNVTVTQEPDGKWYFSLVYAYGKKDSLPECFHKPEKEIRAVGLDMSLPELYRDSNGGLPSYEVNGVTVSFRKVYRKLEKKIAREQRRLSKMEKDSANYRRQCRKIAKLHAKAKHQRCDFLHQMAARLAESYDIIGVEDLDMAAIRRSLRFGKSVSDNGWGNFLLYLEEACRKCGTLLIRVDRWFPSSKTCSACGHIHRELALSDRAYICPECGSAMDRDENAAVNIREEALRIFRGYLDEDKIETLPEGYVFQAA

SEQ ID NO: 16760 - protein, 397 aa, Lyngbya sp.
MIVYEFKVKGKPYQYKAIDEAIRTAQFVRNSCLRYWIDNRGLGRKELYRYNTELRAMYPFVKDLNSHACQASVERCWSAIARFFDNCKKRCDPAPSQGASGQTPAIFNRPGNADQEKERAPREKIPGKKGYPRFKKNSRSVEYKQSGWKLLDPKQIEFTDKKGIGKLKLVGTWDLAFYPVERIKRVRLVRRADGYYVQFCIQVDVKIETKPTGKTIGLDVGLKEFYTDSNNNTEPNPRFYRKSEKQLSFYQRRVSRKNIGSANRLKAIKRLGKVHLKISRQREEHAKKIARCVIQSNDLVAYEDLRIKNLVKNHCLAKSINDAGWYQFRKWLEYFGNKFGRVTVAVNPAYTSQNCSSCGTIVKKSLSTRTHVCQCGCELDRDHNAAINILNSACPFT

SEQ ID NO: 16761 - protein, 393 aa, Microcoleus sp.
MHYWRRLHKDLFNACLAERKTAYKREGRSINYFDQQNALPKFKENWEEYKPLGSQALQATVKRVDYGFQRFFQGLGKYPRFKSFCYYRGWTYPGVAGWKVHTNGGNGHLEISNLGKIQMRGKARSWGVPTTCTIVWKNNKWLASITVKCEVQRQTGTGAVGIDIGTLTAVAFDNGDKIDNPRFLAIAKSDIRKASKELRRKRKPEKRKFKASRRWKKARKKVSQLQNKVANRRQDWTHKVAAQITSANSLVATETLNVKNMTAKAKKGKRKRQKTGLNRSILDVGFGMLRSAIKYKVEEAGGNFLEVPAQKIKPSQTCPKCLAQKKKELSERIHQCEKCGYTADRDVASALVCLNWALGTNVLDVEQKALAKTPKKCGGFSQLSAMKRQKPRT

SEQ ID NO: 16762 - protein, 420 aa, Microcoleus sp.
MLTLTYRYRIYPNAEQQVQMLEWLETCRRVYNYAVRERKDWIKSRKCDVNVCSVQSEYIIAADAPYPDYYKQKKALTEAKKSSPQMKAVYSQTLQDVIGTLDSAFAFMKHRGYGFPRFKKFGQFKSFLFPQMSNDAIQGNQIKLPKIGLVTINLHRPIPDGFKLKTTRIVRKASGWYAMLTLQLDVQIPDVVPHGQAIGIDVGLEYFLSTSDGEQVSRPRFFNRLHRKLELLQRRLKNQKKGSKNRRKLNQKIGRVHEQIANCRRDFHLKLAHKLCDRAGMIFVEDLDFRIMAKGMLGKHGLDAALGQFVNQVLPWVCWKRDVYYGKVDANGTSQECPDCGASVKKDLSVRIHHCPECGSTKSRDIASSQVIVKRGLTAVGQTVEEIACGGDGTGATMPIYHPLKQELLGAIQGSPRWNA

SEQ ID NO: 16763 - protein, 395 aa, Microcoleus sp.
MTQKAYRYRFYPTQEQEQLLRRTLGCVRLVYNRALHTRTEAWYEKQERVDYKHTSGMLTEWKKQEDLQFLNEVSSVPLQQGLRNLQKAFTNFWAGRTKYPNFKKKRNGGSAEFTRAAFKWKDGQLFLAKCSEPLGIRWSRTIPAGCEPSTVTVRLNASGRWFVSLLVDHTIELLPTIDRAIGIDAGITSLIATSDGEKIVNPKHFKRLRYKLRQAQKALSRKLKGSNNREKARIEVARIHAAIADSRTDFLHKLTTRLVRENQTIAVEDLAVKNMMKNHKLAQAIADASRSQLVRQLEYKCQWYGRTLVKIDRWFPSSKRCGNCGHIVDKLPLDVREWDCPECGTHHDRDINAAQNILAAGLAVKVCGANVRPDGHKSKGQLRKTSNGKKQKPKS

SEQ ID NO: 16764 - protein, 415 aa, Microcoleus sp.
MIVAVGVVPRQMIVLEFKAKGKTTQYKSVDEAIRTAQFVRNKCIRFWMDNRGVGQKELYRHNTKLRAEFPFVNALNSHACQVAVEWAYSAIARFYDNCRKSVPGNMGYPRFKKNCRCVEYKTSGWKLSPDRRSINFIDKKGIGKLKLKGTWDLHFYQLEQIKRVRLVRRADGYYVQFLIRTEVEKVDVQPTGKIVGLDVGIKEFYTDSNGYTEPNPKFYRTGEKRLKFRQRRVSRKLKGSTNRRKAINKLGRVHLKISRQREEHAKRVARCVIQSNDLVAYEDLRIKNLVKNHCLAKSINDAGWYQFRKWLEYFGVKLGKVTVAVIAAYTSQECSNCGAVVKKSLSMRTHVCSCGFVLDRDWNAAINILKLALSTTGHVGTWILDPNASGDSTATLAGAILLEQVGSMNEESPHF

SEQ ID NO: 16765 - protein, 591 aa, Microcoleus sp.
MYHQESLLPDWESAPKRSKDGLKQEKSRRSSLQEGNDDTTWIQLSLLEIPKESASYMREFQAALKKMTCLHRLTFYSLTTQTPKLSKTSGADSTTEEKAFYPYWNEFSQMMSDWLSLPTKTDFVDLGSILSHGCAKDKNVNYWFSTNRTLAQNERWLRTSSQSSMYSVVDCTDSESTKSKSLKTVSYRVYPVKALEKIWKQWVAAVRKVYNVSIAYLNEHQKFPKPLKEKGGKLGGKMGFKKFLKASGLIAGWCKELGISKLLDNASMEAYVAWSQTDKCPNFIGKGKSRKVHPQAGLKIARFRSVRDQKLTLQFDPTTYKNGHWMVSATKQFPVPEFAGHNFCILTDGATELTYNKGRWFAHFPVEVEDGADVTQTQKLIALDPGVRTFVTGFDGNEFKEFGNNDFARIAKLCSHLDKMKSRHDQAKGRSFKRLRYCLKIAMAHLRTKIKNLRSELHKQVASYLAKNYDVIFFPTFETSQMVVRKRRKLKNKTARAMITWAFYQFSQTLEHLCNRYGSKLVRVTEEYTSKTCTKCGHVHRKLGGAKMFKCPECGHQIPRDFNGALGIFLKALWDTTFLSDVQEQNVVLDV

SEQ ID NO: 16766 - protein, 397 aa, Microcoleus sp.
MIVLEFKLKGKPAQYRVIDEMITTSQFIRNKALRYWMDNQNVKLSDLYKQCAVLAKKFEWAGKLNSMARQASAERAIFAIQRFLANCKANKPGKKGYPQFKKFTRSVEYKTSGWKLSSDKRSLTFTDGFAAGTFKLVGSRDLHFYAQEEIKRVRVIKRADGYYTQFCIAVDRVEEVVPTGKAIGIDVGLNHFLTDSAGATIPNPRHLRKSEKALKRAQRQVSSKKLRSANRKKAINKLGRKHLKVSRQRKDFAIKTALCVVKSSDFVAYEDLQVRNLVKNHKLAKSISDAAWSQFTQWLQYLGKVYGKTVVAVAPQYTSQNCSTCGNTVKKSLSVRTHVCGCGTVLDRDHNAALNILAKALRQAGIDLNTLGHREINAFGQTDLYSLMETSASKPTG

SEQ ID NO: 16767 - protein, 361 aa, Microcoleus sp.
VRHQQNCLPDFKEVWTEYKPLGSHALQATLKRVDFAFSRFFKGLGGYPKLKAYRRYSGWTYPCKSGWKTESNGKNGHLSITNLGRIQMRGQARTWGVPTTCTIMFRNGAWFASITVQCKEIVRETETESVGIDLGCKDAITLSTGEKIAKPDFIKEGQRRVKAASKKLRRKRSPNFKKKIKASRRWKRERSYVSQLQRKVTRQREDWLHKTTSNIVSGNSLVAGEKLNVKGMTAKAKKGKRKAQKSGLNRSILDVGFGMIGQMLEYKLAEAGGFYVESPTQTLKPTQRCANGTFKSVDALQSLYDGKGITPDKEIITYCAVGARAGHIWFVLKYLLGYPNVRNYDGSWNEWSRLPDMAIKK

SEQ ID NO: 16768 - protein, 407 aa, Microcoleus sp.
MLHKAVKVRLYPTALQQVLLSQHFGCARWWWNYALNKSIETYKETGKSLNQSALNAFLPKLKKAEETIWLSECYSQVLQATTLNLTTAYKNFFAGRARFPRYKSKHGKQSLQYPQNVKVLDGFVQLPGKVGKVKAKLHRNIEGTIKTVTVSLDPSGKYFASILTESEGDNPTVSTNGKVIGVDLGLTHFAITSDGCKVSKYDNPRHLVKHEKNLKRKQQKLAKKQKGSNSRNKVKKTVAKVYERVTKSRQDFLHKLSRKLVNENQVVVVENLNVKGMVRNHNLAKAISDIGWGTFVNFLFYKLEKKGGKLVEIDRWFPSSRLCSNCYYQIDSLSLDIREWTCPNCGTRHDRDGNAATNIRAEGIRMLQTDGTAVSANGGEVRPKLGRKSVLRHSPVMLEAHTIIASI

SEQ ID NO: 16769 - protein, 140 aa, Microcoleus sp.
MLKLPKMLPVKMVQHRPMEGTPSSVTISKTPSGKYYASILVEYDQREAPLNGGKIGADLGLKDFLITSEGKKYPNPRFYKRSLKRLKRLQRSLSRKVKGSNNRNKQRLLVARAHEKVANQRLDMQHKLWAWEAAREESPQ

SEQ ID NO: 16770 - protein, 398 aa, Microcoleus sp.
MTERAYRYRFYPTPEQEELLLRTLGCVRLVYNKALHTRTQAWYERSERIDYKETSAMLTSWKKQEDLQFLNEVSSVPLQQGLRNLQKAFTNFWAGHAKYPNFKKKRSGGSAEFTRSAFRWKDGQLWLAKCNDALPIRWSRTLPACCEPSTVTVRLEPSGRWVVSLLVDDHTVKPLEPVDKAVGIDLGVTSLIVTSDGEKIANPKHFKRLRHKLRKAQKVLSRKVKGSNNREKARRKVARVQAQIADARKDFLHKLTTRLVRENQTIAIEDLSVKNMLTNHKLAQAIADASWSELVRQLEYKCQWYGRTLVKIDRWFPSSKRCGHCGHVVDKMPLSVREWECPECGTRHDRDINAARNILAAGSAVIVCGSGVRPDGHKSKGQLSKTSNRGRKQKPKSC

SEQ ID NO: 16771 - protein, 384 aa, Moorella sp.
MAVGLPRTKQKRQWRRWRVKINRAYRYELKPNADQRILLAKHAGCARFAYNWGLARRIELYQAEKKSTNAMEQHRELNKLKQTEFPWMYEVSKCAPQEALRDLDRAFKNFFRGLKTGVKVGFPRFRKKGEHDSFRLTGSIKVKQKAVQLPRLGVIRLKEEPEISGQILSATVSREADRWFVSLTCEAELPEPEPVIGEVVGIDVGLNYFAVMSNGTKIEAPKPLGKYLKKLRRLAKKHSSKQKGSNNQKKSALALARLHRRIRNIRQDFIHKLTTHLTKTKSEIVIEDLNVRGMLRNNRLARHIADVGWGEFRRQLSYKTVWYGSLLTTVNRFYPSSKTCSNCGDVVESLPLSIREWDCPSCGAHHDRDINAAKNLKKQARSTA

SEQ ID NO: 16772 - protein, 279 aa, Erysipelotrichaceae sp.
MFIAVKLFLKLNPEQEVRLKWYEAVFRFEIERISNIFKNNGHTFEYRYKDISNHISYNSKHLVLVQAKAKYTTEQKNKKFTMPFTSIWSNSSYELQADCILFELGLYEHKELLRIPCYINKQQKLRLTAGRHTNLKLVCSRGKWYALVYVDIPFQQRSGQNQMGIDIGLKVPAVVALSTGEIKFFGNGREIRFQQRRYQSHIEAMIRHHQKKKFVQFQHKLHHVMKDYDHKIAKQIINYAVQNEVSVIKMENLMSINKRYEKMEARHCTTGLIVDFRIT

SEQ ID NO: 16773 - protein, 319 aa, unknown
  TnpB Polypeptide
VLEDRYDFNHQERITLEIHGNPQWNGDDSRIELVYDEATDWIRVKHPVRIQPAHIRKQRQGAFTHTLHPENATHSAAIDVGANNTLAIVTNHGETAVFHARPEFDRFHRLSERIAELQSELSDSRHSSRQIERLYDERGRKRDHARDAAVKHAAEWLLARNVDTVYVGDLTGVLDAHWSTSVNEKTHSFWSHRQLLDRIDLTFGDFGIDIVEVSEAGSSSSCPVCGSAAVRRDGDAFRCRDCELEAHSDIVGAWNVLQAEEGPMARPAALRAGRRRDASPDGGAYWEWDGHEWRPAVFGERSRPVDRTSIGEPASSQPG

SEQ ID NO: 16774 - protein, 179 aa, Clostridium sp.
MTYKNINKTKAVKKLKKTLKRKQRQCSNKYEKNKKGKEFVKTKNIAKLEKQVRLLHRRLANIRVNHLHQATKKIVKTKPSRVVMETLNIKGMMKNKYLSKAVAEQCLYEFKRQMQYKCEFYGIEFVEADKWYPSSKTCSGCGNVKAKLSLSERTYICENCGCIIDRDYNASINLSRYSA

SEQ ID NO: 16775 - protein, 367 aa, Clostridium sp.
MKRGDKMLKAYKFRLYPNEEQKIYLAKTFGCTRFIYNKMLAERITSYEENKDLDIKTMKYPTPAQYKTEFEWLKEVDSLALANAQLNLDKAYKNFFRDKSVGFPRFKKKSNTNNYTTNNQNGTVSIENNHIKVPKLKSMIKIEQHRKFNGLIKSCTISQVPSGKYFISILVDTEIAQLPKMDNKIGVDLGIKEFAITSDGVFFSNAKHLKRSEKRLAKLQKDLSRKQKGSNNRKKARLKVAKSHEKISNQRKDMLHKVSTQLINENQVIVIEDLKVSNMIKNHKLAKSIADASFAEFRRMLTYKAKWYGREIIIAPSNYASSQLCSNCDNKSSQTKDLSCRIYICPVCGMIMDRDINAAKNLLKLAI

SEQ ID NO: 16776 - protein, 347 aa, Streptomyces sp.
MQLRYGFRLYPEPGQVRALARAFGCARVVYNDAVRARRDAHANGRPCPSLGLLSRALVTEAKHRPERAWLREVSAVVLQQSLRDAEAAYRNFFASRKGTRKGPRVEAPRMKSRKDQRAAIRFTANARWSITPGGRLNLPKIGAVKVAWSRRLPAVPSSVTVIKDSAGRYFASFVIDTDPAADAERVPATDQAIGIDLGLTHFAVLSDGTKIDSPRFLRRAEKKLKKAQRELSRKQKGSKNRAKARLKVARAHAQVADARREFHHQLSTHLIRENQAVAVEDLAVNGLARTRLAKSVHDAGWGTFCEHVDLQGGPVRAHPDQGRPVRADQPGLLHLRCQGRSQTPERP

SEQ ID NO: 16777 - protein, 632 aa, unknown
  TnpB Polypeptide
LGCPRLPLRGRANQRRQPGRIAQAFGSRRFAYNWALAQVKANLDARTTDPAVPLLAWNFYELRRAWNQAKDAVAPWWRCSSKEAYASGIADLVVALHNWSDSKAGRRAGGRVGFPRFKARHRDHGRVRFTTGAMRLEPDRRHLVVPVIGRLRSKENTRRLQRLAAKDRARVLSMTLSEQGGRLFVAVQAIVCQQPQTPSQPQARCGIDLGVGNEWAVVAHHDDTIERIAHPAPWVETHTQRRRVARQRSRRIVGSRGHRQANAKLTALDRRAANLRTQSIHTLTTRLSSRYGTVIIEDLDVAAMGRGMGRRAFRRTVAQAGIGRVRPTLAYKTAWAGGQLAVADRWFASSKTHHGCGGYLADLTLSQRVWACPWCEQTVDRNANAARNLRDWTGPVAADSDGDRDVQRGGVAAPVPLVGDHGGQAHAPRGACEAPQDHPRVAGATDTRTDPGSRSKGEEPRAGVSASERSQTLTELVTATTSCWSAAWPRPGTVRRPCGRWRCARTPCGASSGWSRRRPCGTRPTPRPAPRRGCRSAAGPRWPASSTPAGRRSRPAPSRPASTRCAGPWPTPTPSPTRPSRARPWSPWAAPWCMPSGAGTRRARSSSTRPSAWPPRPGTGRRRSPPTGSWGS

SEQ ID NO: 16778 - protein, 470 aa, unknown
  TnpB Polypeptide
MGQATRTTKLSLDLENRAEGGANSGKRAYLEETARFLDAARAFYVAFFLAHPDKLVEKVRYFSEALQEERERLLSPNELLSWAESLTVETSAHPHPLPSYNFSARFPDFPFIYRRSVIKDALGKARSFLSNLATWRASGKKKGQPGSPGASNHPTLYDEAFCLDLDATDLRTGPHTCFARLKVYTGTVWAWHHYPVKLSRYFQARWRDPEWERQSPKLILRKKTAALHFPQVKKVKARRVNESKADPHLVTVAVDLNVKNLAVITVRQDGVIIETLFVSDRGLDRHRYGHLKRIAKKQWQSGKPVAGEHSNQQIWEHVRLMNEDAAHKVARAIATVCASYPGCVLLFERLRKIPAKGSSKSRRMNRKQANQLRGKINQYTKDQAYASCSTVTVEVNPHGTSQYCSRCGAKGERFSYRGGKRIREKWGKLFYCPVCHYEANADFNASVNVHRSFYQEWHWQPRKKPPPRAV

SEQ ID NO: 16779 - protein, 306 aa, Okeania sp.
MITREAKAKLLNGSKAQYQALEQAITTAQFMRNKAVRLWRDEPDVNRSRLSLPCKELASEYPFAKKLNSMARQASVERAWNSISSFYCRCREGAKNKGYPQFKKHSRFLRNAAQTVEYKTSGWKLSQDCLTINFTDSFQAGRFSLFCNYQTREDLLRLKINRVRVVRRADGYYAQFCFDAHRKETGNYTGNVVGIDLGLTYFYKDQNNNAAIYPKYLRQTQKRIKKLQRQLSKKFVKGKPQSKNYHKARMRLAKCHLKVTRQRKDWAVKLARCVVHSNDVVVYLDAERRAEGRPQDTKHGQEPSFG

SEQ ID NO: 16780 - protein, 403 aa, unknown
  TnpB Polypeptide
LKYFIGTPCTAGFKCVFNDADIMLSRVTVNIKIPHNDVILQTIVIYRKGLQFCIDTAWEKRIRNNVKLHPFVYKQLRVFGLKSQLAVACIKQACGIVKRAKSKPTIRKNSMRYNPPRSFSFKNGILSLSTIEGRKKFNVTIPKYAEKYIGWKINESVLWTDRKNRMFFGLCLSKNITPAIHSIQHRRILGIDVGIKHLAVTSDGKFYGSVVPKMIRHQRNVSGLQRRGTKSANRHLKKLSGRWTRFMRSKNHRISREIVNSLRGGDIVALEGIKNIRSNKGKKLNRQLHSWAFRQLQNFVEYKALQKGCPVVYVNPAYTSQTCRLCGEIGTRNKGFFLCNSCGYSCNADLNASLNIRNRVKPSAMTFGLSVNEPIVASYDGLLNAKHFESPDLSCKSTLVVGG

SEQ ID NO: 16781 - protein, 253 aa, unknown
  TnpB Polypeptide
MQIVSSYGVEIKKKNIPLRATLDIFRKAVSYLIPVYAETWEELSEIRNPQKRFNEAEHLVHETKKNHARFPFDRHFPKMPSYLRRAAIQHALGAVSSYQTRLSLWEKGEVKGKPKLVCENHAMPVFYRDVMYKEAEPGEDVAHVKLFDGREWKWFQVKLLHTDMEYLRKKWSGKKASAPTLERKHHKYFLRFSYTEEVSLSKTDVKEQVICSVDLGINTDAVCSIMRADGREKILAYGMAFYKKRCMVKVQEI

SEQ ID NO: 16782 - protein, 372 aa, unknown
  TnpB Polypeptide
MILGKKVRLKPTEEQERQLWKSAGTARWTYNWTLDRQERNYASGGKFLSDNDLRKELTQLKQKEEFSWLYDVSNNITKQAVKDACEAYKKFFKHLADKPKFKSRKKSKPSFYNDTMKLKVKKGVVLVEKVGWIKTSEQLPLGQKYTNPRISFDGKYWYVSVGIEQEQVIGQLTNEVLGIDVGVKVLASCSNGMEFKNINKTQSIKKSEKRLRRLQRKVSRKYQKNKEGVRYVKTCNIIKVEKQIRLLHRKLNGIRSNHIHQATHAIVKTKPCKVVIETLNIKGMMKNRHLSKAIAQQKLYDFKSKLQYKCEKHGIELVEADKWFPSSKLCSSCGTINQDLKLSDRVYKCECGLVINRDFNASINLSRYQLVV

SEQ ID NO: 16783 - protein, 239 aa, Methanoculleus sp.
MVRDHPGRAGGASESKREGRSVGIDVGLNAFAVDSDGAVIENPRFYEHSLDRIRKLQQSIARKQRFSKNWEKTKRKLEEVYEHITNQKNDFLHKLSRQYVDAYVAICVEDLNIKELKENGKSCGLRRSIHSASWGGRFYSYLSYKAESAGTNFIQIDPRNTTQMCSNCGSIVKKDLSVRVHDCPYCGFVADRDYNAAVNIHRVGMEQPFEPGGEPIPLHHISVMQVLSMKQEAPPESAG

SEQ ID NO: 16784 - protein, 367 aa, unknown
  TnpB Polypeptide
MHLTLKLKLNPSLEQRAILRQTIQRANEACNGVSQLAWDNQTFRQFDLHHLVYYKVRQEFGLGAQIATRCISKVADGYKLDKKTRHDFRLLGAIAYDAKNLSYQMDQHTVSIWTLNGREKITFQWASIHEGLLKFQKGESDLVLIKGEFYLLATVVVPDKEQSLTTDVLGVDLGIVNLATDSDGNVYSGQQVEPKRQWYLKRRTALQKVGTRSAKRHLKRLAGRQHRFQTNTNHIISRRLVTQAERTNRAIALEDLKGIRSRTRVLRAEQRHRHSNWGFFQLRQFVTYKALLLGIPLVLIDPRYTSQKCSQCGHTERANRVSQASFKCKKCGYTCNADVNAATNIKWAAVNQPLVSNLRVEMQAQTL

SEQ ID NO: 16785 - protein, 399 aa, Streptomyces sp.
VTTNHVKRAFKYRFYPTDAQAAELSRTFGCVRKVYNLALAARTQAWARQERVNYNATSVMLTAWKKTEELAFLNEVSSVPLQQALRHLQTAFTHFFAKRAKYPRFKSRKKSRKSAEYTTSGFRFRDGEVTLAKMTGPLDIVWSRPLPEGAKPSTVTVSQDAAGRWFVSLLCEDPAVKPLPATDAAVGIDVGLDHLLTLSTGEKITNPRHERRDRARLAKAQRELSRKAKGDGTNRAKARRKVAKVHARIADRRRDMLHKLTTRLVRENQTLVIEDLTVRNMVKNHTLARAISDASWSEFRSLLEYKATWYGREVIAVDRFFPSSKLCSACGTLQDKMPLSVRTWTCDSCGTTHDRDVNAANNLLAAGLAVTVCGAGVRPQRSSPDGQSATKQKTPRREP

SEQ ID NO: 16786 - protein, 450 aa, unknown
  TnpB Polypeptide
MSQKIRIDGVKHAGASVFLGVDHCGNPRWTRNPERIMAWLCDGWRARFNQRREQRPHNIPVKDEAGEIVDWVKEPLGGPDVADLLSDKEARLQCSWMAGIPAPILSSTDRIEGTEWSAGLKRKKTAGGRVPGFKSRHRNLGFVCWRNASKTGNAIFHKTGRKSGVVVITGMNPTRWRKPGEKLHWRVVIHVRVSQPIRPYTSVHVDWTHRTLVFVNMPLPLPRTGNGKVGIDRGCVHTLALSDGTFMDMPKPSKAELKRLRYLQRRMARQDRTNEAKGGRAAKFASKRRQRTLTEFNTLQGRIVRRRNDWIEKTTTTLAKANILVAMEDLDVKAMTKRPKPRPDPAKPGQYLHNGARTKAGLNRSILSNNWSRLMKRLNDKMDANGGRLAIVPAAYTSQTCHQCGHVAKENRESQAVFRCVECGYQANADVNAAKNILGRALVKTGGDTA

SEQ ID NO: 16787 - protein, 377 aa, Moorea sp.
MREQQAMERSIMAKTKSPIGTQQILLHPDKETEAILFYLCQQSGKLYNMGIYLARQIFFKTGKILTGKFDLLYERSVGKSMIAKSLPSTPAQQTLLSVAEAFKSYKGLRSLWFKGDMKDRPSPPKYLKGSKLFKVAYPNSGGQKPKVKEGQVVFSLGLTVRRWFGVRSFSLPFPSNLEGRKIKEWTILPKNGAFYLEVSYEIPNQTPVQQDSNEALSIDLGTSSNLAACVDTLGNSFLIDSRAMKSYNQYWNKQVATRKEGKPQSYWDKWLDRVTRKRNHRVKDGINKAARLIVNHCLKVGITTIVLGWNEGFKRNSNMGRLNNQEFVQIPLGKLKDRLSQLCDLYNIRLEVTEEAYTSKASYLDGDSLPKFGGAIR

SEQ ID NO: 16788 - protein, 562 aa, Fervidicola sp.
MPKKQKKDKFSMTLSGEFFPEVYPAFRSQKWSRGEEDPLKTEMRLFSACMRWAFNRLLEGTSRDEIKKLGQELFGINSRYADDARLKAQALLDSQKELLELEIEETKNKLNRARKKLGTAMRKLAKAEEKGDTPEDIEKLHLAVKGRNNRVASLEKKLAELEIHQENGTIPKVVFGGRKLWEKVCKGLATREEWRASRKNRLYSRGDETKGGNPNIKVSFEGQEFCLAVSISHLSEQTGTDKLGRPKMSKAPRVEGRLWLPEKHRDLMRIWLAMKLPYTVELVHTQKGRYIAHLTLDLGMMKEPDFTKGCLALDINPDGVALCNTNASGQPEPWPEDFKIPCPGNLGKYEGEFQIITYPNGFLYIRIPDLAYTSGFRRDYLIGVLAKVIIEIAFSLGKPIALEDLKFSKDRLDTNKKFNRMASNFPFARMVEAVCRRAVKEGVPFKLVSARDTSTIGYWKYKKRYAVPEHCAAALVIGRRAMGFEERITKELKQMVAQIKQNLTFKVYPYTPREGRGMTRRVRACLRRLEEKLLLHNGLAIWQQEAFYSVWHDLKELALSLR

SEQ ID NO: 16789 - protein, 376 aa, Bacillus sp.
MILAKKVRLIPTPEQEKVLRNHAGATRFAYNYCKRMSDRYYKLFGKSVSQLALQKRFTKIKKRKRYEWLKDINAQVPKQASKDFDTARKHSFKKYKNGSHTSYKSKKDLIQGFYANYERLVIGKKVVHIQSIGEMKTSQQLPRNKKTSNPRVTFDGRHWWISVGFQEDFESQELTNESIGVDVGLKELFVASNGTKERNINKDAKVKKLLKRKKSAQRDMSRRFKKGVKIQSAGYEKAKAEHLRLSRKIMNIRNNHIHQATARLVKTKPMRIVVEDLSISNLLKNKKLSKAFSFQKLNFFFQCLSYKCEKYGIAYVKADKWFASSKICSCCGVKYDHSVQPEGQWSLKIREWRCASCNSYHDRDVNASINLSRWVK

SEQ ID NO: 16790 - protein, 359 aa, unknown
  TnpB Polypeptide
MLEAVKVALDPTPTQERLLLSHAGAARFAYNAGLAHVKDMLEAKEKPEWSLYALRRWWNQAKDALAVDETTGEPWWPENSKEAYNSGLESLSDALKNWSKSRKGERKGRRVGFPRFKAKDRETPRFAYTTGSFGLIKDDPKALRLPRIGRVHCMENVTGRADGAKVLRMTVSCRAGRWYAALTVERADNPTPEPPKGGSVGIDLGVKELATLSDGTVIRNPHALKSNLTRLRKAQRSLSRKASRPTPSASNTGQERSSRIGGPSQDGAAQLSRMLSSMALVPKGFSLTVTRFHCLRLRLSTFCTPVFGSMTGMRWPFPSSANVVFCLSRAHSPVRGSILRLATRMCACGFLPSRSKWIA

SEQ ID NO: 16791 - protein, 351 aa, unknown
  TnpB Polypeptide
VQAIIDDYCGARRSYFANAKTNPNAKPPHKSKKFHTFTWRATGISYSRGKLRLSMGKDNDPLWIDIDKKFYKKIPAEVSLVYNKTTHRYEFHATYDTTPKKSKTKQGSAVAVDMGEIHPITSFDGINAEIYNGREQRAKTQYREKSKATLNQKISRCNRGSKRWKKLKRAKKKTLAALTSQVRDMRHKITSRFVSTGFRERKIETIVIGDIKHIRQSINYGKKANQKLHQWAFSKFQNMITYKAKAVGINVETEDEAYTSQTCPSCRQREKKNNRNYKCSKCGWNGHRDVVGASNILTKYQGWLFNPVVGAVVSPTGVRFDPHLRRLDKWSPFSGLKSSKPPTRKQRSTRL

SEQ ID NO: 16792 - protein, 454 aa, unknown
  TnpB Polypeptide
MNLKVDIQHLRKISENEKFTKSKTGFWNQNCSIIKDNLTNVDYLNHDKSVSTVVSRRVKFKPNYLQRRLLKQCFDAYRYVYNQSISYILRVIDMSQKMDIHISPKMIEFNVYKNVKITDDLVPDFILPLPSDSRKEALREAVKNYKTCIKHKNLNLCKKYLLKHKRRDDATFRIKTNAIKLMRNKLVIFNHRINKLIKDENLSKDYKYAILTNSNRKRLSEFINTKGNPTSYPLITYSHGNYYLIVSGERRAEVKEDKKEICAIDPGIVNFHTVYDGEIYTEGAKLYETKLEKINQRIDKITAAKPYFTGAKQKCMIKRELKLRAKVSNIVYDFRHKLASKLCSKYKVILLPKLGIKQVAKNLRKQVNRKLYALSHYKFNELIKHIAKRTGTTVIHCLESYTSKTCGNCGNLQNVDDDRIFRCRSCTWTKDRDENACKNILIRTLNNYLLSSVA

SEQ ID NO: 16793 - protein, 407 aa, Cyanobacterium sp.
MLNLSYEYKLSTTKIQIEQIEHTLGVCRSIWNFALRERMDWSNSRKSRINSCSIQREYIIPADTPYPNYHVQAKALTKARKENPTLASVNAQVEQQVLRTLERAFLDRERKGLGYPRFKKHSRMRSFVFPQMLKNCIDGNRIKLPQLGWVKFRQSRPIPNGFVVKQARIVRKATGYFVVLSLQSDVDIPQPLPHGHPKGIDIGFISAVVTSDNESIPRPRFLNKYSRELKRLQRMLKKKQKGSCGWKKLQKRIARLHFQTTCHRKDYHFKLSHHLVKDAGMIFVEDINFRMWQRSFLSRSSADFGFGQFVNILEWVAFRTDTYFSKVDHRFTSQECPECGARTGKKDLRERVHECPECGYITGRDHASALVVRNRGLDLVAVGQPVPKKASRDGRNGGEFTRLVTNL

SEQ ID NO: 16794 - protein, 359 aa, Brasilonema sp.
MLLSIKTKLKLTAEQKTIMSKHAGIARFTYNWGLATWNSFVKDGLKPNKFILKKFFNNHVKPEYGWIKEKGICQKITQYAFDNLGDAFSRFFSKKGGYPRFKKKGHHDSFTIDASGKPIPVGGTSIKLPTIGWVKTYEGLPHTTCKSITISRTADSWFIAFAYEQEHEPTVKQHEIVGVDVGVKELATLSTGVVFPNPKHYKTHLEKLRRLSRKFTNKQKGSNNRHKAKIQLAKHHAKVANLRKNTLHQVTTFLCKNHAKIVVEDLNVSGMLSNHKLAQVIADCGFHEFKRQLEYKAKKFGCEIIIADRWFASSKTCSCCGVKKETLTLGERVFECEHCGHVMDRDLNAAVNLSRLAKA

SEQ ID NO: 16795 - protein, 285 aa, unknown
  TnpB Polypeptide
MRKLLKSFKTEINPTEEQKVKIRKTIGTCRYIYNFYLTHNKELYDKGEKFMSGKSFSIWLNNEYLPRNPDKLWINEVSSKSVKRSIENGCIAFTRFFKRQSAFPNFKKKGKSDVKMYFVKNNPKDCRCERHRINIPSLGWIRIKEKGYIPTTKDGYVIKSGHVSIRADKYYVSVLIEILNNKIVNNFNEGIGIDLGLKDFAIVSNGKNYKNINKSAKLKKLEKQLIREQRSLSRKYENLKKGWSTQKTNIQSIHDEIVSNVRENLQYLDVSIFNYILSGRTSESL

SEQ ID NO: 16796 - protein, 245 aa, unknown
  TnpB Polypeptide
MISVQLRYNFRLYPTAGQCQALAKAFGCARVVYNDGLRVRQEALAAGLPYIKDADLQRLVITEAKKTPERAWLAEVPSVVLVQSLNDLHKAYRAFFSSVSGKRKGPRIAPPKFKSRKDRRQAIRFTRDGFSIRPNGRLYVAKVGEIKVRWSRDLPSEPSSVTVVKDAAGRYFASFVVETVDEPLPVVDTEVGIDLGLTHFAVLSTRRMVRSRTRTSSRSQNCRCRGRSPAGDALYGAPEEVYRCE

SEQ ID NO: 16797 - protein, 450 aa, unknown
  TnpB Polypeptide
MNYEKILNMYRSLKVRIEPNSGQRRSIDESLRYHCYVYNGLITACKLYHQKNGKLPSQFILNKTCTVIWHNSPYMHDVLYQNAMNETAKRVLQAFEKCEENRKKKEHEALKKGKEQVFCGLSCPRFKKPAKFGSFTNPLHTDAFKEKNGRRLLKLSKVNGLIRCYNQNTPLPGIPKTCTVRRTNCGTHTEYYASISCYDKNECRSGDVFIEYHKPRAVGVDIGVSRIAVLSDGTVFENDHMYSKLLKDIKEKHEKLSYMTPGTPGYRKAKSHLDHLYRKLTDRRRNNVETISRKIVDDYDIICIENLSIKGLRGISKNKRMTNAYDDASLGMLRRRIEDKAIEAGRILLSVDPRDTSQICSKCGTYVKKNLRVRIHKCPECGLKMDRDLNSAINILRRGLTGNPSPASRGESPSQTVQAQQIMSNASLGVVKGYINKLLVRSSITCDYHE

SEQ ID NO: 16798 - protein, 504 aa, unknown
  TnpB Polypeptide
MECVRRAVAVEVESPPSELYAVEEPYRRIVKEVAAYVAERETLEKEKYKELYRRFRELYPLPAQLIQQAINQGVEIGKSFLTLKKDGRVHKPRPEVQHVSIRFAKDSWNYEKAVGSAALVKLALSLPGGRREIWIKPHRRFWLYWWRVLRKEAELASTLMLKRRRGRWYAIFVFDVAPREEPLAEAVALDVNENSVAVAKVSLLSTVDAVARWNRQYVDPAVYSIETDFGRLAKRYEAVRNAKLEELKQRYPYAGGDDEEKVQNVTDTREYKKFVRRLRERRRKEGRVRQIAREVTKSPALIITEELGKNPQEEMIGLEKKAEKSVKKVKKRELRHRVKQTPFKKLVRAVEDKAAEAGSVVVYVSSYRNSKVCPIHFSLLKNGSGWHTLHCPHGHDVDRDHAAVLNMLWKITPEGVVKAVWWDLKNVKRRLKKGRGLVPKEAVRRRNPLVPWPVVCAVWTSLKALKASDKWPAVLARAAPMTPAQGADEGGTRTPPRPKGTPAL

SEQ ID NO: 16799 - protein, 377 aa, Paenibacillus sp.
MLHHKAYKFRIFPSSEQATLINKTIGCARFVFNHFLELWNNTYTKTGIGLSYGSCSAELTKLKQEIEWLKEPDKFSLQNSLRNLADSYNRFFKKQNDAPRFKSKKNAVQSYQTNYTNGNIEIIDNKIKFPKLGFVKFAKSREVEGRILNATIRRNPSGKYFVSMLAEVEVHELPKIRNVIGVDLGIKDFAITSDGEVFENPKYLRKYEKQLEKAQRTLSRKQEQAKKSGQKLKDSRNYHKNKLQVARIYEKITNARTDYLQKTSSKLINENQVICLEDLQVSNMLKNHKLAKAISEVSWSQFRTMLEYKAKWYGRTISIVGKSYPSSQLCSECGYKNKEVKDLKLREWICPECGAHHDRDINAAKNILQEGLKLLTA

SEQ ID NO: 16800 - protein, 392 aa, Crocosphaera sp.
MPKTLPITVACKLEVSNAVATEIDDTLLVFATACDWVNANTPNKMTNKTAMQSLVYQYVRTNFGLSANLAIQAIRRVCANRKTAKQKGRKVKEFSPTSISYDARIFSFREKDWTVSVKLLNSRQRIKLLIGNYQVGLLKGKDPKAATLVKRKNGDYYIHITLDEPTQPETKTDKVLGCDLGRTDICTTSEGESWSGKQITDKRNHYAKLRATIQKKASKGTRSSRRRCRQLLARLSGKEKRFQKHINHQISRQLVNNAVTNKQAIAIEDLTGIRERTNKKPRSRKDKRLGNNWAFYQLRQFLTYKCVLAGVKLILVNPAWTSQTCHNCHVIGDRKGKKFACNNCGNKCDADYNGSKNIQALGAIINRPGGSGLSCKLNAEVQYIQRFTYLMV

SEQ ID NO: 16801 - protein, 421 aa, unknown
  TnpB Polypeptide
LYRDALSFLTAVFDSEWKALSAIEKAKTRFNTAEHLVHGTKYNIAKYDFDVHFHKMPSYLRRAAIQEALGCVSSYHSNHDNWEKGGKQGKEPKLQVERFAMPTFYNKEMYSVSEDPYSAYLKLYYGNDWVWVKVRLRGTDVRYLKRYWQHCKPSAPTLEKRCGKYYLRFAFTEKVALSDTKISEQRICAVDLGLNSDAVCSIISADGTVLARKFINFPSEKDHLWHVLNRIRRYQREHGSQNVQSFWMYASRLNDDLAKKIASAITDFAVLYSVDCLVFEYLDFRGKKAKGSRAQRIQMWRKNGIQQYAEHKAHRCGIRVSHVCAWGTSKLAFDGSGEVVRDETNRALCTFRSGKRYNCDLRASYNIGARYFVRELLKPLPATVRSELWTKVPDVQRRTSCTLSTLRAMTAAMQGAAQCDR

SEQ ID NO: 16802 - protein, 402 aa, Escherichia sp.
VKRLQAFKFQLRPGGQQEREMRRFAGACRFVFNRALARQNENHEVGNKYIPYGKMASWLVEWKNATETQWLKDAPSQPLQQSLKDLERAYKNFFRKRAAFPRFKKRGQNDVFRYPQGVKLDQENSRIFLPKLGWMRYRNSRQVTGVVKNVTVSQSCGKWYISIQTESEVSTPVHPSASMVGLDAGVAKLATLSDGTVFEPVNSFQKNQKKLARLQRQLSRKVKFSNNWQKQKRKIQRLHSRIANIRRDYLHKVTTTVSKNHAMIVIEDLKVSNMSKSAAGTVSQPGRNVRAKSGLNRSILDQGWYEMRRQLEYKQLWRGGQVLAVPPAYTSQRCACCGHTAKENRLSQSKFRCQVCGYTANADVNGARNILAAGHAVLACGEMVQSGRPLKQEPTEMIQATA

SEQ ID NO: 16803 - protein, 433 aa, Natronomonas sp.
MEDVIRTVKVKLDVPTERCDDLHQTKNQFLYCANTTAAWAWRHPNDYCITSKQNAENALYERLRDETELTANLVQKGIRRAIEATKSGVARLKKGDTTSQPYFNAWSVVYDKRSATFHRDHVSLSTVNGRVECDYVLPDDPEGTPIGEYLLNEDYEFRMSTLQYDRSTESFYLHARMRRTESDEQEQSTASFDAKHRTVLGVDLNVDGSLAVTSTGAFIGNADEMNHRRREFEKTRGSMHQTGTRSAHLSMQSMNDREHRWMQDELHRASNQILDEARAHDCTHIAFENLTDIRKRMAGAKRFHAWAFRRLYQYVEYKAEMYGIAVEQVSPAYTSQRCSMCGFTHELNRRSKHQFVCQKCEYELNADYNASKNIARKLLKRLHSGQTSSSGGAPCQCALTSGTLNLNGEFHASVDSTAEGESTDKPTSSLVGH

SEQ ID NO: 16804 - protein, 409 aa, unknown
  TnpB Polypeptide
VGLNIHRKRGVFLFICLGIVKIFYNAGRVIFVRAYRFRLYPSKCQQALLDNGRVLAKQLWNSLLEYTKAEYDKTGKFPSSGALYKLTKHSGLYAQVAQNVARRLHTALRRIGQMRKLGKCAGFPRFKPVERVKSLHYPQDGFSILANGTLKVTPFGAICIRKHREINGRVKGLTLKREPSGKWFAIFTVEEERCVPRINRGDSIGVDLGLQRFATFSNGASITNPRFYQHAEVRLAMLQRALSQCKRGGKNLAKTKAKLARAFERVDNMRRDFLHKASRQLVETYSFVALEALAPSEMARQRFGKSILDASWAMFANFTCYKAVEAGCTIKFVNPQGTTKTCSACGNQQDVSLNQRTYCCPRCGLTRDRDVNAAINILAKATAGTAESHAWGDEAEALSMSQEASRLNG

SEQ ID NO: 16805 - protein, 371 aa, unknown
  TnpB Polypeptide
MKTAYKFRMYPKKQQEAMLDVTLETCRHLYNTALADRKNCYELEGISRSYEDQAAALTLEKKEGKWQGVFSQVSQDVLKRVDKAFKAFFRRTKAGEKPGYPRFKGQGWYKSFTYPQAGFKLEGSKLTLSKIGSIRIFKHREIEGKIKTCTIKKDTLGHWYATLVSEIPDPLPVEPQIAIGVDVGLKLLITLSNGDRVKYPRHYIQSEKKLQAAQKDLSRKKKGSANRWKARAKVAKIHQRVTNLRSEFLHIVSHELVNTADLIVFENLNISGMLKNHNLAKHIQDHAWGKLIQFTQSKAAKAGKVVELVDARYTSQKCSMCGILVPKTLANRVHHCPKCGLEMDRDLNASINILTLGLRGRASRDTAKAGQ

SEQ ID NO: 16806 - protein, 504 aa, unknown
  TnpB Polypeptide
MVTSHRFTTDDGVDVGQVEHDLAQMVAWMAQAEQEVLASQEFHDLALKVLRGDRPTGSLNSWGRKRLSRYNFSFQKYNMNEVLVSNVVGTLELYAMSVGLFQVMSTHPSTTKPDCILSYYRDIYPDAPQPTSGMVRAHLRRYHVKGDRKASLPGVSAKLNLAVCDTYFAPKAVRDDSDPLSVVVQVKTHSYGTTKIFLKLPENNKRFSEGKVCRPTIRLNNKGQVVFDIAIEHEVDTRQTKKIIGVDLGKVEPFVATVINPKDKHRSAPYHANYKRRLGSLVKKEQQRRDLASHLYEKADLCDRYNRTNRADVLRTEAKRVSAKATRIKHEISQCIASQVAEIADRSNAHIAVENLSWLDSQGRRWPHAEIQSRIENTAKCYGLKVVKVSAKGTSRTCSRCSGKVSNNSRTRVGTCTTCGFSLNRDVSASREIALRAVSNARNREKMRSLLRQRTLEQSSAVTRQSKPVTALGGIQGHTGTSSTSLEATLMMVRENLGSRGSPS

SEQ ID NO: 16807 - protein, 653 aa, unknown
  TnpB Polypeptide
MKKLKKSIVKIKNINLFKPDVKSSRVTIDSRVCNVDKFNEFFALIDNTKNYKNTISQYCYDNLLSLVSDYKPFLTHYKSLDNSQLNSWERQTIFQEIAGHYSETTTRYLDKAKFIVSKPKSNINNIALFIHNQSSLKLTNNIYALDFNIEDNLIQLTTYLDKYNLELNHNKNLLENLVQSKKDNSTDDINKEISKLERLIKSYNKLIANYHEIQQFKSNKPFIYNRLIQLIIDKKLRFISKVKLAIYQTGTHARHLNNAQLSIVKDLSNKDYQYFIKVRKVSTLSSREPKLNNKTKDNYQELLDKYNEDNFIYLPLIFNQSRLKSIGKSIDNVLIKDNPQILIKSEQLRNNSKSRKIHIIFNYESINPLANTIESSIKNKVNINPSELNTLGCDLNLKHNLIADSKGHTYKDILNNKNKFINNLNEIVELFSIKTEERTVKQKYRYEKLLRSNESLLKTYLSGLIKDWKNSNILHLVFEDLNILNDKSYYEHKGIKIKYSRLSRLLRLGQIKHWVASMAEKQGIFTHFINPAYTSQECSVCHYISTTNRTKQEEFICKNPACANHKVKINADSNAARVIKSRLINKTIRNKLGKDNVYQCSRTKSINYKLIKNIVEDEYKIGVVTELLPNAKLAKSKEDSVRNHTEAPSFRSV

SEQ ID NO: 16808 - protein, 326 aa, unknown
  TnpB Polypeptide
VSDLHIQARVKATEAVKSALALKKKGKKVSVPHANVCPPRYNLHTYTLDWDAGVVNLSTTNGRQHIPFTVPPYASTYAGYPVATADLVTKSGHWYLHVVVSIPAPEIEPTDEVVGVDFGVNRAAVTSDNRFLGERRWREVEARDFRLRRALQKKGTKSATHHLKRLSGKTRRRRLDHDHVVSKRITQGTPEGATLAIENLTHIRSRVRARKANGGQRRLHAWSFASLRAFVLYKCAERGIRVEMVDPRYTSQTCSRCAFRHKGNRRTQAEFWCRQCSYRTNADRNGALNIRATLLAGRGMSAPGGVSSVTLSCPPTPVGEAQAVRL

SEQ ID NO: 16809 - protein, 405 aa, unknown
  TnpB Polypeptide
MDKVLKGYSLRIYPTKKQRDLIIRTFGCTRFVWNQMLDMQISRYQNNKDSKYLTGYKMSSLLPTLKKEYLWLKEPDKCALQCSCENLDQAYQSFFSKRAKYPRFKSRKSYLQSYSTKCSYPKKGTAPTIEILDNHHIKLPKLHSVYFRSGRLPQGKIKQATIRINSQGQYYCSVLCEQDKSDNQALPKTHNSVGIDLGLTDLAILSSGTRYSKSTYDIDLGASLKLWERKMSRRQHNALKEIAFDRKDGLLEPRELKDFPRYQQARKTVAKYKSKIANRRKDRLQKLTTSIVKDYDIIVVEDLQTSNMLKNHKLAKGISNSSWGEFVRELEYKCNWYGKQLIKVAPQNTSRRCSNCGMLNKDFNSLTENEWLLVRDWTCPNCGTHLDRDINASVNILNKGLETLV

SEQ ID NO: 16810 - protein, 381 aa, unknown
  TnpB Polypeptide
MYNADMRKMFQYRIYPTKKQETQLNETLEECRWLYNHLLAQRTTTYEQTGKGLTLYQQHATYPGLKQERPSLATVHSQVLQHVAVRLDLAFKAFFRRVKAGEAPGYPRFKGKGRYDSFTYPQFGFKIDEQGKLFASGIGHLKLVLHRPLKGKLKTLTIQKSSTGKWYASFSCEVEPERLPERSEQVGIDVGLKTFATLSTGEEIANPRFFRKEEKALAKVQRKHSKLAQGTPERRQHRKAVARVHGRIAFRRDNFTHQESRHIVDSYGIICVEDLQVNRMTHNHCLAKSIADASWSEFFSKLSCKAEEAGRKYVAVNPAYTSQTCSRCGHRQKMPLSERVYDCLCCHVQLDRDLNAALNIRGLGLQALGLSVEAPGFSRGE

SEQ ID NO: 16811 - protein, 707 aa, Planosporangium sp.
MAQCGHAAALQLPGVPDAAQREALARAFGCARVVFNDGLRARQNAREQGLPYLSDGQLSKQVITQAKATPEREWLGEVSAVVLQQALADLNVAYRNFFASITGKRKGRKVAPPRLRSRKDNRQAIRFTANARFKVGDNGRLRLPKIGGLDVRWSRSLPSEPSSVTIVKDAAGRYFASFVVQTTQDEPLPEADAEVGIDLGLTHFAVLSDGTKVAAPKFLRRAARKLKRLQQDLSRKTKGSNRRKKAVVKVAKAHARVADTRRDWQHQLSTAIIRDNQAVYVEDLCVAGLGRTRLAKSVHDAGWASFDGMLEYKAARYGRTFAKIDRFFPSTRMCSQYGRVNDKMALTVRAWDCPCGAAHDRDVNAAMNVLAAGRAESLNDRGAHVRPALVPAARREAVIHPRAARVPRAARRESPSFRPASTNATAARIVAVSPPLPVAGCAGVGSAPAMSAPVLVDRERTTCESFDDAGGAEGPACCPGAPGEPVPGTGVPLLTELSALPVGPFLTGPSWLPGVGIAGWPAVGCAVGCCWSMTGTPGAVGRAGRSGTAGTAGTTGTAGTAGRAGRAGRAGTSGAAGTVGSASAPGHGPETGRHVSALAAGAPRTTVPGIATAAAVSVVAALRRTSRTQSIAAWTSLRLIQCWPQSRTRQKTRSLSALDPVRTVCDQAMLEIDSCGTGARRLPTGCRLPFGCGYLSVWLTGRVHSSG

SEQ ID NO: 16812 - protein, 393 aa, Planosporangium sp.
LARAFGCARVVFNDGLRARQNAREQGLPYLSDGQLSKQVITQAKATPEREWLGEVSAVVLQQALADLNVAYRNFFASITGKRKGRKVAPPRLRSRKDNRQAIRFTANARFKVGDNGRLRLPKIGGLDVRWSRSLPSEPSSVTIVKDAAGRYFASFVVQTTQDEPLPEADAEVGIDLGLTHFAVLSDGTKVAAPKFLRRAARKLKRLQQDLSRKTKGSNRRKKAVVKVAKAHARVADTRRDWQHQLSTAIIRDNQAVYVEDLCVAGLGRTRLAKSVHDAGWASFDGMLEYKAARYGRTFAKIDRFFPSTRMCSQYGRVNDKMALTVRAWDCPCGAAHDRDVNAAMNVLAAGRAESLNDRGAHVRPALVPAARREAVIHPRAARVPRAARRESPS

SEQ ID NO: 16813 - protein, 521 aa, Caldilineales sp.
VCATVRETFGTPSCGAGAGVERQAGDAALSAYGELYGRVERKLFAEAAAGRSAVSLKREYLKRYGIPARMFNAVRVSLEGRMASVRAQQPLRLDSLDRRMARVERRIRDAAERGYREQIHQQKRRWAALQSQRAALQEDMEAGRVRLCFGSKRLWRKQHHLAENGYTSHQEWLGDWREARSDEFFVLGSRDETAGCQLCVATVADDGSLTLRLRLPNCLAPRYGKYLVIQGVRFAYGHAQVLAVLESNAEYARYRREHGKQAVRATTLGQAISYRFKRDAKGWRVFATTDRMEVPVVTDKRRGAIGVDLNADHLAVAETDASGNPVHAFRVPLVTYGKSRHQSEALIGNAVARVVAYARETGKPVVIERLDFRQRKAELEGESRRYSRMLSSFSYGKVKAYFLSRGYREGVEVQQVNPAFSSVIGRVKFMERYGLSVHQAAALVLARRLLGCSERIPRRRVAPVGDGVQVAFTIPARKRVKHVWTYWGAVSGQLRPALAAQHRLGRRRGPPNPVPAARRAA

SEQ ID NO: 16814 - protein, 400 aa, Streptomyces sp.
MDDQAHAARTTWNLLHDWWSMLPRDKRSLAAADAAIRQARKEIEWLAALPAQAAQAVLKAYAQAWRNCWDGRAGEPVFKARVRELMSVDIPQGRDLHIVRVHRRWGMVRIPLVGRVRFRWTKGLPVGKHANQENRVTGARLVRDALGWHIAFRVQTLELEPEEHMGPEVGIDVGVAVPLALSDGSVYTHDEWSTKKEQATLIRLERRAARRKSFRKPRERTSRRLRRTYDRIQGLRARAKRRHLDWQHQTTLAIARTYGTVVVEALQVTSMVKSAKGTVDSPGRNVAQKSGLNRSIAQEAWGRTVKLLTYKTTRYGGVLYKVPAPGTSQRCSTCGHTTPGSRESQAAFVCKNPDCGWTGNADHNASRNVLHLYRMGLAAIPAAGRAVVRRAGRVKPATAR

SEQ ID NO: 16815 - protein, 402 aa, Escherichia sp.
VKRLQAFKFQLRPGGQQEREMRRFAGACRFVFNRALARQNENHEAGNKYIPYGKMASWLVEWKNATETQWLKDSPSQPLQQSLKDLERAYKNFFRKRAAFPRFKKRGQNDAFRYPQGVKLDQENSRIFLPKLGWMRYRNSRQVTGVVKNVTVSQSCGKWYISIQTESEVSTPVHPSASMVGLDAGVAKLATLSDGTVFEPVNSFQKNQKTLARLQRQLSRKVKFSNNWQKQKRKIQRLHSRIANIRRDYLHKVTTTVSKNHAMIVIEDLKVSNMSKSAAGTVSQPGRNVRAKSGLNRSILDQGWYEMRRQLAYKQLWRGGQVLAVPPAYTSQRCACCGHTAKENRLSQSKFRCQVCGYTANADVNGARNILAAGHAVLACGEMVQSGRPLKQEPTEMIQATA

SEQ ID NO: 16816 - protein, 354 aa, unknown
  TnpB Polypeptide
LQINSTRHLDKLCAAAHASRTAERCWSGITRFFENCKKKVAGKKGFPKFKKNQRSVEYKKAGWSLSEDRKFVTFTDKNKIGKLKLIGTRDLHFYQKDEIQRVRLVKRADGYYCQFVIDSDLASEEVEPTAKCIGLDMGLTDFYTDSDGNKVDNPKYLRQSEKALKRLQRRVSKKFKGSSNKKKAINQLGRKHLKVSRQRKDFAIKLARCVMKSNDFVVYEDLKIKNMVKNHSLAKSISDVSWGIFKEWLQHYALKFGKVAFAVSPHYTSQECSNCGAIVKKTLSIRTHICKCGCVLDRDENAAINILMKGLRLMGYILNTVGHTEINACGEKTLYLDLETFLKQGHSLKQESHL

SEQ ID NO: 16817 - protein, 412 aa, unknown
  TnpB Polypeptide
MQLVEKHIIDLNHWLYKQLDNLCFLSKNLFNYANYLIRQKFIIAGEYLDYYKIQKLCQGTNDYLALPAKVSQQVLLRLHESWKSFFEATSEYNEHPDKFKARPKIPRYKHKTLGRNVLTYTAQAISQKWLNKGMLNLSKTHIFMTTKVKQVNQVRIVPKNYHYVIEVVYDAEALCQSSSGVEVIAGIDIGLNNLAAITSNLPGFKPLIINGKPLKSINAYYHKNHAFLQSYLKEDRKTSRKIKKLTHQRNCLVDNYLHNASRFIINHLAANRIGTLVIGKNDEWKQGINLGRRNNQNFVAIPHARFIQMLTYKAELAGIAVKVIEESYTSRCSFLDNEPCVKHLEYRGKRIKRGLFRAGDGRLINADVNGSANIVRKAFPNAFAEGIQGVVVRPVRVTPYKTVVRGKCNICL

SEQ ID NO: 16818 - protein, 421 aa, Moorea sp.
MIIIEFKAYGKKHQYSAIDEAIRTVKFIRNSCIRLWMDEKGTGKYDLSKYCKVLAKQFSFANELNSTARQAASERAWSSIRQSRRYANARFYDNCKKKVPGKKGFPRFQNHCRSVEYKQSGWKLSPDKKSITFTDKKGVGKLKLKGTWDLWRFDKNQIKRVRIVKRADGYYVQFCVAVDNNEHLEPSDANVGLDVGLKDFYTDSRGHTEPNPRFYRRGEKRLKFYQRRVSRKKKGKAVGHATRTANRRKAINRLGRHHLRISRQREEHAKRLARCVIRSNDLVAYEDLRVKNLVKNHCLAKSINDAGWYQFRKWLEHFGQKFGRVTVAVNPAYTSQNCSSCGEIVKKSLSTRTHTCKCGCQLDRDSAKPTLREHNAAINILGRALSTLGHSGTWVIDPNAHGESTSTLSGSGLIEQVGSLK

SEQ ID NO: 16819 - protein, 515 aa, unknown
  TnpB Polypeptide
MSDEEYKKLLKQYHKLSDRHILVVETDMPYPDVLKVVALSDKIRKAGNELVRLMRKNYDQLMRTKKYRKLLKLYGNTEDKDKRKALANQLNDMQKSYDVTWDFCRTSMIPIGKKYSIDAVFALTKAEDIWRGMEKCLYDNGKTTHFSKYGELPCIRAKQINRGIPMFVEDGKLRFKLRKMQFGIQVNDRFQSDEVNAVLSYLENPDKMDADAVNTLIEEACCIDTYRPCYATLVPKFIRGKYRVYLHLTIEGKAKPKYDRFGNPRHKFGKGIIGAERGNSIQTSERRERLLYRAMDRSRRATDPQNYNDDGTVKKGRKTWKYSNHYKKLKAKHSELCRINAINRQLAINEDANHLRSLGDVFITEPKNASKLMKRTKDTTVNSKGKFHKKKRFGRSIKNRCPSGFQTTVERKFKTSGGIYIEVPNNYRASQYDHTADDYIKKKLSDRIYKLTDGTLVQRDWYSLFLLYCYDYRTQDIDKDKCITDFGRCYDKEKALIAWIKANHIKILNSGIKVA

SEQ ID NO: 16820 - protein, 287 aa, Scytonema sp.
MIVFPQFKSNPVTGFQVKLPKIGAMPINLHRPIPDGFVVKHIRVINKASGWYAQLILQSDVSVPDVMPNGHSIGIDVGLEKFLAVSNGQLVERPRFFNSLQSERIWLQRKLRNKTKGSANYRKAQHKIRRLHERIYDTRKQFHINTAHALCDGVGMIFAEDLNLKMTSRGMLAKHCLDAAWGSFLEILSWVCWKRGVYFTKVNPNGTSQTCPQCGTHTGKKKLSQRVHVCHECGYTTDRDVAAAMVVEQRGLAAAGLAVKLPVEVCPTARLEAPAIPARVSGGRMSR

SEQ ID NO: 16821 - protein, 387 aa, Scytonema sp.
VLHRAVKVRLYPTPEQEVLLAQHFGCARWWWNYALNKSIETYRNTGKGLGRSALNALLPKLKKDEETAWLGDCYSQVLQAVTLNLTTAYKNFFEGHARFPRFKSKHGKQSIQYPQYVQIVGNTVKLPGRVGTVKAKIHRTISGTIKTVTISKEPSGKYYASILTEVEGENPTFSIEDKVIGVDLGLKHFAVTSDGNKVSKYDNPKHLAKHEENLKRKQKKLARKQKGSKSRHKYRKVVARVYERVSNSRQDFLHKLSSKLVNENQVVVVENLHVKGMVCASRTLRERNHNLAKAISDVGWGMFTNFLDYKLEKKGGKLVEIDRWFPSSKLCSNCYHQVNEMPLEVREWTCPNCGTHHDRDGNAATNIREEGMTSATGEPVRCGGSPR

SEQ ID NO: 16822 - protein, 436 aa, Kitasatospora sp.
VHLRYSYRIYPTVGQREALARTFGCARVVYNDALAARKDARKSGFPYPRSSDLQKQVITAAKGTPERAWLASVGVDPLIQSLRDLDAAYQNFFDSVSGKRAGCPVGLPRFKSRKDNRQSLRFTRNGFRIRGNGKLNLAKIGDVRVKWSRNLPADPSSVTIVLDPAGRYHASFVVDVEPEPLPEVQAEVGIDLGLTTYAVLSDGGVIDNPRFLRKAEKRLKVAQRELSRKAKGSKNRERARVKVARAHAKVADTRRDWLHKQTTRIIRENQAVYLEDLNVRGLARGRLAKSVHDAGWAAFRRLLEEKAARYGRTVGIVHRMFPSSQLCSRCGHRDGPKPLVVREWACGACGVLHGRDLNAARNILAAGQADRLNAPGGPVSPGVAIPRRARPGERGTHLGDLRPTGNRAAGVGGIPIHQGGEDVKARARRRRRRPAR

SEQ ID NO: 16823 - protein, 366 aa, unknown
  TnpB Polypeptide
MYRAHKIRIDCTKEQHSLLMQTAGCARYAYNWGLEKWGKMYEAWKADASKEKPSAFKLMNLWTIEKPEWANKTARSAVTCSIQNLDKGFKGFSRRKTKHPKKHKRSQGISFQLGNDTCSIVDNRLRLPNISYVKLRELPRFQGKITGYTVQLIASHWYVTVAFDCPDVPKEAPESVVGIDVGLQYPAVASDGTILQLPIEKLQKLEAKKRRAQRALSRSQRNSKSKERKRTKLQRIQQRITNIRQDAVHKFTTTVCKNHATVVTEDLDISELQKKAPARSVRRAYNSSLMSTIHWQLSYKVQHLIKVNRFFPSSKTCSNCGHIRSDLTVGERTYHCDNCGAVIDRDLNAAINLMKSGLVKPEVSVE

SEQ ID NO: 16824 - protein, 287 aa, Escherichia sp.
  misc_feature (233)..(285): Xaa can be any naturally occurring amino acid
VKRLQAFKFQLRPGGQQEREMRRFAGACRFVFNRALALQNENHEAGNKYIPYGKMASWLVEWKNATETQWLKDAPSQPLQQSLKDLERAYKNFFQKRAAFPRFKKRGQNDAFRYPQGVKLDQENSRIFLPKLGWMRYRNSRQVTGVVKNVTVSQSCGKWYISIQTENEVSTPVHPSALMVGLDAGVAKLATLSDGTVFGPVNSFQKNQKTLARLQRQLSRKVKFSNNWQKQKXXXXXXXXXXXXXXXXXXXXXXXXXXXXXXXXXXXXXXXXXXXXXXXXXXXXXGR

SEQ ID NO: 16825 - protein, 239 aa, Lactobacillus sp.
MAVPYKYEMPPYIHKHTGKKTGIDVNVSHFNDAEGEHYFLHKGNNGAVNLGRVYENIKHQQRILARKLEENGQIAGKRSKSYQKARIKLQKLYERAHRMQDDAMHRYTTHLVREYDAICIEDLDVKGMLMSHVASKGVHRALFGRFRSYLEYKCKSAGVKLVIANRFYPSTQRCAACGNVKKDDEKITLSGNKKHGTKHNEYVCYNKKCPNYNKVVDRDMNAMMNLTFLIDHPRYNKAL

SEQ ID NO: 16826 - protein, 402 aa, Okeania sp.
MRIAYQYKLRPTKEQAEKIDKTLDMLRCQYNYMLAERFNWWEQNRCPINACPLICYLPELKDQPNYYSQKRSLTQLKVDRPWYKEIHSQVLQEVPKRVEIAFRRWLKGDSNGKRLGKPRFKGKGQYKTFTYAQFQQHHFIKKRVKLSKIGDVKVIVHRPIPDGFIIKTVSINKKSNGYFVTFSLEDKSVPEIKPDIKRGKIVGIDVGLIDFYVTSDNESVLAPKYLRKSERKLKSAQRKVSRRKKGSKRRQKAIKQLAKKHRKVADTRKDFHFKTANDLLRKYDIVAVEKLNIKGMAKSRLAKSLHDAGWGQFNTILARKAEKAGQLIVEVKPHGTSTECSRCGHKVKKTLAQRQHDCPNCGLSIGRDLNAAINIKNRAKVLLKDLLPPIKFEAYQGTQLSL

SEQ ID NO: 16827 - protein, 402 aa, Escherichia sp.
VKRLQAFKFQLRPGGQQEREMRRFAGACRFVFNRALALQNENHEAGNKYIPYGKMASWLVEWKNATETQWLKDSPSQPLQQSLKGLERAYKNFFQKRAAFPRFKKRGQNDAFRYPQGVKLDQENSRIFLPKLGWMRYRNSRQVTGVVKNVTVSQSCGKWYISIQTESEVSTPVHPSASMVGLDAGVAKLATLSDGTVFEPVNSFQKNQKKLARLQRQLSRKVKFSNNWQKQKRKIQRLHSCTANIRRDYLHKVTTTVSKNHAMIVIEDLKVSNMSKSAAGTVSQPGRNVRAKSGLNRSILDQGWYEMRRQLAYKQLWRGGQVLAVPPAYTSQRCACCGHTAKENRLSQSKFRCQVCGYTANADVNGARNILAAGHAVLACGGMVQSGRPLKQEPTEMIQATA

SEQ ID NO: 16828 - protein, 439 aa, unknown
  TnpB Polypeptide
MTIYSTYKVKIKHYNHIFKDTISVYRAAVDYLIHVCIEDWDNITSYEKPFEKQRFVETLIHKTKDNPNVAYDFDVHFYKFPCYLRRGAISEAIGKVSSYKSNFASWKANPQGEAPSVPKAGYIYPSMYRTNMYEQTGTYQAQIKVHIRNTWDWITVNLRKSDIDYINRHCSTRKQCAPTLQKRGKEWFLDFPFEEKAKLCDTDVDKQTILAVDLGINTAATISVMRSDGTILGRHFCHLNKEIDHLIHSINRIKKAQQHHNCKTPRLWSRTKGINHDISVKTAQFITDIAVLYNVDIIVFEYLDRNGKLRGSKKQKLHMWRSQEVQAIVTNKVHRLGMRIRRICAWGTSKFAYDDSGMVLRGKDADLATYSVCKFTNGKIYNCDLSASYNIGARYFIREILKSLDESLRLDIEAKVPRCSKRSTCTLSTLISLNAALAA

SEQ ID NO: 16829 - protein, 542 aa, unknown
  TnpB Polypeptide
MAKNQTYKAFTVRPSHVMDLNGVLLDSAPIMSQLASEVQSVSAYATYVARNDTELGTRLAQAGTVQPAEAGRRAGVNIPAELVVKGKLRKNKAGELVEEKVFGKSRKERLFRHRVVTAFRSWQERVDAVNGESSKYVSQGWRRTVDASPPSYGEDFINLGSVDRSYAMIENDPFVDGEIILKMVIQGKWYRLIFKFDNARFTEGKVTLPVIKLENNQPVFIFSVATDNPVVQFSGDYVIGVDVGINNYATVAVINSSTGQVVYETSLSQRVHSLWNSIRASEKQVKQLREKAKPIVYDRQGKMAALDEAQLHREAASRKKRELAIVAAQEIAYLSHFFDNAVVAVEDLSWVKNTMQNGRWNRGELIKWLTYYVEQNGGWVIAVNAANTSQVCHECGSEVTHPEHKVSDCPKCGEMDRDVNAAANIAARAVKNVKTARNSRAKSKNLQTEQAPLKTPVARRSLKYPGQDRTKSAPTPKRKRKGVKTSSSPARVQNISTPVTTVPVVPPMTSVLADCLTYGVAGTPKAAIKQGTMTKYRLCSPI

SEQ ID NO: 16830 - protein, 375 aa, unknown
  TnpB Polypeptide
LEKCYKFRIYPNIEQQIIMSKIFGCCRFVFNRFLAERIEAYKAEKKTVSRFKQDKNLTELKKELTWLKESDSTALQAVIQNLDSAYQNFFRCVKSGEKINSANFGFPKFKSKRDNRNSYKSKTVGKNIEVYEKSIKLPKVGLVDCRVSKQVEGRIISATVSQNPSGKYFVSVCCTDVEIEPFEKTGAVTGIDVGIKDFAVLSDGDKIENNKYLRKSEKKLIREQRKLSRKPKGSQNRNKTRIKVARIHEKISNQRNDFLHNLTTDLVKNYDVISVESLKIKNMVKNRKLAKSISDVSWGEFVRQLEYKCEWYGKTLVKIPTFFASSQTCHVCGFQNVAVKDLAVRSWICPNCGANHDRDVNAAVNILKKGIEQLA

SEQ ID NO: 16831 - protein, 381 aa, Leptolyngbyaceae sp.
MTQTISVSCKLQVPVELCPEIDATLQAFADACNQILEVAKRENCRNVTRLHHLTYRQVRTMTGLKANHACQAIRRVVGNMKATKQVHKFRSTSISLDARVFAYRESDQHVGITLMNKRVWLPLSIGNYQLALLKGQTPTAATLVKRRNGDYYIQIAIDLPTEPTGKTPKVIGVDLGRRDIATTSTGQSWNGRQLQATRDRYSKVRANVQRKRTRSSRRLLRRLSGREQRFQKWVNHNISKKLVEQAKQIGAAIAFEDLTNIRNSLNQKPRNKTERRRTNNWAFYSLRVFTGYKAAIAGVPIVLVPPAYTSQACHHCLHIGERSSKSFKCSHCGFSGDADHNAALVISLLGGALVNQPEVPFLSCNLPDLSRDKATSPCGCG

SEQ ID NO: 16832 - protein, 404 aa, Aulosira sp.
VFHLTYEFKLKPTQSQIAIFEDWLEQCRRVYNYALCERKDWIKSRSCRINACSLHSEYIIPADTPRPTYFNQSEKLTQAKKKYPELRKVSAQVLQQTLKRLEKAFVALWEQKHGFPRFKKPEKMRSFVFPQIGVNSIQKGKILLPKIGWVKFHQSREIPDSGRIKQAQIVKRASGWYILLIVQWDVDVPQPIPHGEAVGIDVGLTSFIATSNGLTVKRPRFFVDAERKLKLLQQRVSRKRLGSNNWHKAIKKVAKLHEYVANCRKDWHFKLSHQICNGVGMVFVEDLNLVGLSRSILGKHCLDAAWGQFFNILEQTCFKRGVYFQKVDSHKTSQICPSCGTDTGKKELSERTHVCSNCGYTSDRDVAAAQVVLQRGLAAVGHTVKMLVEGKFVGIPKMQESLNL

SEQ ID NO: 16833 - protein, 514 aa, unknown
  TnpB Polypeptide
MSSVTRTISLRPFACREKKTRTGLDLHNILEEVRVDAELCAIEASKHITIENLEQVSQYDGLKPALAGRRMGIKLPPGKSVTGRSRFERMVCEYAVTILRSWSERHKASTKQTDKYVSTGFKRTSNSNKPESLQPRLALSTTDKQYHTIRINESIIELDMVVNKRWVTFKFASPKRFLEPGVKIIAPTIHIDDQDRVMFDWPFEVPVERAEFSDQYVVGVDVGITNHTTVVVRDITTGRVVEASFMNRRVRSLENKIQRTKTQINALYRKGRSSEVESHRRALSNRRKELAILIGQEVADLSYHYDNALVAIEDLSHMVNTMKYGRWVRGLIVQRITDMVESNGGRVMTVNSAYTSKKCHQCGAMLDMADYHTPICTKCHVGWDRDENAAANIAGKLKDKHKKSCATRKRHSSKTRRRNSKDTTRPLKHPLKKMGPTPKAPQNRPKPNNNHCVHHKNTVIEKREGGVFLVLCAAGWSLRESDVSVPAVGPEKVSDKKPHDYPTGRHRLDDLCLY

SEQ ID NO: 16834 - protein, 410 aa, unknown
  TnpB Polypeptide
MSLPVRVTVTAKVEAVTPEGDEGPLVEFLRAYRDSVQLVVDGIWGLDRVPSERTLHRTFYSGLRGLGFRAHHVSEIYRRAREVVESTKRNGGSKPVLRRLTARIHPLDYKLDLSTKTIKVAVLHDRWVELKLKWYSYLDRYLEGSWRLGEVLVSYRYGRFYVYITFHRDVVPREPQAVMGVDINFNNLTYTILDLNRNLVSMGIIPFRGLKRALHLRKLAEGLQRRYPRSWRFLRWARRVRARWLRRARNILVDAAHRVSKRLVEVAREYNAVVVFEDLEKIRESGNGGGKLSWERPMWCYRRIQEYAEYKALVGGIKVIYVDPAGTSRRSPNGKKLGYVNYRLVQLGGAITTRDVVASWNLALRGLKRMRGSRVRWSPDSPAGEGMRTRPNAGNPEVENYSQLTVGIYR

SEQ ID NO: 16835 - protein, 403 aa, Actinomadura sp.
MARQVKRAFKYRFYPTDEQAAELSRTFGCVRLVYNKALEERTRAWYGQRRRISYVQSSAALTEWKKTEELAFLAEVSSVPLQQALRHLQTAFANFFAERAKYPRFKSKKRSRASAEYTRSAFTWRDGRLTLAKTTGPLDIRWSRPLPEGAEPTTVTVSCDSAGRWFVSILVQDIVTPAPATEAAVGLDVGITCLVTLSTGEKITNPRHERRDRERLARAQRDLARKAEGSANRGRARRRVARIHARITDRRRDFLHKLSTRLVHENQVVVIEDLNVAGMVKNHSLARAISDAAWRDLRTMLEYKAAWYGRELVVIDRWFPSTKTCSNCWTVTEQLPLNVRVWTCGGCGARHDRDVNAAKNVLAAGLAVSACGAGVRPQRESSRTGRSATKQETQRVTAGIPRL

SEQ ID NO: 16836 - protein, 283 aa, unknown
  TnpB Polypeptide
MFYVQNVGEIKVKSHRSLPDGVDPARSSKEKGCGIKHVVLQRQGNRWYVCLMLEAPDPELAPHPHKPVVGLDMGLHWLLAFSNGDVLANPRWLRAEQAKLRRLQRQVARRKKGSTRRRKAAALVARQHERIANRRRDFWHKGTFDLVNRFGVIALEDLSLSFMTCNHHITLSAHDAGLGEFQQLLAYKAEEAGTAVVTVNPANTSQMCSACGANVKKGLSVRVHRCPHCGLEMDRDVNAAQNVLKRARMDFPALFEEPEPARTGRPRHNVGRWAERALGSSPL

SEQ ID NO: 16837 - protein, 396 aa, Acidimicrobiaceae sp.
MSRCRTYRYLLQPTSRQLTGLERLCLGQCELYNAALEERRGAWAWERRSVSYVDQCRTLTETREVRPDLFDCGLTVCRGTLMRLEWAFAAFYRRCRSGETPGYPRFKAASRFDSVQWEDTKGWGLETEAKRLRLMGIGSVKLRMHRPLRGTPKAITVSRQGHRWWVSIRCAEVPAQPLPATGQSVGIDLGVCALVATSDGELVSEGRFAKKAKDRLAGVQRALATKHRGSMHRRRACEAVGRAHRKVTNKRKDLAHQLSRRLVNEHDLIVLEALKVPQMSRRPKPRPNAKGGFDRNGARAKAGLNRSIADAGWGMLRSMLVYKAEDAGRELIAVDPRHTSTRCAACGHTESENRVSQAVFQCRGCGHQDHADVNAARNILRAGRAQRASARAGSRN

SEQ ID NO: 16838 - protein, 302 aa, Thermofilum sp.
VPKRKSYIRFPLLSWTLRQQGADLRENELVVRVYRRTCSIPLPERGLEWLHRQEEACRDSGGRLTRYVTIKGDGEINVVLHCSHSLSVEELLENLEVIAAVDVNSSHGFLLFVYDLSDGGFRIRRFKVPEVNWRRIKELQRAAAKSRSPGAWATARCALKKAHRRRRAAVLRAVAEVAKELRGKRAIVFIDVPFDESLRNNGLQRTLRSFAGRLENALGFHGIPVIERTLPSKRCPLCGSKLEEAEKRGRTRVMRCTGCGRAFERDSVPALHALKLFIGESEVEELAGKLAKRYGLQRPQGG

SEQ ID NO: 16839 - protein, 471 aa, unknown
  TnpB Polypeptide
VWVKPGHRLFAYLEQACQNAKNLYNTTNFYIRQVFTSFGRNEPLQPLQQQVMNTLKTQLEAMNERRSEKNRSRPFELPSKDQRFVTYPFLDALFRVMEQPDYRALPAQSSQGIMKVVYQNWTAFFASKKDYREHPKKFNGKPNLPGYARSPVKEVVFSNQDCVIKNQKFLKLPKTKQQLNIGKLGRIDGQLKQVRVVPGHGHYVVELIFAYAREQKNTAQENVQDANHSDLLMAIDLGVDNLATLVTTSGSKPMIVKGKIVKAINQYYNKMKAHYTGILRQGKEPRTGVHTSKRLERLHRKRHRRIKDLFHKASRLIVKLAVEQHIGTIVIGHNDGWKQSSAIGRRNNQSFCHIPHQKFIAMIQYKAAEQGIAVLLTEEAYTSKASFLDHDPLPRYGEEGRRTFSGKRVHRGLYASIRGLIHADVNGAANIMRKVFPNVFAKNTDGIEGLDGNQSVNVSTPLVLSILKKSG

SEQ ID NO: 16840 - protein, 356 aa, Acinetobacter sp.
MKTLKLRIKDKHCKVLDQLASEVNFVWNYVNDLCFKHLKKTGQFFSAYDIAKYTKGTSKECHLHSQTIQAVTEELITRRKQFKKAKLKWRVSSKKSAKYSLGWIPFKKVAIKYQNGQVKYGNHWFSFWDSYGLSKYNVKTGSFVEDSRGRWYVCLVVETLEAEKSTVTKAIGIDLGLKDIATCSDGTIISNPKFYCQYEQKLGIDQRAKNKKRVRALHAKIANSRKDYLHKASTQLVRENALIIVGDLSAKKLVKTKLAKSVLDTGFSSLKTMLKYKCENAGVLFEEVNEAYTTQICSCCKKISSSSPKGRMNLGIREWQCMECGTFHDRDINSALNILALGHERLAGEITSLKQR

SEQ ID NO: 16841 - protein, 435 aa, unknown
  TnpB Polypeptide
MSTQDNDAARLKKNAQIKSAGQKTRQRRKTQAAKTYELKIVSHKLSAKQQETLEQMFLQAKWYYNDVISHLEDHNLNDYDTKVKNVAVRMGSESDDFEERQLDVLSSKMKQGFIEQVRDSLSALKALKSKGHKVGRLGYAKEVKSIPLNQYGNTHKLVENSPKIRIVKLGNVRIRGLHQIPQDAEISVANLTKKADGYYVHLTVYVPLNVDVNWENRSDIGLDFNIGDTLVASDGRKFKARFEASDRLKQLQRKLSRQKKGSKNYHKTLKKINKEHQNTSNKKNDLANKIVRELLDSSGLIYIQDEMIKNWHSGLFGKQVQVSILGRLKSKLVKDPRVCVIDRSCATTQLCPECGSLNRHSLDKRVYHCPCGYTQDRDIHSAGNMLVFAENEDNIIKKFGAGRTSTPVERTPSASETLESDVSCREEAGNPYLCR

SEQ ID NO: 16842 - protein, 410 aa, unknown
  TnpB Polypeptide
LLFRVIRSDSRASVSYQYQAVFWHRVVIARGQDGQTETSSLRGTHPAPRRVQADGKCVYHDWKRTCHLFSKDSFFTSLSAPYRDMLGYNRLGAISAATSILRNYRKAKSKNPRTGVPYARKLMMTTCYGFKIQEDLLRLPVKQREYIYLQLNNHTLKVLSGLNVRSITLTPGSVSISYSKERVEIEPEGFLGVDRNLDNVTIAPTDRTARRFDLSKATRIKADYRYVKSRFRRNDARIRGRVFSKYGQKQRNHVQPLLHNVSKRIVREAKSKRYGIVLERLTGIRRLYRRGNTQSRNYRARMNSWSFGELQRQIEYNARWEGVKVIYVPARDTSKRCSICGYKTLESTQRRLWCPHCGAILDRDENAARNIAAGAVKGNPTTVILRVDESKPSPRSTEDLTEPRILLQSQ

SEQ ID NO: 16843 - protein, 369 aa, Chloroflexi sp.
MIKLAPTPEQYQALLETMERFNEACNYISQLAFEHHTASRVKLHHLAYHYLREYYGLSAQMAVRVVGKVVDQYRRDKTRFHIFKPHSAMIYDSRILAFKGLDKVSILTLRGRLIIPTRIGEYQTARMNTVVKETDLILRNGIFYLATVVDSPEASPDDPIGALGVDLGIVHLAVDSDGEFYSAEQVDKVRERLDNLKAKLQSKGTKSAKRHLKRLSGKEANFRRNTNHIISKRLVAKAKDTHRLIALEDLKGIRQRVTVNCSQRRRYHSWAFSQLLRFIQYKAKLVGVLVKLVDPKYTSQTCPRCGFVSKHNRVSQSSFVCQACGFASNADLTGAINIAQRALSTALLPRSPFCGEVPGASPLALAVGG

SEQ ID NO: 16844 - protein, 453 aa, Planktothrix sp.
MIVLEYKCQGKPNQYKAIDEAIRTTQFIRNKAIRYWMDNSRELKIDRFALNKYSTTLRNQFPFVADLNSMAVQSAAERGWSAISRFYDNCKKNISGKKGYPKFQKNCRSVEYKTSGWKLHPTKRQITLTDKNGPPLAPPCTGGFGGGKLKLLGKWDIHTYNIKDIKRVRLIRRADGYYAQFCLNINVTDIQPKTGKEIGLDVGIESFYTDSNGYQEVNPKFLRKAEQSIKQSQKQIYKKVKGSSGRRKARKVYSKKHLKVSRQRNEHAKRIARNVCTSNDVVVYEDLSVRNMVKNHCLAKSISDVSWYLLRKWIEYFAAKFDKSAIPVAPHYTSQKCSNCGVIVKKSLSTRTHVCNCGCELHRDTNAAINILNLGKQARGGHPQSNANGLETSTPLDESLVEQVSRLKLESSVSSDGESVNTSVFLTFLNVLNYCSSSFGPNTICTTMVSPPA

SEQ ID NO: 16845 - protein, 394 aa, Geobacillus sp.
MIKTYKVMLLPNNKQRTKLFECAGVSRWAYNWTLATQQENYKNGGTFLNDRELRKILTQLKKQKEYAWLNHYSNNITKQAIKDACQAYKNFFEGRTKFPKFKSKKRSKPSFYQDTAKIKITKTHVKLEKLTTSKKKNKQTLNDVKLAEKGRIPTGSNIKYFNPRIIFDGINWSLTVGVEQVENKSPNYTDGIGIDLGVKHLAVVSNGQRFRNINKSNKVKKLKKRLKRLQRKRSRKYEKNKIKTEGGEYRYRKTNNIKKLEFLVRKTYRRLKHIRHNSIHQITASLVKTKPEYVVMESLNTHGMLKNRKLSKAIQEQTFHEFKRQMEYKCVWNGVKLILADRFFPSSKTCSHCGAVKDKLSLSERTFVCDECGNKIDRDVNASINLKKYGKSIA

SEQ ID NO: 16846 - protein, 184 aa, Geobacillus sp.
MGVDLGLRYIAVASVGTKSLFFKGNQCAFIRRRYAALRRTLGKAKKLQMIRKIGHKESRWMKDVNHKISCQIVYFALANGVGVIRMEELTGIRKRATSAKEAGRSLHSWVFHQLQTMIAYKAEMVGIRVEWVNPTYTTQTCRCGHREKANRNGIRFRCQKCGYTLHADLNGAINIAKAISGFAA

SEQ ID NO: 16847 - protein, 224 aa, Mycobacterium sp.
VVDREAGVDVGIARLATVATSDGGRSEITNPKHLGRKLRKLARLEREKSRRQKGSANRDKSRRNVAAAHNEVARARRDYHHKQALALVRDNQVIHVEDLNISGMVQNRRLARAISDVGWGQFVRIIGEKADRYRRTVHTVSRWLPSSKTCSTPRCGYVIDELPLQIRSWTCPHCGAVHDRDHNAAKNILAAGRAERLNACGASVSPPTTREARGDEAGSTPTAA

SEQ ID NO: 16848 - protein, 420 aa, Haloarcula sp.
MSNQVVTRTLKASICNHSQVCDNLDSHGFAASKLWNVGRWTISRVWDAIGHIPDADELCSYLKTHERYADLHSQSSQRVLQELGEAFVSWYEQDDPEASPPGYRKHGDDHPRSTMTWKNQGFKLDTQYNRVRLSKGTNMKESRYAADYILCEYTLQADDQTLDAVENVQTVRAVWTGEQWELRFVCKMRIETPETPGEKTAGVDLGICNTAAVSVGDETLLYPGNALKEDAHYFRQQEYDTEGENGPSDHAEWARQKKSRRQEHFLHALSKDIVEQCADRGVETIAVGHPKNICEDEDWGRHGNKRLHDWAFETLLSHIEYKAHERGIDVVRVDEAGLKTSKTCCDCGTEANSNRVERGLYVCANCDLVANSDLNAAENMRKTVTPSPAKDRSNGCLAQPSVYLFDKSTGQVAPQEQVVP

SEQ ID NO: 16849 - protein, 360 aa, unknown
  TnpB Polypeptide
VRKLLRAYKYRLYPNREQREYFAKCFGCSRFIYNKMLSDKINYYKETGEMLKNTPSQYKKEYEWLREVDSLALANAQLNLDKAYRNFFRDKSVGFPKFKSRKINKFSYTTNNQKGTVSIENGYIKLPKLKSRVKIVQHREFDGTIKSCTVSQTPSGKYFVSVLVETEIKELSKTENKVGIDLGLKEFAICSNGYRYANPKHLRKSEKRLKKLQKDLSRKARGSQNRAKARVKVAKLHEKIANQRKDFLHKISSQIISENQAIVIEDLRVSNMLKNHKLAKAISEVSWAEFRTMLEYKAEWYGREIIVAPSNYASSQLCSGCGNKSSQTKDLSLRTYVCSECGLEIDRDYNASLNLLKLAM

SEQ ID NO: 16850 - protein, 350 aa, Duganella sp.
MDMKLVYRYRVKSLLGLLNRQARVVNDVWNYCNDRQKDALRFCRRWHTAFDLIKLTTGCSKELGLHSGTVNDVCQQYAKSRQQSRRPYLRYRGRKALGWVPLKGRELKREGNAFRFAGNTFRVFYSRPLPEGKICDGRNFSRDRSGNWFLNIVLDVAEPPARMIFQDVGIDLGLHDLAKLTSGKPVPAPNFYREAEPALATAQRARKKNRIKAIHSKIANRRHDFLHKLSISLVRQFDHIVVGNVNAAALAKTSMAKSVLDAGWSTLRLQLAYKAVKHGARYTEVDERFTTQICSNCGAKPETRPRGITDLGIREWQCSDCGAVHDRDLNAAINILRRGRATLVAGISVL

SEQ ID NO: 16851 - protein, 409 aa, Methylobacterium sp.
MYPVHRRVTYKLYPSPVQAAALERVCDLHRALYNAALEERIEAYRKAGRSIGFADQCISVTAIRLDDPAYRVLNAQSLQVTLKRLDRAFQSFFRRVKAGQAPGFPRFKGRDRFPGFGFKSHGDGFRFTPGQGWRNGTLHLSGIGEMTARGEARTPGELVCADVQRRAEGWFLSLVVSCEPHRERMGESIAGLDWGVETYATLCTGPMQFGEIENERFLAVEQEALKEEQRALSRALRGKRSKRAAKARKLIARRSRHLANRRKNRTHQVTARLVRGHATIVTEDLSVRNMTASARGSVEEPGRRVKQKAGLNRAILDTAPGSFLSHLRIKAEEAGCVLVLVDPRRHRPSQTCPVSGEVRKEGLGERTHTLPDGRVISRDQASAWVLWNIGQELAAGASPETALGAAIAA

SEQ ID NO: 16852 - protein, 375 aa, Methylobacterium sp.
MSDATQVRSYKYRLRPNAAQSAALDAMLRDFCGLHNACLQQRDEAWRRRRKRLRYADQAAELRGARAEEPTLARWSFTALQQVLRRVEQSYAAFLSGKRGRPRFRAAARYHAATFRVGDGLRLRPNGRITVLGVPGEIKAVWHRTLPADARLGTAILTRQSGKWHVVLSVEATFAAPDGAGDVGVDLGLTCLFATSDGHREPIPRFERRAHKAQRRRQRALARCKRGSRRRAKAKLRLAAASARIARQRRDHAHKLSHGLVAAYRRLAFEDLNTAGLKRSRLARSIHDAAWRQLVEMCRYKASSAGGEVHLVDPRGTSQMCPVCGAVAAKPLSLRRHACACGCELDRDVAAAQVIRDRAFGPGHGLRSISGRVAA

SEQ ID NO: 16853 - protein, 375 aa, Methylobacterium sp.
VQQIRSYKYRLRPNRAQTTLLDAMLRDFCSLYNACLQQRVEAYKRRGLTLRYAQQAAELKSVRAEDPDGLGRWSFSALQQVLRRVEQTYSAFFKRGHGFPRYRGSARYHAATFRVGDGLTLKKDRRIGVVGVPGGIKAVWHRDLPPDAKLGTAILTRQQGRWYAVLSVEADFAETCGSGMVGIDLGLNSLIATSDGETVAAPRHARKAQKAQRRRQRALARCRRGSRRRLKAKARLAAGSARIARQRRDHLHKLSRSLVSRYWGIAFEDLNLTGLKRGMLARSVHDAAWSLLVQLLRYKAANAGAEVLMVDPRGTSQTCPECGTVKAKTLGVRVHACACGCVLDRDVAAARIVHQRAFGLGPGHGLRCVSGRVAA

SEQ ID NO: 16854 - protein, 409 aa, Methylobacterium sp.
VTIVRGFRYRLDPLPEQEHLLRQFAGVCRLVYNLGLEQRATWGRRHRIGFASQCVDLTRLRAEFDWVRAVYVSCQQQALRDLDRAFQNFFAGRASFPRPRKRGVNDSLRFPGREIEIKRLNARWSAVRLPKIGWVKFRDTQPTRGSMKNATVSLDADGWQVSFACEIEHEAPAPLPAIIGIDRGVATTLALSTGETMKMPTSLERIEARKRKAQRVVARRQRGSKRRRRAQRRVARLQARQAHIRRDFHHRAALGIARRFGVAVLEALNTRNMTASARGTVMEPGRNVRQKAGLNRAILNAGWHAFATILSYKMEERGGQVVTVPARFTSQTCAACGVVDARSRESQARFSCISCGHTDHADTNAAINIQRRWNTPLLDVEGLRQRPYEASTRRGLTVSENPRSSGGRC

SEQ ID NO: 16855 - protein, 402 aa, unknown
  TnpB Polypeptide
MKRRYRFRLYPHPHQIGAIGKAFGCARVVWNDALAKSRELYSAGQKVTYPILAKLCITQAKQTPERKWLAEPSNTILQQSVRDLDRAYRNWWNSLKGKRRGSGVGPPRFKKKCGTQSARFTSNAFRVKNNRLILAKIGSVPIIWSRSLPSSPTSVTIIRDSSGRYFASFVVEVEPSQMPKNGKVIGIDLGLTSLAVTSDGKKIAPPRFLRSALKRLRRLQRNLKHKEKGSNRLAFARRRVAKLHAKAADRRLDFLHQLSTRIIRENQTVVLEDLNVSGMLKNKKLARSIADAGWRQFRALLESKAEQYGRQVVVINRWLPTSQVCSACGHHDGKKELSIREWQCPSCGTVHDRDINAALNILAAGLAESQNGRGAVHQSTLSVAAGCEASTHPIAEAFPCTA

SEQ ID NO: 16856 - protein, 396 aa, Enterococcus sp.
MFKIKETIVNREQVNLIERLKGYKFRIYPTEEQAIFFAKSFGCVRKVYNLMLDDRKKVYEEVKNDSSKKMRFPTPAKYKEEFPFLKEVDSLALANAQLNLDKAYKNFFRDQSVGFPRFKSKKNPVQSYTTNNQHGTVKIINNKFIKVPKLKSLIRIKQHRQPKGIIKSATISRHSSGKYYISLLCKEEIKELPKTNSTIGIDLGITDFAILSDGQKIDNNKFTSKMAKKLKREQRKLSRRALLAKQKGINLFEAKNYQKQKRIVARLHEKVMNQRNDFLNKLSTEIIKKHEIICIEDLNTKGMLRNHKLAKSISDVSWSSFVTKLQYKADWYGCEIIKVDKWFPSSQICSACGHKEDKKTLEIREWTCSSCRAHHDRDINASINILNEGLRIKDLV

SEQ ID NO: 16857 - protein, 410 aa, Moorea sp.
VISAYQYKLRLNKNQIAKIEKWLDMLRCQYNYLLADRFNWYERNRCSINSCPLTCYLPELRKKPDYFSQKKTLPGLKKSRPWYAEIHSQVLQDCVKRVDLAFKRFLKGDCNGNRSGKPRFKSKSRYRSFTFPSLSKNPVSGNILTLPKFGKVKMIYHRPIPDGFTIKTATITRKADGYYVTLLIQDDSAPEIIPINSVTNPVGIDMGLKSFLIKSDGTEVPIPQYYRKAQKRLKKIQKAVSRSKKGSNNRKKAVLKLGKAHKKVADTRKDFHFKTAKDLLDNHDLVAHEKLNIKGLAKSKMAKSVLDAGWGQFLSILSVKAEIAGLATKAVNPRNTSQNCSNCGKKVQKKLKDRIHSCPHCGYTEDRDVNAAKNILKLAVGHPVRSKAYRVSEPIGGVGKKPTLNLKRSV

SEQ ID NO: 16858 - protein, 334 aa, Moorea sp.
SSISRFFENCKKKVPGKKGFPRFQKHCRFGVADAARTVEYKQSGWKLSPDKKSITFSDKKGIGRLKLKGTWDLWRFDKKQIKRVRIVKRADGYYVQFCVSVNIKEELEPSRTTIGLDVGLKDFYTDSDGHSEPNPRFYRKGEKRLKFYQRRVSRKKKGSSNRKKAVNRLGRHHLKVSRQRKEHAKRLARCVIRSNDLVAYEDLRVKNLVKNHCLAKSINDAGWYQFRKWLEHFGQKFGRVTVAVNPAYTSQNCSECGEIVKKSLSTRTHVCECGCELDRDHNAAINILKRALGTVGHTGTWIHYPNASGESTSTLSGSGLIEQVGSLNEESPRL

SEQ ID NO: 16859 - protein, 367 aa, unknown
  TnpB Polypeptide
MKLIVNLKLQPTPTQAKSLRATLERANATCNWISEQGWNTQPKPTLKQFALHKLIYHKAKLKFDLTAQMIVRCISKVADAYKLDNKRLRTFKRHGSIAYDDRIIRFTKDEAVNLWTVDGRETIPFAAGDYQRKLLPFRKGEVDLVFRNGNYYLNAVCDVEEIPQGTPKDVLGVDFGIVNVATDSDGTIYSGTKIEEKRRLYAHRRANLQKKQTRSAKRKLKQLAGKQQRFQRNENHCISKTIVLNAQGTKRAISLEDLKGIRDRLTVRRRQRAMLANWTFSQLREFISYKARLRGVTVYAVDPRNSSRECSRCGYTDKANRSNQATFSCKSCEFSTLADFNAALNLRVRGLVNVPNVQSHKASGFAA

SEQ ID NO: 16860 - protein, 228 aa, unknown
  TnpB Polypeptide
VLVFKYHRWVFEEKELQKFLGLDFSMHELYRDSNGKEPAYPRYYRNAEKKLAREQRKLSKMQKGSNNRNKQRLKVAKLHEKVSNQRKDFLHKQSRQITNAYDCVCIEDLDMKAMSRSLNFGKSVSDNGWGMFTTFLRYKLEEQGKKLVKVDRFFASSQTCSVCGYKNAKTKNLALREWDCPQCGTHHDRDVNAYVRKNAGLQTADIWYNKEDFVKEIIEQRNKNPERV

SEQ ID NO: 16861 - protein, 188 aa, unknown
  TnpB Polypeptide
LFIIQKSQRRLVQAQRVLSRRQRRAKKEGRSLHGAKNYQKQRLVVAKLHDKIRRQRQDFLHVLSTALIKNHDIVVAEELRSKNLLKNHALSQSISDAGWRTFLTMLEYKADLYDKEFITIDPKFTTQRCHHCGTIMGQNGYKKLTLKDREWTCPVCHKEHIRDWNAAINILEKGQGIWSNHTRMKKAA

SEQ ID NO: 16862 - protein, 402 aa, Salmonella sp.
MKRLQAFKFQLRPDGQQERDMRRFAGACRFVFNRALALQNENHESGNKYIPYTKMTSWLIGWKADQETQWLKEAPSQPLQQSLKDLERGYKNFFQKRAAFPRFKKRGQNDAFRYPQGVKLDQANSRISFPKLGWIRYRNSREVVGEVKNVTVSQSCGKWYVSIQTEYEVPEPAHNATSIVGLDAGVTRLATLSDGTVYQPVNSFKANQRKLATFQRQLSRKVKFSSNWQKQKRKIRHLHSHIANIRRDYLHKVTSEISKNHAMIVIEDLKVSNMSKSAKGTAEQHGRNVKAKSGLNRSILDQGWYEMRRQLEYKQLWRGGQVLAVPPAYTSQRCACCGHTAKENRLSQSKFVCQACGYTANADVNGARNILAAGHAVLACGGMVQSGRPLKQEPTGARQAPV

SEQ ID NO: 16863 - protein, 382 aa, Nocardia sp.
VQLRYNFRLRPTVGQQESLAKAFGCGRVVFNDALRARREAFEVGQRISDGDLSKRLTAAKATPERAWLGEVSSVMLQQALADLNTAYRNFFQSVTGKRKGAKVAPPKFRSRKDNRQSIRFTRNARFAVTVGRKLRLPKIGDIAVRWSRELPSDPSSVTIIKDAAGRYFASFVVEVTDEPLPVIDSEVGIDLGLTTFAVLSNGKTITSPKFLRRAERKLRAAQKDLSRKQKGSNNRAKARIRVARAHAKVTDQRKDWAHKNSTAIIRDNQAVYVEDLCIRGLARTRLAKPVHDAGWAMFTRMLEEKAQRYGRVFAKVDRFFASSQTCSACGVLDGKKPLSVREWQCKACGAVHDRDLNAAKNIHAAGRAEWLNACGGAVSPAA

SEQ ID NO: 16864 - protein, 708 aa, unknown
  TnpB Polypeptide
MKINLTYTVNKKSIPDFYCEVLNCYGLSAKNIKNSTLFIIKNILTSYTYDKDLKTYTLKNNLHQNQLDIISTVNQTISTLNAKLKAKYEQKLNIYNKDKEKYEEDNKNKEQKEEFKLKEPKLIQFNEYSQTIDSKTYYQIINKTLLENVIKTKELNNKINNINYQDYSEVHSHLAQSVVQQVCDEYHYYFKALKEYFIQHKDKTINNSENNNFTGMPKEPQYKAKNSKITFELCTERFNNNGTVLIIGNKHKLYKDYAKKELLKPEIIDKFNSFNLMEVISNDLKEKNIHYLNNINNYDIVGIRVIPGKYKKLPKIEYIISFEKELKGFYPDLMNKAQQRYNKDFFELKSNLQLSIIKDYFNNDYKDLNNQLNEDLNNNTSKVNNNNSVPYFMGLDLGVVNFAAVSFYTANRDKNYVISGKTLKSRISQLDNRIDKKKKELCIDTIKLIQSKKDKKEVLTRQELNLLSEYYKSIYNDELISQSQERKNNISSDYIHKLSKCLIDECIKKNIKVIVVGKNKGWKQEINNGAKNNRDFYNFPHARFIEVLKYKGLLKDIVVIEVEESYTSKTSFIDNEELRVYQDKRSKDLDNSEERNLTQGNKNQLSKDVSKSTIKNNKIKLLGKRVNRKFITKNGKIIHADINGSFNIVRKVLLNFKYNKETINLSYELMELNMSRKVKLNNFYAQSLIKKQKLKEIKCEQSGVALSF

SEQ ID NO: 16865 - protein, 575 aa, unknown
  TnpB Polypeptide
MTKATTIINSTSLNNNEINEPEKDYKTFSVHESNLSIVKSITKTLLTYKHLENILNILLQQQLSLSDNDNLTLQQKELHKDIFWLLLNPMVMKAVLSNTSGKKYKDFIIKINTYFKDNHLFQQAKSLHNELNAHNSSMLIRRLNKDWKNYFSSLKDFYNGNPKGLTGKPSYPKAKKLSKVFNYSLPLEPSKFSLKKLKQGLLGLNLGKKIFYVYIGKNIDYIQDKTINNVTISYSHGHIYYQFTYVHNKPLILDKELSFNKKKVIKEAGADVGINNLLSLFINDNSTQSLIISGKELISYNVHFNKRLAKTNELISNEVSSYKTIIGKNNQPYEVPESYTELGKKLIHRREQLFERRKLYLDDYLNKMSKKVLTYLQLNKVNVLVLSKNLSFTKTTGEIKMIKKTKQKFYQIPFGRLLNLIEEKSSQYGIEVKWIDEAYTSKTSSISADVNNIQRKGKELREKESKNLPIEEKDLITSNDLKGNRGVKKGLGRGMYKDTIIEKIMNADLNGACNHIKVYLGNRSKDMIMRLKQQSHYLWKWCNPVKIKSNHEFDKILKNIKNLSQIVNRQNLLCE

SEQ ID NO: 16866 - protein, 538 aa, unknown
  TnpB Polypeptide
MKENNKNPNLKSILYTSKYFNTGKGEEVKQLLRTISNYKNVLSKYVYENRNLLLTSDGIKTLKANYKIVKDDTILAWNIQKEHHMLVDKYADALKKHMKNLNIRIQDKMVVKRYSRSGKRHKKGETKYFEIKFRTTKLTKLIKYLVYLDFSKDIEPQITNGAVKDLLDYHKTKPYFDRILNLAKDIQNRLLSKIKFIDFNNDYSIRLTSSNENNARIEIDNTNSLYKHWFIFKMKGDKEYRLPLEINDEYHTKEIIGKEFILYLSLKKNKLNISTTYEGNEPVFKSFNKAIGMDVNIKHNFAKLSDDKEIDYDREFFKSIVKDLSKLDKIGYQNLNEKELKRLQKLYRRLDWYVELLIHNILDYCEQNGITDLVVEDLRLKDKSNIINEEFNMKYSRLVKLLHLSDVKNALLRQGEKRGIRVHIVHSEWTSLRCPECGNISPENRTTQEVFKCTSCGYEDNADHVGSTNVLERFNLFHWLGVQANKLYSVDKYGRITPKHVSRHTLLNVLNQYYKARGFLHHPVLPSEVNSGRMVVKV

SEQ ID NO: 16867 - protein, 376 aa, Arsenophonus sp.
MKRAYKYRFYPTSEQVELLANTFGCVRFVYNSILRWRTDAYYERKEKISYIQANARLTALKKETDVQWLNSVSCVPLQQVLRHQQAAFSNFFSGRAKYPTFKTKHHKQSAEFTASAFKYRDGKLYIAKSKEPLDIRWSRELPSAPSTVTISKDASGRYFASCLCEFEPISLPVSEKMTGIDIGLKDLFVTDTGLKTGNPRHTTKYSKRLALLQRRLSKKKKGSNNRTKARLKVAKLHAKITDCRLDNLHKLSHRLINENQVVCVESLKVKNMIRNPKLSKAIADASWGEFVRQIEYKANWYGRTIVAIDQCFPSSKRCSDCGYTLSKLALNIRSWRCPECGVNHDRDINAAKNIKAAGLAVLALGEPISPKSLNAA

SEQ ID NO: 16868 - protein, 401 aa, Lachnospiraceae sp.
VETLVHAAGSRVPVYDFDTQFYKFPSYLLRSSITEAIGKVSSYQSNHKNWENADPKDRGWEPGHPRAGMIFPYLYRGNCFVRTGEYTAKIKAFIHHTWDWITVPLRKSDADYISRHCADRKECAPVLQKRGKRWSLNFCYKEESELHNEDIYNQRIVAVDLGINSSCTCSVMCPDGTVLGRHFLHLSREYDCLRHKTDHIRRAQHRGSRKIRRLWRYADGVNDDIAEKTAQFIIDTAVLYQAHTIVFEHLDFRGRKKNNIRLHLWKSQTIQDIVANKAHRLGMRISRICAWNTSRFAYYDSGEVLRGRKSGKTNGSYSVCEFSNGRVYNCDLNASYNIGARYFVREILKTLPVTEEQRIRANVSGYAKRITCTLATLISLNSELWASASESSPNSMNWDKK

SEQ ID NO: 16869 - protein, 386 aa, unknown
  TnpB Polypeptide
MRKLLKSFKTEINPTIEQKIKINKTIGTCRYVYNFYLGHNKTLYDNGEKFMTGKSFSVWLNNEYIPNNPDKIWIKEAYSKAVKKSIEDGCTAFTRFFKQQSAFPNFKKKCKSDVKMYFVKNNPKDCRCERHRINIPSLGWVRIKEKGYIPTTKDGWKIKSGTVSIKTDRYYVSVLVEIPDTKIVNNSSEGIGIDLGLKDLAIVSNGKTYKNINKSVRLKKLEKQLRREQRCLSRKYENLKKGESTQKNIQKQKLKVQKLHQRINNIRTDYINKTIAEIVKTKPSYITIEDLNVKGMMKNRQLSKAVAAQKFYEIRVKLKAKCVELGIELRIVSRRYPSSKMCHHCGRIKKDLKLSDRIYRCLCGYIKDRDVNASLNLRDAMTYEIA

SEQ ID NO: 16870 - protein, 496 aa, unknown
  TnpB Polypeptide
MFITLRFKILPKNNKDKQMILNLMRAYSSCHRFVYKRLLENYKEKEIYKLSREKFKDLPTWFILSAISEAKDLLKSKKRKVVFGGKRLFTQLCIHHLQGWRLEEVKREWREKRKGNLLSIGHNKYGNPNIKFIFKENGLYLKITSFEKRKPIIVEVKRKVKSKKDKWTNFICLLLENQKFPYTIRLKLKNNKIYGYVSFEIQEPKIKITKENGVIGIDINAKPFHLAIAEINKDGNLISYKRIKLGYLNNFSKNRKEYEEWLIAHKIINLAKEKNKAIVIENINNLPKGKRGDGKKKLRKVLLRFSYERILNKIERLCLLNGIEIIKVNPSYTSIYGKLKYSPQLNIDKDIAGAYVIARRGLGLKEKVPKNYKRLLNDKKFLEYLEKSLKQRQKQLEEKLKKETNKYKQNPIKVEINRIKKNLKLIKSLQSEPEGLLGAYGRNLSNQKNLWQALEVALTTLLPEKRCFSPLKAILIEGKWERVVSRLGLLCFGRPK

SEQ ID NO: 16871 - protein, 433 aa, Hyperthermus sp.
MARVTRTVIVRSTKLPRKVFRVFVELEGMYRNMIEQLTMYAVRNNIKSFTKLKALKYRELRKLYPQLPSHYVYTACQDASARTKSFTRLKKLGLAEREYPEIRKVSIWLDDHLWKLNGLTSIRIATHKGWVTVESDPHRQYWRYVNRGWKLASEAKIKLDKRNKQLIIYLTFVREVEEYKPRGFLSVDANENNITILLDGIAYLFETNTEKLVLGYYYRRKRIQERYDKLYGVKSRIKRKVIRKFKERKKKNDIKWKIANIIVRTAYERRYAIVLEKLGKKPANSMIKRIRDKQLRHRIFQASFRGIQRAIEEKAREYGVPVIYKPPKGTSTMCPIHNVPIIYNDGSRIGRCSKGGELWHRDVAACWNLLFKALRGDGSHAPSPAGHIPVDVSPMPLGTNATHDPTRVPRAVWARWKSLEATPNNPKITGMTL

SEQ ID NO: 16872 - protein, 438 aa, unknown
  TnpB Polypeptide
MLRGIQIRIYPNKEQAEYISRLLGCCRVVYNALVDKSREHYRAHKDEEEPPSFDSKQALKDLEAEKPFIREVHSKVRQQTVRDWMAARAKFFDAVKKGKVEPKLDKDGKPTGWLTYEPKFHKKNIDDHCRFPVDAFIGIKGNRISIIKALKDIHFKCSRKDERYLNRHQNEVKSVSLRRKGSGKIFCSILIEDCRVQPLPPVEHEVGIDLGVKDAIATSDGEKYGNPKALAEYEKRISRLERRKARQVKGSNRRRKTVRRIAKYHEKVANIRMDSKHKGTTSIVRKSQVVYVEDLNVAGMMKNHKLAKSLGDAAMSAKARMLEYKCRWYGREFWQVGRNFASSQICSHCGYKNQTVKDLNVRAWVCPKCGKVHDRDVNAAKNVKHEGHRIREENLVGLSSPEPDARGQGNGGVLEPQGDTTAVLEEARTKCDGRRSCI

SEQ ID NO: 16873 - protein, 392 aa, unknown
  TnpB Polypeptide
MIKSYKYRLSPTRKQHDALQETLDRCRELYNAALQERRDAYRMCHVSLNYYDQAAQLSEIKELREEYTGIHSQVLQDVLRRVEKGMKAFFRRLKAGEAPGYPRFQSRDRYDSVTYPQSGFRLTHDSRVCLSKIGSIKVKLHRPLEGILKNCTVKREGEYWYVLFSCEVEQVARLAYTDDAIGIDLGLLHFATLSTGDTIENPRYYRRGEKGLQKAQQHLARCKRGSHRRNKARKHVARCHRKVRNQRADFLHKQSRQLVNTYETLVFEGLSPSNMSKAPKPKQDENGAYLPNGASQKAGLNKSIVDAGWGTFVSMGKSKAEEAGSVHVFTVNPEYTSQMCSGCGVVRKKVLSERWHSCECGIELDRDHNAALNILRLGRSQQEAIPVEAPAF

SEQ ID NO: 16874 - protein, 381 aa, unknown
  TnpB Polypeptide
MKSVVTIKLKIPCKKELLETMKQYSQSAQYVVDTGWDNGTYSKRELHNLTYYPIRETLELPAQLVCSSRDKACETLKSLRKIKKPKKPNFREMLTIRYDARSFSFNFDCVSLATINGRLKIPVDIPEYYWQYLDLDVRNADLILDRKNKLFLHITFSRDIQLPSNSDGFLGVDAGINQVAVTSNRQFFNARQIKLKRIKFKKLRAKLQSKGTKSAKKLLKKVSGREQRFMRYWNHVISKQIVNNCEFGTIVLENLKGIRNVRKGRKFNFWLNRWSFYQLQQFIIYKALRSGIKTVKVSPYHTSQICSRCGKLGSRSKSFFVCSHCGYSLNADLNASFNLAKHYSNADSVSVPVTVPDIRVDEHKGSLRTIACETMDKSPHI

SEQ ID NO: 16875 - protein, 396 aa, unknown
  TnpB Polypeptide
MSRYRLLPTPAQEAVLRDHCGHARFTWNLAVEQHQHWRPGRAGAPGYLEQCRQLTAARGENPWLAAGSQMVQQQALRDFAQALKAFFDPGNPVRRPTWRKAGRDEGFRIVGKRGRQWDVRRLSRKIAEVWVPKAGWVRFRWSRPVPAGAKSYRVTMDRAGRWHVAFAVIPKPVSAPRNGQVVGIDRGVTVSAALSTGDLLHVPGLTAQERQRMRRLQRKLARTRRGSNRRGRVRLAIARLTARQTDRRKDWAEQASTRIARRFDLIRLEDLQIKNMTRSARGTSVDPGRRVRQKAGLNRQILRSGWGLLVRRLEDKAPGRVEKINPAFTSQRCSTCGHIAAESRKSQALFSCVACNFTLNADVNAARNIAAGHAVTARGGLRNAGPANREPQLLAS

SEQ ID NO: 16876 - protein, 414 aa, unknown
  TnpB Polypeptide
VRIIAGKETKAKLKALGKAFVDCWNEVNKLRLEQYKRHEPVDFNKTEKVVYEKFKAALHGANVEQVTRKNASAWKSFFELSKKKKKGELPKWMKPKPPYKKKDDLFLLIRNDRYKIEGNEIYLLDFKLRLKFNGKLKWVGKQGTLEIYYDIVRRKWYARIPMVVKLDNKPRGKMKAGIDLGIANLATVAVDDGSWMLFKGGSLLSEFKKITKSISIEEKRLAKHGLKTSRKLEKLYNKRSLLLKNAREGLAREIVESLYDKGVGEIFIGYPKGIAQDKGNERNTNFWSYSSIIKRIKNVAQEYGIKIKPVNEANTSKMCSLCGEIHENGRIKRGLFKCPHTGKAINADLNGAINILHIPESVKDRGKWLKTQPVVYRWTSGAGWVTTSYEVMKMKAINHEPLISLEGTTFPLGL

SEQ ID NO: 16877 - protein, 356 aa, unknown
  TnpB Polypeptide
MLKAYKYRIYPTEEQKEYFTKTFGCVRFIYNKMLKDKIEYYKETGKILKNKPAQYKAEFTFLKEVDSLALANAQIDLETAYKNFFRDKSIGFPEFKSKKNNQSFKTNNQNGTVAIVDDKLKITELKSLIKVKLHRNFTGIIKSATISKTSTGKYFVSVLVDTENIKKTKLDTKVGVDLGIKDFAITSNGDKYENPKWLRKSEKRLKKLQKDLSRKQKGGNNRNKARLKVAKLHEKITNQRKDFLHKLSSKLINENQVMVLEDLKIKNLQKNHKLAKCISEASWSEFRRMLEYKANWYGREIIIADPNYASSQICSKCGYKNSEVKDLGLREWTCPQCGTYHDRDINASKNLLKLAI

SEQ ID NO: 16878 - protein, 395 aa, unknown
  TnpB Polypeptide
MQLVEQHIIKKSNDLYKELDKMCLLSKNLYNQSLYRVRQYYFENKKYLTYANNVNSLTQEQQVDYISLPRKVSQWVCKQVDQNFKSFFSSLKSKNVNHKVRIPQYLDKNGRNILTFTNQAISQKELKNGYLKLSGCESKIKVLHNNIQQVRIIPQANRYVVEIIYTIPDVEYKTNTNYVGIDLGLNNLATIGGNIITPIIINGKPLKSINQFYNKKLYKLKSKQDLCKNKTVNKKKIQTLTNKRNNKIKDYLHKASKILVNHLVSNDISTIVIGHNKEWKQDINIGKQNNQKFVQIPFNTFIHMITYKAQMQGIKVIQREESYTSKCSFMDNEEICKHEKYKGNRIKRGLYKTQTGRLINADLNGALNILKKEIPNAFGGYGIEVCSTPIVLTIK

SEQ ID NO: 16879 - protein, 574 aa, unknown
  TnpB Polypeptide
VRLPDEAQADALRLLDASREVVNQTLLILWPLLDEFGCERTGPAWKQVGKYIGSPSPHGDRQWRCESEVVGRLLRQQAERKKAFELVAPILSEGFIRPKTENRSAGKNRPAMTEAISTLQKSLEEDETSFVAVQNVVEQSCNFFFQQDRFPASYEELQPVPLLKVGMLTYAGDDGREKGQAYRMAVDQEAGVAGLRFRYPDAAGVWHWRKTDTTLALPDCLKERLRNGELMAPTLREERRADGERFAVLDFIIEVEKEPLPDWESVERVLGADWGVHSLLTATAVDEHSKQVGRPFFLDTGSFDGRQARTRRQIDELKKKVAIYEQERDALPVEHPKRAWYQQQLALYRREIERCWRKYEQRNRALAHLASNVLLLLARVHHCSLLSMESLKTLKTTGRGRGVRGRWRNYRNNTTIRGEIWRHLRYKCHLVGLRFQTCPPRGTSHTCPHCGKPAKTYREPSNRREAVKWGRWMWCEACGYNGDRDYCASLNIARLGVAYLLQMKHMGKARSCSITDPRVKPVSYTGTGSALLLPPTGSLSARHVRGKICYAPGWLGSAFLQSSQPRAVFLRLCG

SEQ ID NO: 16880 - protein, 368 aa, Thiomicrorhabdus sp.
VSKRRLQDQLVKKKKTLKYHWLTTVNSQSLLSTLDHLDKAFSAFFRGSSKYPNFKSKRASWQSFQNPQHVQADFESSMVKLPKIGRVKAVFHRTFEGRIKTCTVKKAPSGAFTLSMLIDDSTQLPSKSIVEPELTLGIDVGIKTFAVCSDETEFENPRFLNSVLVKLKQQQRILSRKKKGSANRSKQVRHVAVLHERTANARNNYSHLISHKLAVENQATSLVVEDLNIKGLIRNRKLSRHIADVAWGSFLQQLAYKCDWYGKNLITIGRFVPSSKTCSNCGGYKSDLKLSDRMYECAECKTVIDRDYNAAINIKNFGLKQELETFGANGTVKCSSKPISTQLDGLAKGVSIYLHRSVEVPTKTALAV

SEQ ID NO: 16881 - protein, 416 aa, Nonomuraea sp.
MRVKRADDASALFSRRVRFPSRWRGLGDNVFEVKLVVQVKLLPTPEQAAALEATLRTVNDAATWVAALAHSQRVFRNYDLRRHVYGQVKDRYGLAAQAAQHVIKKVADAYTTLHAHVRNGNLGKRGSVRRERVLARPIVFRPGAAQPFDDRCLSWRMDARTVSIWTVGGRMKGVAFTASADQLTLLAAHRKGESDLLYRDGRWFLIATCDLPDVPVRAPDGFVGVDLGIANIATTATGTGDGVRHSGKTLNAVRHRHRELRRRLQAKATKSAKRLLRKRRRKEARFAADTNHTIARRIVTEAARTGRGIALEDLQGIRDRVRLRKPQRVTLHAWSFHQLGHFIAYKAARAGVALVWVDPAYTSQACSACGHVAKNNRPDQETFACTSCGFAEHADVNAARNIAARGETGWAVSHAA

SEQ ID NO: 16882 - protein, 340 aa, unknown
  TnpB Polypeptide
VFRTHDLKQFSLNKALYPTLRAEFGLKSQMTQSVFKTVIARYKTILENQKKWIKPSFKKPQYDLVWNRDYSLTQDRFSINTLGGRVKLPYFAEGMSKYFDRSIYRFGTAKLVNKHGKYFLHIPVTYDVEESDLSDICHVVGIDRGINFVVATYDSKHKSGFVRGRSIKQKKAHYSALRKELQMRHTPSSRRRLKSIGQRENRWMQDVNHCVSKALVVNNPAHTLFVLEDLSGIRNAAERVKTKHRYISVSWAFYDLEQKLIYKAKQNHSSVIKVNPRYTSQCCPVCGHTEKANRNKKIHLFTCKNCGYKSNDDRIGAMNLYRMGINYLYDSQVPDTVAAE

SEQ ID NO: 16883 - protein, 418 aa, unknown
  TnpB Polypeptide
MIRTFRFQIRARPALDSQLRRFAGGARWVWNQALAEQRARHARGEKYAGHAEMCKWLTAWRNAPSTVWLAEGPTHAQQQVLRRLDEAFIRFFAKSGGFPSFKRRGAEPGIRFPDPKHLAFDAANGRIKLPKLGWVRVRLSQPVAGEVRNVTISREGARWFASIQVQTVQTVQALGVPPSLGIDLGLAHFAAMSDGQTVAPLKALARQQCRLRKYQRSVARKNRGSANRRKAVARLGNLHRKIARQRAHWLHELTTKLADRHPVIALEDLRVKNMSASAKGNAGQRGVNVRQKAGLNRNILDAAWGEFRRQLEYKLQWRGGQVILVNPAYTSRTCRICGSESAENRKTQSVFACVACGHVEHADVHAAKNILAAGHAVWLKETSAEACGGEVRHAKPLKAKRAAPKKQEPTEAGGLVCA

SEQ ID NO: 16884 - protein, 335 aa, Gammaproteobacteria sp.
MLIIIKIPGNVNVIQIQGSKTKTFEYWLKISTLEKGKPIYVPIKIHNYGKQVLGEGKLRGGVTLSKTDGQWYATLAVEIEKKKPIADLSHMVGVDLGIKNIFTASTGQFFGQFSNPLKKLLEQSEVKRRRKQKLNACLKKKGKPEVDLSSPKIIATVRNEIGRAANQLVNTLEKDSLVVLEKLNIKGMKFKSKRMNRILKASKIGLALDKLKEKLDYKHIRYAMVPAAYSSQECSECGYVHKKNRPTPEKFKCGYCGPKENADVNAGKVLIKRFGDAELLNVGHFRFVKTILLERFDKLFPDARSISGGLQPGTEPIRTVLREIGWQQLTVNQST

SEQ ID NO: 16885 - protein, 380 aa, unknown
  TnpB Polypeptide
MLIPNNKQKTKLIQCFGVSRFAYNWTLGKQQENYKNGGKFISDNELRKEFTKLKKTKEYEWLNQYSNNIPKQAIKDACDSYKRFFKGYSKFPRFKSKKKSRPSFYVDNIKIKFSDTHVKLEKLSNSTKKNKAKLNWVRLAEKNRIPTDCKYINPRVTFDGVNFWISVGIEYENNLELPTNEGIGIDLGIKDLAICSDKNIYKNINKTSKVKKIEKKRRRLQRQISRKYELNREGRSYKKTSNIKKLEKELLKVNQRLTNIRHNYLHQTTTEIINRKPIFIVLESLNVVGMMKNKHLAKAIQQQCFYEFYRQIQYKCLWNNIKFIEADRFYPSSKTCSECGSVKKQLKLSEREYICEECGCVIDRDYNASVNLMKYGQSIA

SEQ ID NO: 16886 - protein, 409 aa, Okeania sp.
LIFQPLITLTYQYKLNPTQQQEIEINRILDVCKSVYNYALRERKDWSSARKSPINSCSIVSEYIIPADAPYPNYNHQAKNLTIAKKIHPKLKSVNAQVLQQTLKILDRAFSDMKSQGKGYPRFKKKLRSFVFPAMLKNCLGNNRVKLPQLGWIKIRQSRPYPDGFQAKQARIVKKASGYYLMIIFTSSELLPDNPVGKKSLGIDAGIESFVATSTGKLIKSPKFLFSQLRELKLLQRRLNKKKKGSNNWLKLQKKIAKIHEKIANTRRDWHFKLAHELCDNTDNIFVEDINFNSWSRGIVRKQSNDSGIGQFINEILPYICWKRGKYYGKVDKNYTSQECPKCGQIEKKKLSDRKHNCSNCGYEINRDIAAAKVIRNRGLIAVGHAVKEKACGDGLTGVQLSLFDLLPS

SEQ ID NO: 16887 - protein, 413 aa, unknown
  TnpB Polypeptide
MLETARTYVAKITNHQQVCDDLDQCGFAASKLWNVGRYYIQGRWDDDGEIPDEKELKSELKDHERYSDLHSQSSQRALEELAEAFTGWYNSDDGNNPPGYRKRGDRHPRSTVTWKQKGIKHDAKHGQLRLSKGWNLKEGRSDFILAEYETRPDVDIENIQQVRGVWNGDEWELHLVCKKEIPVEDAPGDKTAGIDLGISNYLAIDYEDGPSELYPGNRLKEDKHYFTRDEYQTEGEHGPSKRARRARRKDHFLHTLSKHIVQRCVKEGIGTIAVGDLSDIREDDTGDSRNWGQSGNKKLHGWEFDQFTRLLEYKAEEHGILVDRVDEANTSKTCSCCGQIRDANRVERGLYVCDSCETTMNADVNGAVNIRRKITQTPPTGDMSNGWLAQPGVYLFDTTTGAFHPQEQGDCKP

SEQ ID NO: 16888 - protein, 408 aa, unknown
  TnpB Polypeptide
VSNVLILCERHIVKPNSPLFSECDNLSFLAKNLYNSTLYYQRQSLFESDFQNYYAVDREFTHTNQPDYRALPAKVSKQVQMLVDRNFKSYFALVKKKNTESYSSKVKLPKYLDKTEGRCTVPYPKDALSLTVEGYVKLSKTSITIKTNVSKEVIQGARIVPKGNHYVIEILYKVVSKPLRSELPKRVAFIDPGLDNLMTVTSNCFNPILVNGRPLKAINQLANKEIAKLKSKLSVQGLYTSPLLQSVYSKRARRITYMLHKITTQLVNHLDSYNIDTVIFGHNIGQKQDINLGKVTNQNFVQIPFTQLIAQLQYKCQLKSIKFILTEESHTSKCSFLDKESIEHHDKYKGKRVKRGLFKTSKGILINADVNGSLNIGRKYLTKAGLYVDGLHQSLVEFMVNPKLVNFA

SEQ ID NO: 16889 - protein, 334 aa, Streptomyces sp.
VGNSAVKRAYKFRFYPDDAQAQELSRTFGCVRKVYNLALAARAEAWKRRERVNYGQTSAMLTAWRQSGELSYLAEVSCVPLQQALRHLQSAFTAFWAGRSKYPRFKSKRKSRASAEYTRSAFRFRNGELTLAKMAAPLPVVWSRPLPEGAEPSTVTVSRDRAGRWFVSILCEDTPAPLPATTNAVGIDAGLGALVTLSTGEKIENPRHERKDRKRLARAQRMLSRKEKGSKNQAKARVRLARVHARSADRRRDHLHQLTTRLVRENQTLVIEDLAVRHLLGNHRLARAISDAAWRELRAMLEYKAAWYGRELIIVDRWFPSCALPAGPSPTRCP

SEQ ID NO: 16890 - protein, 497 aa, Clostridium sp.
VKKLKRAYKVEINPTDKQKSKIHQTIGVSRFVYNFYIAHNKEIYHREGKFVSGMDFSKWLNNEYIPKNQDMKWIKEVSSKATKQAIMNGDKAFRDFFKKAKGFPKFKKKKNQDVKAYFPKNNKTDWTLERHKVKIPTLGWVRLKEFGYIPVNSIVKSGTVSQKADKYYVSILVEEDDKKVYKSTNEGLGIDLGVKEFVVCSNGIKFKNINKTSTVKKVEKKLKREQRKLSRKYESLKIRNKNLKEGKGITMKKILNVAHRGLSGLYPENTMIAFRKAIEADCDGIEMDVHLTRDGVPVVIHDEEVDRTTNGSGYVKDFTYEQLCNLDAGIKFSDEFKGEKIPTLKEFFDFMKDNDKLINIELKNSIIHYEGLEEKVYKEIENYGFEDRVIISSFDHYSIRKCIRLNKNIKTGILYCDCIFEPHNYCKVVGSSALHPEFNSITEEIVRAAHEDFQQINVYTVNEKKDMEKMIDLKVDMIITNYPNILKEVLENKYNKV

SEQ ID NO: 16891 - protein, 333 aa, unknown
  TnpB Polypeptide
VERCWFAIARFFDNCKKQKLRKKGYPKFKKHCRSVEYKTSGWKLLDPKHIKFTDGKGIGKLKLVGTWDLAYYSRDQIKRVRLVRRADGYYAQFCVKVDVEVETKPTHKTIGLDLGLKYFIADSHGLLRRGCAGAGVWESPKFYRKAEHQLNRANRKKSKKYRRGVKPQSNNYHKARNRYARKHLRVSRQRKEYCKRAAYCVIQSNDLVAYEDLNVKGLVKNRRLGKSISDAGWYTFREWLEHFGRKYGKVTVAVPPHYTSQKCSNCDEIVKKSLSCRTHVCNHCGYVADRDVNAAINILKKGLTTVGHTGSHTLGEIGSLAALEQSCAVKSGR

SEQ ID NO: 16892 - protein, 425 aa, unknown
  TnpB Polypeptide
MTDAQALVKTLDFQLDIRSDNEGLLYDATLESRSVYNEAIRLAKDGVDWDAIPDLVADDANLVKNTIQRVVAKALGAMENYYEYDDFGQPSHTKDGTYPLRANYEEGYNLSLTDDGDVAFRISAKPYKHVKGVLNGSGAHLSILETALESDEWKIGTAEALFHNDNAELHVNVTNTKQTVRDKQDSRTVVGVDVNEDNVALTALSENGVEDTLVIDFPEIKFERHRYFTMRKRVQNAGKDSIHDTLEGREERFVCDRLHKVSRHIVEWSQQFEKPCIVFEDLKEMRDSIDYGTRMNRRLHHLPFRALQFYTSYKASFEVIPTGWINPEYTSQRCPMCGHTERANRNKKRFKCRSCSHQDHSDRSASVNIAVKGIKKHQNWNVPALNSLPTVRTVRRQASEAVDAPTVTHPTVRGHQADGRMGVFD

SEQ ID NO: 16893 - protein, 398 aa, unknown
  TnpB Polypeptide
MIRSSKITTKYANEQKKENINVLIDEYKLVAQKFVDILWNSYQLSQPIPSLLPKEITDQAQTWLSARMIQCCAKQASGIVRGTRRKYEKRLFILHKLEKENKLKQARKLKHFIKINPISKPKLKNIEIELDERFVKFDFDNQTSFDGWINLTSLGNKLKIQIPIRFHKHFIQVKKQGKQLKGIRLSKTGISISFEIEKPVKDIGKRVGIDIGMKTPFTSSDGHYCQDEVNGHSLESVCKILSRKKKGSKSFKKSQEHRKNIIGFYKNQLDWNNISTMIIEDIKNLRYKQKSSRYLTTFVYREFFDKLRLTAEKFGVQISTVSPTYTSQRCSCCGWTRKRNRNGKMFKCSECGFSTDADFNASVNISLELRRISTKERKSRMNRTGFYWLEYSTSDKSL

SEQ ID NO: 16894 - protein, 391 aa, unknown
  TnpB Polypeptide
MLTLLKSYKTEIKPTKEQIQIINKTIGTCRFVYNFYLAHNKETYEKEKKFISGMDFSKWLNNVYLKENPEYSWIKEVSSKSVKQSIMNADQAFKRFFKHQSGFPGFKKKGKSDANMYFVKTDAKVIIPCERHRIKIPTLGWVRIKEKGYIPTNSNTHIIKSGTISCKVGRYYISVLVEEQEKPQSELNDFGIGIDLGVKDFAVLSNGIVCENINKTDRLKKLEKQLKREQRCLSRKYEDDKKRKEKGEAARRNIQKQIAKVQKLHYRINHIRTDYINKSVCEIVKTKPSYITMENLNISGMMKNRHLSKAVASQKFYEFRRKLETKCRETGIQLRIADRWFPSSKLCHKCGRIKSDFKLSDREYICECGYRADRDYNASLNLRDAKTYKTA

SEQ ID NO: 16895 - protein, 373 aa, unknown
  TnpB Polypeptide
MPTLSHKIRLDPTETQIVQFKKACGCARFAWNWALAKWNEKYAAGEKCSGNSLNKELNSIKGEVFPWMYESPARASERPFANLQTAFQRFFNKKAKYPKFKSKSKSHDSFYVHNRDVKIKNKTCQLPLIGEVGMREELRLSGKIMSGVVSRIADQWYLSVTVELDKLPITVKKTDKVIGIDLGLRETIVTDDGDIFKAPKPLKKYSKILTRRSRQHSKKVKSSKNKAKSQMKLAKLHAKIANIRKDFTHKATTKLIDENQVIGLEDLNVAGMMKNHCLAKAISDVSWAEIRRQLEYKSAIYGREVRLVGRFFPSSKTCSKCGSVKKTLGLDERVFKCSDCGYTIDRDLNAAINIKDTVGHTGINAWGENCEVN

SEQ ID NO: 16896 - protein, 371 aa, Shimazuella sp.
MTTITAKIQIYVPQEKVESLLVTTRSYRKACNFVSRKIFETKMLKQRPIHDLYYHELRSAFGLKSQMAQSVIKTVIARYKSAKSNGHDWSLIRFQNPEYDLVWNRDYSLVQDTFSVNTIDGRIKCSYETKGTEHFFVDNWKFGTAKVVFQHKKWFLHIPMTKAFSELQDEDVSQVVGIDLGLNFLATTYDSQGKTLFYNGKSFKHKRAKYKALRKQLQQKQTASARRRLQSIGSRENRWMMDINHRITKALVNQYGDHTLFVLEDLQGVRHATEKVKVCNRYVSVSWAFYQFRRMLEYKARMNRQKVMVVNPKYTSQTCPNCGHVEKSNRDKKKHLFCCKNCHYRSNDDRIGAMNLQRLGIEYIVEVTTGA

SEQ ID NO: 16897 - protein, 372 aa, unknown
  TnpB Polypeptide
MRMTYKFRLNPTRHQRTLFNNTLELCRWVYNETLATRKNTWEQEKKSVSHYDTINMLPELKKQRPELIQVYSQVLQEVCARVDLAFKAFFRRIKAGDKKPGYPRFKSYGRYDSFTYPQYGFELLDNGLLLSKIGTIKIVQHRPLEGKIKTLTVRRDAVGNWYANFSCEVEPEPLPKSDKAVGIDVGLESFATFSTSEKVANPRFFRKDEKVLTRAQRRLSKADKGTPERAKRRKVVAHIHQRIANRRKDFAHKLSRQLVNEYGVIALEKLNEKNMLKNHCLAKSISDAAWNQFAEFTQYKAEEAGRECMLIDPRNTSKRCSRCGTLVEKDLSVRIHSCPVCGLVIDRDENAAINILALGLQSLGFSPRSPRL

SEQ ID NO: 16898 - protein, 366 aa, unknown
  TnpB Polypeptide
MKLTAKVKLLPIPEQAELLKKTLETANDACNYISEQAWEHKTFRQFPLHKLTYYATRNKFALSAQVVVHCISKVADAYKLDHKTKRIFKPLGGIAFDNRILSWKIHEMTVSIWTVGGRQTIRFVAGTHQMELLLKQRGESDLAWVAGEFYLFAACDVETPEPIDVKGILGVDLGIVNLAVDSDGERFNGKSVDDNRRKFEHRRKNLQKRQTKSAKRKLKKISGKQKRFQSYTNHTISKHLVKKAQDTRRAIALEDLSGIREAPVRRLQRSKHANWSFYQLRQFMSYKAKRAGIPVIFVDPKYTSQTCSICGCVDKANRRNQSVFLCVSCGYSANADTNAAVNISARAGVNRPMVSNYQGSGTSPRL

SEQ ID NO: 16899 - protein, 386 aa, Burkholderia sp.
MDIKRAYRFRFYPTSEQAAMLARTFGCARFVYNHMLRMRTDAWQQRRARVSYHETSAALTALKKTPEHAWLKDVSSVPLQQALRHLQTAFSNFFATHAKYPNFRRKDGVQSAEYTASAFKWDGTSLRLAKMDAPLAIRRSRTIPKGAKVTTVTVSKDTAGRYHVSMLCDDVVSAKSEASGMVGIDFGLTNFIVLSTGEKIAAPNAFRKNEAKLAKLQRRLARKQTGSANRRKAKLKVARMYARIADGRRDFLHKLSTRLIHENQVIAIESLAVSHMLKNRRLAKSIGDAGWSEFARQLTYKAEWYGRTLIGIDRWYPSSKRCSDCGHTVATLPLKVRSWVCPECAAPHDRDINAARNVLAAGLAVSAHGEGVNPMSLSEAMSGGIR

SEQ ID NO: 16900 - protein, 370 aa, unknown
  TnpB Polypeptide
MQLSIKIKLVPNKEQKDILLKTIGAYNEACNFVSKIAFENKTASVVKIHRICYYDIRKKFNLSSQMAVRVVGKVADAYKIARSKKLRLEKHHKFDKHGAVIYDQRILSWKGLEKVSILTLNGRQVIPIVLGEYQQSKLIYPRRGQVDLLYKNGNFYLIPIVEVPEPPEKINKEFLGADMGICNLAVDSQGEIYSGKEVDNKRVKIDKLKSALQSKGSKSAKRHLKKLSGKESRFRTWVNHNISKKIVEKCKRHSLSLVIEDLAGIRKRATVRHTQRRKHSSWAFNQLRRFLEYKAKLAGIILKAVDPHYTSQRCSKCGYIAKHNRKNQSTFVCRSCGFSANADHNGAINLVQLAVVNQQIVGSTYKPLGL

SEQ ID NO: 16901 - protein, 385 aa, unknown
  TnpB Polypeptide
MATITKAFKYRIYPTDEQITLLSKTFGCARYVYNHFLNFKKTEYEKDESKYSYEDCNKLLTILKKETEWLKEPDKYALQNSIRDLDSAFKNFFKGAGYPKFKSKHKSRSSYRTNFSNNNIELLYSSIKLPKLGKVKIKDRTYRPRTGRILNATVSKTKTGKYFVSICFTDVEVGNLPKTGKKVGLDLGISKFITTSDMYEVLNPKYLETEMAKLKKLHKSLSRKSNGSKNKEKARLKLARCYEKVTNQRKDFLHKLSRMLIEEYDLIVIEDLKIENLLKNHKLAQSISSASWYTFTEMLRYKASWYGKRVVKVDTFFPSSQLCNSCGCKNNEVKNLNIREWECPICGSHNYRDLNAAKNILQKGLEILEQEKLIIELIQVLKTQL

SEQ ID NO: 16902 - protein, 368 aa, unknown
  TnpB Polypeptide
MNKAIKYRICPTAEQEIMFNKTFGCCRKIYNLMLEDKIKSYEETKSFGKQSPAMYKDEYPYLREVDSLALSNVELNLKAAMKNHFDKKRKKQTGFPKFKSYKRSRRAYTTNNQNGTVDIIGNKYIKLPKIGKVKAVIHREPDADWKLKSVTISKDSDGKYYASVLFEYDKIIEPIENPTKFIGLDYKSDGLYMDSEGYSPKGHKYFRQGQKKLARAQRKLKHKKVGSKNYEKQKLKIAKIHKHIANQRKDFLHKESTKITNLYDVVCVETLDMKAISNKGFHNGKATMDNGYGMFLNFLEYKLADRGKYFIKIDKWYPSSQLCSECGSKKKLSLKDRVYKCECGLSIDRDINAAINILNEGLRMLEAA

SEQ ID NO: 16903 - protein, 462 aa, unknown
  TnpB Polypeptide
MDNIIEDKKEYSVYKCKLKNDNPLFCVFDEWSHLANNLYNETLFVLRQLFTGLKKEDKDITPLEKETIDSVLKIAKSYKKTIVLNKDQRLVNYYFMDFYFKKTKNENYNSTLPKQTAQHVIKEACTNFSIWLKALKEYNKNPSKFSGRPKMPKYKVSGGISTFKITNQVVTFKKAKFGYEVKFPKTKHTLTFGKNLRNKRLKEVNVKYEYGSYKITYLFEDVEKSESVVSTGNVVCGIDLGVNNIASIQTSNGDSLLVKGKFIKSKNGWFNKNIAKNMRGQTIGTTNKVKSSKALNKIYEKRALFMNDIMHKISKKIVEWCKSKNVCVIVIGSNKFWKQGINIGNNTQTFVQMPFSTLINYIEDKANKVGIEVVRIEESYTSKASFLDLDDIPIYKENDTTEYTFSGKRVSRGMYKSSTGFTFNADLNGAGNILRKHVKENIVFNLSNLHSPEVVDAKKIYM

SEQ ID NO: 16904 - protein, 416 aa, unknown
  TnpB Polypeptide
MAIQANRTYVASIQNQQQVCDGLDSLGDSASKLWNVARWTVDRVWEATGEIPNEGTLKAYMKTRSCWKDLNSQSSQAVIEELSNAFQSWVDVRQKDDRANPPGYRKHGGSRPRSTITFKEDGFKHDPKNNRVRLSKGANLKENWSDFILCEYQTRPDFDLSKVERVQQVRAVWNGELWELHFVCKVEIEAADSAGDGVAGIDLGIKNIATVAFPDDYVLYPGNSLKQDKHYFKRAGYNTEGENGPSEQSEWARQKLSERETHFYHTLSQAIIDECVERGVGTLAVSWPEDVRDSDWGKTGNKKLHTWAFDRIYQYLAYKGEEHGVEVLKENEWNTSKTCCNCGDTTDSNRVERGLYVCSSCGLVGNADCNGAENMRQKITPSPHGEDRSNGCVAQPSVHLFDRESGTFQTREQAVS

SEQ ID NO: 16905 - protein, 370 aa, unknown
  TnpB Polypeptide
MSYMVRTFKYRLKPSRNQRTKLDRTLELCRWVFNETLATRKNTWEQEKKTLSLYDTNKRLTLWKREHPELVSVHSQVLQNVQERVDLAFKAFFRRVQAGQKPGYPRFRGYGQYASITFKQSGFKLLAAGKGLLISKIGVVRIVLHRPIEGRVKTLTVQRDAVGNWYACLACVVEPKPLPYNELVVGVDVGLESFATLSNGIKIDNPRFFRHAEQELAKVQRLLSRAEKGTPERAKRRKAVQHVHQRIANRRKDFAHKLSWELVGSFGMIVFEDLHIKNMLQNHCLAKSISDAAWNQLILYTTYKAENAGRVVVSVGPRNTSKQCSCCGTLVEKSLSVRVHACPVCGLVMDRDENASHNILRLGLKSLPPH

SEQ ID NO: 16906 - protein, 326 aa, Lactobacillus sp.
MTLQAIKIRIYPNLEQQTKIIDNFGCCRFVWNQLLNMQIERYHNGGSYVSRFGMNYLIKRLKQEYPFLKQADATSLVNVSRDLNQAFQKLFKEHVGHPKFKSRKFPKQSYQANCVNHNIKQIDSHHVKLPKLGMVSFKAGRQITGIIKSVTIRLSATGKYYAIFLVDSEISQLPKTGQFVGIDMGVADLMITSDGIKFPTIRFDKKLAQKKHYWEKRLARRRLQAKKEIAWDHHNKVIAPRELSDFSNYLKAKHMVAKYNEKIANQRHNYLNQLTKQLVEQYDVIKIEDLKTKNLLNNHKLARAIANQAWRELHSQLAYKCDWYGK

SEQ ID NO: 16907 - protein, 454 aa, unknown
  TnpB Polypeptide
MEEDNTFRHLSCFYRTVSNNNLRNRCWSKVKMKLNRGIKVRIYPNKRQQELLNRTFGCCRFLHNKMLEERKKVYEELKDDKDQLYSHKYKTEKQYKQEFSFLSEVDSKALQSETRNLLQAFQNFFRGLRNGKKIGYPKFKSRKQKQSYTTYNINNNIRIDHASKRIRLPKVGWVKYRDNREITHPIRHITVSRTRTNKYFVAIIIELEIDIEPITTIPLHKIEAFDMSAPNFLVSETEKLINPRFYRTHERKLKRLHRLLSRKQKGSQNQAKARFRIAKFYEKIQNRKSDWTHKLTHSLRNQFDAIILEDLNIQGMQQFNSGLSKSVTLDFSWHQFVSRLRYKLEWQGKHLVLVDRFFPSSKRCSVCGQINNDLQLSDRLWKCQCGETHHRDVNASINLKEEGIQILQERGITIISNNDATVGTTGSHASGDRVSPAFAGSGQGRRNPSAFRQW

SEQ ID NO: 16908 - protein, 577 aa, unknown
  TnpB Polypeptide
MLAYILKGAMHDEPLPAEKEVIVHQYGLLNPFDWTEDCTSELERMHAFKGRLVEIEHEYRISFDRLLERDPNLRNARQILDEHIRALSACDLSAIGEMEAFKLIPRAGQEHSGSTPERRLTALRIQVAEAYRVARKNFKDDLNNLELERRDQVKAARQQSGLWWGNYNAVIKAFEQGRRVSVLTRGVMRVEPFDGTGRFTNQIQGGISVESLVSGENIQVRVAPVPADAWSHSSRGERRRLQRTQLTATIFVRDGMRRMVTWPMIMHRPLPENVRIKEVVVSRARLDDRWLWSVVFVCTRTRVIKLGSAAAATVIAIDPGWRRTKTGLRVATIVRATGETEYFELSNRLVQAFRFADELRDRHNVLLANLRMLVSKLTAFQQAKIAGVGEACIDPANLRLPSDFRRLAELWSLDSDYDQRLVAQISHASVEYKRLYLWERNHTRKILNHRDKLYQELAVRVLKDANEILLHKIEIVEMNNNHIEAGRNGFVPDASNWYRKTAAISSLEHWMHNKGKRLGLRFKYIKSIYRQSCPSCGAFDRKNRADTLMYICAHCDHTWDRDWGTCRMMLKDHSSTT

SEQ ID NO: 16909 - protein, 152 aa, unknown
  TnpB Polypeptide
MDVAVLYSVDCIVFEHLDSKGKIRGRRYRERIHLWRKNDVQHRVELQAHRMGMRLSHVCAWGTSKYALDGSGVVDRHSIYHYEHGRKVYNYSLCMFQNGKIYNCDLSAAQNIGARFFLREYQLLGIEGLPATPQRTLCTLRILVSNGLPVAA

SEQ ID NO: 16910 - protein, 412 aa, Hapalosiphonaceae sp.
MRRQAVKVRIYPTDKQVQVLAQHFGCARWWWNYGLNQCIETYKATGKGLSQSGLNSLLPGLKKDKETQWLGECYSQVLQSVSLNLSRAYQNFFEGRAKYPSFKSKHHRQSIQYPQKVKLFDDCLKFPGKLGAVKAKIHRPLDGVIKTVTVSKCPSGKYYASVLMEYEGDYPSASTDGKVIGIDLGIKDFAITYDGEKVSKYPNPKHLAKYEKKLAVKQRIAARKKKGSNCRKRATKIVARVYEQVSNVRQDYLHKLSRKIVDNNQVVVVENLNVKGMVRNHKLAKAISDTGWGTFVNFLSYKLQRSGGNLIEINRWFPSSKLCSNCHYQIPELPLDVRTWNCPSCGTHHDRDGNAAINIRAEGIRMLSSSGMGEANANGEDVRPIRGRKSKMRQSSVKLEAPSAGSGGVVHT

SEQ ID NO: 16911 - protein, 381 aa, unknown
  TnpB Polypeptide
MYRAIKIRLYPNKEQEQAINQLFGCYRFVYNYMLDLKQQEYKDNNKTLSLKDLSKYFYSTLRKDENYSWLKVQNTKVMKQSIRQMLTAYNRFFKLHTGFPKYKSKKDIQSAYFPIDAISRRNTFEERKITLTQSFKDIKFRCSKLYLARLQTYKNKIRSATISKTKSGKYFLSILIDIEESEIVKFKKTGKSVGLDLGVKDFVITSDGDKFENKHFFKKQENKIKKLQKQLSRKVKGSNNRNKQRIKIAKAFEHLVNQRENYIHAVINELLKNYDTIFMEDLNVSGMLKNHCLSKAIQEVGFYKFKLILQSKAMLNNKQVTLIDRYHPSSKICSHCGYKNKDLRLSDRFWTCLCCGTKHDRDINAARNILVEGQRIHKQSI

SEQ ID NO: 16912 - protein, 357 aa, unknown
  TnpB Polypeptide
MKTLKLRIKDKHTSVLNQLARQVNFVWNYSNDLCFKHLQRTGKFFSAFDLHAYTKGASKAGLDLHSQSIQAVNEELVLRRKQFKKAKLRWRISGGSRKSLGWIPFKASGVSYQQGQIKYAGQLFGLWDSYGLSKYTFKTGCFTQDARGRWYICLVVELKEPVVKIQNQNTEAIGIDLGLKDFATLSNGTKIEAQRLYRQSERKLAIVQRANKKQRVKAIHVKIRNTRKEFHHQLSRQLVNQYAAIFVGNVNAKGLAQTPMAKSVLDAGWTAFRTLLKYKCEDAGVWFEEVNEKYSTQTCSCCGSRRDSPKGRAGLGIREWTCFECGITHDRDVNAAMNILALGHERLVGGITASLGR

SEQ ID NO: 16913 - protein, 352 aa, Microbispora sp.
MLKLAPTAEQAESLLATMRACNAAANRAAEVAFAHHSANKVAVQKFVYSDLRHEFGLSAQMAIRSIAKACEAYKRDKTIKPVFRELGAVAYDPRILSWKGQDRVSILTLGRRIVVPVVYQGRWLKRAGATMRGQADLVYRDRVFYLAVVIDVPEPATGGEPDKWLGVDLGIVNLVTDSTGEAHCGKGVRAVRRRNARLRARLQAKGTKAAKRLLKKRRRKESRFARDANHVISKNLVGKAKDTRSGIALEDLQGIRERVTVAKARRADLHSWSFRRLRTFITYKAALAGVPLRLVDPRNTSRTCHACGHCDKRNRPTRDDFRCVRCGFAGPADHNAAINIGRRAAVSQPYAA

SEQ ID NO: 16914 - protein, 137 aa, unknown
  TnpB Polypeptide
MQDINHQVSKALVKNNPKHTLFVLEDLSGIRNATERVKTKDRYVSVSWSFYDLEQKLIYKAKQNQSSVIKVDPRYTSQCCPCCGHIEKANRNKKMHLFTCKNCGYKSNDDRIGAMNLYRMGIDYLADSQVPNTVVTE

SEQ ID NO: 16915 - protein, 527 aa, unknown
  TnpB Polypeptide
MTRVRRAHSFVLDLSAGQRAAVEKMADGRRAAYNFALALDRDTYAADLPPADWADLEPEWAAPRWNERRSLSAWAIAKTWTPAWRTLTPWSPAGGQSAQIAFADYAKARDAAIKRKGGFPRLRSRYDPHQTISFAQGVSAVGETIKVPTLGPLRVKGSTRRLRWFLDNAAGTVQQAHLVRPGVHAPWRCVVIVEIDQPDVPTHAGPAVGLDLGISHFLTLSTGEVIENPRPLQAALRRLRIAQKSVSRSEQTRLVTGPRTPKSHRHVAKETVVTRLHARVAALRSEFHHTLAKRLVAEFSAIGVEDLNIAGMTRNHRLARHIGDVGWAAFLSILAYKAADAGVEVVKAGRWFPSSQRCADCGTINRAVKALDIRRWACPACGVIHDRDENAARNLVPSPTQIARARSVRLVGQERAAKKRQAQKDRAVKAASTKENSRLAKHTERLARHASRDTLPVAVTPTETLTARRGPVRPKGVAKVAPAVARTETPLLREEARTEHPPLRTHRRSRISLGALADPPLVVSSNV

SEQ ID NO: 16916 - protein, 379 aa, unknown
  TnpB Polypeptide
MLTRWCGISRLAYNTCLMKWDADYRDSVAKHNYYSIKKWFNSIKYERFPFIAECSKWVPEAAIKDLQAGFTNLFRHRGNHPKLHRKRRNDSFRIDGSAVKIDGKTVRLPKRLTVRMMERIPNEGRITKINNVTVSHKAGLWFISINYETNMNVRENQATGIVGIDLGLKTLAVCSDGTTVENPRILRKRERRKKHLQRIIARKRKGSENRRKAAALLARYEYHTACKRRDWLHKATRTIADRNAVCFMEDLNVNGMLKKHHLAKAVSDGSFNEFKRQLAYKTQVRNIDRWYPSSQICSNNGMRKPMPLSERTYECERCGLILDRDMNAAVNILHIGIANYPELMPAEDDDHPNVTGLTDDATASYETGIDHQNRVSSFE

SEQ ID NO: 16917 - protein, 387 aa, unknown
  TnpB Polypeptide
MGMNRAWRYRMYPSKAQQEKLNSCLYECKDLWNSLLEYTKNYYEKTGRFPTRKELYLLTKEPPLFSQAAQNVADRLSKSLKGMMLKKKIGKKAGFPRFKSIERMKSFTYPQFGFELGERLELSDIGSISIKKHREIKGRIKTLTIKKLPSGKWYAIFTSEVCPPGGQKKIGASIGLDLGIETFAHLSDGSTIENPRHLRLAEERLKLAQRRLSKKKKGSMNRARARRDVAVAHEKIVGKRRDFLHKVSRLLVNQYALIAMENLDNEKLAQGFLAKEVLDCSWAEFSSMIRYKAEEAGCEIVFVDPANTTSQCSGCGLIRKKSLAERWHSCPCGAEMARDLNAAINVLNRATSGTEESQACGEETPTHCKHNEQVSSMKQEAHGFSRG

SEQ ID NO: 16918 - protein, 394 aa, unknown
  TnpB Polypeptide
MKTHKFRLYPGKQVEQNMLNALDLCRQTYNELLGLLNEQEVIDKAHIQGIIPDMKICDSRFKHLYSKTMQYECYRLFSNLSALAQTKKHNRKVGSLRFKGKGWFKTFTYNQSGFKLINTGKRCQTLHLSKIGDIPIRCHRNIEGKIKQVTIKHEQSGKWFASIAEETVNPDQIKIIRKVAGIDLGLIDEVYDSDNNRIANPKYLKQHAERLAFLNRKFSKKSKGSNNKNKWRIRLARQYELLANTRDDFLHKTSRYYVDNYDAIGYEDMPINSMVKGLYSKSILDASWGKLRRYMSYKAESAGKICMLVDYRGTTQRCSNCHKTVKKEIWQRTHQCPFCGINIPRDYNSAIEIRNLTITKMRQELPESTLAEMEGYSPTGQCPSMNQEALTSTS

SEQ ID NO: 16919 - protein, 493 aa, unknown
  TnpB Polypeptide
MRNQTPSFVVQTKLHLQDNVQRHLNKSFNIANSVYNETLGFGLKRFSAMKKNPRYQELLELRRVSRSQEIDNELKQIQMDYGLTKYQLSTWVLARRKQNKAYQHLNSAEIQVIAENAYQTLSQVLFYKTKNVRFRTRYDRTHSFRNRTNTTGTRLVVSEKPYIAYRLYLHKKSTFVDIPRCAFTPYQQTQLARADKIKYVQIISKTIRGEKVYYLQIVCQGIPVSKIQKGESVTGIDPGISTVAYVSKNTCELVDLVPKNFVRKERLIKNLSRKLEQSRQVNNPEAYNENGTRKKNACLKPLSKRAKRLVIRKRKAYRSLCEDRRKLQGELINCIVSLSAVIKIEELKTKNLQKRTRETRINPKTGRPFSKKRYGKAIFKAAPSRFRTLLVQRANSVGCEVEVILPTKTKPSQYNHITGEFNKKELKTRIYSLTEEISDIQRDLYSAFLIAHIKDDEYRNDELVEDFNEFYTNMKEHLEKLRQTPTRLSWYVK

SEQ ID NO: 16920 - protein, 389 aa, unknown
  TnpB Polypeptide
MRKTFQYRIYPNKNSEVNSIRTLSTCRYLYNEKLAERKKQAELNRLKKQFDVFPWGKPEWINYYDQKLDLTATKTPYQKEVHSQVLQDVIKRVDRSFKNFFNGFGYPRFQGRDRYNSFTYPQSGFELKDGKLILSKIGRFKIIQHREIEGIIKTCTIKRYVDQWYVSFSCEIEEPIPVEIKTKIGIDVGLIDLITLSNGNQIKPPKFLRESEDKLTREQKRLSRKMKRSGKRKKQVIIVAKVNRRIRNQRKDFAHKLSRMLVDTYDLIKFEDLQIQNMVQNHCLAKSISDAGWYQLMNFTEYKAEYAGKFVEFVNPAGTSQTCICGFHVPKDLSVRIHICPSCGLVMGRDQVSAMLIENRPSITVGTTGIHDRQGLSSREPMQRYAQAL

SEQ ID NO: 16921 - protein, 400 aa, unknown
  TnpB Polypeptide
LLAKFRLKGGKMIARRVKLKLSKMQKKHIDSAMVASATLYNHLLSINFELIDSAEKNLSKIDMINRVRDLKLGLDLGSDIIDQICGRVHKCFKTWLWSDSIKLDFWLQHGADYRRPMDGFLKSKNKKLWGKPRFKKAEKGISLQIAIRKRDQSFIRVNGRYTSITLPKLGAVKGFNDRQALVGDIKMVSINKDACSDYWASIVCDGNLNVIEFAPRAIAIGVDLGLKHTMTAANDAETIKPESDRFLNAQIKNVQQASKTRKRDLPFIHRKIARRRKHSHHVMAKQLCLAARFIHVGHLNSRFLFAGRLARSASDAAHAQFLSILSRKAENAGAKMFLINEAYTTQTCYRCKRRQKMSLAEREYHCPCGYQNCRDVNAALNILEKGEKQRLGFLTQSPGL

SEQ ID NO: 16922 - protein, 419 aa, Moorella sp.
MSQLKRNTAVKKGRNQTQGDVLAEKIPLHFKPHEEEMARDIQRESARVWNTVMTIHRLFWFKYGVWIDEAMMKEFLKGRFNVHSQDVQAIIETYYECWERTRKLHEEGHTEWRYPWRLKRFFTSTWKVTGITVEDGYLRLSNGWRKPPLKVKLPERLNGLAIKQVQLVWRRNGYWLHVAVVKPALEKVQGDAVAAIDPGEVHALTLTDGQEALVINGRHLRSLRRLRNKTLRKFQKAISRTKKGSNRRRKLLAAKYRFLNWIGAQISHAEHAVTKMAVDWCLERGIKKVYIGDPQGVRERDCGRHHNQRMGQWSFGRLRDLLEYKLKRHGITLEKIEERGTSGTCPLCGKYTKQAGRIYRCGDRECGFGEVHRDVIGAAGILDLAVNGRFTLGRKLPEMVSYARPVVLAPGQGHNIKAA

SEQ ID NO: 16923 - protein, 426 aa, Moorella sp.
MRREVKKMSQLQRNTTAKKSKGQTQGDVLVEKIPLKLKPTEETLARDIQRESARVWNTVMTIHRLFWFKYGVWIDEAMMKEFLKGRFNVHSQDVQAIIETYYECWERTRKLHEEGHPEWRYPWRLKRFFTSTWKVTGITVEDKNLRLSNGWKKPPLKVKLPARLKGMAIKQVQLVWRRNGYWLHVAVVKPALEKVQGDAVAAVDPGEVHALTLTDGQEALVINGRHLRSLRRLRNKTLRKFQKAISRTKKGSNRRRKLLAAKYRFLNWIGAQISHAEHAVTKMAADWCLERGIKKVYLGDPQGVREQDCGRHHNQRMSQWSFGRLRELLEYKLKRHGITLEKIEERGTSGTCPLCGKYTKQTGRVYQCGNMECGFSGMHRDVLGATGILDLAVNGRFTPGRKLPEIVSYAWPAVLAPVQVSKMKAA

SEQ ID NO: 16924 - protein, 449 aa, unknown
  TnpB Polypeptide
MLKKKYTIVTQLHKTNNKDLIEYFENASVYFCKLQRKAFHIFKNETIKGNRIDINIMYKTFMLDYGISARTANSIIRYVQGRINALVELKKHEISQQEHRIKSLIESIEKLDEKILNLQEKMKDNIKINHCTYWNLKKSRAFKKMKLNKFKMRLEQLKWEIETGYYKLCFGTKQLLKINKTKFLLQRDSQISYIGRKDDTQRNQMFQLTYNKRNNQFKIKIRKDFGFDTEEKYVFGKCYFNNHKNKLIEALKNKNSTPLTYSIIRKNNRYYLHCTFEYRIENKSSFLTRKTYGTIGLDFNKGFIALSEIDRNSNLIGTDILKYRFGKGNKTQSDLEKGISKILKRALDTGKNICIENLNFKTKKSKIEKAKSEKGRKYNNMLHSLSYALYDKLITNMAFRNKVDVIKVNPAWTSWIAKNKFCNRMKLNIHIGASFVIARLGIGIEDKVI

SEQ ID NO: 16925 - protein, 351 aa, unknown
  TnpB Polypeptide
MEVRRTAPVKLVVPDERRDDLHKSARQFLHCANRAAEFCWSDRSYTECVTVNTTARDALYDEFRDETDLTANLVQEAIRRAVHATKGCVERWKNGKRVSQPEFTSWSMLYDKRSATFYRNKVSLSTVNGRVECDFELPADSPTPYEQYVLSGEFEYRASTLQYDEATDEFYFHITTRKYDSDEDSSDNSEGSADAKHQTVLGIDLGVNSLAVASTGRFWQGDDYDHWCREFEKRRGEMQQRGTQAAHTALLRLGKREEAWRKQYIHTVANELVSEAVKHDCDVIVFEDLTDIRERLPEAKWHHVWAFRRLLKYVEYKTPERGISVKQVEPNHTSQRCSRTDCGFTHDDNRH

SEQ ID NO: 16926 - protein, 398 aa, Kribbella sp.
MSRFRMYPTPAQQAALLEQCGHARYVWNLTLEQWSMWTNDKEATPNFAEQCRQLTEARAALGWLRAGSQTVQQQALRDFDQAVKNFYAGTHQRPTWRKAGLNEGFRIVGGQATRIVRLNRKWAGINVPKVGWVRFRMSRAVPDAKSYRVTRDRAGRWHLAFAVIPTPIPAPGTGEVVGVDRGVTVSAALSTGELLICPGLSGREQTRLKHLQRRLSRCRRDSKRRQRVKAAIAKLYARAADRRKDWVEKTSTDLARRFDVIRVEDLRIMQMIRRPKPKPDPKRPGAYLPNRRRAKAGLNRGVLANGWGLLVQRLEHKAARRVERVNPAFTSQTCSVCGHCAPDNRENQAVFRCVACGHRANADVNAAVNIAAGRAVSARRETPVRVSPKREPQHATSA

SEQ ID NO: 16927 - protein, 420 aa, unknown
  TnpB Polypeptide
MTVVTQAYRFALDPTPAQRRGLASHCGAARFAYNWGLALVKARLDDRATGPGTGVPWTLPSLRKAWNQAKGAVAPWWAENSKEAYSSGLDALARALKNFSDSRAGRRRGGRAGFPRFKKKGRARDACRFTTGTIRVEPDRHHVTLPRLGRIKTHESTRKLARRLEAGTARVLSATISRTADRWFVAFTVEVDRHLPEGNGQRSVVGVDVGVRHLAVVAGHAPEYVENPRALQRQQRALARAQRALARRQPGSAGREQARRRIARLHARVASRRRDHLHKLTSRLAHAHHTVVVEDLHVAGMVRSRPLARAVADAALAELRRQLAYKTRWYGARLVGADRWYPSSKTCSGCGLVKAKLGLAERTFHCAGCGLVIDRDANAACNLAMLAVAASGAETQNARPKPRPAGQTGTKREASTGVAG

SEQ ID NO: 16928 - protein, 314 aa, Lactobacillus sp.
LSARCLQLAISDSTSDLGKAWQNFFKKSLPDWGKPKFKSKKTARQGFKTDRAQIVNGKLWLDKSQRVKAWADISFKDADDLNGDLKVVSIYCENGKYWVSLPFEVKVTKKTKTGQKTAVDVNVGHFDYPEGQVKTLPNNLKALYKRIKHYQRLLARKRLVNGKKATQANNYVKTRAKLQRDYRKVANIQHDIVQKFTTMLVNDYDRIAIEDLAVKQMQMSHVASKGLHRSMFGYFKQVLKYKCEWYGKELILADRYYPSTQRCSACGHVKTGEDKVELDGNKQHGTKHNEYVYYECGVVMDRDENAVRNLLALL

SEQ ID NO: 16929 - protein, 430 aa, unknown
  TnpB Polypeptide
MRQVERHWIKEGHEFYPICDNLTFKAKNLYNAGLYQIRQSIFERYKSQEEEKPSVLSWIKLVSQFRKEKQEDMLALPSKVSTNILRTLGSTISSYYQLLKCYHDKANLSVTNKPKLPRYLHKTEGRYVVEFTNQTFSKKRGINGELILCPKDLKLSIPTKVEHPQCVRIVPKLKAFVIEVIYDVEISPLKHTGSYAAIDLGVDNLASVTFSDGVNPLLIKGSKLKSINQGYNRLIAKAKSKLPANQKTSQGIHRLWRNRELKLQSELHKVTSFLSLYFDEMAIEKVFIGKNQGWKQEVALGKKTNQTFTQIPFTTFIFQLTYKCLARGIEVVEQEESYTSKASFIDQDEIPIYGESDKKPAFSGKRVSRGLYQTKNGFLLNADVNGSYNILVKGLLALGKSLDREKVSFHTRSLKNWESVANKDLLLQYM

SEQ ID NO: 16930 - protein, 384 aa, unknown
  TnpB Polypeptide
MNRIFRYRLYPTSRQTTALGEMLRDHCDLYNAALQERRDAYRMCGTSIRYGMQSSQLKDIRTADPLGQGRWSFSSQQQTLRRLDRAFAAFFSRIKNGEKPGYPRFRSSRRFDTATLIEGDGGKWLGNTVRIQGVGCVKVKLHRPVRGTVKQFSVTRQGRHWYVNVVCVDVPVQPKPFTNAAVGLDRGVTHLIADSDGRFVDNIRPLQAARDKLTAAQRDLARKKRGSHRRRKAVARVAVLHRKVSDVRKDHLHKVARSYINAYDLIVVEDLKVKNMTRSASGTLEEPGTNVAQKSGLNRSILDAGWGVLLELIRQKAEEAVVEVVEVNPRNTSRTCHACGHVAAGNRDGEAFRCQRCGHSAHADTNAAQNILRLGLSLQAAVAS

SEQ ID NO: 16931 - protein, 304 aa, Halomonas sp.
VSSVILQQALRDQQAAFGNFFNPALKARYPRFKRKDGRQSIRLTKAAFSYRDGEITIAKTKTPLPIRWSRPLPCAPSSITLSRDRAGRYFISCLCDVTPEVLPVTPKMTGIDLGLSDLFITSEGMKSGNPRHLKRYEAKLAYLQRRLAKKQKGSKNRAKARNKVARLHAKIADCRRDAIHKATRTLVNENQVLCVESLNIVGMIKNRSLAKSISDAGWGEFVRQLEYKAEWAGRQLVTVSQWLPSSKICHGCGHKVEKLPLSQRHWHCDGCGQAIDRDINAARNIRTAGLAGLACGATGAGAAA

SEQ ID NO: 16932 - protein, 357 aa, unknown
  TnpB Polypeptide
MLVAYKYRMYPNKEQEIYFAKTFGCVRFIYNQMLSDKIDHYKETGQKLNNTPAQYKSKYEWLKEVDAQALCNAQMHLQAAYNNFFKRPEVGFPKFKSKKNNHCSYTTNQVTIKVSKKYITLPKVGKVKIKRHRIFEGRIKNVSVSKTPSGKYYVSVLVDQEEKEKLMPIDSKIGIDLGLKEFCIISNGEMIENPKYLHKSEKRLQKLQKDLSRCKNGSSNRNKARIKVAKQHEKIANQRKDFLHKLSKRLIDENQVIALETLKVKNLMSNHKLAKSIADVSWSEFVRQLEYKADWYGRDIVKIDTWYPSSQICSVCGHKDGKKELSVREWTCPVCGSHHERDINAAINILNEGLRIA

SEQ ID NO: 16933 - protein, 417 aa, unknown
  TnpB Polypeptide
MPSYRKVQTACVVRIIPLRGLNKTQVALCSLLRREAGRCWADMLHAHIESRSGKWLNSFDLEKLTKGQYDLHSQTVQALAQKLDDNCKTARQLRKIDPEARYPYKDKRFQTVIWKDQAIRIVGGQIVLPNGRKTPSLMLPLPSEYQDSDIRKAELTWRSDHYELCITVDTGLLIPPLLESGKAVGVDLGEINIAAAVTEEGKGIVISGRYLRSINRLRNKRLAAYQSLIDRCKDGSKRQRKLVRSKNKASAKYDRQQRDILHKASRQLVNFCQEQGVSQIAVGDVKNIQTGVDLGRKCNQKISQWPHGQFVKYVGYKARQIGMNTIQIPEDYSTKTCSECGQILKYAPRGRTFFCPGCGARLSRDGNGGANICSRFLYGEYAKVQINHLMYLRPLVRSRACDTSQCCSSIMMRTPCF

SEQ ID NO: 16934 - protein, 402 aa, Escherichia sp.
VKRLQAFKFQLRPGGQQEREMRRFAGACRFVFNRALARQNENHEVGNKYIPYGKMAFWLVEWKNATETQWLKDAPSQPLQQSLKDLERAYKNFFQNRAAFPRFKKRGQNDVFRYPQGVKLDQENSRIFLPKLGWMRYRNSRQVTGVVKNVTVSQSCGKWYISIQTESEVSTPVHPSASMVGLDAGVAKLATLSDGTVFEPVNSFQKNQKTLARLQRQLSRKVKFSNNGQKQKRKIQRLHSCIANIRRDYLHKVTTAVSKKHAMIVIEDLKVSNMSKSAAGTVSQPGRNVRAKSGLNRSILDQGWYEMRRQLEYKQLWRGGQVLAVPPAYTSQRCAYCGHTAKENRLSQSKFRCQVCGYTANADVNGARNILAAGHAVLACGEMVQSGRPLKQEPTEMIQATA

SEQ ID NO: 16935 - protein, 305 aa, Clostridium sp.
  misc_feature (26)..(29): Xaa can be any naturally occurring amino acid
VVKRHLPLLWKGNIINISFGFHTQRXXXXYLRKKWSGKKASAPTLERKHHKYFLRFSYTEEVSLSKTDVKEQVICSVDLGINTDAVCSIMRADGTILGRKFINFSSDKDHLYHVLGRIRRFQREHSSRQVQSRWDYAKRLNMELSRKIAAEITKYAAEYQAGVIVFEYLEMQGKISGKKKQKLHLWRKRDIQKLCEHQAHRNGIRVSRVSARNTSRLACDGSGAVVRNQENHSLCTFRTGKQYNCDLSASYNIGARYFIREFLKPLPETERSSLEAKVPAVKRRTSCVYADLRKLYVEVNNLKAA

SEQ ID NO: 16936 - protein, 283 aa, unknown
  TnpB Polypeptide
MKSWKLWCRSKGKYDKKIPDFLNPQLVLSNGLVVISPGANSFDLWIKVSTLSKGHPMHLPIKSYNYANKYFINWEPSKSCQFNKKDGRWYVTLYFRKNLDPVPVRETIGVDVGYRKTVTTSNNISIGKIKDLCEKSDRKKCGSRAKQRSLVEIRNHIGRVVNQLIDGTNNIVIEDLKNLKKNKKGKWRKSTNRKFRSWYYPLILKRIRNRTEVVGVQCHAVNPSYTSQDCPECGYRDSKNRRKEEFRCIRCGYSADADYVGALNILKKFLRGTQELIVPGVIS

SEQ ID NO: 16937 - protein, 401 aa, unknown
  TnpB Polypeptide
MTEENTDMMTMCETHLIKKSSPFYKEMDELCFRSKNLYNAALYSTRQRFFNENALQSCYDTDKIFNSEKQVNYKALPAKVSQQVLKQVDLGFKSFFKASKSTKMKWKTLRIPSYKDKVCGRNMVVYTKQAISKKSLKKGLLNPSKTNIFIKTKQKNIQEFRIVPHTNGYKAIVIYKFPCKSKVGSDSFAGIDLGINNLATIGFNNFKGFRVNGRPLKSINQHYNKRVAHYKSKLKGGKRTSKRVKLITNKRNNRVKDYLHKASKAIVNQLVSNNVSVVAIGHNKEWKQDTNIGKVNNQSFTQIPHSKLIQMVSYKARLQGITVVEHEESYTSKCSFMDNEAIGKKDVYLGKRIKRGLFRTSNGRLINADLNGALNILKKVIGEFHYPIQVCSTPLDLSIKL

SEQ ID NO: 16938 - protein, 378 aa, unknown
  TnpB Polypeptide
VKLSFKYTITKIGNKNLDIIKDLQWHVKKVCNMLLYDIREGKEKIDVNKNLNIISSKIYKDYRKNNWHSNYLHSHMLQEAIIGVIGSYKSYISLCNIYKKNKNSLRGQPRFPRFKKENIVQEIIFTKYAIRIEENKIKLSLSKRMQEKYEVKSLNFLIPRKLRKLVDFSRVKMIKIKQEVKNIEINVIYEREEKKAIEGNTNIMSIDLGLNNIVGCTNKDNSNSILISGKEAKSKNKYINEKIRKLQQIEMKMRKTSKKYKNTKQIKKLYEYRKNYMNTYMHKVSKIVIEYAKVNKCGVIVIGDLKDIKQGMNYNKNFVQIPLYKLVQKIEYKAKLEGIKVEKISEKYTSGVSALDREDIIKENYKINRNNACNNTTC

SEQ ID NO: 16939 - protein, 497 aa, unknown
  TnpB Polypeptide
MSVRKPSGITLKGLNISKGAGKLVRRKVDVRTVCIALEVDADASEKMHQTRRLYGQACNLLVPIVVSDTDRKKRLWQRYNLHKAAYPMVRTKMSVLGAQLACNVMRSVSSMYQSWISNHPNFSKDKKMVLPSISFRNPVVHLDKNTIRFFNNYTEASVYTVNGRVGVRLRPGKFQLSQLAGFLAEELAGTSKENRIYRLGECNLVWKCGIKGTPSRWELHIAIEKKLEEVSLDNLSLNQVMGVDVGENNAAALSAGRIFKAGKMKDDRDKYLSSRARFQRNGSRSARQALRKASGREKRHVEQINDEISKSIIEPKISDFGAVDDEGKRSISLWHKQTPGIPGVDFYLERLYNILQPWRFQKWPIRTQKPPSRNVPTRTKLKGCLPMRSTSSVRALGMFTFPIASVRTGSASRSETTSAPCRLMERSFCRTCTTFRMNLTSIIARSSAGRAPSCASAHSKSSMQTRSRRSLRASLWTLNSIAISSFPLAQRRFVLPS

SEQ ID NO: 16940 - protein, 389 aa, unknown
  TnpB Polypeptide
MQVGAIVYKAYKFRLYPDSNQRMIINKMLGCSRYIYNHYLSKMKDFGYVGAYTNIMDYTSNLKYKDTFLQEADSIIIRQALFNLDNAFQKMFKEHSGYPRYKNKHSKCSYNTCAIYSKYKDKEYCNIEVDLNERMIKLPKLKWLKIRGYRNINKIVGKIKSATVERESNGKYYVSLLYKQEDIKYKVIPRNVVGIDLGIKKLLTLSDGTSYDNNKYLLKYEKRIKRKQRELSRKVKRSNNYYKCKKELARLYSKLTNSRKYYIHKITKNITDEYDIITCEKLHTKKMIMEGTKNHLSKSITDASFNEILRQLLYKSRYKGKYFYQVDEYYPSSQICSVCNHQDKTYKDLNKREYKCNNCGMTLDRDLNASINIMFFGVVNVYKKLLISR

SEQ ID NO: 16941 - protein, 179 aa, Methanosarcina sp.
MLQKRVTRKVKGSKNRKKAVKKLAKQHQLVSNQRNNFQHKVSLSLIRENQAVAIETLNIKGMIKNHKLDQTVADSAWYSFVTKLEYKAQWFGKTILKIGMFEPSSKNCHVCGYHNSELTLKDREWFCPSCNTNHDRDINAAINIKQFAINNLITSGTEGRACGVILKRESREAGCPSFQ

SEQ ID NO: 16942 - protein, 371 aa, Lachnospiraceae sp.
VKRNLNKAYKFRIYPDKKQEELLAKTFGCCRFIYNIMLEDKIKEYEATKKMKKTTPAAYKKEYPWLKEVDSLALANVQLHLEKAYKNFFSNPSVGFPKFKSRHQSRKSYTTNVVNGNIRLGNGKLRLPKLKEVKIRKHREIPESYALKSVTISQEPSGKYYASLLYEYEVCENQAEKRKEAEPEVLGIDYAMSGMAVFSDGTRCEYPGHFRKAMKRLAREQRKLSRCQKGSRNYEKQRKKVAVCHEKIRNQRKDFHHKLSHELAERYDAVAVEDLDMKAMSRCLHLGKGVMDNGYGMFRDMLAHKLEDRGKKLIKVDRFYPSSKICSKCGKVKKELSLSERTYECECGNRKDRDVNAAINIREEGKRILCA

SEQ ID NO: 16943 - protein, 465 aa, Scytonema sp.
VSQLYRTIPIRVKFTDIEQAFWVNQCQHANSLINCAIYHIRQSHYVRLEESGNAFTTYWRGDELRHGWKTYRCNTTYPELDKILKDNPHYKALAAQSAQQTLKSVGESITSYNGLVKAYYNGEVDKPSLPKYRKKGGLAAVTFPRQALNYRNGSFYPSISKETKPHLLTEIKLQLPDFIDLDWVKEVTVRPYYGELWIDWVIDDGKQLVEINPNLDYTQAWSFDHGGTNWLTGVSTLGRSLIIDGRKLKSMNQGYCRLVAKYKQGKFDFYWDSNLDRVQRKRNNQMRDAINKAARFIVNRCLNDRVGNLVIGWNQGQKNGSDMGKRGNQNFVAIPTGRLIERLKQLCPEYGIVFTVTEEAYTSRASFLDGDLLPKFGEKPEGYKTSGTRVTRGTYKTKNGILVNADCNGACNILAKVARQLGVSLAKLGRGSLTAPHRYDLFCNLKKTFRNSLRSVSLDHGARSM

SEQ ID NO: 16944 - protein, 403 aa, unknown
  TnpB Polypeptide
MAYRTVKIDWLPRSSQDWATFTAVRMEAGRLWSWLVERHADARQEGETWPGRDDLQKETKRQFPNLHSQSVQMTVHDFLEAIASVEALRQRGEPYEYPHRKLRYRQVIFNGQAARSRDGCLILPCGKAGKISIKIPDAVSFPGQVMEVRLNYGSIEVVCKIQEPVRSGGLIIGVDLGVNTLVAPTDGEKAILVSGREIKATVQLRNKTLAEITAKQFKKTKGSRRHKKLQRRKYRMLDRAKNKVRDLCHKATRKVADVFPNAKAYVGKPFNDASQKMGRRQAQTVSSACNRKLISMLNYKLAAAIEVNEAFSSQTCPVCGERAKHCRVYRCRCGYEAPRDVVGCSNIRAIGIDGEMRPGCSVPNAVHQVVPDRYPGTSQVVPRAQGKSLGVVKTTNHPRTPRL

SEQ ID NO: 16945 - protein, 403 aa, Hormoscilla sp.
VKGLPTPAEELNSLGLTEFEMFLTAYSSVFHKAACETANYLLSGQSFNKSSCHTHLQTTYGISKRHANGVISYAKGAVDASKEHRQLHIKTLEGKLKSANYWMTKAENKLADYRKFYAKKNWRNSKTGCRFTLCCSVKFRSTNWKNLRFQIHNKKRRGHNLVEQIKHLQAAQIPTVIPRNQAFIVGSKDEKFGNQVCQWDRCLLKFRVPACLESRFGKFVQTRLGNFDRNINRLPKDGAKTWHFYRKNRKWNAAVQFTPAPVKRISRHSAYGCIGIDNLPGSIGWAYVDHDGNLKAHGQIPLQMGLPSGKQDAQIVDACLQLAALADKFACPVVCEKLDFSTKKERLKERGKKYARMLSGWAYSQFFFRLESKYMDKINFTHSLALVSISGACRPWLCAIIFV

SEQ ID NO: 16946 - protein, 556 aa, Streptomyces sp.
MAEKKPLRQIARPFVADGPSGVSIRDRLKSLTAEDEKVLRAVGEHMGRLASADLARRRRDGMDHSTDTWAARKRDLTAESSSRWAGSVTSSTHDQWGLSRRAQHQHLASLDAGIRTLRHRLSLPVGEKGSRGKPGGYRSKHEWFVKTRRLAILEEKCEKIRVEREAGRVSVTRGGRRLFRQRHNLNAAGKMPEQWRAQWEAARWFLTADGESGKRYGNETIRVTPDGGVSIKLPAPLADLANARHSRYVLAAKVSFPFRGEEWRDRVTGNRAVAYRIHLNTASGRWYLDASWTRKDLPVIPLDALRAGGVIGMDTNADHLAAWLLDEYGNPVGAPRRFDYDLSGSASHRDAQLRHALTRLLRWTQECGVRAVAIEDLDFTDSKTREKHGRKKKFRQLISGIPTGRVRARLLSMCAEAGIGVIAVDPAYTSMWGAEHWRKPLTTKRRPATRHYAAAVAIGRRSLGHRIRRRTAPPPHHQSDGVRHRTAQARPGDPGSEGHHPAYPDHGHDPLALDAAGTRWTRTPKTVRVVRLSTCNSCSLFRNGYSRPAEVLDMSA

SEQ ID NO: 16947 - protein, 482 aa, Acidimicrobiaceae sp.
VKRDSNSPAERSRKAKAAKLARWKAAHPSVSRGLLYRMDPTVELGAGMGRMTDLDRALWNMTHQWWLMSSRPLRRVKKSDLDAVVAQARTDIPWLAELPAQACKAVAKRYWQTWERCWSGVGGAPNFHSRLKDRPSFDIPQARDLNITRVSKKFATVQVPKVGKVTIRYHRPIPVGARVTGARVTNDHGRWTLALRVELPKPELRSPVESRPVVGFDRGVVIPLAGSDGTEFNHPDWLTPGEKRHLRYLERQSARERHARWDRSDGRGKGRIGANERKTYDAIASVQAKAARRRKDWHHQTSRKIADGYSVAVFEALRIKNMTKSAAGSVKAPGTNVAAKSGLNRVILNEGWGTLLDLTRYKMADNGGAVVTVPAPFTSLTCHTCGSTTPGQRKNQALLVCGDTDCGWTGNADFNAACNILMRAVSGGLVPTLSAGIVDDARSRYELEERTDAMPPVGTEAPLKLDGPGKRENRLGQRTVAA

SEQ ID NO: 16948 - protein, 382 aa, Acidaminococcus sp.
MKPTTYTYKLYPSRRNKHLHQLLEAARQTYNHCIKLYRRYYRLYHEKLPKQKLQRQLTKQQKLPHYAYLRQLPSSIRNAIPYKIEKAYQSYFSILGKNKRAAPPCCRSQEAFTTITLYQSGWKLDEEHHRIRIGKTWYKYFRDRALPSKPKSVTLKRSPLGDFYLYFTCQIPKQFIPFRKRKVIGLDYSMQDFLCGSDGNRISEPQFLRESLAAIQKAADSLAHKHSGSNNYQRAKKDLLRKYEKLKNQRSDFQWKLARKLVQDYTVVAIESLDSQKLQKKFGHRIADYALADFIKKLKYKAEETNTLIFEHHPYFASSQTCSNCGHRNPQVKNMQVKTWICPHCGAEHDRDTNAAINLAQHAMEILLRGGKQRMRTTSEQK

SEQ ID NO: 16949 - protein, 191 aa, Desulfotomaculum sp.
MPGTILTELEKTGLDVGIEKLATLSDGEQIPNPKPIQKSEKKVKRAQRDLSRKKKGSKNRDKARQRLAKIHERIRHQRQDYLHKIASYLVWKYGKIVAEDLQIQNMLKNHHLAKSIADAGWGYLFTMLSYKAESVGREFIRVIAHGSSQECSQCGAIVKKDLAERVHRCPHCGLVLDRDHNAAKVLEKRAS

SEQ ID NO: 16950 - protein, 291 aa, Streptomyces sp.
VIVKLVVQIRLLPTPVQAAALEATLRACNEAATWASGVAFAKDVKNNFALHQHTYREIKARWGLGAQAAQRVIKKTCDAYAVLRANLRAGWLGRPGSKRYRRATEKPIAFRAEGAQPYDDRMLSWQTDRRRVSIWTTAGRVKEVAFTASSEQLATLALHRRGESDLVYRDGMWFLNATCEVPEQPLNTDPTDFLGIDLGIVNIATTSDGEVMAGRELNRIRVRERRLRAKLQQKNTPSAKRRLRKRRRKEARRARDINHKIAKHVVAEAWGHLPRRSGSGGAPVAGSPWRT

SEQ ID NO: 16951 - protein, 354 aa, Acinetobacter sp.
MKTLKLRIKDRHSRVLNQLASEVNFVWNYVNELAFKHLKRKGEFLSAYDIAKYTKGTSKECGLHSQTVQAVTEELVTRRKQFKKAKLRWRVSNKKSARRSLGWIPFKKVAIKYADGYVQYGKHPFKLWDSYGLSQYSVKTGAFVEDSRGRWYVCLVVDSLKTEKSTATKAIGIDLGLKDIATCSDGTVISNPKFYRAYEQKLGIAQRARNKKRVRALHAKIANCRKDHLHKASSQLVKENALIVVGDLSAKKLVKTKMAKSVLDTGFSALKTMLKYKCENASVLFEEVNEAYTTQTCSCCGEITASSPKGRADLRIREWRCVECGTFHENRDINSALNILALGHKRLAVEISLF

SEQ ID NO: 16952 - protein, 372 aa, Bacillus sp.
VILARRVSLKPTLEQEKQPWKSVGTARWAYNWALAKQEENYKQGGKFITDGVLRKELTQMKQTEEYAWLYGVSNNITKQAIKDLCEAYKRFFKGLADRPRFKSRKRSKPSFYNDNVKLKVKKNYVLIEKVGWIKTSELIPIVDKYTNPRVNFDGKYWYLCIGIEQECSQYKLTNECIGIDVGVKELAVCSNRMTFKNINKTKVIKQAEKRLRKLQRQVSRKYEMNKEGNRFVKTSNIIKLEKRIQHLHRRLANIRNNHIHQTTTAIVKIKPCRVVMETLNIKGMMKNKHLSKAIAQQKLHDFKLKLQYKCEKYGIEFVEADKWFPLSKMCSSCGNIKKDLKLSDRMYQCTCGHEIDRDLNAAINLSQYELVS

SEQ ID NO: 16953 - protein, 242 aa, unknown
  TnpB Polypeptide
MLIAHKIALNPNNAQATYFARAAGTARFADNWALSEWQRQYEAWKADASLPKPSQRSLCRQLNAIKREQYPWMREVSKNVPQMAIIQLGAAFKNFFAGRAKYPQFRKKGIHDRFALTNDQFSVDGLRIRIPKLGWVRMREALRFTGKIMSATLSREADRWFASSKTCSNCEHQLDTLPLSVREWTCLACGSIHDRDLNAAINLKNMTASSTVSACGEAGAGLGRKLKTKPASVKQEVSFKAV

SEQ ID NO: 16954 - protein, 381 aa, unknown
  TnpB Polypeptide
MTKRAYRYRFYPTPEQELILARTFGCVRFVYNSVLRWRTDAFYQQQIKVGYVEANAQLSRMKKDPELAFLSDVSSVPLQQCLRHQQSAFKHFFEGRAQYPTFKRKKHRQSAEFTRSAFKYRDRQIFLAKCKEPLAIRWSRDLPGEPSTITVSKDTAGRYFVSCLCEYDAQALPITPKMIGIDLGLHDLFVTSEGGRTGNPRHTAKYATKLAKAQRALSRKRLGSANRAKARRKVAAIHAKLSDCRMDNLHKLSRRLINENQVVCVESLKVKNMLRNRSLAKSISDASWGEFVRQLAYKADWAGRQLVAIDQWYPSSKRCSSCGHVVEKMPLHIRAWICPECTAEHDRDVNAAINIKAAGLAVLALGENVSGIGQAPVSGSQ

SEQ ID NO: 16955 - protein, 421 aa, Streptomyces sp.
MDDQRRPLRQIARPFVADGPTGVSIRDRLKHLTAEDEKVLRLVGAHLGMLASRDLARRCRDGLEHSTDTWAGRKRDLTALSSSRWAGSITSSTHDQWGLSRRAQQAHLQSLDAGIRMIRHRLSLPVGEKGSRGKPGGYRSSHEWFHKSRRLAILEERYEQVLAERDAGRVSITRGGRRLLGIRHNLTAANLTEAQWRAQWEAARWFLTADGESGKRFGNETIRVSPHGEISIKLPAPLAEHANTKHGRYVLSAKVAFWHRGDEWRDRIEANRAVAYRIHLDTVRGRWYLDASWTRKDVPVASLTTLRADGVIAVDTNADHLAAWRLDEHGNPIGTPRRFDYQLTGSASHRDAQLRHALTRLVHWAKQTGVQAIAIEDLDFTDSTTRENTAAASDLGSSSPVSPPAACAHACCPCARKPASA

SEQ ID NO: 16956 - protein, 505 aa, unknown
  TnpB Polypeptide
MRVIMHLPHRFSGIGRPAPLLTRPWPPAKAPPGHPASLFPTPARAARRRRARWPGRLRRWPGRTCPPSRCASRTTATSERRGPGDAEHVPDRPHLQRVGDDYPGEPELATEQPGERGAGHRGGQVAGQFGHPQVARHDSQGPGLDRRLERRQVDQLDRDPDVADGDDQQDDREDERQRGPHPVARRHRECPVVRVDAQLVPVPVTQLPGDQISLGEHAEVPDDRQQQQAKTSAPLRFVWSWPDVDVATLNPTMVVVSCEPDGRWYVTFSVDGDDPEALVPAGHAVGVDLGIKDFAVTSDGEKIANPRHLERKARNLARCQRRLSRKQKGTANRAKAKAKVARAHRKVRNTRSDFLHRASTRLVRSADVIVIEDLLVRNMVRNRRLARAISDCGWGEFRRQLEYKCQRYGRELVVIDRWHPSSKTCSACRHLLASLSLSTRHWTCPSCGTRHDRDINAAKNILAAGQAVTACGADVRHSGSSRVQSAVKQEFQSATAGIPVPQGRE

SEQ ID NO: 16957 - protein, 386 aa, Acrocarpospora sp.
MVVCSIVKLVVRVKLLPTPEQAAALQATLRMVNQAANHVSKVAFERNTRRHYDLRKLTYANVREEFALAAQAAQHAIKKVADAYTSLRSNIRAGNLGPEGSPRRAKAESKPITFGPDAAKPYDDRCLSWNHDARTLSIWTTAGRLRNMAFTGSPDQLKMLTAHRKGESDLIHRDGMWFLYATCDLPDVQVLDPVGFVCVDLGIANFATTSDGTLYAGKTLNAVRHRHRELRRRLQARNTKSAKRLLKRRFRKEARFAADANHVISKRIVTEAKRTGRGISLEDLSGIRDRVRLRKPQRVTLHSWSFHQLGSFIAYKAAGQGVPLVYVDSACTSRECSTCGHVDKKNRPDQATFSCTSCGFAEHADVNAARNIASRGATGWAVSHAA

SEQ ID NO: 16958 - protein, 400 aa, unknown
  TnpB Polypeptide
MMLTATKIRLYPNAAQANKLAKAFGSARWYWNNSLAETQKVYQETGKGLGQYQLNARLPQLKTEVAWLGETHSQVLQSVSLHLSRAFANFFEHRAKYPQFKNKHRKQSIQYPQGVKVVDDCKVFLPKIGHIKAVIHRELVGTIKTVTVSKDPSGKYFASILCENDEVQPEVNLHGKVLGIDVGLTELAITSDGSKFANPKHVHKAQRNLKRKQQSLSRKAKGSNTRNKARLLVAKAHERVANARKDYLHKLSTRLVNENQVIAVEDLHIKGMMKNHNLARAIGDAGWGAFTNMLKYKTARSGKGYIEVNRFFASSKTCSCCLHAQAQMPLDIRTWTCDQCGTRHDRDINAAINIRNEAQRMIAAGIVVTANGGAVSQAKGRKSSALLAPLKLEAPSFTAG

SEQ ID NO: 16959 - protein, 303 aa, Mycobacterium sp.
MQMRYRYRIEPTPGQQEMLARVFGCCRVVFNDALRIRDQAYQAGVKLSDSEIQRRVITAAKRTEERVWLAEVPSVALVQSVNDSRRAWRNFFDSATGKRRGRKVGRPRFKSRKDHRQSFRLTRNGFSVRDNGRLFVAKVGEVRVRWSRELPSTPSSVTIIREPDGHFYASFVVDAAATPLPVVDREAGVDVGIARLATVATTDGHRIDIGNPKHLGRKLRKLRRLEREKSRRQKGSANRAKTRRKVAIAHNEVARARRDYHHKQALALVRENQVIHVEDLNIAGMVRNRRLARAISDAGWGSS

SEQ ID NO: 16960 - protein, 357 aa, Mycobacterium sp.
VRQWHVGTKGKPRFKSVKRGLHSLAAKDGNGALRPKTDEAGALVGLQWGAGLVVPIAPAAVSGRRGREQQAELAEIEALIAAGKVRSTRIVRTVINGRDTYRMQLVCDGRPSRRYPVGEGRVSFDLGPSQIAVAVERSDGSWSGWVEPLADAIRLDTLRLRRTQRHLDRQHRAGSPDCFNRDGVHTGRCGWRRSAAAMRTTRQVAELHRRLAEHRKTLHGRWATDCWATAPISPVSDSTMCRGRRTFRAVCATGHPGHWWRWCAARLKAPAVSSSTSTTHARPPCRKPACAGTARRNRFRNGCTAASAASKKIGTCFRPTWDCMSEPGSMGSIGWTCRQPNRAGASSGRRRVAEVQP

SEQ ID NO: 16961 - protein, 355 aa, Methylophilaceae sp.
LTWLKDAPSQTLQQSLKNLESSFRNFFAKRADFPKFKKKGLSDSFRFPQGFKLEQHNNRIFLPKLGWMRYRNSRDMLGVAKNITLSQKCGKWYASIQTEQEVEQPIHPSASIVGVDVGIARFATLSNRQVFDAVNSFKQKQTRLARYQRALSRKVKFSNNWKKQKGKVTRLHNTIANIRKDYLHKTTTAISQNHAMIVIEDLQISNMSKSAKGTIEAKGRNVKAKSGLNRSILDQGWFEFRRQLEYKQAWNGGSVIAVNPRNTSRTCPCCKHIAKENRLTQAKFECVVCGYSNNADLVGAINILAAGHAVLACETVKVFTEPLSASAQSGDVRVTVQQDRTMKQEPAEETKHEYA

SEQ ID NO: 16962 - protein, 382 aa, unknown
  TnpB Polypeptide
MNKKERRLWKMANKAYKFEAYPNEKQSLQFNRTFGCARFIYNHLLNDRTTYYKETKKTLKKEVSEYKKEFPFLKEVDSLALANAKINLQKAFDNFFNPKLKAKYPTFHKKGKNDSYTTNRVVNSKGNENISLTKNGIKLPKVGVVKIKQHRALGKEETIKSVTVSKKAGRFFISILVEFTPQEIEKVIPSKNSKAIGLDYSSPYFYVDSNGNSPSNIHFFRESEKKLAKLQHNLSRKVKGSSNYKKELLKIQKLHLHIANQRRDFAFKEANRLTEMYDIICFEDLNLSNLKRTLKLGKATSDNGFGMFRTIVKNKCEEKGKLFIKIDKFFPSSKKCRHCGNINKNLKLSDRIWTCPYCKNPIKRDLNAAINIKEEGLRIALL

SEQ ID NO: 16963 - protein, 381 aa, Acidilobales sp.
MASSYEGALTLSIAMRVSPEPGAVELLKRYRLALNYAINRILSLNLKTIRNVHRVLYRELREWFELPSRIALDCYRDALANAKAWRRNPYRGRRPRVKRLSMLLHPGSGYRIEEGYVEIIGGIRLKIIGWDRRYDQYESGEARLVYRGGEMVLWISKRIPRPKQYKPRDVIAIDINEKKIVYGDSEINKDIDTAVNRAYKWKILAESLQKKYSSPRYPAWKRRRRGILNRIRSYHRKAKNVLEDWAKRTSLKIVRLAVKLQYALAREDLTGLVEALRKLPRDHMVKLIIMGYSRLGKWIDWQAMKHGAPLAIVDPRGTSSECPQCGSKLEESGYRRLRCPSCGFEADRDVIGKLNIRKKALKMLRIKIDFGEFWPPSLPPK

SEQ ID NO: 16964 - protein, 361 aa, Brevibacillus sp.
VIELAQSLQISFVSKQRTSDTHQQNDRMHSLCILAKRKDAYEQEQKTLNYNDCSAMLTQLKKEIEWLKEVDSTALQSTLKDLDSSYKKFFKEKKGYPKFKSKKNPKQSYTCKMNIKVEGDRIKLPKLGWVTFAKSREVEGRILSATVRKNPSGKYFVSVLCETEIQPLLQAEKTVGVDLGIKDFAILSTGEKIANPKVLRYYEKKLATWQQKLSRRKKGGQNREKSRKQVARLHERISNTRNDFLHKLSTQLIRENQTICLEDLRVENMIKNHKLAKSIADASWSAFRTMLEYKAAWYGRTISVVGKQFPSSQLCSGCGYQNKEVKNLNLRNWTCPNCGVQHDRDKNAAINIEQEGLRLLA

SEQ ID NO: 16965 - protein, 370 aa, Brevibacillus sp.
MILAKKTRLKPTPEQEKQLWKSVGTARWAYNWTVARQEENYRNGGKFLVDGDLRKEITQIKQLGEYSWLYEVSNNVTKQAVKDACEAYKKFFKKLADKPRFKSRKHSKPSFYNDTDKLKVKHNLVLIEKVGWVQTTEQLPTEVKYSNPRISFDGKYWYLGVGIEQKVEKSTLTDEVIGIDIGVKDLAICSNGMTFKNINKTKASKKAEKRLRRLQRKVSRKYEMNKEGSRFVKTCNIVKVEKSIRLLHRRLTNIRTNHIHQATNAIVKTKPSTVVMETLNIKGMMKNRHLSKAIAQQKLYEFKRQLQYKCEKYGIHFMEADKWYPSSKTCSNCGQIKKDLKLSDREFKCDCGLEIDRDLNAAINLAKLAS

SEQ ID NO: 16966 - protein, 153 aa, Brevibacillus sp.
MNGLFVDSEEGKTANYPRFYRQALEKLAREQRILSRRKKGSNRWHKQRLKVVKHHERIASQRKNFLHKESHKLAKRYDGVVIEDLNMKGLSQALHFGKSVADNAWGMFTTFLQYKLEEQGKELIKIDKCRLSRKSRQLFFCSFLLTNYRVNLL

SEQ ID NO: 16967 - protein, 390 aa, unknown
  TnpB Polypeptide
MIIQKRFKFRLYPTKEQETVLLQQGGNTRFLWNHLLKDNVDYYKETKKFKFFYEMAMSLPKLKEEYEFLKLSFSQSLQTVTRQLDRALRDSFKSGKGFPKFKKKKDNDSFTCPQGWKLKKGFVYIPKIGEVRWIKHRPLQGSSKHITISQDGDRWFCSVSCEVKIQEKEKKTGNIVGLDLGLKVFATLSDGIVIDNPKHIKRYEDKLAKEQRKLSRKLKGGKNRNKQRKKVHRVYQKIKDVRLDFLHKVTSHMIAKYDGVVVEDLNVSGMMKNHHLAKSIADVSWSEFTRQLEYKALWNSKYFLKISRFYPSSKTCSRCSWKDEELTLSDRMFKCEICGLNIDRDLNAAINIYRLGASQINACGDERLLSSAKQEKEEQDNLLEACGCKP

SEQ ID NO: 16968 - protein, 435 aa, Thermococcus sp.
MKRTVTLKLQPSKEQEKSLFELANTGAKVWNEVNFLRRQLFFDHQPVDFNKTEKEVYEKYKKEIGSATVQQICRKNAEAWRSFFSLARKKKDRELPKWMRPKPPSYLKDDGKRKPLIVLRNDQYKIEGNKLILKGLGKFKRLEVQFKGRIHVKGKQGRLEIIYDESRRKWYAHVSYTVEKRLTGNEWVEVPRRPKGDLSAGIDLGVNNLMAVYVETGESFLVNGRPLKSIAFYWQKRIAEYQSKLNKSGYKTSRKLKRMYQKAKLQARHYINTAVRQIVEGLYEMGVSTIVVGYPKGIARNSEWGEKQNFILSHVWRFNTVIQRLKEVAEEYGIEVELVDEAFTSQTCPVCGKPHKGARFVRGLYKCPAEGLVFNADLVGAFNILKKVVKTITPSLSALAGGRGNGGKTLPEGPKSPPLLGFNETPQTFPPLARG

SEQ ID NO: 16969 - protein, 292 aa, Arthrospira sp.
MDTAPFWVSQTPYNPRQLAVFQADEAHKAAIKSGGDAKFRSVRDPVKSIRFPKDNWKKGTFYPTQTKGLRFKASEPIIDKMHHEPTLVLDRGRWFICYAIDAPKLEPLNSDLAIALDPGVRTFLTGFDGQEIWEIGKSDMGRIYRLATHLDRLMSRIGLSKGRQFKRLRHCLRKAAQKIRVKIRDLVSELHKKAANYLCSKYKVIFLPKFEVKNMVKRGKRRLSTKTARKMVTWSHYRFQQTLKHQAAKVMVEREVTFPNSNSKPYLRLSPHTAPDMDTPLSVGTGLQPPAL

SEQ ID NO: 16970 - protein, 461 aa, Paraburkholderia sp.
MYSIHMPSILQSGVRFRAYPSAGLASLLARWIGCQRFIYNGKVNEDRLFAAQRRLEMASGNVEVKTPLDQAYSQFKDRELTPWLYDVPSQILRNGAVRWMNAKQRQLKKLGKAPRRRTRRDFNSVHVTAELFRFVQTAAGPAIELGTKAEPIGRLPFKAHRPFGLPKSIVLREVAGQWFVSFCYEQASNVIPREPHELAYELNALDDETLAGFTLGLDRNVADNCVATSAGEQFHFDPVSVERMRRKEIGAKRYQRRLARTQKGSANRRKLARRLARRQDYATCVRNDFAHRLTYRLVNSEARFFVLEDLKVRNMSRRPKAVKDGRTGKWLRNGANAKAGLNRKILASCWGRIDAFLRYKAAKQNKLVGKVPARNTSRGCSRCGHIHADNRDAGRFVCVRCGFTLHADHNAGINIRTRGIEALRDGAFSVGKPKKRVAFRRKNRSTTGGTPGSCLWSECKT

SEQ ID NO: 16971 - protein, 381 aa, Kandleria sp.
MTNRAIKYRAYPTTEQSVMFAKTFGCCRKVWNLMLADKIESYKSTGKFVTVTPAKYKKDYLYLKEVDSLALANVQLNLQSAFKNRFSKSRKKNNGFPKFKSAKRSRKSYTTNNQHGTVAINDNSIRLPKIGHVKTVIHRKPNDSWIVKSATVSQESDGKFYISVLFEIADSKNTYVADTNNCIGLDYASDGLYVDNNGNVGTNHKYYHESHDKLAKSQRRLSRMQGSKKHEIKSNNYLKQLRKVNKIHRHIANQRLDNLHKISTEIANQYDVVCVESLNMKSMSNKGFGNGKATLDNGYGMFLSMLEYKLSERNKYLVKVDKWFPSSQICHCCGKIHPEMKNLTIRTMKCDCGLTISRDQNAAINILHEGLRILNESFAVA

SEQ ID NO: 16972 - protein, 427 aa, unknown
  TnpB Polypeptide
MLEGYEMTEIVKTMKLHIHVQDSDIRSVEHLTEQYRLACNFVSQYIFDHNFPMSSVTLSNKLYQTIRSDFGLKSQLTQSAIRTVTARYDSIRTQMKRKPYKFKDIFTSKWYRVYRTLDWLQKPVLFSRPQADLVRNRDYSFVTDKKSDTTYLSLNTLDGRIKATFDVPPCFKDYFDGTWSFGTGKIVSLKNEWYFHIPMTKKDDVVFDKESIKHVVGIDRGLRYLMTTYDEKDETSFYSGEAVRKKRESFNKVRAELQSKGTKSAKRALKRLSGRENRWMSNVNHCLSKTLVDKYGSNTLFVMEDLSDVSFDENLERRSDQQRNELRSWSFYQLEQYLTYKAEAIGSQLLKISPEYTSQRCPKCGRIHKANRDHDKHLYTCDCCGYQANDDQVGAMNIQLLGTLWISGNENPKFKLSEQEKTLALTN

SEQ ID NO: 16973 - protein, 396 aa, Nocardia sp.
MRSIQLRYNFRCYPDESQQAALARAFGCARVVYNDALDARQRAGAAGHWIPDAELSRRLTAAKRTAERAWLADVSAVVLQQALADLNTAYRNFFASATGRRLGPTVGLPKFRSRHDRQSIRFTRNAHFAVTAGGRLRLPKIGAVKVVWSRPLPAEPTSVTVIRDTAGRYFASFVVESTADPLPEQSAQVGIARGTGTVAVLSNGATIAPPEFLRRSQRRLDRARRTLSRKQPGSKNQLEARLAVAKALAALNDTRRDWAHKQSTAIIRENQAVYIEGLPYRAKAPSRRTRSTDDDSWTVLTRMLDQKAARYGRRFGKVSPSPVPGPHHPDRAARTILAAGQAESRNACGADKRPGPVPALGHETGTRRRRYPRQTESSLPAGARHEDAKTRTPTHR

SEQ ID NO: 16974 - protein, 459 aa, Acidiferrobacter sp.
LSERPPTRSFCSSCTIGSCEPGSISRRRWRCGVSPRPARPINATRRNGRISVPAPLSLRPAPDELQGAGPGESSDASRPDPRAVHHGHIPVRTVQRRQGPVRFGPAARRPMVPAGDGRRPRWHQNLHDRLPGRRPGRGQRRYRQRRRETFRRWRRGLSHPPPHPAPGTAEGGGAQAPRAPAQGPARKLRTLSGQEARFRKDVNHTLSKTLVAKAQDTGRGLALEDLKGIRDRTRFRKAQQSMSRKQKFSHNGKKARARVQRIHTRIGATRRDFLHKTTTATGHAAGHVSQNHAIVCLEDLPVRNMSQSAAGTTEKPGRTVRAKSGLNKSILDPGGFEFRRPLDYKLAWNGGWLVAVPPHYTSRTCPCCGHISADNRKTQARFACVECGFADNADLVGAINILSRGMHMLRDEGQDTADASAGWDTTARIACEVSGAAMPPAAGTRRSDLGAAQCRPLAP

SEQ ID NO: 16975 - protein, 413 aa, Acidiferrobacter sp.
MFHATKIRLYPNVAQQDLIARQLGCVRFVWNKALDVKKVAWRERRESLSIHTLITMLPVWKARDTPWLKEADSQALQMTLRHLDRAYTNFFAHRAGFPKFKKKHAPRQSYAYPQRVKVEGDKVFLPKVGWVKAVVHREITGAIKTVTVSRSATGKYYAAVLTEDGKTRPEPVRPVTRVTGIDLGLSDAVITSHGAKTPNPRFLRRSLKNLRRKQQSLSRKIEAAKTRCAAAGRPVADLRDYFGSNVAQARQQLARAHERVRDARTDWQHQVSRRLADENQAVCAETLNVKGMMKNRRLARAIADVGWSGLVTKLEAKLKARGGYLIRVDRFFPSSKTCSHCGARNTTLTLKDRTWTCAACGTTHDRDVNAAINIRHQGILQLKAAGLSVSIVGRMAYAHGGGVNPSPIGMVAA

SEQ ID NO: 16976 - protein, 199 aa, Salmonella sp.
MMFLAYHSSNHYTLPITAKTVGIDVGLKDLFVTNTGFKQSNPRHTAKYAARLTPLQHRLSKKAKGSKNSAKARLKVARLHSKIADCRLDALHKATRKLINDNQVVCVESLKVKNMIRNPSLSRAITDASWSELVRQLQYKGEWAGRSVVAIDPFFPSVVVAASPCKKCLLMFVNGTALNAAQTMTVTLTRPVISKLPGW

SEQ ID NO: 16977 - protein, 414 aa, unknown
  TnpB Polypeptide
MDLTRKIRLYPNKVMSTILDNLCDYRRYCWNQALDVWMSLYQQRQEHLPADLRLKVKQAVNDKSITFTDDENALLIQYPAPTRYQVCNMLVATKEEWQYLLSSRVLQQAVADLAKAWKCYFNNKDNTSLRVGKPSFKEKKQPKQGFKTDRSRIQNGKLMLDKPRQYKGDWYGIPFKGYPLPNGPIKYCSITKINNKYYASLVVEVSIEELPKTGQNTAVDANVNHFDYTDGQYAINPKQLNSLYERIAFYQKRLARKRKVNGKKASDSKSYSVMRAKLQALYEKATAIQYDLLHKFTTYLYQTYDIIVIEDLDVKSMQMSKKAKNLHRSLFGKFRYQMEYKAEKFDKQLIIADRYYPSTQKCSSCGHIKKGDDKITLTGNAKYGTAHNEYICYNCGYQSDRDRNAVNNLLALIK

SEQ ID NO: 16978 - protein, 418 aa, unknown
  TnpB Polypeptide
MLKTYSLEHDKRKEVEGLFRAYNKILNAIIEDVWSSIRWKQIKIKGKNQFRLLPIYRKDNSFRKYLRNKHLKGWIYAAHWVDSALKTAFSIMDSWKKNYVKGDRKRVCPKARRLFIRVKQTLCKLEGGNLRVTTAPKSFVYFDLSKRYFKIPREISSSGIGEPIITLNRIYLPIHAPDKRPEPATGKVAWDSNMLSLDGYSPKTGWVKIDTKALATVHISSFEKRRSVQRKAKTKKVKRVLRKYSRTEMNRARKHQLEIARVINSLAEVNGFERLRKERMYSRSKVWNREIMRTDWRAIRRLVDSGVELSPQYTSEECSRCGWINRDLNGSIFRCRSCGLTIDRQLNAALNLYLKMEGVPHQMRWWDMHILPSLVGGYFLTGAEQKAPYELVRELYEAVKPKLYTYDSYADAYLPVPT

SEQ ID NO: 16979 - protein, 169 aa, Escherichia sp.
  misc_feature (151)..(154): Xaa can be any naturally occurring amino acid
VKRLQAFKFQLRPGGQQEHEMRRFAGACRFVFNRALALQNENHEAGNKYIPYGKMASWLVEWKNATGTQWLKDSPSQPLQQSLKDLERAYKNFFQNRAAFPQFKKRGQNDAFRYPQGVKLDQENSRIFLPKLGWMRYRNSRQVTGIVKNVXXXXWAGCATGTAARSRVL

SEQ ID NO: 16980 - protein, 211 aa, Haloplanus sp.
LDGPTPHGGILALQGGEDVNREEYQTEGENGPSKRARKARKKLSRRKDHFLHTLSNHLVERCVEEGVGKIAVGDLSDIREDENGDSRNWGGSGNKKLHGWEFDRFTRLLEYKAEEHGILIDRVDEENTSKTCSCCGQIRDSNRVERGLYVCSSCETTMNADVNGAVNVRRKITQSPPTGDMSNGCLAQPGVFLFDRESGSFNTREQGDCKP

SEQ ID NO: 16981 - protein, 410 aa, Haloplanus sp.
MNYNYRYRLRPSDALEEQLAWTVDTCRQVYNHFLHRLNRTDDTSAYSEQERLPDLKKWWDDLNQVHSKVLQKVVQRLYDNLSTLRGRKENGYHVGTLNWKAPSEYRSFTYSQSGFKLKDTSGRTELWLSKLGEIPLTFHRDLPDDAEIKTVTVKQEPTGKWYAIFGVETPEGPPEKPANPKQCVGIDVGILNYAHDTDGTAVKSPDLSDERERLKRAQRDLSRKEHGSTNWGEQRKTVAERHADLKHKRRDFLHKLSNYYATEYDLVAVEDLDAKGLVELPGNSRNRTGAAWGTFLRMLEYKCEREGTHFVAVEPAGTTKECASCGVKTDKPLWVREHSCPACGFEADRDANAAWNILSRGLEEVGAGRSESTPVETALPTDTDSVSAKRVVETGSPCLKEPPKAASRQG

SEQ ID NO: 16982 - protein, 437 aa, Haloplanus sp.
MSVVVRRTNVFAVRPLTEQGEQLLHDLLDASASLWNELTHERRQNFFGGESVWDTADYRKRYVGVLGSATAQQVIRKNSEAWRSFFAAREDGEGTAPPGYWGNKDEGRELRTYIRNDQYTLETGERSRLEVPVGRNLKDEYGLGYHDRLRLEIAGDLKWEGEQGRLELYYDEVDDTFRAIQPVTVPDSRRDSPVAEESAALDVGANNLVACTTTTGQQYLYGGRDLFARFRETTQEIARLQSKLCEGRYSSRRIRRLYRKRTRRRDHAQDALARDLIERLYDEGIATVYVGDLTDVLSEHWSAEVNEKTHQFWAYRSFIDRLATTAEEYDITVKVRSEAYTTAECPVCGERGETERDNDVFRCLCGYEGHADLGASRTFLERQAGEITVGSMARPVRLTWDNHTWSESPHSPERVRPNEERTNRSTGDGKLVSVGTA

SEQ ID NO: 16983 - protein, 417 aa, Haloplanus sp.
MEVRRTVPVTLDVDSDDDALLRNTVDEFLFAAQYVVDYAFQGEYVTTSKGQLQDETYDDVCDQTPLNTGLVQNARNKAAEACKSVIERWKQGNKASKPRMTSPHVVYDHRTATFYDDYVSLATTDGRIEADYVLPDRNTDTPHAEYLFSDEYETTGTELHRKHSEWQLHIHCKKDVESDVADQATTENGTVLGVDLGVNNLAAASTGTFWTGNEFDHWRQEYEKRRGDLQVCGTRWAHENIQSVGRKEEGRFKQTLHQISNEIVAEARDHGCSVIAFEDLTHIRERTGASWGHKWAFNRLYEYVEYKAVECGIDVEQVDPENTSRRCSHCGFTHPDNRDSERFKCQKCGYENHADYNAAKEHWTTVSSSQPNRGDEGAPLGVRLNSGTLNVNGEYESPADVSARTGVHAESHRFSGG

SEQ ID NO: 16984 - protein, 456 aa, Haloplanus sp.
MSMTVTKTLQATFAPPTAHKQSKLTDLLETYRDGLQAAFDSGASTMSAVSDIVTPYDLPYQAKAALCNYVPKLRKTYNAKELDDEHPIRFTNQAAKFDHSAERDYEFTWWVPRPGRGTNFWIPLRINPEQEALWHDLVSEDAKAGEIRLQQHRKNWVLHVTVEYPVEEPATDGDATHIGLDIGETALITGCALKDGSPTDPLVRSGSRAKHLRKEMHTTLKRLQERDASEWRTDERFDHYQNALTDIVEKASREAVEYAKRFEDPVLVMENLTYIRERLDYGKYMNRRLHSWAFARLQGRIEDKATEAGIPVEYVNPAYTSQTCHSCHRIGRRDSQAEFQCPHDDCHVSTFQADINASANIARRVDPWGESVPLDKAERDDSSRDGSGSDTATTPTETASPSRGHERRTSLERHREMSETPSQMTLTAFQKSEPSASVHETLSREPTRTGDSGDDD

SEQ ID NO: 16985 - protein, 414 aa, Haloplanus sp.
MEKRRTVPVKLDVDSADAALLEDTVDEFLWAANYVTRHAFEGEYVTTSKTTLHDDTYDDVRDETALHSNHVQAARNKAAEACKSVVEKWKQGKKASMPHFISPHLVYDHRTATFHEDYVSLATTDGRIEADYVVPDDERDTPHTEYFFSDEYETTGAELHHSNGNWMLHVHCKKEVESDTSDMEATENGTVLGVDLGVNNLAVASTGTFWTGDEFDHWRREYERRRGDLQECGTRWAHQNIQSIGRKEEGRFKLILHRISNELVGEARENGCSVIAFEELTDIRKRTGASWGHKWAFNRLYEYVEYKAEEYGIGVEQVDPENTSRRCSHCGFTHPDNRHREDFECLKCGYENHADYNAAKNIGLRYLRRNQTGDGGGAPVGVRLNSGTLNANGEYDPPAEESARAGVHAESPRL

SEQ ID NO: 16986 - protein, 378 aa, Haloplanus sp.
MAWGKYNAKSDVQPLAYDDVREHTDLGSQHAVLATHQAAQAITGCIERRSKGKTISKPTFTAPTVKYDTRTMTLFNDDTVSLSTTESRVRCPLALPEADDGYQRQYLDSDEWNVTESTLTARDGDYFLHIGFRRPKNDTEQNTAEDGTVLGVDLGIENLAVTSTAYFFSGREVTHNLREFEKTRAGLQQTGTRSAHRTLKQSSDQERRYIRDVLHQASNAIVDEALRYECDVITFEDLTHIRDRTGASWGHKWAFRTLYEQVEYKAEAEGVSVKQVGSAYTSKRCAECGFTADENRPARNTFRCVKCESEANADYNAAKNIGMRYVRRGQQSSRRTGNSQLALKSGAVTPSGGFTAHPDGSEVESTDKPHHQKSQTSG

SEQ ID NO: 16987 - protein, 438 aa, Haloplanus sp.
LHIHRTYRAKIFNHSQVAEMLDRHGWSASKLWNVANYHSRQEWHETGEIPDDSDLKRELKTHPKYKGLHSQSSQRVLEELAEAFNSWYGKRKNDSRSNPPGYRKKNYYDQEGRRAHEEHPRSTVAWKQKGIRHDTKNNRVRLSKGANHKEHPRAWEYILVEYETRPGVTVENLQQVRAVYDKAKGRWELHLVCKHKVDTPDAPGDETAGVDLGICNFAAVAYSTEEADLYPGNRLKQDGYYFPKEIAKCDDSGGQEATRLHAKWSERRTHFFHSLAKHIVERCIENGVGRINIGKLAGVREDEDGDSKNWGRHGNLDLHGWAFDRFTKILTYKAKIEGIEVVDVSERDTSKTCCVCGREDDSQRVERGLYVCESCDSAFNADVNGAENIRLNLNQSNSESSTSLDEDRSTGWLAQPAVYLHDLSSGFQPQAQVVDCKP

SEQ ID NO: 16988 - protein, 395 aa, unknown
  TnpB Polypeptide
MQRLQAFKYELMPTGDQQRDMRRFSGSCRFVFNKALAMQTANHEAGNKHIRYEELANLLPAWKSEFPWLKEAPSQALQHALKNIDRAFVNFFEKRADYPRFKKRGYGDSFRFPQGFKLDQANSRILLPKLGYIRYRNSREVLGAVKNVTVSNRNGIWFVSIQTEREVEQPVAQGDAVGIDMGVVRFATLSDGTVVPPLNIYKRYAADLGKAQQAMSRKKKFSNNWKKAKAKVQRIHVRIANARKDDLHKTSTTISKNHAMVVVEDLQVSNMSRSASGKVEQPGRKVKQKSGLNKAILDQGWAEFRRQLEYKMLWAGGLLLAVPAMNTSRTCPHCGHVSGENRRTQAEFACVACGFQENADLVGAINVLRAGHARLACEVNCGVSGQQQEPTERAA

SEQ ID NO: 16989 - protein, 420 aa, unknown
  TnpB Polypeptide
MLVREAKLLNGTPEQYQALDEAICTMQFVRNKCLRYWMDNRGVGKKQLYALCKDLAKQFAFVNELNSTARQASAERAWFAISSFYKRCKRGEKKKGYPQFKKNCRSVEYKQSGWKLSPDGMSITFTDGFNAGTFALYCNGEARRLILNSKINRVRVIRRADGYYAQFCLDMERKEQGEYTGNVIGIDLGLASFYTDQHGNKLECPKFLRRSERRLKQHQRRLSRKFRKGAKPQSKNYHKQRKRLGKVHLKVQRQRRNWVIKLARCVVMSNDVVVYEDLQVKNLVKNRHLAKSIYDTSWSLFTQWLDYYGKVWDKAVVAVPPQYTTQDCSSCGHRVVKNLSTRTHTCPKCGFEMDRDQNAALNILKKGLSILGMEWQNSTFGQKGTAPLGGTTGEISTAAFEGQPDEVSAVAEPVTRIPCL

SEQ ID NO: 16990 - protein, 404 aa, Microcoleus sp.
MIVYEFKVKGKETQYRAIDEAIRTTQFIQNKCLRLWLDNKGIGKADLNKYCAVLAAEFPFASELNSMARQAAAERTWSAIARFYDNCKKKVKGKKGFPKFKKHCRSVEYKTSGWKLSGNRKAITFRGGKNIGTLKLKGTYDLNYYDINQIKRVRLVRRADGYYAQFAIDVKVRIETEPTGQAIGIDLGLKFFIADNIGNTEPCPQFYRKSERQLSRANRKKSKKFVKGAKPQSKNYHKARSRYARKHLRVSRQRKEYCKRVAYSVIQSNDLVAYEDLNVKGLVKNRHLAKSISDAGWSTFRQWLEYFGFKYGKFTVAVAPHNTSQNCSKCGNKVKKSLSTRTHVCPHCGFIEDRDVNAAINILKLALCTLGHSGTYAWGDLPSWAVGAILLSNGESVNQESNVF

SEQ ID NO: 16991 - protein, 438 aa, Nonomuraea sp.
VEREKRNRAHVARLELDQRQNAVLDGQAHNARTLWNLLHEFFTFRQGRFASLAQCDAAIRAARKEIDWLNDLPAQAAQAVLKTYRQAWANYFNPDHPAGRPTFKSRLRSRMAVDVPQARDLNITRITRRWGAVNIPKLGRVRFRWTKDLPGVTKGGPDGKITGARLVKEANGWHIVFRTQTMQAPMAPHQGPPTAIDRGIAVPLALSAGEKIFHRDQWLTAGEQQRLLRLERKAARQKRAAKPRQPASNRLKATYDQIARLRAKAKRRAIDWQHRTTAELTDRFGVIVLEDLKVTNMMANAAGTLEQPGRNVAQKRGLNRAIAGQAWGRTAEFLTYKATDKGGQVVYIPAPGTSQECHACHTITEGSRQSQSRFVCRNTACGWIGNADVNAARTQLYRYNSAAGRAVTGRGGPAVLGPVKRQAPHGGTTHTTPQRVAA

SEQ ID NO: 16992 - protein, 396 aa, Clostridia sp.
MKKLLKSYKTEIDPTPEQKQIINRTIGVCRYVYNFYLAYNKEIYETEKRFVTGMGFSKWLNNEFIPNNTKFHWIKEVSSKSVKQSIMNAERAFKNFFKGRSRFPKFKKKARSDVKMYFVRTDAKVIIQCERHRIKIPTLGWVRIKEKGYIPTNSNTHIIKSGAVSYKAGRYYISVLVEETEIETNKYRINDFGVGIDLGLKDFAICSNGKIFKNINKSLQIRKLEKKLRREQRSLSRKYESYKKHNKELKGEATQQNIQKQKLKVQKLHQRLDNIRTNYINKVISELVKTKPMWITIEDLNVSGMMKNRHLSKAIAQQKFYEFRIKILAKCKESGIELRVVDRYYPSSKTCHSCGNIKRDLKIKDRTYHCKECGYTADRDYNASLNLRDCQTYNIV

SEQ ID NO: 16993 - protein, 171 aa, unknown
  TnpB Polypeptide
LEKRLRREQRHLSRKYEFKKKKGGKTAMTSANIEKQKLKIQKLHQKIGNIRKDYENKVVHEIVKQKPSFITMEDLNVKGMMKNKHLAKAIAAQRFNYLLTKLKRKTEIIGIELRMVDRFYPSSKTCHACGYINKTLKLKDRIYVCPKCGYTKDRDFNASLNLRDAKEYWVI

SEQ ID NO: 16994 - protein, 471 aa, Bacillus sp.
MVASTERTPSFIATIRLRTNAQEEKVILMLSDCGRQLYNACLGEGLKRIKAIQNTKLYKETVRLSKTSEIDIEKRRANFKHLNATFSFTDYSIQSFGTKTKNSSKFIAEHLGTHVCQKLSTRAFKAVQKFAFKKAKKVRFKRKGEFVSLEGKNNKTFLTYSNGYVFIGKTISLKCLIDPNDQWMQHALNHRIKYCRLIKKEVKGKNRFYVQLILEGSPHRKYELGKEEVGLDIGPSTIAIVGESKAELKEFCEEVVVIDKENKRINRKMDRQRRANNPNHYQSNGVMKKGKKKWTTSKRYIKTRAEHRELERKIKEVRKQLHGRDTNQILQLASSIQTEKLSYKAFQKMFGKSIGRKAPSMFLKMLKRKVEAQGGSFREFPTYSTRLSQTCHCGAIKKKRLKERWHICECGVVAQRDLYSAFLARYVTKSNQVVLQQAEKEWFQLSNVLNDCISNLKNMKVERKLISTFGV

SEQ ID NO: 16995 - protein, 444 aa, unknown
  TnpB Polypeptide
MVQKLKLAIITQLHEGSNRCLIEYMEVSRRDYGKALREAFYAVRRGGLNKSKYNTYLQHKYGISRRTANSIISDAQGRFNALKELKEYERKQLERKIKHLESIVIPKLVERRNQNSIKLQDGVFVSLIQQRNLRLIVFSKKAKLNRLKQKLEELKYQLDTGKLKICFGTKRLRKQDYKKFIEQRDSQMSFIGAREETACNQVLQLKYNRRSNQFLIRLRKDFGGYKPAKGEDRYVYGKVYFNHHKEQIVSILMSKGSPLSYKIVKRKCRYYLHCVFEFQVGNSGKVTRSDYGTIGLDFNKGFVTLSETNQHGHLVKTQFMPYRFKSGNKTKADLQGIANHAVKLAVRTGKDVCIENLDFRTKKAKTEAKQGKKYNEMLHSLAYREFSEAVESVAYRNRVGLNKVNPAWTSWLAERIYCKPMKLNIHTGASYVIARRGQGYKDAV

SEQ ID NO: 16996 - protein, 372 aa, unknown
  TnpB Polypeptide
LRKNFKYRLYPTVAQTVALDGQLSEACRLYNAALQERRDAYRAARKSLGYCDQANQLKEIRAQGDLALANFSCCQDVLRRVDKAFSAFFGRVRKGRKPGYPRFRSVRRYDSITFPSYGDGCRMLDGGKLRLQGVGAVKVKLHRPIEGEIKTVTVKREAGKWYAVFSVECDAKPLPPSTEATGVDVGLTAFATLADGTGIENPRYYKEAQAALGRAQRKVARRKRGGSNRKKAVRELQRAHAHVRNQRADFAHKVARTLVVMFGLIVIEKLNVKGMAAGMLAKSVNDAGWSSFTAKLTYKAAEAGRALVEVDPRGTSQRCVCGEPNPKTLSQRWHQCDSCGLSVPRDHASALEILRLGLSLLGGTWPTEGERA

SEQ ID NO: 16997 - protein, 410 aa, Oscillatoriales sp.
MFVLEFKAKGKPNQYAAIDEAIRTAQFVRNKCVRFWIDNRGIGQKDLYRHSTALREEFAFVKDLNSSACQASVERAYSAIARFYDNCKKAVPGKKGYPTFKKNSRSVEYKVSGWKLSETRKQITFTDKKGIGKLKLKGTWDLNFYQIDQIKRVRLIRRADGYYVQFAISADNNVDTAPVGKTVGLDVGLKEFYTDSDGHTEPNPKFYRTSEKRLKFRQRRVSRKKKGSANRKKAINRLGRVHLKISRQREEHASRLARCVIQSNDLVAYEDLRIKNLVKNHCLAKSINDAGWHQFRKWLEYFGVKFGRVTVAVNPAYTSQKCSNCGAIVKKSLSVRTHACECGFVMDRDWNAAINILKSALSTVGHTGTWVLDPNALGDSTSTLAGEILSEQVGSMNKESPRLDSRGVSR

SEQ ID NO: 16998 - protein, 309 aa, Cupriavidus sp.
  misc_feature (179)..(182): Xaa can be any naturally occurring amino acid
MAPQFLSDAGKKGQQDSFRYPDPKQIKLDQANSRIFLPKLGWIRYRNSRDVLGAVKNVTVSQACGKWFIAIQTEREIKQPVPQTTSAIGIDVGVARFATFSDGTYLAPLNSFKRHEARLRKAQQAMSRKVKFSNNWKKAKAKIQRIHARIGNARRDYLHKATTTISKSHAMVCIEDLQXXXXRSMSKSATGTVDAPGRNVEAKSGLNKSILEQGWFEFRRQLDYKLAWAGGWLIAVPPQNTSRMCPACGHVSASNRKTQAQFACVACGHEDHADVIGAINILARGHRVAACGEPVQSGHSVKREPTEAI

SEQ ID NO: 16999 - protein, 180 aa, Cupriavidus sp.
  misc_feature (179)..(180): Xaa can be any naturally occurring amino acid
MAPQFLSDAGKKGQQDSFRYPDPKQIKLDQANSRIFLPKLGWIRYRNSRDVLGAVKNVTVSQACGKWFIAIQTEREIKQPVPQTTSAIGIDVGVARFATFSDGTYLAPLNSFKRHEARLRKAQQAMSRKVKFSNNWKKAKAKIQRIHARIGNARRDYLHKATTTISKSHAMVCIEDLQXX

SEQ ID NO: 17000 - protein, 509 aa, unknown
  TnpB Polypeptide
MGYMRTATVYINEGHPLFQYADNLTALTNNLSNTARFRQRQVLSAVSKEEADWTTNEREVMEEIRKTVPLIKKASMPTKGKHFLGYMFLEGILRVNHNPDFYAEGLPRQTAQHVLKVAVKDMKGFYKAIKEYNKNPDRFTGEPKLPGYKRKGGHSTALVTNQDCTIKTCDGKWYAYFPFAKDKPVCLGCPIPDARLKQACITPDNGRYKLSFQFEVDADIPEIPEDIRPERICAIDFGVDNLMSVTNNCGLPSLIYKGGVAKSVNQKYNKTIAALVSEQTLRTGEKFVPDAAYYAATNRRNDQISDFMRKCAKHFVAWCIENRIDTVVMGINKYWKQEAGLGKRNNQNFVQLPFDRLRNIISYLCVWEGIFCLDQEESYTSKASFPDRDFIPVYGNEKGKPSFSGQRRPVHYKGMYKKDGFRGLYTTKSGDIINSDLNGSANILRKAFPNAFTEKPAPDFNSVVIIRHPDEEKVKNNRKKQTAVQKQDSHAKIKRQRKKDAKRKKHPAA

SEQ ID NO: 17001 - protein, 398 aa, unknown
  TnpB Polypeptide
MKLVLKLKLLTDTPTDLLLRQTAQVYHQACNALSQIAFQNQTFSPFTLHLLAYYPIKTEFELPSQLIIRAIAEVCSAYKSLVAQIEQHNLSCQPSEQRELEPLQFQPDLAVPFDQRVMLLNTHQHRVSLRTLKSRIWIDFQVGQKRQHLLAYAHGQADLKRYGKQWFLFQTLEVPEADPIVTTNHIGVDVGICTVASSTDGKQTLRFPGEQIRQVRNHHYHLRRGLQRHNTKSSRRRVRKLRDKESRTVRTYNHLVSRRIVQQAQRTNSTLVLEALDGIRAGVKVHRSQRRERFSWAYAQLQQMIVYKAKLAGIPVMFVAPDYTSKTCSKCHFMSDRNRPTQAWFKCVHCGFCGHADDNAAMNIRFLGAVSACQKRTVYMQEYLQTDRCKPLRFNRGS

SEQ ID NO: 17002 - protein, 465 aa, unknown
  TnpB Polypeptide
VSDRPQRTNTYTANPVSDRYQQCLFDWLAAHAPLWNQITYRRRQQYFDEDGDVWDADYTDLYDEYAPILGKATCQQLARKNSEAWRSHFRLLDKYDSDDPSVTDKPRPPGYWGTREDGYKLHGLVRNDLYTLDWDEDTSTLEFGVGDVLEDRYDFQHNERVTLELRGTPQWNGDDSRLELIYDDHADRLRVQHPVRSQSDTLREQRQAAFTHTLDSENTTQAAAIDVGANNTLAIVTEDGESAVYHARPEFDRFQSYSERIATLQSTLPAEEYTSKRIQRLYDERSRTRDHSRDAAVKHAAEWLLERNVDTVYVGDLTDVLDTHWSATVNEMTHAFWSHRQLLERIELTLGDVGIAVEEVSEADSSSTCPECGSRAVTRAGDSFRCHDCELDGHSDVAGAWNMLQSEDGPMARPAALSAGRGRDAPTDGAYWQWNEHDWTPADCGEQSRSRDQPSISEPASSQPG

SEQ ID NO: 17003 - protein, 332 aa, Campylobacter sp.
MKTLQRVERHIIKPYNKNYNSLLLLANKTKNLYNYVNYLLRQDFITKKPQIKEYDLSKKLASEKQFDYKELPSQTAQQTIKLLYKDWKSFFKCLKSYQKDKNKFTSNPKLPKYKRKGEKGHHIAIFTNQQAKIKQYKNFNKIVFPKSVNIKSIITKIDTNISSLKQVRIIPKATCFIVEIVYETNQLAINYVKNSFLSCDLGLNNFVTTIDTQSKQPLIINGKGIKSINQYYNKKKAYLQAIAKKSNNRFITKQLLKLLNFRENKLNDFLHKASNFLVKYCVKHSIETLIIGKNKEWKKEINLGAKNNQSFTSIPYENFISKLAYKCETYGI

SEQ ID NO: 17004 - protein, 294 aa, unknown
  TnpB Polypeptide
VLANGKLRLPKIGEVAVRWSRGLPSEPSSVTVIRDASGRYFASFVVVTDPAEDLDRFPDSYAEVGIDLGLASFAVLSDGTVVENPRFLRRAERKLRKAQQNLSRKQKGSNNRKKAVVKVAKAHAHVADARRNHHHRLSTMLIRENQAVYVEDLCVTGLGRTRLAKSVHDAGWSQFVGMLEYKAARYGRDFAKVDRFAPTSQVCSACGVSDGKKPLSVREWKCVGCGAVHDRDLNAAKNVLKLGQVAAGRVETKNACGDQVRPLLAVAQVNEAGTRRGGRKRETRADGAAGIPAP

SEQ ID NO: 17005 - protein, 397 aa, Euryarchaeota sp.
MMKSYKFRLEPNKEQRVTLKATLDTCRHLYNNALASRKLQAELYRLPMTKQWITVENQIKALPLQKETNEYLLLVHSQVLQDVCRRVNKSFKNFFRHLKNHEKPGYPRFKSYTRYNSFTYPQTGFKIVGKKLELSHIGNINIKIHRSLKGKIKTCTIKRDIDAWYASFSVEIDDLLAEKTVIKSAVGIDVGINPLVALSNGEQKKPPKFLLQSEHKLAKEQRKLSRKQKGSHNRDKQRVIVAKVHRRIRQQRMDFHHKLSRELVEKYDFIAFEDLKIKNMLRNHHLAKSISDVSWNMLQSFTAYKAEWAGKVVTFVNPKNTSQECSSCGKIVKKILNIKIHNCPYCGLILDRHVNAAINILHRGMKKVGLGYTDLMPVRGLAQVPPMTQEAHEFSRG

SEQ ID NO: 17006 - protein, 433 aa, Streptomyces sp.
MARFRMYPTSEQAGIMLEHCAHARYVWNLAVEQHAHWMPGRRSAPGFAEQCRQLTEARRDNEWLAAGNADVQQQALKDFAKAKSARFTSGFGEPTWRRKYRHEGFRVIGTDRVPEYEADGSPKLNVKTGKQVLGRSVVVQKLNRRWAQVKVPGCGWVRFRLSAKGKGAKLPHAKTFRVTFRNGQWHIAFAVIPGPTPAPGTGEVIGIDRGVTITAALSDGRKLNCPQLTVRERAQIRKHERRAARAPKGSARKTSAYAKVAQLKAREADRRKDWCEKTSTLLARTYDVIRFEKLNIKNMTRSAKGTVEQPGKSVAQKSGLNRSILAQGWGLLRQRTEHKAPGRVEDVPAPYTSLRCSACGWIEKKSRKSQADFACVSCGFTCNADTNAATNIAAGQGGIPRPRCSAGAGGATAATGRSSAREPQPTWVGIPLF

SEQ ID NO: 17007 - protein, 354 aa, unknown
  TnpB Polypeptide
MKTYRTLVLKYRVEKLPPEAAEKIAQLLKIQQEFRRWAEEWARSGGKTPEQRPLKYFAKEFIHAAGALEWLREHVVKHGFKPPLVFSAQLRLTNERDVSRGVFVDISKREIRIRKWGGNTIVLPLSESATRWIKKRVEEGGRLVFAMAWVGRSRRNHAAALYVALVFRRDVAPIQPRRLLVVDFNALHNGVVLATVEEGRVLQRGVLRPDVDRIIHLQREAARLDSLCAEREEGAICSRATSAKSRLWRLLRSWEDEAAKKIAQLAMRYRAAVVADVPLDKSIRQLKESGYPAERKIMLNFGRLRRRIRELAEWHGVPHREERLYSTTCPICGADPPRPRAPTRGPEPPAHGGS

SEQ ID NO: 17008 - protein, 385 aa, unknown
  TnpB Polypeptide
MNKDNIVERVELQLIEKSNYYYDKIFLGCAYSGELYNLANDMLKSFILKKEKINKNDFIEKIMQSKKAQRDIEMLTKNISKQIINVCWRDHESYKKNIDNYFENLDYNLKNEIKCPNIPENKNNGFVVFYGKYDFKYKDNVIMLPICDETITLKMKDKGIPIGIDIIPSNKKIIVNIIYETEIDYEKARIASCDIGLRNFLAITNNFYKDPVIIDGLSFYEEYNFEEDKIKEFVDRSISFVSNYCFENKIKYFVLGNILSTKSMMKINSDKKDLFNSYDHIYFYKTLKKEIERNGTKLILVNEHYTSGTSFLDREIPNKKNYNYSRRNGDVFISRYGLKINADINGSYQIMRKAFPMMFFDDYYDLDSFKFEPKYIYLIDKTKNL

SEQ ID NO: 17009 - protein, 463 aa, unknown
  TnpB Polypeptide
MHAIFFTRREVRTLSNFLTIKYHYKASSKEKQLLKLLCRISKNIYNSALYELRQQYFNKKNICTYFELNQIMKYNPNYHILNTYQSLCTIRIAYNNISKYIRYHNEKGEFIGKGNTDFARFPKYKKKKAVMPLVTDQIRPVWYKGHKCIKLPLSNLTRTSKIFNKVFEDELINLFIKESELKESFDIYFKIPKELYKYNIHQFRIIPNSIGNDYTIEFIYEVGEYAKTKININKSMAIDLGISNLASCIVTNNESFIIDGKKLKSINQFYNKQKAYYQSKLPQGTKYSNRLRNLDKKRNRQVEDYLNKAVATLITKAIESNIDEIIIGWNNYIKTDGIKNDDLKGKDKRRVNQTFVQIPLSRFKDKLVFKCRQNGIKTVVINESYTSKSSFYDNDPIIKGKYSGIRISRGLYQTKDKRIINADINAALNIYKKAVITCNSTNNKIDYLMSRGLTIPNRILVKL

SEQ ID NO: 17010 - protein, 387 aa, Lachnospiraceae sp.
MRKLLKSFKTEINPTEEQKVRIRKTIGTCRFIYNFYLAHNKELYENGKKFMSSSKFRVWLNNEYLPQHPEYSWIKEVYSKAVTQSVNNGQAAFTRFFKHQSAFPKFKKKGKSDVTMYFVKNNPKDCRCERHRINIPSLGWVRIKEKGYIPTTKDGYVIKSGTVSMRAGRSYVSVLVELPDVRAANNVNEGIGIDLGLKDFAICSNGKIYKNINKSPRLKKLERQLIREQRSLSRKYENLKKGESTQKANIQKQKLKVQKLHHKMDNIRTDYMNKTIAEIVKTKPSYITIEDLNVKGMMKNRHLSKAVASQKFYEFRSKLQAKCNENGIELRVVDRWYPSSKMCHCCGCIKKDLKLSDRIYRCGCGYVEDRDFNAALNLKDAMTYEVA

SEQ ID NO: 17011 - protein, 366 aa, Ktedonobacter sp.
MSRKPKGLQHTLQVRLYPTQEQGRVLMAHCQEYISTVNVLSHALDADLIPHDDPFSTKDFVAALPSCVKNQALRDARSVFKRSLDLDVLPVLKKPICQWNNQNWRIEDGVLTVPVSLGGKTQQIPICCADVALDGPPGVLRIKKKRGKWIADISVTLPKPKPVETERVMGVDLGIKVPAVISVSGAGTRFFGNGRYQRMMRRRFYSRRKKLQQARKTRAIRKSKGKEARWMKNINHQLSRQMVNHAHAQGVGTIKLESLAGIRKGTTSTRRGAKARKNNRMKNSWSFYQLTMFLTYKAERLGIKVEQVDPAYTSQECPACRARNKAQDRTYVCAECGWMGHRDGVGAINISRRTGLSDQRVGATGA

SEQ ID NO: 17012 - protein, 479 aa, unknown
  TnpB Polypeptide
VVLAGVRQDAELVSEYAAREMTEQNLALVTYFNGLKPAEAGRQMNLKLPSEVKKRFKSGASRLEMLFRERVVSTLRSWAARVNAANGTHDGYVSAGWRRTVRDAKPESLDLRLSLSATNNQYRKIHVQEDKIILDLVVQGEWVTLHFPTPPQMLEDGCEPGVPDIWVDKNDRVMFGFHGKTKPGRPEFSERYVVGVDVGVTNPAAYVVWDTEKKQVVERSLLGQRARSLSNKIKRAQVQVASLKGKGKDEEAVSHRQHLSNRRKELSILVAQEIADAAWCYGNAIVSFEDLSHIKNTMRFGRWFRGEVYRRTRDMVEADGGRVLKVNAAHTSRRCHICQSDLDMSDYSQPRCKACGVTYHRDLNAAANVAQRANVKKACQTRKRHATKAKRVRRSRCHSKPLRHPGTKNRPTPKAPQNQIKTLAHSSLPSGEVSKGMCPAESRVSAVDHDAWFQTTSGTTIPVENLSIANAVDVVYTKE

SEQ ID NO: 17013 - protein, 371 aa, unknown
  TnpB Polypeptide
MMRELTLWRNNTDPHSNFLKDAPVHALQCVLFELYDSYQRFFKGEQVHPPQFEKKSKAKISFTESDPASFEIDEANQRARLAKLGWVKCRFTQHIEGKPNSTTVKWDGVRWILSVQCQIEMVDPQHLSNTIVAGDFGVARRVTFSDGVVAPPIDVSREEKRKAFYQRQLKNKCQFSQNWKKVVRRISKLDRRIANIRRDATHKFTSEYSKNHAVIVLGDLHIQSMSASAKGTREKHGKNIKQKSGLNRAILRQGWGELARQLEYKQLWAGGMVEYQSEAYTSQDCPKCSYRSPSNRKTQEIFECGSCGFKANADDVAASNQLKKFINSDKGVALLASGYRASANSLWSGRSWGPAVKQEPIEEAAPCAQPQ

SEQ ID NO: 17014 - protein, 403 aa, unknown
  TnpB Polypeptide
VKIRRAYKFRLYPTKEQSAALRQHGGNTRFLWNALLKQNQDKYESEKKFVFAHDMVTSLPQFKKEHEFLQLSFSQSLQQVARQLDRALKDCFNKSKRFPVFKKKGKQNDSFTVPQKFRVGKNFVFIPKIGEVQWVKHRPIKGKVKHLTISQDGEQWYCSVNVELKIKEPTCKQDLLVGIDVGIKTYATMSDGSKIENPKTLNKQEQQLSKAQRRLSQKQKGSNNRSKHRNKVQRLHRKVKNARRDFQHKATAHMIAKYDGFAMEDLNIKGMLSNRCLSKAVSDCGWFEFKRQLRYKSEWAGKPLVEIGRFEPSSKTCSSCGWINKNLTLKDREFVCLDCGQILDRDLNAAVNIRNIGLKILRGTQESTPVETGGCSPAYAGQCQSKKQEKEVLGLDEHLCLLN

SEQ ID NO: 17015 - protein, 396 aa, unknown
  TnpB Polypeptide
MRAYRFRIYPNQEQEKALENTLTTCRHLYNSALEERITAYKESGKSLSYVEQANALSANKNEWQKQVHSQVLQDTLKRLDKSFRRFFDALKTKKRCGFPRFKPMQRYHSFCYPQSGFKLTDNHKHITLSKIGKVKVRCHREIEGNVKTCALVKDIDEWFVVLTVKNTLGSVSVSQPDSVIGIDVGISAFATLSNGESIPNPRHLKRSEKQLSKLQRHLSRKKKGSNNRNKQRLRVAKCHRAIKRQRNDFLHKVSYQLATTHGTIVFEKLNIKGMMRNHKLAKHIADASWNRLIEFTTYKAESAGGVVQTVNPKGTSQICSKCGCIVKKGLSVRVHDCPHCGVVLDRDHNAALNIKDLAVGIADNQNACGRLVRLPSTSVGEAGAVESGSPIPLWVG

SEQ ID NO: 17016 - protein, 381 aa, unknown
  TnpB Polypeptide
MTVVKKSIKVRLYPTKEQKILIDKTIGCVRFVYNQTLADCKQSYEQSKHFPSRNERIKNLVQLKEKYEFLKEVDSQALQQSVRDFNRALDNFFRNRSHFGFPKFRARRADKQSYRTTYNSCNAKVLDDRHIKLPKLGRIKTKHFDVPRSYKIFNITVEKTSTNKYYASICIETEVQSLPKTGKQVGFDLGLIDLLIGSDGTRFERPKFNYLNKDKLTKEQRKLSKMRTKLERAKLNLNECRNYQKQKHKVAKLHEHTSNCAKDFNHKLSRKLVEDYDLLAFEDLNVEGMKKNHRLAYSIADVRWSQLLNFIRYKCNWYGKEFKQVDRFYASSKICSCCGAYHKDIVNAFSIREWTCPDCGSHHDRDVNAAKNILTQALSVA

SEQ ID NO: 17017 - protein, 388 aa, unknown
  TnpB Polypeptide
MGGDSYRMAVVKKSIKVRLYPTESQKVLIDKTIGCARFVYNQTLADCKWSYEQSKRFPSQNERFKNLVVLKEKHEFLKEVDSRALQQSIRDFNKALINFFKNKRCFGFPKFKYKRDGKHSYRTPYADGRSGALDNKHIKLPKLGRVKTKRFDMPEVYRIFNITVKKTNTNKYYASICIETEVQPLTKTGNRAGFDLGLIDLLIGSDGTRFERPKFNYINKDKLAKEQRKLSKMRTKLERAKLNLDECKNYQKQKHKVAKLHEHIANCAKDFNHKLSRKLVEEYDFLAFEDLNVEGMKKNHYLAYSIADVRWSQLLNFIQYKCDWYGKEFKQVDKFYASSKICSCCGAYHKDIVNSLSVREWTCPDCGTRHDRDVNAAINILTQALSVA

SEQ ID NO: 17018 - protein, 263 aa, unknown
  TnpB Polypeptide
LRISKHLKFSKIREPVQIREHWIPDKMLNPRVSFDGKFWYFSFSYEIPDADLTINQENKNITGVDLGIKSLAVTSGGVIYKNINKSKRVKQLEKRKRHLQRKLSRKYQMNKEDSNFVKTNNIIKLEQEIRLIDRKLKNIRNTYIHQVTYDLVKTKPACIVIEDLNVKGMMKNKHLSKAIQQQEFYKFRQYISYKCQGYGVRLVVANRFYPSSKTCSCCGHKKKFLSLKERTYICHECGLVTDRDLNAAINLKIYGKEKLIKIA

SEQ ID NO: 17019 - protein, 278 aa, unknown
  TnpB Polypeptide
MLLCKKVRLEVSEQDAAALECMQGKCRGLYNWLVMRLRDGERWHFAEEKARLGECRAYDPELNDVYGKLLAEVYFRLDKAMKAFFRRVKHGETPGFPRVRPRHQFFTLCYPAMYIKVEGTTVLLPTGGKSEKTKRFPTIRAGLTEEVPAGYREVAISRDARGHYYASFVYPVQEAEPQAGQVVAFDLGIKTLATGVNEQGRFYHIGGFKGHQWYNQQLDKIRSKRDRCKKRSRRYIHLSQVYKRVSEKKRNKQRDCLHKASHLIAHRLAERVVVIGDL

SEQ ID NO: 17020 - protein, 447 aa, Natronococcus sp.
LFEWLAAHAPLWNQLNYRRLDEYFDDDGDVWDAEYTDLYDKYAPVLGKATCQQVARKNSEAWRSFFRLLDKYYSDNPSVTEKPSPPGFKGNRDDGYELYGLVRNDLYEFDWDENQSTLEFGVGDVLEEKYDFDHNERITLEVRGNPQWDGDDARLELVYDEAADTLRVKHPVRIRPDKLREQRLDAFTHTLDPENTMHAAAIDVGANNTLAIVTTTGETTVYHARPEFERFHVLSELIIELQSQLPADQYTSPRVQRVYDERAERRDHSRDAAVKHAADWLLERNIGTVYVGDLTDVLEAHWSAMVNEKTHDFWSHGQLVDRLELTLGDVGITVEQVSEAGSSSECPACGSNEVVRDGDELYCRDCELDAHSDVSGAWNLLQAREGPMARPAALSAGRGRDGSENSSECDGTYWEWNGHDWRPARFGEQSSPVDQPSVGEPASSQPG

SEQ ID NO: 17021 - protein, 409 aa, Streptomyces sp.
LRKSFNEAKRTDPRFVGWWEENSKEAYNTGLANASAAFDNYAKSKNGRRRGARVGVPRFKSKRRARPACRFTTGTIRIESDGRHVTLPRIGTIRLHEHRPDLRARIDTGTMRILSATVRLDRGRWFVAFQVEQRNELVRVARPDAAAGIDLGITSLAVLADSDGNVTEEPNPRHLDRAQKQLARASRVVSRRRGPDRRRGQKPSRRWEKANRVRNKVHHRVANLREDTLHKLTTRLTSEYGTLVVEDLNVAGMGRNRRLSRRVADAAFGEIRRQLSYKTRRHGTRLVVADRWFPSSKTCSRCGAVKAELPLSMRVFECDTCGLVLDRDANAGYNLLALTTRTTGTGVAGDLDPTVTVRSKPRGADRKTRTTLPRHPADKGRAGGIIPSPRAGTETGDRRQDTRTQLALW

SEQ ID NO: 17022 - protein, 376 aa, unknown
  TnpB Polypeptide
LKTILRAYKYRLYPNKKQQELINKTIGCCRFVYNHYLAQRIELYKTEQKSINYNACANDLKNLKKQYEWLREVDSISLQQTLKDLDLAYQNFFRRVKNGEKEVGFPKFKSKKNPKQSYRTQKVNNNISIDGSKIKLPKLGLIKFANSRCFNGRITSCTISKTNAGKYFVSVLVEEEIQELPQNNNAIGFDLGIKKYMVTSDGEIVENPRTLNKYEKKLIKLQRQLAKKQKGSNGYKKQALKIAKLHEKIRDTRTDFLHKLSSQIIKENQLIISENLNVKGMVQNHKLAKAISDVSWSEFCRMIGYKSKWYGRTYHKIDRYFASSQTCNVCGYKNTDTKDLNVRQWICPQCNTNHDRDVNAAVNILNQGLKELGLTA

SEQ ID NO: 17023 - protein, 411 aa, unknown
  TnpB Polypeptide
MSRYRLYPTAAQEKALLEHCAHARYVWNLAVEQREWWQPGRPVPGYSEQCRQLSEARAASPWLATGSVIVQQQALRDFHAAYAAWFASLKQWRMRHAITPPEQRPAAPSPPSWRKRGRREGFRIVAVDPQDVRRVSRGWGVVLVPKLGWVRFRWSRAVPAARSYRVTRDRAGRWYVAFAAVPPAIPAPGNGQVVGVDRGVAVSVALSTGKLLKAPGLRPGERLRLRLLERRLARQRTGSRRREKTRLAIARLKVRQTDRRRDWTEQVSTDLARRFDLICVEDLDVRALTRSASGTVEQPGRNVRQKAGLNQAILAAGWGGLVNRLEHKAPGRVVKIPAAYTSQRCSACGHVAAESRQSQTAYRCVACAWTGNADYNAARNIAAAGQVVAARGGQESPGPLNHEPPTLGVVA

SEQ ID NO: 17024 - protein, 502 aa, unknown
  TnpB Polypeptide
LARPGACHYPTAGYESRSYDRAGAPTADGAFPAAAVPAHAYRYTHEARSAGLGRAAMATVIQAYRFALDPTPRQRRALASHCGAARYAYNWGLELVTTRLSQRRAGEDVQVPWSLFELQRQWNLTKQQVAPWWAENSKEAYKSGLDGLARALKNWADSRAGRRKGRRVGFPNTKRKGRCRDACRFTTGAIKVLPDRTHVQLPRIGVLKTHESTRKLARRLEQGTARILAATISRTANRWFVSFTVEVQRNLPTGNRKTTVVGVDVGIRHLAVLSTGAVIPNPHALERSLRKLGHVNRELHRRRPQSRRRNLTRHRLARVHARAANLRRDALHNLTTTLATQHGAIVVEHLNLAGMLRNRRLARALSDAGLAELRRQLGYKTVWYGSRLVVADPFYPSSKTCSGCGWVKAKLTLAERTFTCEVCGRQLDRDLNAAHNLAKLAQHVARSGRETQNARGAGCKSQLAGRVAMKREAGSPYGHETGTAAPARDGCYHPPQTSGEGW

SEQ ID NO: 17025 - protein, 411 aa, Micromonospora sp.
VQSSRWLTDWKRTQELAFLNEVPSVPLQQTLRHLQAGLAAFWDKRARYPRFNSRRKSRASAEYTRSAFRWRGKMNTPLNIVWSRPLREGAEPSTVTVSRDAAGRWFVSLLVEDQTVKPLPPVAGEVGVDAGITSLLTLSHPVPGISDEEGKVANPRDGQADRRKLAKAQRNLARKQKGSNNRAKARLTVARIHARIAHRRSDHLHKLTTRLVRETQTVVIEDLSVRHMLRNRRLACVIFDAGSGQFRSILEYKAAWYGREVIPVGRWLPSSKTCSGCGRINTTLALNVRTWTCPDCGTEHDQDISADRNVLAAGLAERYNACGADIRPQGRPPGKAVGDETGNLTGDRENPGPFRAGRMSKDSCPADVMRRPRWGCRKGRIQRVVVAVGEDLLGLHASGGQRGDRGLSHGR

SEQ ID NO: 17026 - protein, 360 aa, unknown
  TnpB Polypeptide
MTVTLSHKIELKANKFKTYCRKAFGVSRFTWNWALERVNDKRERKEKIDILELKKEFNHIKRKQYPFVMEVTKYASQQPFIFLKRALSQFFGDLKSDKSPSKRKGFPVFKKKRYSSGSFYIGGDMAVVKKGSEIKDKRFGASDNKPYLHVPKFGWVMLREEICFPGKINSVTISQDGDKFFASFSIETSEIIYEATHRENVREALCGCDWGVKDLLTLSNGIKIKGSKHLRRRQRQLSRQQRKLAKKRHPRTKGDKTPISKNYIKQSRKVGKLYRRIKAQRRDENEKLSSVLVRHFRVICLETLNVKGMMSNHRLAKAVSDNSPYALKKMIKRKSALRERTVVEADQFYASSKTCRRCAR

SEQ ID NO: 17027 - protein, 409 aa, unknown
  TnpB Polypeptide
VILQAYKYRLYPTKKQAIRLQAVLDRTRELYNAALQERKDAYRMAQVSIGYTQQAAQLPEIKEIRPEYADIHSQILQDTLRRVDKAFKAFFRRVKNGEKPGYPRFQAYDRYDSFTFPQSGFSLTQDNRVCLSKIGTLKVKFPQKKKANPPQGTMKTCTIKREGEHWYVVFTCEREQEIVSHPSEEAVGMDLGLLHFGTLSDGSTIENPRHLRVSEQKLKKLQEALSHKKRGSKRRRKAAQVVGKNHRHIRNQRKDFQHKEARKLVNGYQTIVFEKLQPANMSKRPKPKQDEATGAYLPNGASAKAGLNKSILDAGWGQFQQICRNKAEWAGSRVLLVNPKYTSQMCSGCGAIKKKDLSERWHSCSCGCSLDRDHNAALNIKRAGLNLLVNESQARTEPSGDALLRSPRL

SEQ ID NO: 17028 - protein, 378 aa, unknown
  TnpB Polypeptide
MQMTYKFRLYPTEEQEKRLLETLEICRQTYNYFLFKMRRSNKVPSRLELQAELPKLKKEIPELNKVYSKVLQMVIYQLYLNLKALAKLKKNGKKVGKLRYKGKWFKTFIYNQSGFKIIRTGKRLDKLRLSKIGEIPIRIHREIRGKIKQVIIKRYNSGKWFALLCVEKEGEQLPMTNKAIGIDVGIRYFLTDSEGRQVENPRFYEKILERIKIEQRRLSKKKKGSRNYEKQRKKLAKKYEKLVNQRDDFLHKLSRFYVDNYDVICVEDLNIRNMVQNGNLAQKILDASWGKFIRMLSYKAENAGRRVMKVNPRGTSKGLSYRNPLRDYISACRIKMRGWDSPDSLLERRPLLRTISYKEVVSGQVFSMKQETPCLHWG

SEQ ID NO: 17029 - protein, 396 aa, Moorea sp.
MLFKAGKYLNNAELDKIMKTNVHFKALRSACAQQTLHSVVESFKSYKALKKLYTLGQLTDKPRIPKYRKKGGLAVVSYPARWVKLVKGQLKFTLGKQVKAWFGVDNFLLPMPSNIDFKSIKEYRFVPRNGCFYLEFVYERPNPDQVAPSDKVLGIDPGLNNWLTCVSNTRKSFIIDGRKVKSQNQWYNKRVAAIKKGKTQDYWDNQLASLTEKRNRQMRDNVNKAARFVVNWCIKNQISTVVFGWNKRNKDGINIGKKNNQQFVQIPTAKLKNRIEQLCIEYGIKFVETEESYTSKASFLDQDFLPVLGAKPEGWEPSGKRVKRGLYRSGKGELINADANGACNILRKVATQLGISLAEVGRAVLDLPQRYRLDSLSKSYREASWSAVSTRVTTSA

SEQ ID NO: 17030 - protein, 145 aa, unknown
  TnpB Polypeptide
MIKGSNNYKKQRNKVAKLHAHIGQQRKDFLHKESRKIANSWDMVVVEDIDMKTMSQGLQLGKNLMDNGFGTLRNYLKYKLEDVGKRFIKIDKWYASTQICNHCGAKRKIGLNERIYQCPKCGHIEDRDINAAKNIRDEGIRLHRG

SEQ ID NO: 17031 - protein, 517 aa, Streptomyces sp.
VSWVRELVSDAQAGAEEKTSGKRRRPRFEVRDGCVLAAYKFALDPNATQVPLLCSHGGGARAAFNWAVARVKANWEQREAEVSYGLGEEELTPWQGWSLPALRKAFNAAKHDDPRFASWWDQNSKEAYSTGLANATAAFGNWHASRTGARAGAKVGFPRFKKKHRSRLSCRFTTGTIRVEADRRHVTLPRLGTIRTHESTRKLQRRLADGRARILSATVSQESCGRWFVSFQVEVERAPAMPARPDTTVGVDLGIRHLAVLADSAGQVAYVPNPRHLERARAGLRRANRTLARGQGPTVVDPVTGAKSFRTPSENWLEAKAKLGRAHARIRHLREDALHKLTTGIAREYGTVVVEDLNVAGMLRNRKLARHIADAGFGAIRRQLGYKTPWNGGELVVADRWYPSSKTCSHCTTTKAKLSLRERVFNCGACGLVMDRDENAARNLAALVADVVTGTAVGGDPEVQASKARGAGQKTRARRNRQSSRSAGSQRAGGATPREGTETGHRTRSGHVAAQGS

SEQ ID NO: 17032 - protein, 385 aa, Acidimicrobiaceae sp.
VYNLGLEQRNLWCRHRAARITTVSQQKELAEARRETWLGKGSSSVQQAALRDLDRAFQNWWKSPHHFAHPTWRRAGIHEGFYVRDLQVRQINGRWGEVQVPKAGWVRFRISRQWAEITAATSARVTLDRSGRWHVSFTTPSPAFQRKASGAEVGLDMGVAASITTSDGVHLWIPTLLSAGEAQRKYRLQRQLSRQQKGSNRRAYTRRCMARLAAKEADRRRNWIETTTTQLVRDFDLVVIEDLRVKNMVRSANGTVANPGRNVRQKAGLNRSIHAQSWALFRQRLTDKATHATDLVELVAVNPAYTSQRCSVCGYTAKDNRESQAIFRCRACGFTANADVNAAINILAAGQAVTGRGGTSHASPIGVDQAQRPDEASTTRELVLA

SEQ ID NO: 17033 - protein, 396 aa, unknown
  TnpB Polypeptide
LLPSLEQAAVLAEHCRHARFVWNLAVEQHQHWQPGRQAPGYNEQCAQLTAARAEYDWLAAGSQTVQQLGVPPACGGALRDFAQAMRNFFHGTHRRPTRRKAGTHEGFRQVGVKPRHITRLSRRYGQVWIPKLGWVKFRWTRTIADTVKSYRVTLDRSGRWHIAFAAVPDAVSGPGDGRAVGVDRGVAVSVALSSGELLRVAGLRAGETQRLRRLQRRLARARRGSHRRARTTLAIARLRARETDRRRDWVEKTSTDVARRFDTICVEVLKVRAMTRSARGTRECPGTHVAQKRGLNREISRQGWGLLVARLKHKALGRVEFVPAAYTSQRCSRCGHVAPENRKSQAVFRCVACGAGPCNADVNAARNIAAGRAVTARGDLGASRSANREPQLCSPA

SEQ ID NO: 17034 - protein, 457 aa, Thermoprotei sp.
MLASGQLLGDEGREPIPPAIPEAGIREVKYAGRRTNVVRLLPSCSQGRKLRRLASISARLFNEVNYERRQQFFRGEGVDLEGTYRKYYEKYRSVLGVNAQQVLNKNNEAWSSFFSLLKRKREGKLPPYMMRVGPPSYWKDRGSKERKLILVVRQDRYVVDEQNHRLILRDFGLEIDFAGRLRWHGKQGRLEVRYGEARGAWHASIPVEVGVETTRNGNESKHIVRGERKSIRMAGPRGDRAAGVDLGINILASAVTSNGTWLLYRGSRAKEDYFYLTRRIAEVQSKADIARNSGDNGEFLRLNRKKRRLFRKLAGRVAHLYWNLANHLVRNLWELGVSKIYIGYPFNIAQERGNKLTVNLWTYRKLMDAIELKAQEYGIRVYEVVEYSTSNHCAVHGTKVARGPRGVVTCPLGHRLHSDLNGALNILRRGVGSMPAAVGRPLSFLVDHGGVAPVKGA

SEQ ID NO: 17035 - protein, 596 aa, Micromonospora sp.
MFAATFQLRRALQAQARSRVDALWAASRLRERDLAGARARFELTRAALEAAAYRHVEAAGWLRHHVTNAIAMHLADEVWQTCDRHLFPDRSGKRAGRPRTGTWWDHRRIPGRARSHTKPRTWETFRLVGGLDAHASAYPPRQPDSALSQPRVMPTPPRPLKGWWEYDGPLAIVFTGLPAGDLVLPVRLPQGAGQWARLHHFLADPTLWHKIDLVRVEDHRACGGWRYYAHLMILGSGWTSPAVAANRKGAPRDRVAGVDGNVSNLAVVSMPASPSTDGGLASDHVAVTPEQRAAVEKARLAARRRQRALDRSRRSSNQAQYTLSVRQARRARRRREAGLPERAATTPAGTRVSDAAGHPKRAYRRDMLSTTYRRVRAQHAQDSRAMSQAKQHRARDIARTIVTRHGSHLTVEHTDMRVWARRWGRGIAMFSPGQLVAALHGEARAAGGRMLRAGTRQTALSQRCPCGHRQRKPLSQREHNCPHCGLIGDRDLVSAAMAACVRLTDPDDPRTAYLDETSVAALRQRVAGQQEALTRSTAPTPTTAAGTAATPAVASAGQRPPAPGRATPDETRPTTGGTTRHTHPTPRNARPQRVRS

SEQ ID NO: 17036 - protein, 419 aa, Streptomyces sp.
AQHRVYRYRCYPTEEQAAQLSKTFGACRWVYNEGLALRQKAWREYRVSVGFAETCRALTGWRQSVEMSWLRAVSSTVLQQPLRHLQAAFQGFFDGSAKYPKRKKKGRSPDSATYMRTGFSWREDPERPGTRAVKLALQREPLDVRWSRPLPAGDTPLRLTMSRDRAGRFFVSFLVEEVVPALPAVFVAGTREPQAVGLDLGLASLVTLDDGTKVDHPRLLRRYQARLKRLQQELHRKKLRSRNREKVRLKIARLYALISDVRRDMLDQLTTRLVRENQVLVVEDLSVASLMAAGKGKGRRRKARLNEAIRDASWGTLLRMLTYKCEWYGRTLVVVDRFFPSTRRCSGCHAVGPKLDVSVRQWACTECGAQHDRDENAAVNLRDEGMRLYWQVSISLPPGSKAPALIKASELSKEIRLAA

SEQ ID NO: 17037 - protein, 322 aa, unknown
  TnpB Polypeptide
MTALSHKIPLAPTLEQRLFFERAASTARFTYNWALAEWQERYQLGGKPQGHLLKKSFNALRRVQSPWTYDVHRDATAQPFADLQRAFVNFWKGNAEYPQFKKKGKCRDSFYVACDKFHVVGKTVVLPKVGVVRMREELRFDGKILSARVTREADRWSISIQVELPADYQRARTAGGQVGVDLGITHLATLSTGEVVDGPKPLKSVLKHLKRANRVLHRRKKGRANRKKAQRRVARIHARVSHIRNDALHKLTSKLCRKNQAISIEDLHVKGMIKNKHLNQLGQALPEVTPVESRALGLVPIGTKLTSLKQERTRAHLCARER

SEQ ID NO: 17038 - protein, 507 aa, unknown
  TnpB Polypeptide
VPEVPASSSWWPRSGPLRRATGADRRRARLGDRGRRGDARSRAPVRPCWAHRRASGGSTRVQGPHRPRAPARVPVSAAVREGVVVTVVFRRLSRIRLRVDGAPLHRTPVGRGGLMRRAYVFRLRPTARQHVALAACLDAHRELYNAALQERRDAWSHNKTRIYYGDQSAQLSEIRAIRPDQAVWSFSSQQATLRRLTKAFDGFFRRVKRGETPGYPRFKGKARFDSVEWPKDGDGARWLPETSRVYLQGVGQVKVHLHRQVRGRVKTIQIKRAGRRWVLVLSCDEVPTKPLPTTGGQAGIDVGVVTYATLSDGTEVANPRWARQEAARLEVAQQRLQRTKRGSNNRVARRETVAARHRKIANRRKDFHHKQARELVARYDLLVVEDLKISNMLCRAKPKPDPDKPGQFLPNGTRAKSGLSRSISDAGWGQFVSILRVKAEDAGRTWIEVNPRHTSDGCECCGYAAPENRVSQAAFVCQRCGHTAPADEHAARNILRAGLALHAATTA

SEQ ID NO: 17039 - protein, 319 aa, unknown
  TnpB Polypeptide
VPLARGDGAVNEVSNNITKQSVKDACKAYKRFFKSLANKPKFKSKKKSKPSFYNDPIKLKVKKKKVLIEKVGWIKINEQIPINVKYNNPRITYDNKYWYLSVGIEVNEKKEELTNISLGIDLGLKELAICSDGKIFKNINKTKKVKKLEKRLKQKQRQISRKYEINKIKKEGGERCQFIKTKNIKKLENTTKLIYRKLANIRNNYIHQVTTSIVKTKPYRIVIEDLNVSGMMKNKHLSDSVKKQCFHKFRQYITYKSELNGIELVVADRFYPSSKTCSKCGFIKKDLKLKDRVYRCPHCGAVIDRDLNASLNLSMYKLA

SEQ ID NO: 17040 - protein, 338 aa, Aphanizomenon sp.
MAKICFFKSGINRCIRNNDNCKKNIPGLKGYPQFQKDCRSVEYKTSGWKLASDRKSITFTDKKGIGKLKIKGTRDLHFYQINQIKRVRLVKRADGYYCQFCIDVNRQENIEPSGNTIGLDVGLKEYYTDSNGVMIENPKFLREAEKVLKRSQRRVSRKVKGSKNRGKARRILGKHHLKISRKRKDHAVKLARCVVQSNDLISYEDLRIKNLVKNHCLAKSINDASWYQFRVWLEYFGKVFKRVTVAVNPQYTSQECSSCGEIVKKSLSTRTHICKCGCVMDRDENAARNILSRGLSTVGHTGTFALDASNALGDKTSTQVGEILSEQVISLIKESQRL

SEQ ID NO: 17041 - protein, 363 aa, Nissabacter sp.
MSIQTKTLSVRVKDKHAAVLRQMAFEVNQVFNLANEITSAAYSNAGAFGAQVPKWLTAYDVQKQTAGLRKEKGYLIDSASIQEVIAVHGKARKQFKRSKLRWRISGGARRSLGWIPFKVGFAKWQNGQVKFAGKLFKVWDSYGLSAYKFRAGSFSEDSRGRWYFNVAVDYEEQPTEGVSAVGIDLGLKDIATTSDGEKLAAGRFYRDLEPALGKAQRANKKRRVKAIYAKIKNRRKDALHKFSTAIVKANAAIFVGDVSASKLIKTKMAKSVLDAGWSMLKTQLEYKAIARSAVFQVVNESYSTQACSCCGALPLNSPKGRAGLRIRVWTCSECGTLHDRDVNASKNILAAGHCRLAVGIPVL

SEQ ID NO: 17042 - protein, 664 aa, unknown
  TnpB Polypeptide
MKKSKPKVKEKKKEEDNVDYMKTNKDNIMNIIKDEKILPIINDLVNRTNKIVIHSYQFLKLYFIYLYENNQPFPILDKEYICDIFKVITKRKCGSGGYKDDKMPDQLKTLDTFYKEHYSKTITDNEILYYDKLSYILAYEAIDMITNINNNIQEHFIDHLNKYVNIVFDVKAKRDEITKNNKDKIIRKELHKQNYEEYNKVKKDLITFGELTSDIKYHDWIKDQKLKLFPNKTKFDNNNIYYHLKSNSQDFLVSMFHICIELEKLNEIKIQKEEKQIRLFNVLPLRTNIISKNICIDTPALISNFLGDESTSEYLKTYKKKNKYNELWARFFNLDNKIFKKNKYAFNNMIRTDMISCCILFIRLDANEKPLKKTIVNKKLTEEVNTDYIEKVELTDEIRSKKVVCIDPGKSDLIYCGSKNKDGKLETFRYTQNQRRLETRLKKYNKIIHNVNKETKINEKTIKEHETILSKLNSKTINYDKFKLYCIEKNKLNYQLYPHYEQKFFRKFKLNRFINTQKSESKMIKNFANKLGKPEDTLFIMGDWDKGNYNMKGKEPTICKKFRRIFKNAGYKTFLVNEFRTSKLCNCCHNELEMFLERESHKPKLIKENKKETVSGLLRCSSVKPKCEIIHNRDKNAVQNMLSIVENIFSTGKRPEIFCRAVAS

SEQ ID NO: 17043 - protein, 215 aa, Bacillus sp.
MLLLYLFQPLKTLHSSIPTTKKTGTKIMGVDLGLKVPAVAVTDGDRVRFFGNGRRNKYMKHKFRSVRKQLGECKQLNAIRKYHDKEQRWMKNEDHQVSRKIIDFAIYNNISVIRLELLTNIRQTARTSRKNEKNLHAWSFYHLAQFIEYKATLVGIKVEYVNPAYTSQTCPKCSERNKTQDRKYNCTCGFKKHRDIVGAMNIRYATVIDGNSQSV

SEQ ID NO: 17044 - protein, 368 aa, Thermincola sp.
MRNYRFRIYPSREQEQKLLDWIETCRKIFNTAIAQRKESWEKEKRSLSRREQQVWLKEAKKENEYFRQVHSQVAQEVLFRVERAFAAFFRRVKNGETPGYPRFKGRGRYKSLTFTQFGEGKGASFQDGKLKLSKIGLVKIKLHRQIPSTVKTVIIKRDAVGRWWAVFAVEIELSQQQTHAGPAIGLDAGLEKFAALSDDSVIENPRHLRKTEERLKRAQRELSRKEKGSRNRERARRKLAKLHAKVRSQRMDFLHKQSRKLVNTYSLIAVEELNIKGMVKNHHLAKSISDAGWGEFISMLEYKAGEAGTKLVKVNPSGTSQECSRCGMTVPKELSERVHCCPYCGLTLDRDVNAARNILKRALALEAA

SEQ ID NO: 17045 - protein, 376 aa, unknown
  TnpB Polypeptide
MYSVRKLKIKRTDQIDALALASGELYSRTLVSFWRTVRKQGIWLKPSSMMRWQNSGQLHAHSADAVVQSFYSSLKSWRTRRKIDPDAKPPKRRRRFYRVQWKNSAIHLKDGNLTLSNGKGNLPLIVPWQWDEPTLVELGWNGVGYEIRAIYSIEPTAVALGDRVAGVDLGEIHLAATHDGEECNIYNGRHLRSVRRYQSKRKAEISSILDHKKKGSIRSKRLKYSKRRTLTKLDHQINDIMHKQTTKLVSTLHERGVKTVVIGDVRDIRKGLDYGKKANQKMHQWLYGDTRWMISYKAERLGMEVVLQEEAYTSQTCPVCGALHKPNGREYRCPNCGFRYHRDGVGAFNIRAKYLGSLGSPVVGAMASPTGVRYVL

SEQ ID NO: 17046 - protein, 408 aa, unknown
  TnpB Polypeptide
MQKVIKLQSVGLTNKKQKELSDARIEAKRIIEKFILPNIDSCEDNGQLQQLIYHDIRKESYLPSQVLLNLIRNSFHLKQKPKETRNIEQITLDYNIPRACKMFMLNDKKLCFAITLKPRHRIVIPIEDNGSIQRFQKQIENGWKIKQVGLTNKNDIIATIEKRKARKDYKNILGIDTNSNNVSVTALTPQGKVLKQLYLGKNLYNKKAKILKRRAILRSHADKGSPKAKEKLRRLSRKVRNINKNAVGEIAKQIHYIAEKYQARIVFERLSKFEANKGKDANRKITLIPFRMLTMNTAIRSVDTGIPMGYTNSYHTSKWCSGCGSVNPPHDSKNYAIYRCGNCGLIVNSDRKASLAVAVKKFAERKEYFQFSAKRVPVNALFRGDERIATQATENAVALHDPKEAICL

SEQ ID NO: 17047 - protein, 504 aa, Dictyobacter sp.
MAKATKTITQAMQYPSRYAAWFTTTQALFNTVASFYFEVITAHEQVLLLSSHKALHALETLTHATEENPDPVMPLDAIAPQVPALFRRAAIHAALGSAHAFETSLQKWRARKEKAALKKKRFTEHPPVPPRTWNRSPTFYKGQWKGRTASSILLKLWTGASWIWVNVRLLSRDLPDGYEPGSPSLVRHGSHWRLHTPVEKTFTSPGKVAVQLAHAQTRICAIDLNLDHHLAVCTIQTADGSTVATTFLSGGKRVNGRRKWLLGRIARNRRKTGILAENEPDNLALWEKIRHVDEQVAHLISARIVHFARQHQASVLVFEHLGKLKPQKGRYSRRGNSKRAFWMKGRIFTNAKYKAWNEGMITSRVNPRNTSRECARCHGLIVRYHAKQGPEPEGYTPGAPLAWCPACGMKGHADRNASLVIGQRLRTRVHHQEKPRAPLLGPGERDEKSSGVVRSQDANSKGGPSRRRARRHGTGKGHGTAHEDHARMVAPSAIPRPLPLFSEL

SEQ ID NO: 17048 - protein, 388 aa, Streptomyces sp.
MPGMKIVTQVKLMPEADQAAALGATLRTVNDLACWVSEVAFAHGVPREYELRKHTYAHLKEQGLGAQAAQHVIKKVRDAYTTLHANIRAGNYGKPGSKRRRKVESKPVAFRPEAAQPYDDRCLSWQYDQQTVSIWTTAGRLKGVRFTCSADAFKVLQPYRKGESDLIERDGVFYLIATCEVPEAETYEPDGFIGVDLGIANIATTSTGYQAAGRQLNRYRERQLALRAKLQKKRTKSAKRRLKERSRREARHVKNTNHIISKTIVTEAERTSAGISLEELKGIRQRVRLRKPQRVALHSWAFAQLGDFIVYKAKRAGVPLVFVDPAYTSQTCAECGHVDKRNRVDQGVRASTVRSRCSYDRGGRAGGRACTRRHGRSRRPPVVAPSSR

SEQ ID NO: 17049 - protein, 541 aa, Saccharopolyspora sp.
VAVGGPAAESGGLDHHHARNRAVDRLRREASREDRHAQAALLHARDEPEQEGPVHDDRLRLIFTCCHPALSTGAQVALTLRLLGGRLVRAKGKIRAAGVPYRAPDRLRVAVSVQCVIMARFRMYPSARQEQVMLAHCAHARYVWNLAVEQHSHWNPGRQPGPGFAEQCRQLTEARVDNEWLRQGNVDVQQQALKDFAQARARMFGSGFGAPTWRKKYRHEGFRAIGTDRVPALNLDGTPVLNRKGKQVMSRSVVVHKLNKNWAQVKVPGCGWVRFRLTRSRLPDAKTFRVTYRNGQWHVAFAVIPDPINAPGNGRMVGIDRGVTITAQLSDGRSLNCPQLSSKERAKLRKYEHRAARAPKGSDTKRAEYAKVAAIKAREANRRKDWCEKTSTMLAKSFDTIRFEKLNIRNMTRSARGTVEQPGRNVRQKAGLNRSILAQGWGLLRQRTEHKAPGRVHEVPAPYTSLRCSDCGWIDKNSRKSQAEFVCDACGFTCNADLNASYNVAAGQDNTRCPLLVRVGAGGTTPRVGSKSVREPQLSLW

SEQ ID NO: 17050 - protein, 378 aa, unknown
  TnpB Polypeptide
MLVKTVKQSYRPSSELMGFMETFRGIVNQCITIGLKENRRSMKSLSKASYSKLRQYQITTAYKLCAISRAAGILTNYRKLLRDHHVEISYCRRASLVTAACYGLRVKKSILNLPSKIKIEVNPHTVSVLDRTNIRSVTLTPDSLNIAYSKEIAPVKTTGLLAIDRNLDNVTMADTAGKTSRHSLDKATLSKALCRMTKSRFHRNDARIRRYIYGKYGRIERNRVNPVLHNASASIVRQAKQNSLGIVLENIKGIRKLYRRGNSQNKHYRFRMNACSFYEFQRQLSYKARWEGLPVHYVSPRGTSSKCSKCGDQVFAKESRIVECPRCGCIDRDVNAARNVLSAALRFRVKGPPSEAMVEEREPNGVTLILKVDGGQSS

SEQ ID NO: 17051 - protein, 400 aa, unknown
  TnpB Polypeptide
VLAVKSVWQYYAPVGDVLLLLDLFRRMVNDSIRIGLLNDASSLRKLSLLSYNQLSCYDSPGCYKLCAISRAAGILASRKKSLKRGFPTRTPYAVRPLLVSCYNFRVKNGGLEVPIARGKRLSISLTKHTLDVISQPGVKVRSFTLTQNKLCLCIALDVPMIECISTVGVDRNLRNLTVGNDQETRHYDLSETVRIASTTVHIARSFKRDDARTKAGIASKYGRRRTARTRHLLHNATKTIVALAVQRRTAIVLENIQGIRALYRKGNGQGRKYRGRMNGWSFGEAQRQIEYKARWVGLPVIRLSRRETRGSSVTCPRCGERLQSDKKLKRKLWCSKCRIMMDRDTVAAVNLSRRGRVRFARSRPPIIEAQGGAVEAMKGNPTPTVIHGVDAPKLTQPNKS

SEQ ID NO: 17052 - protein, 395 aa, Streptomyces sp.
VQKGTVRRVKIVVQMKLLPTAEQAAALQSTLLECNEAANWVSQVAFDRGVPREYELRKHTYAELKARGLGAQAAQHVIKKVRDAYTTLHANIKAGNLGKPRSKRRMQAESKPITFRASAAQPYDDRCVSWQHDAGTVSIWTTAGRLKGVRFTGSADQLKTLREYRKGESDLSERDGEFYLLATCEVPEAELTEEPAGFIGVDLGIVNIATTSDGDVLAGRGLSRYRARQVRLRAKLQKKGTKSAKRRLKKRAQRERRFAADTNHVISKRIVAEAERTSRGIALEDLGGIRARVRLRKPQRAAVHSWAFAQLGQFLEYKARRAGVPLIFVDPAYTSQTCSECGHGDKRNRASQARFQCRSCGVVAHADLNASRNIARKGEVVWNAGRESCVPAASP

SEQ ID NO: 17053 - protein, 266 aa, Streptomyces sp.
LSWQYDAQTVSIWTTAGRLKNVRFACSPNALKTLREYRKGESDLIERDGVFYLIAVCEVPEAEQYEPGQFIGVDLGIANIATTSTGYQAAGRGLNRYRKRQLALRKKLQAKGTKSAKRRLKERSRREQRHVKNTNHIIAKTIVTEAERTSSGISLEELKGIRQRVRLRKPQRVTLHSWAFAQLGDFIVYKAKRAGVPLVFVDPAYTSQTCAECGHVDKRNRVDQGLFICRGCGVVAHADRNASHNIAARGEAVWIAGRESRVPTPI

SEQ ID NO: 17054 - protein, 546 aa, Streptomyces sp.
MSKKQLRPIDAPFVALGPSGVAIRDRLKHLTTEDDKVLRLVGEHLGNLALLDLKARCADGNEHSTDTWAARKQGLTAASSSRWAGSITKATHDQWALSRRCQLAHIQSLEAGVRTLMHRLSQPVGEKGTKRAPGGYRSKGEWFQKTRRLHTLEHRLDRARADRDNGVVHVVRGGRRLLNTRHNLGKAQLTEAEWRRRWETERWFLAADGESGKRYGNETIRVTPEGEVSIKLPAPLAHHANTRHGRYVLASKIAFAHRGAEWADRITANRAVAYRIHLDVQRGRWYLTASWQRPAVKTIPLETARAKGMIGVDTNADHFAAYQLDRHGNPVGDPHRFFYDLSGTAQYRDAQIRHAITQVLHWAKRCGVAAIAIEDLDFTAEKTCEKHGRKKRFRQLISKIPTGKLKGRLVSMAAEQGLSIVAVDPAYTSQWGAQHWQKPLAAPRRKMSRHDAAGIAIGRRALGHPIRRRTAPPQHHQSDGAGHRTVQADRDVRGREGTRPPVTERAHDSRARTETTRGTRATSASKTVRDARSAWTWVQDPLLITG

SEQ ID NO: 17055 - protein, 348 aa, Streptomyces sp.
VIRAYKFLMRPTVRQGQALSEMLRDHCSLYNGALQERRDAYRHVSKTSVRYGMQSAQLKGIRAFDPERQGRWSFSSQQATLRRLDKAFAAFFRRVKSGDSPGYPRFRGVTWFDTVEFPKDGDGCRWDSTPHDPVTRVRFQGVGHVRVHQHRAVAGRVKTVSVKREGRKWFVVLSAEQDQPEPLPATGSVVGIDLGIANFLADSNGGFVPNPRHGRQAAQKLAAAQQALSRFPRRKAKDRTANHQRWSPGSVQEATRVGLRERVRTRRSVTSSRGAWSGRACIAVSQRSSRDWPGCARTVPSRRIPFSMCRRRPGLRNLFLKVGPGQWRHAVAGRRSPRANPMAPAAFR

SEQ ID NO: 17056 - protein, 548 aa, Streptomyces sp.
VKRIDELGDGDLGREVHQEVDVVVLAVELHQLTFEVHAHRPHDLLHTRQMNIGKHPVPEQCRPVLISLISPATQVCIVAVMQLRYSFRLYPNTPQRASLARTFGCARVVFNDALRAREEARKAGEAFPAAGELSRKLITEAKRTAERSWLREVSAVVLQQSLRDAELAYRNFFASLKGGRKGPKVGSPRFKSRKNSRQSIRFTANARWSITDGGRLNLPKIGAVKVKWSRTLPARPSSVTVVKDSAGRYFASFVVDTDPAADAARMPDTDHAIGIDLGLTHFAVLSDGTKIGSPRFLRRAEKKLKKAHRELSHKQKGSKNREKARLKVARAHAKVTNARHEFHHQLSTQLIRDNQAIGMEDLAVSALARTPLAKSVHDAGWSTFVTMLEYKAARYGRTLVKIGRFEPTSQTCSACGIKDGPKPLNVREWTCTACGTVHDRDHNAAINVKTAAGLAASACGAPVRPGLVPAQREETGSHGFPPGSCAATRHRIRAGRPESSGSARGASQQWDDSDTNHRGTARAHSSPVMDCGLAPDPGRGDILRLTWG

SEQ ID NO: 17057 - protein, 391 aa, Streptomyces sp.
VIVTHAYRFALDPTPGQVGALLRHAGAARVAFNWGIAQVKANLGQREAERSYGMAEAGLTPSFGWSMYSLRKAWNAAKREVAPWWAECSKEAYATGLDQLARALENWSGSKRGKRKGPRMGFPRYKSKRKTTPSVRFTTGTIRLEDDRRHVTLPVLGTIRTHESTRKLHRRIAAGTAVVKSATVRREAGRWFVSFTCEVERTDRTPSRADTVIGVDLGIKHLAVFSDGRPTAENPRHYDTARRKLGRLSRTVARRLGPDRRTGQQPSKRLAARGCGPQPGALPHREPAAGRAPQAHHQPGPRVRHDRGGRPQRLGDAQEPQTRPRRGRRQVRRDPASARLQNPVERRNARSGGPLVPQQQDVFQMPGSDTQTASPDTDVRVRTLRTRPRPG

SEQ ID NO: 17058 - protein, 355 aa, unknown
  TnpB Polypeptide
MLNQIIFIVSVNNMIRSYRYRLKDSSSALQLNRLARACNVVWNFCNESQEHALRWHQRWPTYQDLCKLTTGSSKELGLHSQTVQAVCDQYATRRQQFKKRKLRWRGKRSPGWVPFKASGVKVVEDTVRYAGHTFRFWNSRELSRPIKCGSFSQDSRQRWYVNFVVEVPEAEATTGTRHIGIDLGLKTLATCSDGRKIEAPRWYRHQQRRIAEHQRKKRSRQARNLQAKIANRRLDFLHKASDRLTKECELIVVGDVGSARLAKTNMAKSVNDAGWATFKNLLSYKAIARKVVYREVSERLSTQTCSGCGAIGGPKGREGLGVREWACGECGVVHDRDVNAALNILRMGHHTLALK

SEQ ID NO: 17059 - protein, 371 aa, unknown
  TnpB Polypeptide
MWRAKMLEKTYKFRLYPTKKQWEKLDWTVEVCRHLYNSCLIDRKNFYQRNGIGLSRVSQQEILRRDKDRVEFLHDVYSQVLQEVLFRLDKAYQNFFRRIKLKKEGRWGRKVGYPRLKGQNRYDSITYPQYGGFQILNGGKKLKLSKIGAIRMRMHRQIEGQIKQCTIRKDVDRWYACFSVQYNPLPQEIPDTETGMDVGLTVLGTLSNGEKIENPKYLKQAENKLKKLQRSVSKKKKGSKNRNKARIKIARQHRKVRNQRSDGHHKKSRKLVDAFGLIKVENLHILNMVKNHYLAKAILDAAWGMLFLYIAYKAAEAGSRFEKVDPKGTTIDCSRCHKPVPKTLAIRVHRCPFCGMNMDRDQNAAINILQR

SEQ ID NO: 17060 - protein, 368 aa, Clostridiales sp.
  misc_feature (153)..(158): Xaa can be any naturally occurring amino acid
MKRIRGYKYRAYPDSKQQEFFLKTFGSCRFVFNHYLELKQTQWKECHKSLNYAETSKDLSRHLKVENPWLRESDSIALQQTLRHLDKAYENFFKKRGGYPKFKSKRYSQSYRTMNVNDSIRISGDRIRIPKAGEIKIRNTREFDGRILSATVXXXXXXGRYYITLQVEEDRELLPNNGGETGLDAGLSVLYTDSDGNIVPNPKTLRKHEKKIARLQRRLSKKKKGSNNREKARKRLARELEKVSDIRKDYLHKVSYRLANENQVVCVEDLNVKGMMKNKRLAKSIGDVSWGEFYRMLEYKMADHGGKLVKVPRAFPSSQQCSCCGKKEPKVKDLFVRRWKCAACGAIHDRDVNAAVNILNKGKEILAA

SEQ ID NO: 17061 - protein, 529 aa, unknown
  TnpB Polypeptide
VYSFWEGELAKNQTYRAFVARPSHVLDLNGELLYDTSVLLSLASEIRDISAYAAYVVRNDVELGDELARVTATAPAEAGRQAGVIMPDFLATGKSGRSRKEKLFQYSVVTAYRSYRERVKAANGETPKYMSQGWKRTVDVSAPSYGEDYVNLGAVDKWYAVIENDPFANGEIVLRMVIQGAWHRLIFDFDNKRFTEGRVTLPVIKVEDGQPVFIFTVVTDNPVVQFSGDYTIGVDVGVTDYATVVVRDTKTGRIVHQTTLSQRVHSLWNSVRASEQQVRDLKKKADGLLSQRQKRMSALDEAQLHREAASRKKRELAILAAQEIAYLSHVWGNAVVAVEDLGWIRNTMRNGRWNRGELVRWLTHYVTQNGGWVVAVSPFNTSQQCHKCGAKVTHPTHKLSVCAEHGVMDRDVNAAVNIAARAAPRVVKARVTRAKNRKLQPQAPLRTPVARNSLKYPGRDRTKNAPTPKRKNLRITKGVILPVRPARAQAYSLDARVLADQGTCSALGTSKAALKQGNAAYECRLCSLI

SEQ ID NO: 17062 - protein, 395 aa, unknown
  TnpB Polypeptide
VQVRYRYRIYPAPGQRQSLARVFGCARVVYNDCLRLRDQCHAAGEKISDTEVQRRVVTVAKLTPERAWLGEVASVALVQACQDARRAYKNWFDSLSGQRKGRRVGHPALRRKHHRQSIRLTRNGFALHGGRLYLAKVGDVKVEWSRDLPSVPSTVTVIREPDGRYYASFVVRRAATPLPACGRELGIDLGLASLVVTSGGEAIANPRFLRAKQRRLARAQRALSRKQKGSANRAKARHRVAVVHRKVRQTRLDHAHKIALRLVRDNQAVYAEDLCVSGLARTRLAKSVADAGWSQLLRCIEEKAAQYGREFARIGRFEPTSQVCSACGLKDGPKPLSVRAWQCAGCGVVHDRDVNAARNILAAGRADRLNACGTGVRPPSPAAAGIETGTHRSAA

SEQ ID NO: 17063 - protein, 432 aa, Halorubrum sp.
MEDVVRTVKVKLDVPDERCDNLHQTKKQFLHCANTTAAWAWRYPDEHCITSKQQAENALYERLRNETDLTANLVQKGIRRAIEATKSGIARLKKGETTSQPHFDAWSVVYDKRSATFHRDHVSLSTVNGRVECEYVLPDDPTGTPIGEYLLNEEYEFRMSTLQYDRSSESFYLHARMRRTTDEHEQSTAVSNAEHRTVLGVDLNVGGSLAVTSTGAFIGNADEMNHRRREFKKTRGSMRQTGTRSAHLSIQSMDDREHRWMKDELHRASNQILDEAHDHECTHIAFENLTDIRDRMARAKRFHAWAFRRLYEYVEYKTETLDIKVEKMSPAYTSQRCSKCGFTHERNRRSKHQFACQKCDYQLNADYNASKNIARKLLKRLRSGQKSSSGGAPCQCALTSGTLNLNGEFIASVDSTAEGESTDKPTTSVVGH

SEQ ID NO: 17064 - protein, 381 aa, unknown
  TnpB Polypeptide
MATINCAAKCRAYPNRMQASAMKHTFSCCRYIYNHMLERNNKIYERRKEHMSYVFMQNLLPKMKKYLTWLKGADSQALKYACRQVDTAFQKFFKHETGYPKFHSKKGRQAYTTTHNANIHIGEDLKKIKLPIIGWIKVRGLHLPDNAKVNFATVSLEPDGSFYISINYKYEADITVKAVKKPMFLGLDYKSDGLYVDSEGSCADMPHWFRESQAKLARQQRRLSRKTGSRKGERKSEGWWKQHRKVARLQAKVKHQRLDHLHKLSRSLADNYDVVGIEDIDMKSISNKGYGLGKATMDNGYGMFTTMLEYKLSWNGGQLVRIDRWYPSSQICSCCGYRNTDTKDLKVRRWVCPECGVIHDRDVNAAANIRNEAIRLLKTVA

SEQ ID NO: 17065 - protein, 409 aa, unknown
  TnpB Polypeptide
MSLITRSYRLRAYPNGAQRRLLGRWFGATRWLWNTALGIRSEAYRTCRLSLTGNDLSRWLTQWKRTAGHQWLAEVPATALTQCLRDQDRAFSGFFAHRTRYPRFKAKRGRQSLRFQDIGAGWRSGVLRLPKLGVLKLAEELPEVERPDMVSLSRDAAGAYFVSFCAEVPRTSRPGTGELVGVDLGLTHLATLSTGEKIPNPRHYQRRLRYLRQQHRCLARRQKGSHRREKQRVRVARAHARVREARQYALHALTTRLVREFSVIAIEDLNVRALGRGRGARAIQDAAFGELRRQLRYKSEWYGPLLLEVDRWYASSKHCSMCRFRLDELRLDQRQWRCPKCGTCHDRDINAARNLLTQGVRQLAGRDDRDLRVDAGDACPEEQLLVQVLAEEARSGHRNRAGLESARLG

SEQ ID NO: 17066 - protein, 402 aa, unknown
  TnpB Polypeptide
VKRLQAFKFQLRPGGQQEREMRRFAGACRFVFNRALARQNENHEAGNKYIPYGKMASWLVEWKNATETQWLKDSPSQPLQQSLKDLERAYKNFFRKRAAFPRFKKRGQNDAFRYPQGVKLDQENSRIFLPKLGWMRYRNSRQVTGVVKNVTVSQSCGKWYISIQTESEVSTPVHPSASMVGLDAGVAKLATLSDGTVFEPVNSFQKNQKTLARLQRQLSRKVKFSNNWQKQKRKIQRLHSCIANIRRDYLHKVTTTVSKNHAMIVIEDLKVSNMSKSAAGTVSQPGRNVRAKSGLNRSILDQGWYEMRRQLEYKQLWRGGQVLAVPPAYTSQRCACCGHTAKENRLSQSKFRCQVCGYTANADVNGARNILAAGHAVLACGEMVQSGRSLKQEPTEMIQATA

SEQ ID NO: 17067 - protein, 159 aa, Clostridioides sp.
  misc_feature (141)..(159): Xaa can be any naturally occurring amino acid
MYPNKKQQELINKTFGCCRFVYNKYLAKRIEVYKNDKETFTYKQCSSDLTNLKKDLNWLKEPDKFSLQNALKDLDNAYEKFFKKKAGFPKFKSKKINRFSYKTNFTNGNIMYCGQHIKLPKLGMVKIRDKQVPQGRILNAXXXXXXXXXXXXXXXXXXX

SEQ ID NO: 17068 - protein, 217 aa, Paraburkholderia sp.
MATFHHTFPRRTVKKTPRPATVQVEKSVGIDLGLKDFAATSDGYLFTLDRHYRKLEQELAKAQRANGKARARAIHAKIKNSRKDQLHKLSTALVEEYGAIFIGNVNASPLARTRMAKSVLDAGWSSFRTMLQYKSDDAGVWFDEVDEAYSTQACSCCKRRTGPKSLEGLRIREWPCPECGAYHHRDINSAENILTVGRRRLAEGIPVLPAPSAAAAG

SEQ ID NO: 17069 - protein, 506 aa, unknown
  TnpB Polypeptide
MITTVKFRLHPTPSQERKLHEIFTIYNRVRRVGFKLYFTLKDMDLTKTEQRKLVQPCLMELCQNNPYVNSILIDCETKLAQQQTWYAKHKKYLKLQITTIIKRIEQIKQKDKRDKRLRGLYSRLSSVQNKLRALRLKPVVFGTKRLFRERILGNISRDEFKIRRDSSFCCVGKRRGINLNLKILPNTTLRVRTFSKEKGKKWLIIPFTVNYKQEKWFNEILGLELYQVEVVRRLIKGSVRYFAHISYEIPEVEMRYGFEHGAVGLDMNYNFISLCNMDEKGNFKSYHEIKFRNLHSYRKNKSADYISYKMDKVVNYCINKKKGLVIEDLSFEQEFSYGKKRNRKLSNFKTSVLALLKRKCFKRGVAVRKVHPAYTSLIGKYKYSISRNLSTHVLASYVIARKGLGFKEELPTIYKWLLAQVGDAIKPRLKPSSPYYNWAKLHDFFKHCGITSFKTSEVMKKALQMKYVLNSVTSAQPDNLRAGLSSNGKVDNWHKFWNFVEITNIL

SEQ ID NO: 17070 - protein, 542 aa, Streptomyces sp.
VADLRSIDPPFVAPGPSGVAVRTRLKAITTEDEKVLRLVGDHLGTLAGRDLKARCAAGPEHDTGQWAERKRTLTLETSSRWAGSITRATHDQWALSRRAQLAHIQNLEAGVRTIAHRLSLQIGEKGTKQAPGGYRTKQEWFAKSRRLHVLEDRLTAERADREAGRVRVVRGGARLLGTRHNLTTANLTETQWRERWQAERRFLQADGESGKRFGNETIRVTPDGEVSIKLPGPLAHLANAPCGRYLLTGTVVFHHRGDEWADRAVGNRAVAYRIHEDVQRGRWYLTASWTIPPVKTVPLTQARAKGLIGVDTNADHLAAWRLDRHGNPCGEPRRFFFDLSGTADHRDAQARHALIRLLHWAARHTLAIGIENLDFSAEKTREKLGRRKRFRKLISGMPVSKLRARLVSMATELGLTIIAVDPAYTSMWGAQHWQKPLTSNTRKTTRHDAAAVAIGRRALGHPVRRRTAPPPHDQSDRAGHRTVQARPGVPGREETHPSVPGQRARPAAPDVRAKVGDQCAQHRSGHAAEHGSRQQDSLPLSL

SEQ ID NO: 17071 - protein, 409 aa, Acidobacteriaceae sp.
MMFGMKRLQAFKYELMPCEAQGRDMSRFAGCKRVAFNEALLLQQDRYSKGEKKLSYAGLCKELTAWRHGALLPSGRIASWLADAPVHPLQQTLKDLDRAYTNFFASRSAFPRFKKKGRGDSFRYPDPKQINLDQANCRIFLPKLGWVRYRNSRLVLGVVKNVTVSNRNGKWFVSIQTERDVEPPVAHGDAVGIDMGVARFATLSDGTVYLSLNIFKRYAADLRKAQQAMSRKKKFSNNWKKAKARVQRIHVRIANARRDYLHKTSTTISNNHAMVVVEDLEVGNMSRSAAGSVEQPGRNVRAKSGLNRSILDQGWSEFRRQLEYKMLWAGGLFLAVPAQNTSRTCPRCGHVSKDNRMSQAVFACVECGFNENADLVGAINILRAGHAPLACEVNGDVGRQQQEPTKRAA

SEQ ID NO: 17072 - protein, 527 aa, Acidimicrobiaceae sp.
LSPQASRPSWCCRTQTTTCSAARMCEWLVTPSHPVTTLVSMSGTSDGHVTRAVVFTLDVSPAQERMLQSYCGAARFAYNWAIDQVTGNLAARAAEREAGLAGKALTSSVSWSAYSLRKQFNSVKAEAAPWAGEVAKHCFDTGIFQAADALKNWSASKVGARAGTRVGFPRFKSRKTAKLAVSFVELNHQLSWFHPSRHAVRLMLPQMLVQSNNRHVRAKMQQLVWLHTTESTRRLYRLVEDGRATIQKVAISYMGGRWQASFQVRYQVAARPTKRGHARIGGAVGVDLGISHLATLSRPVGGVTDPDGHVPNPRPLAKQLDRLKDLDRRLARCQDGSKNRRKLTRRRARLHGRIAATRKAAHHQLANELAARFDLVGIEDLNIKGMTHNRPLARALADAGLGQLTQIITTECTDRGTPVVAVGRLYPSSKTCSSCGTVTAKLSLSQRTFDCTHCGAHIDRDVNAAVNIEREAVRLHAQQPADPVAGVAGLRPETRNAVRRTRKTSPTSVGEAVSVDARTRQPHTRVA

SEQ ID NO: 17073 - protein, 305 aa, Escherichia sp.
VKRLQAFKFQLRPGGQQECEMRRFAGACRFVFNRALARQNENHEAGNKYIPYGKMASWLVEWKNATETQWLKDSPSQPLQQSLKDLERAYKNFFRKRAAFPRFKKRGQNDAFRYPQGVKLDQENSRIFLPKLGWMRYRNSRQVTGVVKNVTVSQSCGKWYISIQTESEVSTPVHPSASMIGLDAGVAKLATLSDGTVFGPVNSFQKNQKTLARLQRQLSRKVKFSNNWQKQKRKIQRLHSRIANIRRRLSQSQFRCQVCGYTANADVNGARNILAAGHAVLACGEMVQSGRSLKQEPTEMIQATA

SEQ ID NO: 17074 - protein, 411 aa, Mollicutes sp.
MYKRFKVKIKPTQEQVDLIEKTFGCTRFIWNQMLNERQTVYESLGNNRESLYAHKYLTEKDYKQQYLFLSEISSYALQSTRKDLQEAYKKAFDRLKKGKKTGFPKFKSKKGKQAFRMPNVHNEIRFLDNTTLKLPKLKGVRLTYLPKNFKGEIQSVTVKKEHGKYYVSILCKIDDAEVKKERSGDGITGVDFGLKNFITTSTGDVIYGLKNVLYDVDKRIVKMNRALSRKKKGSKRREKCRRKLSSLYEYKTNRLSHFQWHLANHLCNENQVVVIEDLNVRGMQKLRSLSRFVSTQVWSTFVNKLENKSVEYDTDVYKIDRFYPSSKMCSKCGAIKEDLSLSDRQYECECGASLDRDINAAINIRNYYLVNDKKSEDHIDYRRGEEVRPRELSFDNFQGIFCEALNPALAG

SEQ ID NO: 17075 - protein, 426 aa, Lachnospiraceae sp.
MRSCSDMQFHTAAKLRIYPSSEQKKIISVNDGASRFVYNRLTANDRDLHAMKKVVGSCPAYLERIAYLEQVRTSKRELVNTIPFLNCEDVDSLSVDNAIRNHNRAWKQFREDPGTGIPGFHKKGYAQTYQTNAHYKADALTWEDGNVRFIWRSSNEKIPHYIQLPKIGAIRFRCSPEVRNLLLTHRNDTRIGTITISRDNCGDYYAVLQMSSDSPFFEPLPRTGKRVGIDMNLTSLYMDSDGNSAENIRVGRNAKKKLAKAQRKLSRMAVGAKKEGRSLYESSNYQKQRLRTAKIQRQVSSAREDYLQVQTKRLVESQDLIVSEDLKVKNLMKNHCLAFSISDVSWSRFFTLLGQKAVSYGKTYIKVPAKNTTQTCSCCGHVMAGDETIPLGVEEWVCPACGTHHVRDHNAAINILERGMALISCG

SEQ ID NO: 17076 - protein, 321 aa, unknown
  TnpB Polypeptide
LESFFVAIKDWKKHPNKYLGRPKLPKYKAKDGREIFMLKNIQCSLNYGVLRISFKPFHGYSVNTHIPNNSKLMQCRFIPHNNYYTMEIVYQIEVPDVTTDSRHIASIDLGIDNFATITNNIGLKPIAIKGNVIKSMNQYYNKKKAKMQSELMLINKKHNSKRIIQLTNKRNNKVKDWMHKVSKYVVDYCVLYGIDTLVCGYNAGWKQESDMSKKVNQKFVSIPFEMFVNQLAYKCENNGIRFITTDESYTSGTSFLDYEEPIKANYNKNRRIHRGLFKSNTGTLINADVNGSYQIMKKVFPNAFADGIEGVGLHPLSMKIA

SEQ ID NO: 17077 - protein, 425 aa, Streptomyces sp.
VFELSRVIVMQLRYAFRLYPNAGQRTALARAFGCARVVFNDAVRAREDARRAGQPFPTAGVLSRRLITEAKQTAARSWLGEASAVVLQQSLRDAEAAYKNFFASLRGTRKGPRIGPPRFKSRKDARQSIRFTANARWNITGSGRLNLPKIGAVKVKWSRNLPATPTSVTVVMDAAGRYFASFVIDTDPAADAARMPETDRITGIDLGLTLPQTPSGGTPIAVLSDGTKIDSPRFLRRAEKKLKKAQKELSRKQKGSKNRAKARLKVARAHAKVADARREFHHQLSTKLISENQGIAVEDLSVSGLARTKLAKSVHDAGWASFVNMLEYKAARYGRTLVRIGRFTPTSQTCSTCGAVDGPKPLNVREWTCTACGTVHDRDTNAAINVKTAAGLAVSACGAPVRPGAIPAQREETGSHGFPTGNCAA

SEQ ID NO: 17078 - protein, 381 aa, unknown
  TnpB Polypeptide
VLRVVKVRLYPNKEQQQLIHKTFGSCRFVYNILLDAKIKAYECGDSLSAYELKKRLVPIKKAYNGEFLKEVDSTALQNSVLKIDVAYKNFFRRVKHGEKSGFPRFKSKHNSYQSYQSSTASIKKNKLYLPKIGEVKARFHHGKITGKIKTVTVSYEAGQYHASINYEDGSEQIYGTNNGKSIGIDVGVKVFAYTSENEAIKYINLKHEIANVIKAQKVLSRRKKGSANRTKAKAKLAKKHLKLKNKKNDFLHKITKKLSENQTIAVENLKIKNMSKKAKGSIDNPTMRSSAKRGLNRSILQQSWGKFFELLDYKLRRNGGQLIKVDPRFTSQKCSSCGHISNENRLKQAQFICKNCGNRLNADYNASVNILNAVGTTAKAS

SEQ ID NO: 17079 - protein, 351 aa, Cohnella sp.
MQTITVQIRIFPDNPTLLREHGNAYIEATNRLAMQAERAGIFPHLTSKDIEAKLPSAVRNQIIRDARSIHKKTNKQGKRPILKRRAYYVNNQNYSINGNVVAFPVMMDGKVQRLRVASRLTEREYNILSSGKLGLMKVVEKSGKWYVQISVEKQFGQTTGDATMGIDLGLKVPAVVVTSTGKTKFVGNGRQNKYIRRKYSSCRRKLGKLKKLSAIRKQQNKEHRYMKDQNHKISRQIVNMAIDAQVSVIKIEKLTNIRQTTRTSRKNAKNLHNWSFYQLQMFIAYKAALAGIRVLEVNPAYTSQTCPICAKRNKAMDRTYRCSCGFHAHRDRVGAINIMRQPMTDGNSLSA

SEQ ID NO: 17080 - protein, 403 aa, Erysipelotrichaceae sp.
MWGMKMHLAFISLFLYFERISMIKTVKRTYRFRIYPNPSQKELIEKTLGCSRQVYNDFLSMCIESYELDHNRIVNKYDLIKLLPEYKKTFPYLKEVDSIALQQTVIHLYDAYMNFFRHNAEFPKFKKKKNDYGYTTMSTNNSIRFIEDDIQIPKLGRVKVKLHRYLPESFKFTMVSVSRKGKYYYVSLLGEEEYFDYGEYIKESLDHNNSIGLDFSLSHLFVDSNGSHLDMPTYYQDSLTKLAREQRKLSHMKKDSSHYQKQLMRIKNLHEHIANQRKDFLHKASRKLANTYDYVFVENLDLQEMSERRDKLKLGISIFDLGYGTFLNYLSYKLKWLNKRLIKVDRYFPSSQLCSACNYRKSDLALNQRSWVCPECGTKHNRDYNAAINIKKEGIRMILNPSN

SEQ ID NO: 17081 - protein, 377 aa, Microcystis sp.
  misc_feature (322)..(355): Xaa can be any naturally occurring amino acid
MRDMEKAYSFRFYPTPEQESLLRRTLGCVRLVYNKALHERTQAWYERQERVGYAQTSSMLTDWKKQEELDFLNEVSCVPLQQGLRHLQTAFTNFFAGRTKYPNFKKKHQGGSAEFTKSAFKFKDRQIYLAKCTEPLPIRWSRQIPESCEPSTVTVRLHPSGRWHISIRFDDPTIKPLPPTDKAIGIDLGISSLVITSDGDKVSNPKHFNKHYRRLRKAQKNLSRKQKGSKNREKARIKVARIHAQITDSRKDHLHKLTTQLVRENQTIVVENLAVKNMVKNPKLSQAISDVSWGEITRQLAYKCLWYGRNYIEIDRWFPSSXXXXXXXXXXXXXXXXXXXXXXXXXXXXXXXXXXLSFCLKIAAIYLLPVNHIPPLF

SEQ ID NO: 17082 - protein, 234 aa, Elainella sp.
VEVQLDPTKALGIDHGLNNWLTCISNVGTSFIIDGLHLKSLNQWYNKRVATLKEGQAQGFWSKQLASITEKRNRQMRDAVNKAARIVVNHCLQYGIGRIVFGWNQGQKDGANMGRKNNQKFVQIPTARLKARISQLCEQYVIEFVETEEAYTSQASFIDGDSLPKHGEKPEGWKSSGKRVKRGLFRTASNWYINADCNGAANVLRKVATMLELDLSGVGRGELTAPSRVRLWAI

SEQ ID NO: 17083 - protein, 298 aa, Shigella sp.
VKRLQAFKFQLRPGGQQECEMRRFAGACRFVFNRALARQNENHEAGNKYIPYGKMASWLVEWKNATETQWLKDSPSQPLQQSLKDLERAYKNFFRKRAAFPRFKKRGQNDAFRYPQGVKLDQENSRIFLPKLGWMRYRNSRQVTGVVKNVTVSQSCGTWYISIQTESEVSTPAHPSASMVGLDAGVAKLATLSDGTVFEPVNSFQKNQKTLARLQRQLSRKVKFSNNWQKQKRKIQRLHSCIANIRRDYLHKVTTAVSKNHAMIVIEDLKVSNMSKSAAGTVSQPGRNVRAKSGLNRS

SEQ ID NO: 17084 - protein, 194 aa, unknown
  TnpB Polypeptide
MKIINYNQSRFKVEGDELILSKLEEVKVLLHRPFEGGLKGVIVKKNESDWYAIFQCEAEKKPLEETSKAVGIDLGVDKLVVTSDGVVAENPKSFDKIEKNTKPPQHSLTWKKRGSKNYERPRNKLAKLHEHAKNLMNDYIHKITTRLVQEYDEIYAEYLGVRGMVEKGENKTLRKHILHSNFSLFTHHLSYKAS

SEQ ID NO: 17085 - protein, 327 aa, unknown
  TnpB Polypeptide
VSAVVLQQALADLNEAYRNFFNSLTGKRKGPKVAPPRFRSRKDSRQSVRFTANARLKVLGDGRLRLPKIGDVPVRWSRALPSAPSSVTVIRDAAGRFFASFVIETEPRPLPETDAECGIDLGLGHFAVMDDGTKVAAPKFLRRAEKKLKRAQRDLSRKQKGSANRDRARVKVARAHARVTGARRDFHHKLSTRIIRENQAVTVEDLAVKALARTKLAKSVHDAGWSAFVSMLEYKAKLYGREFRKAGRFEPTSQVCSACGVKDGPKPLSVREWTCHECRTVHDRDVNAAKNIAALGRREALNVRGGQVRPAETLAQADEAGSRRGAA

SEQ ID NO: 17086 - protein, 400 aa, unknown
  TnpB Polypeptide
MQQVLTVVCKINPTSTQVAKIDATLKAFADGCNYINDTVDPKLTNNVRIQTLVYKQVREQFGLSANLAIRAINRVAGNRKTAKKDHKPVLKFKPTSADYDARIFAFRESDWTVSLTLNGGRERFKVQLGNYGRGKLTGSNPTSATLSKHRDGNYSVNIQVKTTAPDIKSTDSVIGADLGRTDICVTSTGTKHSGKQITQKRNKYAKTRALVQTKSTKGTRTSRRSCHRLLARLSGRERRFQSWHSHKISKQLVSQAKESNSIIALEDLTGIRERTNKQPKSKKERRLSNNWAFYQLRQYIEYKAIGAGVKVVFIPPAYTSKTCHRCNHIHPNPDLSYRHGKYFRCGHCLWTGDADLNASMNIQQWGVTVNTPEQSSLSCPVSLVEQVESPHHSCTQVGVG

SEQ ID NO: 17087 - protein, 251 aa, unknown
  TnpB Polypeptide
MVKAIKVMLIPNNVQQTKLFQYAGASRFAYNWALAREKENYEKGGGFIPDTELRKEFTRLRNSDEYAWLLNVSNNVTKQAIKDACSAYKNFFKGLQRYPRFKAKKKSMPKFYQDNIKIQFRDTHVKFEGFSFSRKANKQKLNWVKLAEHGRIPTDAKYRNPRVSFDGLNWWISVCVEFPDCRDRSNHDGIGIDLGIKDLAICSDGNTYKNINKSQTVKKLEKCKRRLQRSVSRKYEHNKKGGSYCKTNNIV

SEQ ID NO: 17088 - protein, 405 aa, Arcobacter sp.
MRIEEIIFALCLLSIIIKDKHFNENAILLAHKIEIRPNQEQEEYLLGAVGSRRFAYNHLVAYYNEQKKLTKTVSVKLIKELRAKYEWLEDFSTRVIRNCVDDIDKAIKRAWSPQIIIERNRAIDKASTPKQKLKAYNLGMPQFAKKGINESFSIREKEKITIKDRKFKVEKMPFYIKMRNKIRFSGVVKQVTISMQGGKWFASFLIETTDKHEEEQKPRLDSVGVDVGIKELATLSNGVVFPKSQPLKKQLKRLRQLQKKLSRQIRYSNGYKITKAKIAKLHYFVSQKRKAIIHELTDYLVKTFNRVAIEDLNVKGMIKNRKLAKAISDVGFGMFKEILTYKCKLYDVKLVLVDRFFPSSKICSKCGTKKDNLKLSYRVYNCNSCNLVIDRDLNASLNINGWRQV

SEQ ID NO: 17089 - protein, 382 aa, Gordonia sp.
MQLRYQYRVYPTPGQQNRLAQAFGCARVVFNDALRARQVAYQAGLKLSDTDVQKLVVTEAKRTPERQWLGEVASVVLVQASQDARRAYRNWFDSMSGKRKGRKVGAPRFRSRKDNRQAIRLTRNGFSIRANRKLYVAKVGELKVAWSRDLPSEPSSVTIIKDAAGRYFASFVVETSDEPLPESQFEVGIDLGLTSFAVCSDGRVIDSPKFLRRAERKLRKAQQDLSRKQKGSKNRTKARVRVAKAHARVADSRKDWAHKLSTTLIRENQAIYVEDLCVTGLARTRLAKSVHDAGWGMFVRMVEEKAARYGRTVVKVDRFFPSSQLCSVCGAKDGPKPLSVREWTCRGCGAVHDRDLNAAKNILAEGRSERLNACGETVSLPA

SEQ ID NO: 17090 - protein, 559 aa, Lysinibacillus sp.
  misc_feature (418)..(544): Xaa can be any naturally occurring amino acid
MTKGKKDCFIIELKLLIDTWQKDILLKRFEIARTLYNTTLSYAVKQYTLMQESKHYRKRLRYYQKAKKSNDSKELKQTAKELNNIRQSFGLSEYQLHAYIKKHQHNYKKHIDSNTSQKIASTVWKAVQDVLFKGSKAHFKRYGMLHSVEGKSNKAGIRFKENIVYWNGLTLPVRIRKQDLFVEESLAFHTIKYCRLVKKVIRGIHTFYVQLVMDGIPPAKRIPSTGAFRHSYQKQKRVGIDIGPSTIAVVSEETVFMQQLAPEVPLLEKQKRRLLRKLDRSRRSTNPNNFKKDGPIKHGVKLHWAYSKNYQKIKKQVKELYRKKACYIKEKHGALANKILSLGDEVYIETMHFKGLAKRTKETKTTIQGKIQSKKRFGKSIGNHAPAMLVEIIHQKLGYTKQTIQKVNTITFRASQYXXXXXXXXXXXXXXXXXXXXXXXXXXXXXXXXXXXXXXXXXXXXXXXXXXXXXXXXXXXXXXXXXXXXXXXXXXXXXXXXXXXXXXXXXXXXXXXXXXXXXXXXXXXXXXXXXXXXXXXXXXXXXXXVKKTFPLSMGIKQIK

SEQ ID NO: 17091 - protein, 271 aa, Photorhabdus sp.
VKVLEGAVKLPKLSPIKARIHREIAGEVKSITLSRTATGKYFAAILCDDGKEAREKPGIITRVTGCDRGLSHYLIESNGEKVNNPRHLINTTRNLRRKQKSLSRKQKGSANRGKARLRLAAVHERVANARADFQHKRSRTRVDENQALIVETLKSANMMKDHRIARAIGDAGWHGFIKKLEYKAAAAGVHLVKLDQGFASSKTCHCCGHKESEMPLSQRYWMCPMCQTEHDRDINAALNIQRKGITALQAAGLVVSAHGGQCKSVIKTVAA

SEQ ID NO: 17092 - protein, 489 aa, Bacillus sp.
MTKENSSNYKTLQIWIKKGHRMYSYFQECCHNAKNMYNTTNFYIRQVYTGLTQEKELQPLQKEVLDHIHKNIGKMNDTQLLAYQKRLEKEKLKPKEEQKEITCNLFSEPNFEKPYVDYNFLDALFKAMIQNDYRALPTQCSQSIMKGVFQNWKSFFASLKDYKKNPNKYAGMPRIPKYIRSSEKEILYTNQDCIIKNSRFLKFPKTKLQLNIGKLGFTEGKLKQVRVIPKYNEYVVELVIDVPSEQQIIEENARYMSIDLGIDNLATIVTNTGMKPVLVKGKHVKSINQYYNKMKSHFTSILRNGKQTNEGPFTSKRIEKLHQKRYLKIKDVFHKVSHHIVKLAQEEDVCKIVIGQNKSWKQETNMGKRNNQSFCHIPHSLLIQMITYKANAVGIQVIVTEESYTSKASFLDNDFIPTYGENDQNTTFSGKRIKRGIYCSANKTLIHADVNAAANILRKVIPNAWTNGIEGLGVKQLANVLTPLTLIVR

SEQ ID NO: 17093 - protein, 385 aa, unknown
  TnpB Polypeptide
MKLTVQIQVVPDKVQDAELRRTVERFNEAANWVAVELFASRISNKRLAQKLVYRELRDRFRLTAQTAILVIHRVCEAYKRDKDKQPKFRKHAAITYDARVLRFIGLDRVNLWTLAGRLVIPILVGKYQVQQFARAKGQIDLVLRKDGKWFLLVTVDVPDDASIDPVDFIGVDLGVKNLATTNDGENFSGQGVDRIRTRYGRIRRTCQKTGTKSAKRKLRKVRKKESAYRRNQNHLISKRIVAKAKDTNSAIACENLAGIGERTTARKPERSRMKGWAFHQLRTFISYKAAVAGIPIIAVDPRDTSRTCPECGHCEKGNRRSRDKFECRSCGHADAADRVGARNIRHRAIQDWATVRTPIVGLVDAGPRNPVESTCKLRGFSPSST

SEQ ID NO: 17094 - protein, 367 aa, Clostridiales sp.
MKITKGYKYRIYPNDVQTEQISRTLGCCRFVYNHFLALRSEAWKECRESLSYVATARLLTELKRDPEHLWLASADSMALQESLRNLDRAYRNFFSGRGRYPRYKSKHNHCQSYRTRNQSDNIRIEDGRIVLPKLGAVKARISRIPDGRILNASVSRTPTGKYYVSLCVEEELVPKPNSGGVIGIDVGIKEFYTDSNGDSVANPKTLSKYERRLRREQRRLSRKQKGSSNRAKQRIRVAAVHEKIYNVRTDFLHKESTRLVSENQVIAIESLNVKGMVRNHHLAKAISDASWSRFFSMLEYKGFEHGCEIRRIGTFYPSSQTCSCCGYRNPLVRDLSVRDWTCPECGAHHDRDSNAAVNILDAALQPA

SEQ ID NO: 17095 - protein, 452 aa, Streptomyces sp.
VKKFRPRPGFVVQAYRFALDPNTAQGHALRSHCGAARAAYNWAVAWVTASWWQRKAEETYGVPEAELTTWRPWSLPSLRKAFNAAKHADPRFADWWEENSKEAYNTGLANAAAAFDNYAKSKNGKRKGRTMGMPRFKPKRKARLACRFTTGAIRVDADGRHVTLPRLGTIRTHEPTVKLLARIQAQTARILSATVRHERGRWFASFQVEVKRDFTRVTRPEAAVGVDLGVKTLAVMADSTGEIRTVPNPGHYDQALRLLRRASRSVSRRRGPDRRTGQRPSKRWEKANAARNRVHHRVANIRTDAPHKLTTALAAEYGTVVVEDLNVAGMLRNRRLARRIADAGFGEIRRQLAYKTSQRHGTRTITADRWYPSSKTCSGCGAVKAKLPLHDRYRSGRRPGHRTGVEASWSRPEDRATRRSPKAAAGRVGGAIPARRGKETRDRPQAEALTLW

SEQ ID NO: 17096 - protein, 442 aa, Streptomyces sp.
VHLRYSYRIYPTAGQRSVLARTFGCARVVYNDALTARKAARKDGLPYPRSTDLQKRVITEAKRTPERAWLASVGVDPLIQSLRDLDTAYRNFFDSVSGKRAERPVGLPRFKSRKDSRQSLRFTRNGFRIRSNGKLNLAKIGDVRVKWSRALPTDPSSVTVVLDPSGRYHASFVVDLEPEHLPELDTEIGIDLWLTTYAVLSDGRVIDNPRFLRKAEKRLKAVQRALSRKAKGSKNRAKARRKVAKAHAKVADTRMDWLHKQTTRLIGENQAIYLEDLNVRGLARGHLAKSVHDAGWATFRRLLEEKAARHGRTIGVIGRLEPTSQVCSACGVLDGPKPLAVREWSCGACGVLHDRDLNAARNILAAGQADRLNASGGPRSPGVAIPRQARPVERGTHRNTSGMGCKPRAAGAAGIPALVGGEDVNSGWACRLCDGCRSGGRG

SEQ ID NO: 17097 - protein, 415 aa, Thermococcus sp.
VGKKTYKLLRTLTHLSKDLYNITLYTVKQHYELNGTFLPYAKAYHLVKDTEPYKLLPSQVAQQTMKIVERNFRSFFHVLNERKKGNYNRPVSPPKYLPKNGHFILIFPYQSFRVKEDRVILTLGKNFAEKYGVKHLEIPLPKNVKGHRIKEIRILPKYNALWFEVEYVYEVQPEEKDLDRSKYLAIDLGLDNFATCVSTTGTAFIIEGRGLKSFNRWWNKEKAKLQSQYDKQGIKFGRKMAWLLKKRKNVVNDFMNKAVNYIVNYCLENGIGNIVIGELKGIKRNANLGKRNNQNFQFVPYGLFKQKLKAKCERYGINYIEVDEAYTSKVDALALEPIGKRKKYLGKRVKRGLFQSSTGVLINADVNGALNILRKVAGDSPVGEIAGSGRVNRPVRVRLSWGGLTPHEAPSARAG

SEQ ID NO: 17098 - protein, 433 aa, Thermococcus sp.
MKRTITVKLQPSKAQEKILFELALISSKIWNKVNYLRRQEFFEGKPVDFNKTEKTVYEEFKSQIGSATVQQICRKNAEAWRSFFSLIRNKRSGELPKWLKPKPPNYVKGEGLIVLRNDQYKIEGNKLILKGLGKFKRLEIQFKGRIHLKGKQGRLEIKYDPVRRKWYAHISITVKEKLQGEEWVEVPREPLGNLSAGIDLGVNNLMAVYLENGQSFLVNGRPLKSIDFYWRKRIADYQSKLNKSGVKKSRKLARMHQKAKLQAKHYINTAVRRTVERLYHLGVSRIVVGYPKGISRNSDKSKKQNYLLSHVWRFNYLIKRLKEVSEEYGIQVFVVSEAFTSKTCPVCGRPHEGARFVRGLFKCPETGLVFNSDLVGAFNILKKVVKTITPNLSGFYAQRRGNWGKTLPEGFEEPNLDWVLMKTPQTFPSVARG

SEQ ID NO: 17099 - protein, 255 aa, Thermococcus sp.
MRTEIIKPTAKFKLKEIPGGLDDLFSTYREIVNYLISYAFENNVTSFYRLKKGTYKSLRKEYPELPSHYHYTATQMATMIYKSYRKLKRKGKAKGRPVFKKEAIMLDDHLFKLDLEAGIIKLSTPSGRIKLKFYPAKYHEKFKNWKVGQAWLVRTPKGVFINVVFSMEVEIREPETFVGVDLNENNVTLSLPNGEFVQIITHEQEIRTGYFVKRRKIQRKLRTGKRRKELLEKYGGREKNRLNDSYHKLANKSLN

SEQ ID NO: 17100 - protein, 181 aa, Microcystis sp.
MEKAYSFRFYPTPEQESLLRRTLGCVRLVYNKALHERTQAWYEKQERVGYAQTSSMLTEWKKQEELNFLNEVSCVPLQQGLRHLQTAFTNFFAGRTKYPNFKKKHQGGSAEFTKSAFKFKDKQIYLAKCTEPLPIRWSRQIPESCEPSTVTVRLHPSGRWHISIRFDDPTIKASSLLGMVR

SEQ ID NO: 17101 - protein, 414 aa, unknown
  TnpB Polypeptide
MFMCERQYMLLKKTIILKLKTKDNDLGEAIDKYTEGMNYVSNVVFENGKPIPVRKLQPMTYNHLRTKIGLKSQMSCNIIRQVAGTYQTLLAQIRKEETKWQLIEYNPTNITYSYGRDFSLKKHELSITTLKGRKRYKLAHYVYADRQLDDKNWKYCASKLIRHRNGNDYFHLSIEKETKEIDITKTTDFIGIDVGINHLAVATTTNKKNRFFCGGEIKNIRNIYSKQRKRLQAKGTRSAKRVLKQQKYREQRLMTDVNHVVSKKIVKFAKEHRIPVIAMEDLNGIRKRTKAHKGYRYKHSSWAFRQLQSFIDYKAKEENMKVVYVDAHYTSQTCSRCGHIEQSNRNGLVFECKSCAFELHSDLNASRNIEHKARNFRHDLEFQGCVVSHPDGNGEPQRKQTEFQAPSLKSSMMI

SEQ ID NO: 17102 - protein, 408 aa, Acidithiobacillus sp.
MMLRKAVRYRLEPLPEQEHLLSRAVGCVRFVWNRALAVQKSYLDHQCGILSYVDMAKCLTTWRNGESFGFLSESPVHPQQWALKFLDRALKDAFDKSNPKRFPVFKKKGLHDSMRYPDPEQIKIDLRPQDADGRTQFPKIFLPRIGWVKFRKSCVIGGEIRNVTVSHSGGHWHVAIQTEKEVPDPVHPSTTAVGGDRGVANLLTLSDGTMFLPVTTYRDLQKRLAKEQKRLAHKVKFSANWKQQKAKITRLHQRIAEIRKTVLHQVSAAISKNHAVVVLEDLKVRNMTGSARGTAEESGRNIRQKAGLNKSILDQGWGMLKRMMGYKLQWTGGMLLLVDPAYTSQICPVCGVVDAGNRQTQAEFHCLHCGHEAHADVNAAQNILARGLTTSYEVASTAGHAGVVCFAA

SEQ ID NO: 17103 - protein, 292 aa, unknown
  TnpB Polypeptide
VGFRGKGSGMVANRAYKFRIYPNDEQKILFAKTFGCVRMVYNHWLDRKIRQYEENKTNVTYTICAKEMAAMKKTEEYGFLKEADSIALQQALRHLDTAFQNFFKQPKTGFPRFKSKKRNKNSYSTVCINGNITLSNGYLRLPKIGQVRLKQHRSVLGEYRLKSVTVSQTPSGKYYASILFEYEDQVQEKELQKFLGLDFSMHELYRDSNGKEPAYPGYYRNAEKKLAREQRKLSRMQKGSNNRNKQRLKVAKLHEKVSNQRKDFLHKQSRQITNAYDCVCIEDLDMKRCRGH

SEQ ID NO: 17104 - protein, 219 aa, unknown
  TnpB Polypeptide
LENDKFVYGCFYFNNKIYTNLLKKLLRTKESPLTYRIKFKNDKVLLQIIYNFKHNKDLCVTRNSYGVVGVDFNKCFVSVSETDKYGNLINTFNINYQYGKGNQTTNDFQRIATNLKDYCLDIGKDLVIEKLNFNKKKDTLISKRGKKYNKMLSTLAYSKFDSIITSKCVKNRIFLHKINPAWTSWVAKQKYCPKMKLNIHSGASYVIARRGMFLKDKIK

SEQ ID NO: 17105 - protein, 409 aa, Halobacteriales sp.
MQYNYKYRLDPPEALTETLLYHIDTCRQLYNHVLYKLNEADEIPARYTVQGTLPDLKSWWDDLNDVHSKVLQMVVKRVYDNLSTLKAQKESGRAVGMLKWKSPREYQSLTYNQSGFELKNTSGRPVLWLSKVGEIPIHLHRDIPENATIKQVTVKQEPTGEWFATFGIDVDDDTPEKPENPDRVVGIDVGILKYAHDTDGTAVRSPEFSEERERLERAQRELSRKEHGSNNWEQQRKTVAQRYADLKRKRRDFLHKLSNYYAREYELVAVEELDTKGLIELPGNSRDRAGASWGMFLRMLEYKCERDGTHFIAVDPRGTTKECASCGTETDKPLWVREHSCPSCGFEADRDANASWNILSRGLKNVGVVHSESTPVETVLPVDTVVSAKRVVETGSPTLKKRTASAVSE

SEQ ID NO: 17106 - protein, 406 aa, unknown
  TnpB Polypeptide
MEKRKINYKLYPITTQKERLLEHLRLHQQLYNAALQERIECYRKTGRSITYNDQQASLTQIRAEHPEYRAIPVYITRMTLRRLDKAFKSFFDRVKKGQTPGFPRFKSLSRFSSFDMCSGSGWTFTPEANGKHGRLSINGIGQIKARGKARTLGNVKTSQVIHRHGHWYLSVTVECEPERVCKGLKACGFDWGVEYLGTIAHEDGSTKTLDNPRYYRDSKEAMLPLQLAVSRKKRGSNRWKRACKSLAQARAKVARQRHHDHHQLSHDLAEEYALFATEKLTIRNMTRTAKGTVEKPGKRVKQKSGLNREILDTAPAKLLGMIRYKVKETGSEFVEIPTRQAKPSQRCPACWAVVKKSLSERIHNCDCGCIMPRDAASGLVAIKWALGLGGNSSDTAKAVKPLLSAA

SEQ ID NO: 17107 - protein, 189 aa, Halomonas sp.
LAFLSEVSSVPLQQCLRHQQTAFKNFFEGRAKYPVFKSKRHRQSAEFTRSAFKYRDGKLYLAKSKTPLNIRWSRELPGEPSTVTVSKDSAGRYFVSCLCEFEPSKLPVTSNMTGIDLGLKDLFITDQGERVGNPRHTAKYAARLAKAQRRLSKKSSARPTVPRPGRRWRNFTPKSPIADRTICTNCPAD

SEQ ID NO: 17108 - protein, 260 aa, Halomonas sp.
MRAGKHLAPILGDEDQMDVEFKNAVPSCSDSLFGFHRPSIFEAMKQTKTLKVRVKDKHAAELNRMARSVNFVWNYLNELSSRAIREKGLFLSAYDMHPYTKGAGKDLGLHSQTLQCIAAEYVARRKQFKKPRLNWRKSGGVRRSLGWIPVNTGAAKWKNGQVFHNGTYFKVWDSYGLSTYKFRAGSFNEDSRGRWYFNVAVEVDVQPTLGQGAVGIDLGLKDVATCSDGGRLENSRFYRRMEDQLATAQRARNKRRVKAT

SEQ ID NO: 17109 - protein, 84 aa, Halomonas sp.
MLAGELVRQLDYKAAWAGRQFVQIDRWYPSSKRCHSCGFVRESLPLDVRTWDCPDCGAQGIDRDVNAARNILQAGTALLAGADG

SEQ ID NO: 17110 - protein, 234 aa, Halomonas sp.
VSCDTAGRYHVSFLVEEAVTPLPVTPKMVGIDLGLTHRVITSDGDKIPNPRFLHRTERKLARVQRNLSRKQKGSQNRAKARHRVAKVHAKLADQRRDATHKLSTQLIHENQVIAAESLPVKNLLKNRSLAKAISDVGWHQLTQQLAYKAERYGRDFVQIDKWYPSSKRCFHCGHITEKMPLNVRTWDCPHCGTQGIDRDVNAARNILQSGKAILAGADKLRQHEKTTTVGLTGG

SEQ ID NO: 17111 - protein, 165 aa, Halomonas sp.
VNGDNGYIAMQVSGLEVLPGGGLTDSGAIHAKIKNRRQDAQHKFSRKLVNQYGEIVVGDVSSTRLAKTRMAKSVYDAGWSQLKTMLEYKCAHAGIVFKVVRETNTTRACSSCGSLSGPQGVNGLRVRGWECVECGVLHDRDVNAARNILSLGAGRCPQEVGIPVF

SEQ ID NO: 17112 - protein, 283 aa, Hydrococcus sp.
MFVLEYKIRAKSAQLRAIDEAIRTAQFVRNKALRYWMDTPKQNKYDLNKYSAVLAKEFKLVDKLNSTARQSSAERAWSAIARFYDNCKRKIPGKKGYPRFQKNNRSVEYKRSGWQLDNQTKKHITFTDKNGIGRVKLVGSRDIYFYNQEDIKRVRLVRRADGYYCQFCISIDVSEELEPTSKAVGIDVGLKYFYVDSNGQIEENPKFYRVGEKRLKKLQRRVSGKFEKGKPVTNNYLKAKASLALYHLKISRQRVEHAKRLARCVCTSNDVVAYEDLQVRKHG

SEQ ID NO: 17113 - protein, 390 aa, Synechococcus sp.
MTQRAFKYRFYPTPEQESLLRRTMGCTRLVYNRALAVRTQAWSEEKKQVGYSDTSAMLTAWKKQDDLQFLNEVSCVPLQQGLRHLQKAFRNFFQGRAKYPTFKKKRNGGSAEFTKSAFKWRDGQVFLAKCSEPLAIRWSRALPKGANPSTITVKLSPAGRWTISLLVDVDVDPLPPSPNQIGIDLGVTSLAALSNGDKIANPKNFNTKRRKLKKAQKALARKQKGSNNRHKARLKVAKVHQEIADARKDFLHKLTTRWVRENQTIAVEDLVVKNMVKNQKLALSISDASWGELVRQLEYKCDWYGRRLIKIDRWFPSSRRCGSCGHIIEKLPLNVRAWDCLNCGAHHDRDINAAKNILAAGLAVKVCGANVRPERHKSDGSCNETERSRK

SEQ ID NO: 17114 - protein, 325 aa, unknown
  TnpB Polypeptide
MVQQQALRDFDQAMRSFYGGTHGRPSWRKAGRDEGFWIVAVKPEHVRRLGRKTGQAWVPKAGWVRFRWSRQVPDGVKSYRVTLDRAGRWHISFVAIPEPILSPGTGEVVGIDRGAAVSATLSTGQMLMVPRLSPSRQRRLRRLQRKIARASRGSKRRAQAKLAIARLRARETDMRKDWVEKTSTDLARRFDLIRVENLRITSMTRSARGTAGNPGRNVRAKAGLNREIMRSGWGLLVRRLEQKAPGRVERISPAYTSQRCSACGHIAAESRKSQALFACVACNFICNADVNAAINIAAGHAVTARGGDGVTRPANREPQLLSQSA

SEQ ID NO: 17115 - protein, 378 aa, Alicyclobacillus sp.
VKGGESVELVLTAKVKIVPTEEQHTMLQQTLQAYREGCNYLSGVIYTTKNLIQARLHTTTYRYLRETFGLRSQMAQSVIKTVIARYKSMMENGHDWKKVGFKKPELDLVWNRDYSLGHGVFSVNTLAGRVKVPFVTKGMEHYFDGTWKFGTAKVVYKHGKFFLHIPMTKHIEETEWEHINEIVGVDMGMNFLVTTYDSHGKVWFVKGRHVKDKRAHYKQLRRHLQQRQTASARRRLKKIGQRETRWMTDVNHQVSKALVERYGANALYVLEDLTGVREATEKVRKRHRYESVSWAYDQLRQMIEYKAIKLQSKVIAVDPRYTSQTCPKCGHIEKANRDKKHHRFTCKNCHYRSNDDRIGGMNLHRKGIEYLVAVTTSA

SEQ ID NO: 17116 - protein, 356 aa, Okeania sp.
MKSIRTKLKVNNYQRTILAKHAGVARHAYNWGLATCITEYESTKKRPSAITLHKRLIAEVKSENPWYYEVSKCAPQQALRDLDRAFKNFLTIPKCGFPKFKKKGKKDSFYLEGSIKIVQGNYIKLPRIGIVKTYEILPSVPVKNVTISKRADNWYISFKYDECEPKPPTKKRDIIGVDIGINTLATCSDGTRFANVKAYKQAKKRLTRYQRRLKKKEPGSKNRAKAVKRLAKTHKKVADIRANALHKLTTWLAKNHSTIVIEDLNVSGMLKNHKLASAIADCGFYEFRRQLSYKCKWYGSKLVIADRFYPSSQLCSHCGHRQKMPLSMRTYECSNCGSRADRDFNAAINLENYVHQ

SEQ ID NO: 17117 - protein, 448 aa, unknown
  TnpB Polypeptide
MSVHAYKQPFKADTLTFELAKESGKIYSKAMLLNKKEHKSFKEITKIMEKYCKENRKYLHSQSAQASYQNFITNLKSFFEALKTFNKNPSGFSGKPRPPHKNKFMYKIIFKKSAIHCNNGYMLLSVKKPYEPIKIKWAKDLPIPLWVEISYNKYDGWNISFVMEEKCELLELDKNKVMTIDPGNKRTATTFNNVDSEVTTYNGKIIMSLVRLRNVVDGRIKTKQSKCKKRSRYYKILARVKRKIVKRIKNKENDILHKYSRKIVNDAVSKGIGKIVSGDNSSTHNKTDCGKQNQKIQQNPERKLIKLVEYKFARVGGQAEAGHEQYTSRTCPKCGYVKKTSPKGRTYSCSNPIKCDFAYDRDGVGAIGIMKKNVSNVSFDHKEWLDVVGGLTPPIGVKYHKKTPRLSLVSSNRNKIPNNCLASNGENSILGNFSELVNLEKLEEPHVL

SEQ ID NO: 17118 - protein, 417 aa, Hydrogenovibrio sp.
MKQVIRKAFKFKLNPNSDQAQKMVEFAGANRFVWNKALAKNLTLLEYKKPILWYQEMNFWLGLWKKSNEYGFLKQAHSQSLQQTLKQLERAFKNGFDKKQPLKRIPRFKRKGQKDSFSYPQGFKLDGNSVFLPKIGWVKYRSSRKVVGELKNCTVSRRGKHWYVSVQVEYEAEIPRHSANSIIGLDLGVKRFITLSDGSYIEPINSFKKLEKKLAFAQRRLSKKVKFSSNWKKQKQRIARLHEKIANVRLDFLHKTSTSISKNHAMIVVEDLKVRNMSKSAKGNIDKPGKNVKPKSGLNKSILDQGWGMFVQMLEYKQNWFGGDVLRVDPRHTSQTCPKCQNISRANRKTQSAFACTECGFKANADLVGALNVLARGHRVLACGVETLVSTLKQEPVGSSDTRPLLNGLKLLGIPVL

SEQ ID NO: 17119 - protein, 416 aa, unknown
  TnpB Polypeptide
VKIVLTYKMTHEWNVEKLLEEYQRVLQWAVDEIWENAAWKEKKVKHRCFLGGKRYKFYETTRLIPYFPNSNEFRRNLRNKLLVEWFFARHYVDSAIKTAYSILTSWRKNYMKGKRKRKKPSVNRRFIRVKTTLMKVEGSKIRITIKPRGEYLELDYSKEWFYERTKGWKVGELIIRESDILLTFSKDVEFSRRVKIGLDSNLMSLDVFHPEKGWVKIDLSELHRIAEIYDRIIDRLKSKQRKSPKRIMSLLKKYWLRRENRIEDFLNKLAAQLAREFPDAVFIFENLNKFKMLRNRSRQFNRKLSRSTWAKIIHKLAYRVQVEFVDPAYTSSTCPICGSRLKSRNGLVKCPRCGFEADRQFVGAFNIFMRGLGVALSGVKTDDLLPHEPGGELRLMRPKSVVKVSMNGGTFTHFPP

SEQ ID NO: 17120 - protein, 396 aa, unknown
  TnpB Polypeptide
MRLVERHIVKDNRFEDICLKSGLLYNYVLYNIRQGVFSGNYLKEFELSTKLCKENQFDFRNLPNHVSQQVIKQVFKNIKSWVRLKKDFEKNPSKYGNNRPNIPSYKRGNKQNMVVFTNCDCRIKDDGYIHFVKNVIEPIKTNVKNDELKQVRIVPQATCYVVEVIYERDENDLCLNKDNFLSIDLGLNNLCSCISNVGVKPFIINGRVMKSLNRWYNKKKARFMSYIGDNGTSMRIRKIALYRNCWIDDKIHKISKYIVNFCKLNNIGTIIIGLNKKWKNEINIGKRNNQHFVSIPHSKLIDKIIYKAKLLGINAIVHEESYTSKIDHLAFEALKKQDSYLGKRKKRGLFQSSIGKLLNADINGAIGIARKVIGDSFIRKIIDSGFVFNPIRLNIL

SEQ ID NO: 17121 - protein, 381 aa, unknown
  TnpB Polypeptide
MINKSFKYRMYPTSSQEVLLSKTFGCVRVIWNACVESFNSYDKGLNPSPKIPCKSDLISNKPWLNEVSAATLQQKQRDFIEFSKQYFNKSRKKKINRPRFKSKDDHQSFRLPAQKFKLKDDKIRLEKIGYIKIVTDRTIPKNSRIISCTVSKDKSGRYFASIVVETEQVYKQKTGKSVGVDLGIKTLVALSDGATISNPHFLHKNQVKLVRMQQHMSRKQKGSNRRRKCKLKIAELHRKISDKRSFYMHNLTTMLVSNYDIICIEDLNTSGMLKNHNLASSISDASFSMFRSQLEYKCDWYGKKLVVIDRFYPSSKTCSYCGWKNDDLKLSDRVFKCENCGIELDRDLNAAINIQRVGVDILSNRTQSSEVTSCGEAFRTT

SEQ ID NO: 17122 - protein, 370 aa, unknown
  TnpB Polypeptide
MEYGYKFRIYPTPAQIQQMQRTFGCCRFVWNHYLALRKDLYEQYGKTMNYNACSGDMTQLKKTLSWLKEADASALQSSLRDLDTAYQNFFRRVKQGQKPGYPRFKSKHNHRQSYKSKCVRTNIKVLDKAVQLPKLGLVKCRISKVVKGRILSATISQNPSGKYFVSICCTDVEIKPLPSTGAVAGIDMGLKAFAITSDGVEYPNHKYLIKNQKKLARLQRCLSRKSKGSNRWEKARIQVARLHEHVANQRNDMFHKLSTNLVRDYDLIAIEDLASSNMVKNHKLAKAISDAGWGEFRRQLQYKGMWYGKEVVTVDRFYPSSQTCSCCGAQWSGTKDLSVRIWTCPECGAVHDRDINAAKNILNEGLRLLA

SEQ ID NO: 17123 - protein, 432 aa, unknown
  TnpB Polypeptide
MKTASPYASKIHKESTLDRHCRSFLMRICIAAGCSIEMEVVIMIKIIRVMLIPNNRQRSKLFQYANTARFAYNWALGREQTNYKSGGKFLSDVDLRKEFTKMKQTQEYEWLNDVSNNVTKQAIKDACDAYKKFFKGLAKFPKFKSRKKSTPSFYQDNVKIQFSETHVKVEGFAASKKKNKQQLNWIRLAEHNRIPINCKYSNPRIKFDGLNWWITVGVECPDPVVAPQNEGVGIDLGIKDLAICSDGNKYKNINKSNEIKKLKKKKRRLQRSVSRSYEQNKKEGKYCKTNNVIKKEKLLLKITHRLTNIRQNYLHQTTSEIVKREPSFICIEDLNVSGMMKNKHLSKAVQEQCFYEFRKQIGYKATWNNIPVIIANRFFPSSKLCSCCGTIQTDLKLSDRIYKCKCGNVIDRDYQAALNLKRYGENAVKSVT

SEQ ID NO: 17124 - protein, 540 aa, Asgard sp.
MNYLSDKSKSTYKTIKFTILTDKKEESILEKMTRKHTYAVRRFLEIIKKEKLTSRIKSNLLKLTLTSRNRPAVSYDLRKETKLSYRFLAQCMSYAIWLYRAYIAKYKKWEQLILKQSQYKIEKLIHEVEVDSTGKLLSIKDDTTEILDNILNDRLIEKILKSRHSFPCESINHKPKKIPVYFDNQILELEKTSDVFKLVLSTLKLRERIILNLKTSPYHFREINGHQVVGGSIYKNLNKRRWEFHACVKINAPKYFGNKKAILGVDLGIVTNATVVVLLEDKPLKQKQIHFLKVPELKQKKFFLMQRKNYLQKKLANAHPIQRKPLIKELKNVYSKITKNTKTLCHKISKIIADIAQDYLTSGYDVHLAIGQLSGIRTRAMKGNYKGGKFRGKVHSLPYYQITENIKYKCRLVGVDDKNISVLSESWTSKTCHKCDSVNTTRLSQASFKCLDCNCEFHADVNGAINIALRYIKKYFIKDLIRIKMIYLFPNKKSEGLSNPSVTLLNPQGTRSSPPCNESTGADFSAHVKVEDARKVQTLK

SEQ ID NO: 17125 - protein, 400 aa, Brasilonema sp.
VLVLEYKAVVKKTKSTAIDEAIRTSQFVRNKVLRYWMDNRGVGKKQLYQYNTQLRAEFGFVKDLNSHACQASVENVERAINRFFDNCKKNKQGLKGYPRFKKDCRSVEYKQSGWKLHSTKRRIVFLDNKGIGEVKLLGKWDIHTYPIELIKRVRIVRKADGYYVQFCIKVDTASEARTGDGEVGLDVGLEHFYSDSNGHHEENPRFLRKAEKAIKHAQRRIYTKEKGKNNRRKARGRYARKHLRVSRQREEHAKRLARCVCKANAFVAYDSAACPKGIDLNVKGLVRNRHLAKSISDVAWTSFRRWIEYFALKFDNKVVAVAPHYTSQKCSNCGETVKKGLSTRTHNCSRCGTVLQRDVNAAINILLKAKNTGGHPGINAWGDVSSTSVGGNTCKSKKRR

SEQ ID NO: 17126 - protein, 397 aa, Oligoflexia sp.
MLLRGYKYRLRPSKKQKKILLRWMGACRFVYNCGLAHRSINYQQWPKSVSYFDQQNALPEAKSDPELSWLKEVPSQSLQMALRHLDTAFKNFFRGTGKYPQPKKKGMHDSISFPQGNILKIQKKARKTRSILLPKLGEVEFIHHRNFTGKVKSATVSHSHGNGWQMSILVEEADIIPPNKSEETVGIDLGVARTIAVSGAHPDQNLPVEQIKRIEKRIAVIQRKQAKVTRFSDRWKHFRRVVAKLHSRVSRIRKDFLHQASSNLSKNHGVIVMEDLKVKNMSKSASGTKEEPGQKVAQKSGLNRAILRQGWGSFRTMMEYKTTWYGSRLILVSPKNTSRRCCQCGYTHEGNRQTQAEFLCLQCGHNENADKNAANNIRRLGLESLGCEPLEAPAIAC

SEQ ID NO: 17127 - protein, 259 aa, Streptomyces sp.
VRPAPAGAAASPGAFTGFFAQRAKYPRFKSRKRSRASAEYTRSAFTWRDGQLTLAKMAGPLDIRWSRPLPEGASPSTVTVSRDAAGRWFVSMLCEDIIAPAPATASAVGVDVGITSLVTLSTGEKITNPKHERRDRARLAKARRELSRKAKGSANREKARREVAKIHARIADRRRDHLHKLSTRLVRENQTVVIEDLTVRNLLKNHSLARAISDAAWREPRSKLEYKAAWYGRELVVIDRWFPSSKLCGPAARSLRNCR

SEQ ID NO: 17128 - protein, 307 aa, unknown
  TnpB Polypeptide
MQSLRDSSAVEADTPTLNDDHVSLATTDKRVTAEYVTPVNEEGTPFEDYWTEEWEKAEATLHKRDGTYYLHIAVKKDVDPSCDDESENGVVLGVDLNVDGYVAVTSTGAFLGNADYLNHRRDEYERRRGNLQQTGTRSAHLTIQSIGDRFARWSADYLHRISKAIVREAVENDCTAIAFENLNHIRKRISNASKFQQWAFKELQRHVEYKAEEYGIDVDDVNPAYTSQRCSHSECGFTHEDNRDGDEFECLKCGKELHSDYNAARNVGWRLIQHWLKSGAGRATSQLALKSGTLNANGRFRPTALRS

SEQ ID NO: 17129 - protein, 375 aa, unknown
  TnpB Polypeptide
MNKAIKYRVYPSNEQAVMFAKTFGCCRKVYNLMLNDKLESYKTTGKFVFVTPAIYKKEYLYLKEVDSLSLANVQLNLQKAFRNCFDKSRKKQNGFPKFKSAKHSRKSYTTNNQKGTVAIIGNTIKLPKIGKVKAVIHRKPEADWTVKSATVSQESDGKYYASILFTFDRIINNVAISDNVLGLDYASDGLYTDSNGNKGTNHKYYKESHRKLAKEQRKLSRKVGSKKNQTKSNNYIKQLHKVNKIHRHITNQRIDNLHKLSTEIANQYDVVCVESLDMKAMSNKGFGNGKATLDNGYGLFLNMLEYKLSDRGKYFIKVDKWFPSSQICNHCGTVHTEMKDLSIRTMRCDCGLTMNRDHNAALNIKKEGLRLLKAA

SEQ ID NO: 17130 - protein, 421 aa, unknown
  TnpB Polypeptide
VKKAITHLKLSDGNAGKLAQLDAVAVEYLRVVQADIDWLIAHEVKEPDKYADLPDLTTPLSARWQRCAWQQACGTVQSWYANERTNPPVLHGSCIQGNANVIVLEPSETPRFDFWLRISTLNAGAPVRIPLKFYSKARQAIADFPKLCTGVTLTKRSDQWYATLVVERKTAKSATTTVVGVDIGMKRIVATSEGKSYGEVSAALRHRTERATAKRRRKQKLNRCLKRKGKPEVDLNDHKAQAFARNEIGRALNTLLDDLPPAAAVALERLAVKDMRFKSRMMNRWLSAAQLGYTRDKLKFKLDERGIRYRSVQPAYTSQQCSRCGYVDPQNRPSQARFKCLACGFESNADWNASLNIAERFGDDELNRLPFCAVKSLLEQRFQARLPVPRSGTAEPGSAPAMAATAINGQPVQLTPMNGCL

SEQ ID NO: 17131 - protein, 458 aa, unknown
  TnpB Polypeptide
LKKPQFERLKELTNHAKNLYNQTLWTLREAFEATGRYFSYPQMDKAMKKVTNLEGKINYKLLKAKVAQQTLRRLDKNFRSFFSCHQDFKKNPGKYKGKPRPPKYKQDKHDNLIYDYQAFRIQGLFIIEKGPEISLPNGKTFPTGESIRYEQVVVLEKGLEIQVPKQLWDKDIKQVEIIPKYNSFHAVFVYEEDPTDFIQVRQSEKTMSIDLGLNNLATCVTNGVVEPFIIDGKRLKSVNAYYNKRKAKMQSKLSKRGKKWSRKLQGLTNWRNAVVNDYMHKATSIVVKTCIKHGISKVVVGDVVKSLNGINLGKRTNQNFVNLSLGQFVDLLSYKLGSHGIELVVTDESYTSKASFVDDDKMPKRYNPKAKQKRTFSGKRVKRGLYKSSNGTLLNADANGAYNILRKTNSDFSFSKLAAKVGARVKEWLHPTKRIHPLPTWREQFFIDLKSHRNRPQN

SEQ ID NO: 17132 - protein, 532 aa, Mycobacterium sp.
MWSRPHLMNGRHVIYLAGDSGRRAVLVPWRPSSSLCLTSWYDAGPVSGACKTAREMTRHTTFRFCLDPTLAQRDRMARHAGASRFAFNQCLRIVKSALSQHRANPAVNVPWTGFDLINTFNTWKKTEDAGRLFVVDDDGVAETVVTGLPWRHEVCQQVLEEAAVDCARALAAWSDSRAGRRKGRRVGFPRFKRKTEAARSFRLRNTKRKGRKPTIRVGEGHPRSVTLPGIGTVRVHDDTRRLRRMLAKNRAKICFATVTQHAERWWITLNVEAADLHPAQQHSVRDPGDNDRWIGVDRGLAAFIVAATADGAELARVQDAPKALQAGMNRQRRLAKMVSRKQKGSANRRQAVARLGQHHHHVTNVRRHFLHQVSNKLVKTHDRLVIEDLNVSGMLRNHRVAQAISDAGWAEFARLVRYKQMWRGGLVAVADRWFPSSKLCAHCGTVNRDLTLADRTFTCSCGSSVDRDLNAAINLARWGQKQSSASPRSPDPQAGGRATNARRRDGADQHPMCAGETSPNDAGTDVHTAAAG

SEQ ID NO: 17133 - protein, 197 aa, Avibacterium sp.
MGVARFVTLSNGEYFEPVNAFKTYKGKLAKLQKRLKNKVKFSQNWQKLKAKIAKLHHKIANCRKDFLHQTSSKISKNHAMIYIEDLQVSNMSKSAKGTAETPGKNVAAKSGLNQAILDQSWFEFRRQLDYKTQWQGGFLVAVPVQNTSRTCPCCGHVAKENRQTQANFECVECGYTENADVVGALNVLGRGRAIVHA

SEQ ID NO: 17134 - protein, 448 aa, unknown
  TnpB Polypeptide
VRFDIEKAEGWDMGNYRTLLLKYNLLRLPPDVAEKISDFLKIQEQYRRWASEWVNGGSLPPERMLRRFARKLLYAAKASKWLGGLKKNGIKVGKMQPPLIFDAQLRLNNERDVSSGVFVDLPRRELKIRRWSNRRGNTIILPIDKHAIKWIQRRVQEGGKLALAAVWIGRSRSSVVKLYVALIFRRNLAPVQPKRLLVIDFNALHNGVSWAVVEGEKIVTKGVLRPDTSKILHLQNTVTRLDSLCANKDVMCDAAMATKSRVWRVLRVWEDEAAKKLMRLALQYKAAIVVDLPRGESIRKLKEGSYTSEKKIFLNFGRLWERLRGLAGWYGIPYREARLYSSICPRCERKMSILQNRRVKCACGFEANRDEVPFHWAIKLFPKLIFFSNSPFSWEARGARRCGPRIQRGPPSRGEPAAGRGSQPADVRRRLLCRCVKLLASSSSAEFI

SEQ ID NO: 17135 - protein, 462 aa, Oscillatoriales sp.
MKTTYQYRFYPNTKQKLELNYWLRVSRYWYNRQLGERFDWWQMNRTAVNACPLISSIAPPRDQPNYYSQKQQLPVLKKDLVKVFHSGELLDFTRVYSTILQEVSRRVDKAFQRFVVGDVNGKRAGKPRFKTVADFRTMTFATAQDDWIKPVRKNWMYIRLPKLGVVKVRMHRPMPSGFKVKQLSVTKKADGWYLQICLEGATVPSFTPDPITPSWDNSLGLDAVLHEDVYLATSEGELLPSFKPLRHNQSKLARISQKRNQRKRGSRCRRKLAKRFAKQHQRIARARKDFQYKTAHKLVKTGKKFFFHEDLNLKGLSKRNAPKQDENGKYLPNGQAAKSGLNKSWMDAAFNQFFQLLDNIAEKAGAVVIPQNPAYTSTILCYRNEVIFTDTSIRDYWDEQHSLMVNRDINAAINLKRLGLDMFPSIKRRNGKLSIVGTVGNSTVKEILNTLNRASRSPRYIR

SEQ ID NO: 17136 - protein, 380 aa, unknown
  TnpB Polypeptide
MGNVNKWHTGSMEYRQNRMRLRKIRHLDAAAISGIECWGITTHFIPRLEKYRRIRLLITKIWLNEVDSLALANVQLNLDSAFSRFFKKTARYPNFKSRKFGKKSYTTNAVYLKKKDGSICCNISLDPVSGLLKLPKHKDPVQLRLHRSIRPDGKLKSVTVTMESDGKRYYSILMEYPKQELTRDLDTDNAIGLDMSLPKLYVDSNGNTPDFPKPYRTMESKIKREQRKLSRKEKGSKNYEKQRIKLAKQHAKAKHLRNDVLHKLSCALTDRYDLIAIEDLDMSAIKRSLRFGKSASDNGWGMFTDMLSYKAKRKGKQLVKVDRWFPSSKTCSHCGHIHKELRLSDRIYLCPKCGHTMDRDQQAAQNIVKEAKRMLLNAAF

SEQ ID NO: 17137 - protein, 313 aa, Acidobacteria sp.
MALEGYKSNHNVVYSSKYHCVGTPKYRRAVLVGPSAKRCEQVLRQVTNKYRAEIMALEIMPDHVHVLVEVDPQLGIHRLVKHLKGVSSYTLRQEFRTKWYACFSSILDSEPLPENHDAIGIDVGLESFAVTSDAEIVDNPRWFRAAEKELRRKQRHVSRCTKRSSGWKRACRRVAKLDRHVFHQRNDFQHKLSRELVNNYGIIAVEDLNIQGLAGGRLAKSIHDAAWSGFIRKLSYKAESAGRWLVKVNARGTSQQCPCGRAVPKQLWDRKHHCSACGFKTIRDHASALEILRRFKAWTAPKDRNACDSGPGP

SEQ ID NO: 17138 - protein, 467 aa, Streptomyces sp.
MAEPSEEEPVRVVGAEAKRVKREALGIADRRKHPARAALPMQRRAKEAGTQQRVYRYRFYPTPDQAEQLLQTFGACRWVYNEGLALRSGAWEQHRVSVGFAETCRALTGWKRAEGREWLREVSSTVLQQALRHLDGAFSRFFKKSAKYPKRKRKGRSRDSATYVRTGFRWVEDPERPGTGLVTLAKQSAPLDVRWSRPLPAGQVPVRLNVTRDRAGRFFLSVLVEERIEPLPPVFLPGGCEPKAVGLDLGLAALVTLDDGSVLEHPRLLKKYGEELARRQRAMHRKKKGSKNRGKARERIARLYALIGDVRRDLLDQLTTRLVRENQVLVVEDLPIANLMRPAVGKGRRRKAKLNQTIRDAAWGELLRQLRYKCEWYGRTLVIVDRFFASTRRCSACHAKGPRLDVSVREWVCGECGVVHGRDKNAAVNLRDEGMRLYWLVAAALPPGKPTPSMIRASALPDAVLAA

SEQ ID NO: 17139 - protein, 279 aa, Streptomyces sp.
VIVMQLRCSFRLYPNGPQPAALARAFGCARVVYNDALRARETARAAGESFPKSAELSKLLITEARKTPARVWLSEVSAVVLQQSLRDLDAAYRNFFDGLKGKRPRMGAPRLKSRKDSRVCALHRERRLEDHFPWRPVVAEGWQGAGEWSRSLPSVPPSLTVVKDAAGRYFASFVVETEPETPPDTDSVVGIDLGLGHFAVLSDGTNVDAPRFLRRAEKKLKRTQRALSRKAKGSKIWDKARVKAARAHARVSDARREFHHQLSTKLIRENQAVAVEDLG

SEQ ID NO: 17140 - protein, 446 aa, Streptomyces sp.
MCGSFCHAHPGLTEGLWFRVVSGRANAKRQFGHRARLALSPAQVRLVDEQAHAARTMWNLLHEWWAMLPKERRSPAAADAAIRQARKEIDWLSVLPAQAAQAVLKTYFQAWKNCWAGRADEPNFKARCRMVMSVDVPQGRDLHITRVHRRWGMVGLPKIGRVRFRWTKDLPVGKRADADTRITGARLAKDALGWHIAFRLQTYEPAPEPHTGPEVGIDVGISVPLALSDGTTYDHREWLTEKERATLLRLEQKAARRKTYRRRGEKTSRRLRRTYDRIQELRARAKRRHLDWQHKTTTDIARKYSTVVVEALKITNTTRSAKGTVDSPGKKVAQKSGLNRSIHAEAWGRTVELLTYKTSRHGGTLVKVPAPGTSRRCSACGHTTPGSRESQALFVCKNPDCGWTGNADHNAGRNILHLYRMGLALIPAAGRAVARRARRVKPTTAR

SEQ ID NO: 17141 - protein, 305 aa, Streptomyces sp.
VKSAELSKVRITRVKRTEKRAWLADVSAVVLQQALRDLEAAYKNLKDSSGRYFMSFVVDTVPDVLPEVDTEAGIDLGLSTFAVLSDGTRISSPKFLRRAGKNRAKARIKVARQHAKVADRRRDFRHKASIRLIRDNQAVYVEDLAVSGLARTRLAKSVYDAGWSQFVNMLEYKAAKHGRYFGKIGRFEPTSQDCSACGVKDGPKPLHVREWTCKACGTIHDRDDNASKNTLAAGRADRLNASQSAGKTRTKVPAPHEEAGSHPDGQVIVEGTLARQGGKRVNSTVLGFGVPEIAAGGDLRGALTR

SEQ ID NO: 17142 - protein, 376 aa, unknown
  TnpB Polypeptide
MYIGGNNMLREKAYKFRLYPNKEQRILINKSIGCARYIYNHFLAKAKENKYETYTKYSKQLTQLKKELEWLKEPDKFALQNALKDLDRAFKNFFSGKYDFPKFKSKKNKKNSYRTNKFTRKSRDTTNIEIKNNKVKLPKLGWVKFRKSKEVKGKILNVTVTKTNTDKYFISIAVEEEIKELPKKENTIGIDLGLKEFAITSNGEKIKNPKVLKKYEKKIARLNRSLARKEKGSNNWHKAKKKLAKVNEKVANTRKDFLHKLSTKLIRENQTICLETLQVKNMLKNSNLAKSISDVSWSKFVEYLEYKTKWYGRNLVKIDTFFASSQLCNNCGYKNEEVKNLKVRKWECPECKEMHDRDINASKNILDEGLKIQKVS

SEQ ID NO: 17143 - protein, 427 aa, unknown
  TnpB Polypeptide
MHTTVRFRAYPTPAQQGLWAQHAGACRVVFNLCLGLTLDVRRTRGVWVEDNVLYAQLKELRNDPDVAPWLQTTPAQVLQQAVRQHRAAWLNMGHGTRRPRFRRKNTGRQTFTMPQRVTVQRHSRRWGTVTMPGTRQQLRVRWHRTPPGTIKSATYVREADGTYWVSLVCETRDRTPTVHLNDHGPIGVDLGVAVPVATSNGDQWGFTPLTVKEQQRLVRLQRKLVRQPKQRTEDGRMVDGSNRARTKQQIAKLKARARRRRHAFAEQVSAHLTNNHGVVVFEQLPVAAMTRSAKGTLQHPGVNVRQKAGLNRAILDVGWAHLVERTKQKAARRGAVVRQVNPAYTSQTCPDCGTLDPAQRVTRSRYDCRACGYHGHADVGAARTILVRGTSHPPTGSGWQPVQDLQTPVGSMTQEQTNGHSTTQTDA

SEQ ID NO: 17144 - protein, 445 aa, unknown
  TnpB Polypeptide
MKITRSDKLLIHTNTQQRKALSSTLSVYRCYVRDLMVLINARWRYFQRFSGNEIIKAVETLIHPTSKRPVVKHAYFQHRYYKFPSYLRRVAIMDAAGQVRSFHTRYNDWLDKGMKKMPPKLTCATNTYPSLYQGQCIKFSQDSKTAFIKAFINNDWVWLACRLSGQARYLDKGKALSPLLTVKGKQWGLSQPVKMDIPLKASTDFSGNVLAVDIGINTAATCAVVNKDGTVVHRAFLDRTDKDRSYHLMQRIRSKARKATRHGNRLEKGFCSRTHRQLRQLSNNQAHQISRKIVNLATEFQCDAIVLENLKYWRPKAGSKRSSLKMRFHTWFKSMLSERIEAKAIDLGIRTSYVYARGTSSYAYDGSGKVIRDKENYANAKFTTGKRYNADLNAAYNIATRGIVKLYYPLLHKQQWSRGRPNACPTTGNPLVLSSLWLLTQQKAG

SEQ ID NO: 17145 - protein, 416 aa, unknown
  TnpB Polypeptide
MWYDYRFRAYPDRTGVTAEAERHIDIHRQAYNHTRYEYQTLDTDDANIGSAYQHQKRLTEWKDEWPVFSEVHSKGLQKTVERFYDNLSNLSEKKANGHKIGWLKWKAPREYQSVTYSQSGFKLKNTSGRTATLWLSKIGDIPIRYHRTIPDNATIKEVTLKKEMTGEWYVTFGLEVEDTALPEKPDVDDLDVEDCVGIDLGITNYIYTSDGDSVGWLDLSDEYDRLHREQRSLSRKEHGSSNWEKQRREVAKVKRRIKRKVEDFQHKLTTWLVKTYDGVFVEDLNVSGMLQQRGNARNKQDASWRGFIEMLEYKGDLYGTHVVQVNPAGTTKECAECGVESEKPLWVREHSCPSCGFKTDRDANASYNVLSRGLEEVGLGQAKVTPVETATAVETDGGRSSSVSASRVVETGSLGA

SEQ ID NO: 17146 - protein, 430 aa, Lactobacillus sp.
MNFDSNRLSVSEDKHTFDLVSLKYEEVNRMPIKTHKIRLYPNAEMVAVITELIDYNRFCWNKGLATWNTMYTESLLTKNKKLRPSGRKVRNELVKSKADWQYQMSARVLQTAVQRLQQAWKNFFNPKMPDAHKPKFHSKRDPKQSFTTDRGTVNGKFLTLDQPHESTHRFTKIKMAETLRFTGEIKTVTITKRGNKFYASITVLVEDPPRPVFTNSWDIVAVDVNVGHFSWNGGEVSTFTPRMAALHQRIKVYQKRLNRKRRDNPHHFRSKNYQRLKAKLNRTYEQVYALQDDLIHKFSHQIIRDYASPCLEDLNVRAMMMDKKKVKSLQRSLFRRFRTMVEYKASWHHRRLVIADRFYPSTQRCSNCGYIKKEDSYGGKMTLQGDSIYHQHDVYRCYECGLVINRDENAVQNLTAYAAGLPPEWATIQR

SEQ ID NO: 17147 - protein, 570 aa, unknown
  TnpB Polypeptide
MLKAYKYRIYPNNEQKIQIAKTFGCCRFVYNQTLAYRKEVYEKEKKSVSKTDCNNYCNRQLKKEYEWLKEVDKFALTNAIYNMDAAYQKFFKEHAGYPKFKSKHDNHKSYTTNFTNGNITVDFGCNRVKLPKLKGIKAKLHRNFIGQIKSATISQVPSGKYYVSILVETEHVELPHINQNTGIDLGIKELCITSAGKKYENPKIIRKYEKKLVKLQRQLAHKEKRSQNYCKTKKKIALCHEKITNTRKDYLHKMSHEIISENQVIVSEDLQIKNMVKNHRLAKSISDVSWYELTRQLEYKAKWNGRKYVKIDTFYASSQLCSVCGYQNTETKNLSVREWTCPVCGTNHDRDINAAKHYTGRGITLMDLIQEGNIGLMHAAEKYDYTKENRFSTYASWWIKEAMQRAIDQQSREIRVPVHVAENMKKVQKISKDLQQKFGREATPEEIAAEMKDKSPEFVKEILSYLQNPVSLETPVGEDGENNLGDMVEDKDATTPEDAMNQLVQKEEVQELLESLNDRERQVIRLRFGLEDGKTHTLEEIGDELNVTRERVRQIEARAMEKLRSKATKL

SEQ ID NO: 17148 - protein, 410 aa, Fervidicola sp.
VPLITLKAQVHADPQTEAVLKDAMFCATKIYNGLLWHLRKEYKETGKVNISRKNLNRILKELPRAKGYYSMSIQLTRDEVREAYKSFFALKKKGLTQHEAPGFRRKNCLSPLKYVQSGFMVDGDRVTLSLGTSREDGVKQVSFRISHRPDIEYERVRELSIAYDKVSGRIEARLVVEVKARENNGTGKAAVDLGETVLMACAFDDGAVMLCSGRLIKAIRRYWQKVRANLKQNSRRWRETAHREKKQVEQLLHAATSHLIAECVQRGVKEIAIGNLNGIRESIAYGDRLNQRLHAWPYRKLINMLKYKGAMAGILVRDNVDEKSTSITCHACGNVMASNRRYRGLYICSCGWRAQADVNGALNIYERVYQVSPVKGSSGRVARPAVVSYHLGWHGVAEPKRRDKTLCASA

SEQ ID NO: 17149 - protein, 418 aa, Halobacteriales sp.
MEVRRTAPVKLVIPDEYHDDLHETADQFLYCANEASDYCRDNTDYEDCITSNVKARDALYDRLRDETDLTANLVQEAIRRAVHAVDSGVDRWKNGKRTNKPEFTSWSMVYDKRSATFYRNKISLSTVNGRIKCDFKLPADSPTPYEKYVLSEDYEFRTSTLQYDRATDEFYFHIKTWKVDDAGEAIEIEGSDDTGHQTVLGIDLGVNSLAVASTGTFWSGDEYDHWIREFEKRRTEMQQRGTQAAHNAFLRLGRRERAWRKQYIHTVANELVTEAVEHDCDVIVVEELTDIRERLPHAEWHHVWAFRRLVEYVEYKAPERGIAVEQVEPDHTSQRCSHTDCGFTHEDNRDGEHFECLKCGYQINADYNGAKNVGLRYMRKRQHRLRSSPMSGGVDAPVDVRINGGMLNGDGSRPPTES

SEQ ID NO: 17150 - protein, 362 aa, Oscillatoriales sp.
MMLLGFKTELKLNNQQRTQLAKHCGVARHAWNWGLWLTKNILNHNQANPDEKLKFPTAIDLHKLLVALVKSENAWYYECSKSTPQQALMALREAWKRCFNKTAGVPKFKKKGRRDSFTLEGTVKILGNNKIQVPKIGILKTYERLPQVSIKSCTISRQADRWFISFRFDVEQKELGNASVVGVDLGIKALATISTGEVIFGAKSYKKYAAKLSRMQWLNRHKVIGSSNWKKAQIKIARLHKKIANIRKDTLHKLTTLLAKNHGVIVVEDLNVSGMMANHKLATSIADMSFFELRRQLTYKCELYGSKLVIASRWFPSSKTCSNCGTKKETLSLSERVFECSHCGLVIDRDLNAAINLSKTVS

SEQ ID NO: 17151 - protein, 444 aa, Holophagaceae sp.
MIVSRIYPITDVRPSTRRAIREGQMEAGRLWTAICGIHREARKAETKWPNRDALRSISKGTQFALHSQTIQAVVECFVTTIDTTKLLRKTHPQMGMRYPWKEKRFYPLMWPAQAVHVEATRIVLPMGRGRKSLVIPRPEGFPDAPGGVKVCWNGAGYDLHMAVEAPAEVQSRATGGVHATVDLGEIHQVAIATNTGKALVVSGRGIRSVKRYRNVALGQVLRLRSRCKKGSWRYKRLGWTISRVMHRALRQVRDLRHKGTRKAIAFCVENHVSSIYVGDPDGVRKRPCGRKHNQRMSQWEYGKDMQYLDYKSRKAGMECFSGTERGTSSHCPACGHRHRPKGREWVCKKCGFRGHRDVVGAVNMHPLAYGEKIAFPSKITYRRAGITQGTKQPLRNARRSRPDPGLGASGPVLSRFATGPTTQIAGSPQGLGQAEGLRLEAHPL

SEQ ID NO: 17152 - protein, 290 aa, Streptomyces sp.
MCCARSPTPVTFRPDAAQPYDDRCLSWQIDEQTVSIWTTAGRIRGVRFTCSEQARKPLAEYRKGESDLVHRDGMWLLIATCEVSEAEQYEPDGFIGVDLGIANIATTSTGYRAAGRDLNRRRKRHHDLRRKLQAKHTKSAKRRLKNRRRKEQRHAANVNHIISKKIVAEAERTSSGIALEDLGGIRQRARLRKPQRVTLHSWAFAQLGAFVEYKAQRAGVPLVYVDPAYTSQECAECHHIEKKNRVDQALFVCRRRGVVAHADRNASHVIGQRGEIVWNAGRESRVPATP

SEQ ID NO: 17153 - protein, 251 aa, unknown
  TnpB Polypeptide
MLLSKKTSIKVSREYANLIGHMCYAASKFWNVCNYERQHYKETGIEQYPDWYYQKKTHKEDLWYKQLPSQTAQEVCKLLGKAWKSFYDLKRSGGIETPRPPRFKQESIPITYMQMGIVHERDMGRVRLSLPKALKKYMEETYQIHENFLYLENKIFRGMDQIKQLRIYPPEKGNCKIIVVYEVPDQEELPQNGHELSIDLGLHNLMTCYDSGNGKTFILGRKYLALERYFHKEIARVQAQWYGQQSGKGVK

SEQ ID NO: 17154 - protein, 471 aa, unknown
  TnpB Polypeptide
MKRTVKIKANCLNKENEILLIGTVQRNIKNYVWSRYGGIGSLLKQSGWTIRDELRQKNLLSKKITKTFSRVAIEKSASTIKINWITTKKKVKKAITQNENLTEDDKHYLYLCLKHTPTLYSILNYKKVDYQTDYLKDLKIDVHRLNNLLRRYVRRYKTKSHTNKTNIIIDSNIYKFDFNNKIFTFTGKKKNSRIEISLIGNVPKLKGTLELVKNQKSNQYYLHVPLDRIINKKKMTEHSDILGLDVGITDLITLSNGSVYGSNSAELFYTLSDNLVNKNRSRLFAHKRKLEQRILTEQDKSKKFTLKQKLKNLEENNLGYQKRNTKIGKYKSRIISHINCELNKMIKEENLKEIVREDLNWVSKKKNVSRKQQNRFSTWTKGVLLERLSVKLTEKGIKETIVNPAYTSQVCCKCNHLGIRNSKEFKCSNCSLSIDADFNASINIKKRKYIEEINIYTPYKQVKKYYENIPV

SEQ ID NO: 17155 - protein, 471 aa, unknown
  TnpB Polypeptide
MKRTVKIKANCSNKENEILLIGEVQRNIKNYVWSRYSGIRSLLKQSGWTIRDELIQKDLLSNKITKTLSRVAVEKSASTIKTNWITTKKKVKKAIAQNENLTEDDKRYLYLCLKHTPTLYGILNYKKIDYNTDYLKDLKVNVHRLNNLLRRYIRRYKVKSYTNKANVILTSNLYKFDSRNNIFMFSGKKRNSQVKITLIGNVPKLKGTLELVKNQKSNQYYLHIPLDRVVSKKRMTNESEILGLDVGITDLITLSNGSVYGANSSDLFYTLSDNLVNRNSSRLFAYKRKLEQRILKEQDQSKKARIKLKLKNLEENNLGSKKRNTKISKYKSRIVSHINYELNKMVKEEDLKEIVREDLNWNSKKKNVCRKQQNRFSTWSKGILLERLSLKLTEKGIKETIVNPAYTSQVCCKCNHLGIRNGKEFKCSNCNSSIDADFNASINIKKRKYIEEINIYTPYKQVKKYYENIPV

SEQ ID NO: 17156 - protein, 416 aa, unknown
  TnpB Polypeptide
MAIEATRTYVGFIQNHRQVSEGLNSLGDSASKVWNVARWMADRIWNHTGEIPDEGTLKSYMKKQPCWKDLNAQSSQKVIEELSGAFQAWFELRQTDDKANPPGYRKHGDERPLSTVTFKEDGFKHDPENNRVRLSKGKNLKDNRSDFLLCEYQTRPDVDLSEVNQVQNVRAVWNGDKWELHFVCKAEVESTDSAGNRVAGVDLGIKNTATVAFPDEYVLYPGNLLKQDRHYFTQVEYDTEGENGPSEKSEWARSKLTERETHFYHMLTNAIITECVERGVGTLAVSWPEDIRESDWGKTGNKKLHSWAFDRLYQYLDYKGETRGVEVLKENEWNTSEACSRCGDSTKSNRVERGLYVCSSCELVANADCNGAENMRQKITSSPHSEDRSNGCVAQPSTYLFNRESGRFAPREQVVS

SEQ ID NO: 17157 - protein, 347 aa, Bacillus sp.
MLFRSYKYQLKLSTSQQKIFDILYKYMQVSYKTLYPLFKDNKKPSINLLRTTTTPLFEKYQFSQLYTDIIFPQLISNIQKNPDKFESIFPIKFKTFLYDKQLNILSLPFCQNIKISHQRELPSKIYNVEIFNKNKKWYVNFLVAKKQKNKKQSDLRSIGIDVGLKQFAFLSSGQIVSNPRFYDKIKEKISLEQKKLSKKQKGSNRWKYQKTKINKLYTKLYRQRSDFLHKLTNYLTEKYDVIGIESINIRDLQKKKHLRNSLADASWGEFITILQYKCDEKGKHLIGVERFFPSSQLCSNCGNKKWMPVHIRTYSCMNCGTETDRDFNAALNIENRAKQIFLETIYV

SEQ ID NO: 17158 - protein, 413 aa, unknown
  TnpB Polypeptide
MYYADKYRLTPSNAHREELDRHRDICRQLYNHTLYRLNEYQDEHGELPSMTTLRSKLPDLKQWWDDLSDVYSKVLQTVVERLFDNLKGLSALKDRGYGVGHLAWKPPREFRSFTYSQSGFKLDKKGGQTVLSLSKLADIPIRLHRAIPNDAQLKQVTLKKEPTGEWFATFGVEMDREPPDLPENPEKCVGIDVGILTYAHDTDGTAVGALDLSDERERLEREQRKLSRREHGSNNWEKQRRQVAECHADLRRKRRDFLHKLSAYYAREYDLVAVEDLHVKGMMESPSNSRNTAYAAWGTFLSLLEYKCERAGTHFVAVDPRGTTTECASCGASTDKPLWVREHSCPACGFEADRDANAAWNILSRGLDDVGVGYSEETPVETALPVDTHVSAKRVVETGSPTLCERVSASRAG

SEQ ID NO: 17159 - protein, 332 aa, Leptolyngbyaceae sp.
MFLAVQKDVFSPGKELDGLLCDLARLANNLYNQAVYESRQYFFASDRKPWKVLSYPKLYAALKERENSKLLHSQAAQQVMKSAYEAFKSFKALHKLFRLGELEHEPKLPRYRTKGGLYQVVFTGQSLSVKDGLIRVPLGRGGAEAFDRDCFHIPLPERLKEVEIRELRFIPTNGHWVVEFVHESLETPALSCKLHSESVLALDPGLDNLLAGVTNTGQAFLIDGLPLKAKNQWYNKQVARLKSILTCGLESTRGVTSKQIQRVTHKRNCFVRDYINKAARWVIDFCLDNGIDTIVYGRNKGQKNGVNLGHKTNQEFVQIPMLSCLPGLGSYA

SEQ ID NO: 17160 - protein, 351 aa, Actinocrispum sp.
MMICVKQVVQVRLLPTPEQASALTSTLHTCNLAASWLSEQIHTCRVHRKFDVQKRFYTELRERFGLAAQPAIRVIGKVADAYTTLRANLQAGNYGPPGSNRRRKVEGTAIVFRPDAGQAFDARCLSWQLGDAGREGAVSLWTTAGRLKGVRAVGEPRQMAQLRGSQIGETDLIHRDGMWFLYATVDVPESALTQPVNGFLGVDLGIVNIATTSDGDRMSGARLSRYRKRQQRIRRRLQAKKTSSARRLLKKRRRKEQRFATDVNHQISKRIVAEAERTGRGIAVEQLTGIRDRVRLRKPQRATLHSWAFAQLGHFLVGHADHNAAHNIAARGEVCWGEVMRPHAAPTLAAS

SEQ ID NO: 17161 - protein, 539 aa, unknown
  TnpB Polypeptide
MESGDKMKKIRSAEETAAYKAEMIVKKAAKSEKMKDKNIKAAKYPVILGPQQRQIFDYWIVLGKELYNLLVNQRIEAEKYSQEQYFLAHPEKALERARKDGEHQAKVEKEILEGKRKPKKVHLTPFLSHVQMRHEGLRNINTDVITFTCGASTIEELILSHDGEIYTNKNGIKSIRLSWQQQQKYLTTFKKVCPEFAVMPAIYLNNICKQVDQAWKKYESNKASYSKKPTKRFPKAQFVHKEDDFSLKGAEGVDNNSRVRVAALKGQRNARVYGIDTKRFPQGIKIVYFKPVPGDISVTALVKEGSKYFLNLTFQETKKHWPSSSPHVGIDLGITRNIQLSTGDYFNLPIDQIKELENKKKKAQRGLKNKEINSKNYKKAQKKIAKIDAKMAALKKYHTALFATEIVRKHEIIIVESLAVKNMTKSAKGTIDAPGKRVAQKSGLNKAFLRVAPYAIKLALKQKAAEYSRTFIEVPPAYTSLDCSGCGHRSHKNESRLTQSDYICSQCGLEINADHNAAINILNKGLAYIKSEDQLEDAI

SEQ ID NO: 17162 - protein, 435 aa, unknown
  TnpB Polypeptide
MGSYEAVKVRLDPTPRQERLMASHAGAARFAYNAGLAHVKEALDNGEPVDWSHYSLRRWWNENKDELAVNKTTGEVWWSQNSKESYSGGLRSLAQGLSNWSKSRKGQRKGKRVGFPRFKSKNTVMRFAYSTGFTAPTAGDPYGLKLPRIGRVHCMENVYDRVNGARLVRITVSRRAGNWCASLTVEREPTAPATAPKLGAVGVDLGVKNLATLSDSTVIPSPRALSAKLRALRKAQRALSRKVKGSARREKAKGRVARLYARVADVRADVINKATTMIAENYSVVCIEDLNVAGMAKNRHLARSLSDAALGEFRRQLEYKTARTGAVLRVVDRWFASSKTCSNCGVAKAKLPLSERTFNCNDCGLSIDRDLNAAINIEVAGSAPEMLNSRGEDVRRAGLVSGSADLGEARTKQSPTGDVRLGADLGNEVMRPRIN

SEQ ID NO: 17163 - protein, 462 aa, Marinobacter sp.
MLEIPLYKKLTPILAGCNINNMSKTKSTHIRTQQIVIRKRHEAFRGAGYCAQIAHRIKNATSYLMQHHPDGKDQTLSHRDADKWLKKNNRELYTKLPSAIAQRSTQIVGQEWKTFFAALAAFKKTPSAFKARPQKPRYARKAATVHIGRNGFKVVEGTVYFANDVLPPVKTQFRFSQNWNALVVDTVALEVRIVPKGNCFIIEIIYDESKIVEAGCFCRLLDKSRKAGIDLGINNLIALATDQPSVRPVLINGKALKSINAWYNKRVAKLRSQGKYAHIRAVTNKRHRRMKDLLHRASSKVASCCLENNIGTLVIGYNANWKQKINIGKVNNQKFVDIPHSILIAQIQYKCHGLGITTVIQEESYTSKASALDNDFPPVYGEKPKNVVPIFSGKRIRRGLYQSKHGIINADINGALNILRKATGEALGLACKGFVSNPIMMDLMPHKSIVIRRENAAQPMAA

SEQ ID NO: 17164 - protein, 348 aa, Microbacteriaceae sp.
MTISAMEESYKSLGNSGSYMKCRKEWTEQFKKEVPWWDEIPAHTLYGAMRDAEKDYRLVIKKRAKGEKHNLPRCRAKTQRSFFILGNGITERGVYVRRLGKMKSSEALPNKPMDSRIIFEAGKWWLRTPEKVQAQVGDNQARVCSIDPGVRTFATIYSPEGIGKIQSGAFGRIVRLLQHLDDLISRTVKEKCKQRKERMKLAQARMRLRVRNLINDLHFQTISWLFSKFDTIIIPESDFTSAITKATRKIRSKTVRALMGYSFARFRDRVAHKASLFGKTVVRVCESYTSKTHNITGEIVNNLGGRKTITSQGLTVDRDINGALGIFLKALLAQPAGSNLPQCERKGT

SEQ ID NO: 17165 - protein, 289 aa, Escherichia sp.
  misc_feature (64)..(67): Xaa can be any naturally occurring amino acid
VKRLQAFKFQLRPGGQQECEMRRFAGACRFVFNRALARQNENHEAGNKYIPYGKMASWLVEWKXXXXGLDAGVAKLATLSDGTVFEPVNSFQKNQKTLARLQRQLSRKVKFSNNWQKQKRKIQRLHSCIANIRRDYLHKVTTAVSKNHAMIVIEDLKVSNMSKSAAGTVSQPGRNVRAKSGLNRSILDQGWYEMRRQLEYKQLWRGGQVLAVPPAYTSQRCACCGHTAKENRLSQSKFRCQVCGYTANADVNGARNILAAGHAVLACGEMVQSGRPLKQEPTEMIQATA

SEQ ID NO: 17166 - protein, 427 aa, unknown
  TnpB Polypeptide
MPELQTLTTIAKIDVDNSGALVLGLLGHSATKLWNTALWDATERWNNTGKIPAYQEQAKRLKSNRWYKNAHAQTSQAVLEEQWQAHKSWFALRKTDPKANPPKFRKKTTVSTVTFKKDSIRLNGETLRVGVPEKVYGRKYLSLKLHFPPTHRVTTDNIQVVRVVCGRGEFFAHIVHRVVLPEAEAGGHVLAVDLGICRLAGTACTDGKSKLYSGGELLALERYFEKEKSKCTESRSRKCFTLNSKRSRQRKHLLHALTRNLVRDAKARGVSTIVVGDLQGIRTDKEGEAKQWGRENQKLHAWPYAEIVRQITYKAKLEGMAVEQVSEQYSSQICCACGKRRKANRIHRGVYQCKTCGVVVHADINGAWNILKTYLRGAESLVTWSSGGLAPPTVNRFAWRNTAPIVHEPGTWFGVPPTAAANHRRAA

SEQ ID NO: 17167 - protein, 349 aa, unknown
  TnpB Polypeptide
MVKEMVEYAVEHRASQSTLHRVFYSRFRERYPWLPTRVIKGAYRDAVRRARSFRELKKKGKAYTDKPEVRRVAITYADSQDWRIEDGVIKLRTHIGWVELHYRNHKQLHRYLYSDWKLTEELKFKLAGRRIVVYLTFIKHFEVEYDPRNAVAVDVNENNVTIAVFKSGALAEVYRVKTGLGRIVIAYAERRKKIAEGSSTKIREVRKKLRKLRERGRKLDILMKTARFIERLALENKAVVVIGNIGGKAKEKMESGKNAKLRHRIHQWSVSTLIRLLEEKPVHVVRVSEKGSSSTDPFTNVRIEKYSPLVIRIAVRGAGRVKVFKIVLRVANVNGRVLERMLLELLTLA

SEQ ID NO: 17168 - protein, 429 aa, unknown
  TnpB Polypeptide
LKTLTRVERHVIKPTDKRYAQIASICHKSKNLYNYANYILREAFITDKKLPKEYDLTTLLAKENQADYRSLPAQTSQQVIKLLYRNYKAFFKALKSYRKDKSKFTSNPKLPKYKKKDGYSIAIFTNQQAKLKDGYITFPKSVNVKPVKTNASSIEQVRIIPKATCFIVEVVFERTITSYEKIDGSVASIDLGVSNFVTFLDNQANIPFIINGKEAKAYNQYYHKRLAKAQSLLKKDEYVSNEIRRLAFRRDMFMRNFSHQSSSKIIKALKNRKISTLVIGLNADWKQGVGNGKRNNQAFVSLPHKSFIEQTVYKCEEIGVEVIITEESYTSKIDHFAQEPMEKRQKYLGKRIHRGLFKSSTGKTINADANGALGIMRKVFPEKVLKLIGDRGVAFTPVIVNPVNRLKANVNALNDRIGFYATKEFVNAS

SEQ ID NO: 17169 - protein, 436 aa, Cyanobacteria sp.
MATTRRVTFKLYPKKSTEQKLHYARKAHCDLYNAALSHRKTQYQQFGSSVSYFDQQNSLPEFKEELPEYKEFGSHTLQATLKRVDFAYQRFFKGLGKSPRFKKRRNYRGWTYPDKAGWKVHSNGKNGYFELKDLGLKIRMRGQARTWGNPNTCTIFFDGKDWYASITVNCEPTRETGCGAIGLDFGCKVAIATSEGEFIEAPKFQAKAQEKVNQLSKNLRRKRRPEKRKVKASRRWKKHQKQISRVKRKVSNQRHDWSHQVASQIVSSNSMVATEKLNLTGMTRKVKGKRKKQKTGLNRNLLDVAIGMTKDNIKYKVEEAGGIYTEIPTRTVKPTQRCAKCWKLTKKTLSDRVHNCQHCGHSENRDINAAQVMLESALRGGESASLDVESPSSTSCGRTSHDSEETSESVSSSMRQLGAKRGATQAELGSALESAP

SEQ ID NO: 17170 - protein, 459 aa, Cyanobacteria sp.
MSYQTTKLLLTGNITDQTRDILVFLCHEANRLWNTAVYQVRQAHFSTCGIREFFDQNDLLRRQFKDKKVKVSYSGLCKEFKENPHYQWLGGQQGQQVLKSVIEAFKSYNKLLEMWFNGEIDHKPKLPSYRTKGGLCEFSFPAQSLRLNYENGCWLLPMSHLIKDYWIEEEFSIPSVNYIGERNIAEVRIFPQHGKLWAELVYQVKEKQAVGLDYSQALGCDPGVKNLLTCVSTLGKSFIVDGHKIKGANAEYNKKVAKYKQGKTDFYWDEYLDELTHKRSCLMRDAINKAARLIINYCLKHRIGNIVFGWGQAVKTNCNLGSKNNQNFVQIPTARLKNRIKELAESVGIKFTETEESYTSKSSFLDCDELPVFGGEKPASWKPSGKRVKRGLYQTRNGQLINADANGAANILRKVSTQLGLGLAEVRREVLSLPKRYDVFSSLKKLYRKCGETRLNLVS

SEQ ID NO: 17171 - protein, 344 aa, Methanosarcina sp.
MILTYKIKHNRDFSEELQKARKVAEFGIKHRTLSSKDVAHIGLKSMISNQILRKYARNKKVKSVKNIKLTIPNQGIKIDADKHIIRIPCVKLALEYQFPEFEKINQIELGKTFAYVSVTIPENDIQNPTNYVGVDRNTTGHIATVANPETGKVWKLGKKGLHIHTKYKNIRKSLQKKGKYRKVKQIKDRESRIVKDLNHKISKKIVEIAVQNNSGIKLEDLTGIRQTAKQRKSFRYSLNSWSFYQLQQFIEYKAKLQGVEVVYIDPHYTSKSCSRCGLIGNRNGKHFKCPSCGHVDHADINAAFNIAVKDVNVDQSIEERDSIEGNTDIPKEALGSADGSILLS

SEQ ID NO: 17172 - protein, 378 aa, unknown
  TnpB Polypeptide
MLRAIKVRLYPNKTQEQTLNKVLGCYRFVYNHMLALKQNTYNDNKTSLGLGDLSKYFHGILLKDEQYVWLKEQNTKVMKQAIRQMLTAYDRFFKQHNGFPKFKTKKDKQSALFPIDTISKRNMFETMHITLIKSLKNMKFRCSDLYHKRLQTYKDKIRSVTLSKTKSGNYFLSILIELPQEEVVKFEPTNKHVGIDLGVKDFVITSDGERFENKHFFKKQEDKIKRLQRQLSKKQKDSNNRNKQRIKIAKAFERLTNQKNAYIHSVTNELLTYYDTVFMEDLNTKGMLKNHHLAKVIQEVCFYQFKKTLVNKTLINNKRVVLIDRFYPSSKTCSVCGYKKQDLKLSDRFWSCPICGKYHDRDLNAAINILHEGERIIN

SEQ ID NO: 17173 - protein, 378 aa, unknown
  TnpB Polypeptide
MLRAIKVRLYPNKTQEQTLNKVLGCYRFVYNQMFALKQNTYNDNKKSLGLTELSKYFHGTLLKNEQYAWLKEQNTKVMNQAIRQMLTAYDRFFKQHNGFPKFKTKKDKQSALFPLGAISKRNKFNDRKITLTQPLKDIKFRCSDLYHKRLQRYKGKIRSATLSKTKSGNYFLSILVDLPQEEIIKFEQTNKQVGIDLGVKDFVITSDGEVFENRHFFKKQENKIAKLQRQLSKKQKGSNNRNRQRIKIAKTFERVINQKKYYIHSVVNELLTYYDTVFMEDLNVRGMLKNHHLSKAIHEIGLYKFRQILVDKARNNYKKVVFVDRFYPSSKTCSTCGYKKRDLKLSDRKWTCPNCGTHLDRDLNASVNILHEGERIIN

SEQ ID NO: 17174 - protein, 368 aa, unknown
  TnpB Polypeptide
VKKARRIRIYPTQQQKQLFKQWFGVGRKVYNTCINHFNEKDIEVKEWMNMSTLVLHSLTEDYIKAVPFQIKKIAVKDSYTSWRTNCIKAKQTGKPFKLRYKSRKNPTQSCYIPKQAVSESGIYYTISGKLKFSEREWLKNDICDCRLINDHGRWYLSIPQKIRTMPTENQGSIVALDPGVRNFLTYFSEDGRFGWLGIHAFDRILTLNLKRDKLFSKFALTKDKRGKCNLKRTLNRTYHRIQDLVNELHWQCINYLVHNFSVIVFPPFEVKGMTKKGRKLRKSVVRSMLALRFFEFKERLKQKCKECGVLYVEQNESYTSKTNSFTGELIANLGSKEWFTYDGIKVHRDLNAARNILLRAMRDSSAVG

SEQ ID NO: 17175 - protein, 437 aa, unknown
  TnpB Polypeptide
VKYKFFSFHFLFIILILQIYKKIFDINKIISIFVSDMRKINRTYKFRLYPNVEQTELLAKHFGCTRFVYNYFLNQRKEQYKLTGKSDNYYAQAKYLTELKNQEETSWLKDVNSQTLQFAIRSLEAAYTNFFKKRAKFPNFKPKHSKNSFTVPQFASVVDNRLFIPKFKDGIKCRVHREIKGKIGKVAITKTPSGKYFVSVFTEEEYVTPLKKTGKSVGLDMGLKDLLITSDGEIFKNNRYTRKYEYKLAKAQQHLSRKKKGSRGFENQKLKVARLHEKIANSRADYLHKCSISLVRRYDTICIEDLNVKGMERNHRLAKSITDASWGSFVSMLTYKADWNDKKVVKIDRYFPSSQTCSVCGYINKDIKDLSIREWECPICHTHHNRDVNAAINILKIGLNNTSAGTVDYTGGEEVRVNQTKDHSSMKSETNESLSHG

SEQ ID NO: 17176 - protein, 362 aa, Rhodococcus sp.
MCRIGSVNVPRRYFVTKTKGYRQGKAQGVKRIVVVKLAPTPAQYVALKSTLELCNAGANMVSQFAHTATDRRPFALQKQVYAQLKARGLSAQPAIRVIKKVADAYATRRANLLNGNYGTPESKRYAKVAGKAIVFREDAGQPFDDRCLSWRIDRSTVSIWTTEGRMRNVGFVCAPWQLKMLADRKGESDLIFRDGSFYLHATVDTDAPDQLVPADDPTGWLGVDLGIVNLAVTTADDPAELDVRWSGGAVTARRKKNGTMRSALQKVGTKSAKRKLKRRRRKETRYATDINHQLSKTIVAQAQRTGQGIAVEDLSGIRDRVRLARKQRQQLHSWAYAQLRDQITYKAQAAGVPVQVINPQYQ

SEQ ID NO: 17177 - protein, 413 aa, Rhodococcus sp.
VKRIVVVKLVPTSDQFAALESTLLVCNDIANEMSGLAQSMRQRSRRALQVALYPMVKARGLSAQPTLHVLRKVADAYTARQANLTNGNYGQSGSKRYMAVAGTAVEFRPLAAQPFDDRCLSWQVESSTVSIWTTVGRMRGVRFVCAPWQHALLADRKGETDLVYRDGHFYLHATVDAPSPEPAAPPDTAVGWLGVDLGIVNLAVTTDDDPADLDVRWSAGAVTARRKKDADLRASLQRVGTKSAKRKLKTRRRKEQRFATDINHQLSKTIVASAQRTGRGIAMEDLSGIRDRVRLARQQRTQLHSWGFAQLRAQIIYKAEMAGVPVAVVDPRNTSRTCSQCGYCDKANRVSQATFRCRQCQWAGHADHNAACNIAALGHRMYRAAQSTAPIAATLPTASGNVSSKPGPLRPSS

SEQ ID NO: 17178 - protein, 375 aa, unknown
  TnpB Polypeptide
MARRKKKTDCVRIAYKYRAYPDENQQILFQKTFGCCRKMYNLMLADKIEYYHQMKKMLKVTPAHYKDMYPFLREVDSLALANVKANLESAYERFFDKVSKFPKFKSKKTARQSYTTNVVNNNIVLNEQSIRLPKVGQVRIKVHRKPEDFWNLKSVTVSQECDNTFYVSVLFEYPKPVIQKVQVPKTRIGLDYKSDGLYMDSNHQIGTNHKYFRESQQKLAKRQRQLRHKQCGSNNYQKQQLKINKVHRKIARQRLDNHHKLSTEIANQYDMVCVETLDMKALSNKKFHNGKATMDNGYGQFLNLLEYKLTNRGKWFIKVDKWFPSSQLCSSCGHRQKLELSERIYECPQCGLHIDRDYNAALNILQEGLRLLAEA

SEQ ID NO: 17179 - protein, 432 aa, unknown
  TnpB Polypeptide
MEYSHRYRAYPTQEVADRLDHHLDVHRQLYNHVRWDYENSPENDKPSEYDQNNKLPEWKQRWPVFSELHSKAAQATVARFHHNLTVLSELKESGYNVGQLKRQAPTEYRSVTYNQSGFDLDEKRGHDKYAYVRFSKIGWVKIRYSRPIPDHATINEVTFKKETTGEWFVSFALETDDDNLPEKPDVDSLDAGNSVGIDLGIRNYIHTSDGKTVDWLDLEDDYDRLRREQRTLPRKDHGSRNYERQRQKVAKVKRRIRRKVLDYQHKLTTWLVTEYDAVFVGDLDVTGMLRGDGNARNKQDAAWRQFINLLDYKADLYGTHVVQVEPAGTTKECARCGVETAKPIWVREHSCLSCGFETDRDANAAMNVLQRGFAELGLGWPESTPVETVTVPRNSSSFWCANESKALVNATDTTQFASVSASHVIETGSLPS

SEQ ID NO: 17180 - protein, 368 aa, Veillonellaceae sp.
MANTRGYKFRIYPNKTQQMLINRTLGCCRFLYNHFLALRRDEWKANRRGIYYKESARLMTEMKRREETSWLREVDSMALQESLRNLDNAFLRFFQKIARYPRFKSKHRHAQSYRTRNQSNGIRLVDGKLKLPKIGFVRIRLSRTFDGKITNATVSRTASGKYFVSLCVEENVSFAPCGTGKVGIDVGLKEFYSDSNGNTVENPRLIRCFQRKLRREQRRLSRKMPHSRNRDKQRIRIAKVHERIKNIRRDFQQKLTTQLINENQVIAVEHLKISGMLKNRKLAKAISDASWYEFFRELGYKAVWRGAQVLKVDTFYPSSQTCGNCGYKNPLVKNLSVREWTCPECGTHHNRDINAAKNILAKALEQVA

SEQ ID NO: 17181 - protein, 425 aa, unknown
  TnpB Polypeptide
VVVTETLRTFRYHLYPTEEQEAVMGGQLRTLCSLYNLLRNEKITKHLSLNKLRMMALEHRGNVHSQAAQNVASRVNSAFKNYFEGRTRFPKPKQAEKYRSMTYPQSGFRLEGKMVKRGKRTELAGKLYVSKIGHVRIFMHRPLEGKVKTVTVKHEADGWHACFSCEADEPQKKPIEQALERVAGGDLGLKKFLTLADGSSVDAPQFLRRMEKKIKRLQKAFSKAKKGSRNRKRLGVRLARLHLHVARQRSSEQNQVIALLYANADVLGLEKLQVENMLKNHCLAKSIADAAWSQFVRKAEFKSRVLGKYFVPVDPWGTSQFCWRCLSWAPKQLNERVHVCPVCCEVLPRDQNSAKIVKTLVLTWMSYAHGRWVNTPVEQKPLPSLRGQVSAVKREAPALRPGRTSPSPLLEEDNFPIVSSNVFAQ

SEQ ID NO: 17182 - protein, 242 aa, Micromonospora sp.
VVHRTARVALRVTSGQRRRCFGLLRSAGDVWACVLEVNSWRRRRGYAPLVGYQGLCRELAASGPGTFDDLDSTGARSVLRRFSDAWFAAAKRRNAGDGSARFPRRRRRLVPVRWYHGTFRIDGRRVRIPAGKGRPSLWVRLARQLPYPVEQVRSITLLSEGGHLFLDVTAEVPIATYPPGEEPDPARVAGVDLGIIHPFAVAGPDGEGLLVSGRAIRAEHRMHLADTKARRRAVARRAPGRV

SEQ ID NO: 17183 - protein, 201 aa, unknown
  TnpB Polypeptide
MVNNVGLQPVVIKGGAIKSVNQFYNKRKAEMQSQLKKETGRDWSKNLQKLTDKRYEKIKYLMHCASKKVVDYCVENEIDTLIIGLNKKWKQENENKQNFTYIPFDMLISQIQSKCKEYGIEVVMTEEAYTSGTSFLDKEQPVKENYNKERRVYRGLFVANNGKTINADVNGAYQIMKKVVPDVFDEGIEGVGSHPIRLEIA

SEQ ID NO: 17184 - protein, 401 aa, unknown
  TnpB Polypeptide
MPKKHYSIIVEKMAHYTYKFRLYPNKEQQYRLSAHFGCCRFVYNHFLDERKTAYEQSGESPNYYDQAATLTKLKKEKTWLKETNSQVLQFSLKCLQAAYNNFFAKRAKFPRFHAKKNKQSFTVPQHVKVQDGKLYFPKFSDGMKIKLHRQIEGEIKHATISKNCAGQYFVCIIVERNIGLLPKVKREVGIDLGITALATPSIGKAFENIRPYRTLQKRLRALDKDLHRKKLGSKNREKARYKVARLHNKIANIRNDHLHKVSRRIVDDNQVICLEDLNVKGMMKNRCLAKSIADVSLSELVRQIEYKSGWYGRQVIKIDRWFPSSKMCSSCGYVMETLPLDVRSWCCPRCEVKHNRDRNAAKNILVEGKRTVGTTELACGLGVRLESNRKRLRVKQEAPTL

SEQ ID NO: 17185 - protein, 369 aa, Anaerolineales sp.
MHKRTYKYRLYPTKAQQSALQKSLDACRWVYNQALAVRKDAWEQEQKAVSRYDTIKMLPIWKQEHGILKNAYSQCLQETCTRVDLAFKAFFRRAKKGQKPGYPRFRGKERYDSFTYPQSGYVLLDKKRLRLSTIGELKIKLHRPMGGKIKNLTIRRDGVGNWYACFSCRVDKKRLPQIDTVVGVDVGLTSFATYSNGEKIDNPRFFRREENELAKEQRRLSKADKGTPERAKRRKVVAHIHRRIANKRRDFAHKLSRQLVNNFGVIAFEKLDIQDMTDGNWRSMNKSISDVAWKQFVQFVAYKAEDAGRNFVQVDSHNTTKMCSCCGRLVEKDLSVRIHKCPFCGLVLDRDENAAINILRLGIQSLALA

SEQ ID NO: 17186 - protein, 368 aa, Anaerolineales sp.
MRKTFRYRLFPTKAQQTSMQKSLDACRWVYNKTLEVRRDAWQQRQESLSRYDTIRMLPGWKAEHSLLSDAYSQCLQEACTRVDLAFQHFFRRVKAGEKPGYPRFKGDRYKSFTYPQSGFNLSDNGSLRLSKIGKVRIKIHRPIKGEVKALTIRRDVLGNWYACFSCVVEPQFLSPCHRVIGVDVGLSHFATLSSGEHIPNPRFFRQDEKALAKAQGCLSKCEKGTPEYRKCKRVVQHIHHRVAGRRHNFAHQLSRRLVNEYQIIAMEDLNIQDMQNGNWRSINKSIADAAWRQFIDFTAYKAENAGRLSPRIDPGGTTQDCSGCGGIVPKDLSVRIHNCPHCGLILDRDHNAAINILARGMASIRLDR

SEQ ID NO: 17187 - protein, 419 aa, Lactobacillus sp.
MEREAIIMKRSSKPIKSYSKTVRAYSLKLDEDTYTKLDQLFINYGKCRNMFLNQYCGISHMLDVKQYRKLRDQIKGSKQNKKYVAKYNFLDKHWCYALSDACANINSMWSNLANQIRRVVQANEAIDKDERHLIYYLLSIRELWYYALTNDQAVLLDLSHGLQKHLAELEEAVTPKQRKHAYSYLSRLTRRYKYTPRKHHSLNKSMTYDESMYKFTGDQLEELAISSHVSRKRFSLKLTSPWHYRLNGNLQIILDRDKKRIEIHKVIKVRQKKEYQAGTKLGIDKGLATLVSCSSGREYGKGFSQFTRPEIEQESQYLARRNPYYGYRYQLKKKLNQLKNANIPKQIIKKKQLTRQLNKLNANNIGHKRKDKRHASYHACLESKINHAIKTMIKLGTPSLIVKEDLTFTKEKIAKKGSK

SEQ ID NO: 17188 - protein, 442 aa, Lactobacillus sp.
MSSLAYHFGIRLRFYPSSKQKKLIKLNYDAQRFVYNSYVGRNRSSYHAKCYFLVKQSKAMPFAFSILNRYETKLAETVVANNELLAKPKNIRDAYSFLRIKEIDSLALANAIQNYHKAWNNYRKIGYGIPTFHKKRSDWAYQTNCQYIKQDEAYLNNGTAKFIDAKHVKLPKLGVVRIAGLRKLIKERLLKHIPTRIGTVTLKKTADDQFYLSMQLGSDLAFVKELAKTQNQIGIDLNLDNFLTDSNGAMVANPCFYRKAKKKLAHTQRILSRRQRRAKKDGRKLRTAKNYQEQRLAVAKLHDKIRRQREDFLQVLSTALIKSHDLVVAEELRSKNLLKNHALSQAISDAGWRKFLNMLAYKAKLYGKDFQTIDPKYTTQRCHQCGTIMGHNGYQKLKLADREWTCPMCHAYHIRDWNAAVNILEKGLGHWQNPVIKKKKNA

SEQ ID NO: 17189 - protein, 447 aa, Ligilactobacillus sp.
MVKQQKSKKKVIKTFKEVRAEKTEVQYEYLVEKHIIKSNDARYAILDKYAHLSNNVYNQALYRFRQAFFKGKWLSYEKLDKSFKQSFNQKDCMLYRSMKSVHLAQQILKLVNQNMTSWNKARKAYLKAPQKFTGKPKIPKYKPKGGKNIVIVDNQTAKLRANGIVEIPVMDSLKIKLQHKKTNKIQQVRIIPRNNTFVIEIVYKTNKVIDYKEDNGRYLTIDPGLDNAFTLASNVKGFKPVIINGRPLKSVNQYYNKQKARLTRIYDLSKQNRNTKRLNKLDFYRNQKMLKFAHEASKRIVEIALSHELNTIVIGKNKGQKRSSNMGKRINQNFIGIPHQKMLEMIEYKANLAEIVVIQANEAYTSQTSFLDNEIPIKQNGDKARKRKGLSPVKRRVKRGLFKSNKGILINADVNGALQILRKVVPNAFADGIDGIGLVPVKLNLNF

SEQ ID NO: 17190 - protein, 571 aa, unknown
  TnpB Polypeptide
MALKEAYDLHIRTHESQVALIKRNLNNNLYQYCHFELTKQVQNDCKDQDAKTELSVLQCFENFLYFATNSWFFNYKTFCQFEAEYFSKKFSKARTYQRAKTLLLDLLKPSNAVKKEVLTKEEAKQLKQLLESGSNQFSLCNQLFQHYCHGLVKAIQKFRGFKQIQSQINPTITLDGECYDLYSKYDETAHKNRWFLNIMSMESGKRIKGLELTGFHHAKKIMKHKKSANLTLSFDPNNLANGVTAHFTFPIRKTKLATKKKLRRKVKKCNNNSHHTSTATVVGGDFGLTESFTFSDGWVAGRTQKKILKDIADSTKDDIAKIQSNSKKNYFGLEKNNPTNKRNHINNCFNHNSEKNNINTNYRKKQKRYNSHLENYKYQMVNDIIHHFTTDNEYGQYAKYSFSNCENSEVLNKLTLVFEDLTYTNLGRTKDDKRQINLIKGVLTLLEEKIKLYHLPIEIKYVNPAYTSQSCPSCYYVDRKNRKSRHDDFRCLHCGFTANEDVRYRALTTVVKRSEAIMLPSKDDFIAACNIAERLSVLPNSMKLHQRKIKDLLMEKHEQVKGSCKMFTCKH

SEQ ID NO: 17191 - protein, 401 aa, unknown
  TnpB Polypeptide
MQKFPYYAITVRRYNVLFRHTDWLKKTQELYNEILLFYYRLYLETFPDQQPGTQEALRILETLTIVGRDKQPVPTPLPWKKIPLYFRRAAINTATAAAKSYLARGTQEHPTEKFTESVTFYKGMYRDFQDNTISLKLWNGESWQWSRLRLRGNTVPEAGQMMSPALVLTKDRAELHIPWKLPVSDGRSARERITAEENICSVVFTGQDTCAVCCILNADGGRENSFFIKGGSRYAGACRQITEKLDKSREVQGGGENPRANAHYWERLRNIHDHYAHQFSRQIIDYCKTQNARILVLPEFDKNYSQIILAAAGRNSPIRLIPSIREKLKYKAWQEGIVVVEIQQHQISSVCSQCGAKIRRKGGDFLCQNGHRGNRYLNMAHNLGQKCLDGFAATADQEKSK

SEQ ID NO: 17192 - protein, 302 aa, unknown
  TnpB Polypeptide
LDGRLILPYTAYSKHVDLIQHGAHLGAAKLWYDKPHKQFYLLVSLEIEVAEPTPETHKGVAGVDVGMRYLAVSSTMKGEPTFHSGKRVVSKANHYARLKKRLQQKGTRSASRRLVAMSRRERRLKQDANHVVSKRIVEQHPHSLIGLENLTDIRERTRRKHGKRASKKQRKANARQSKWAFAELHSMIAYKATLQSSMTIKVDAHYTSQACPMCGYTSKDNRPRKGLLFVCQNCHYTLHADLVGARNITLRTLLIRQDWMSTGRLSVGPESSDSDVSDDEAKAARLSRYAELRWSPDTSPCL

SEQ ID NO: 17193 - protein, 355 aa, Okeania sp.
MKSIKTKLKVNNKQKTLLARHAGVARHAYNWGLATCISEYESTKKRPSAISLHKRLVAEVKSINPWYYEVSKCAPQQALRDLERAFKNFLTIPKFGFPKFKKKGKKDSFYLEGSIKILQGNYIKLPRIGIVKTYEILPTVPVKNVTISKRADHWYISFKYDYQTNPTAKGQNIIGVDVGINTLATCSDGTKFANVKAYKQAKKRLTRYQRRVNKKEPGSRNRAKAVKKLAKVHKKVADLRADTLHKLTTWLAKNHSTIIIEDLNVSGMLKNHKLASAIADCGFYEFKRQLTYKCEWYDSKLVIADRFYPSSQLCSHCGHQQKMPLHNRTYECTACGFTADRDFNAAVNLENYIHQ

SEQ ID NO: 17194 - protein, 410 aa, unknown
  TnpB Polypeptide
MKRMQAYKFELMPNGAQARAMSQYAGACRFVYNKALAWQNKQYQTDNSFKFSYTKIANLLPQWKSELDWLRDAPSQTLQQSLKRLESGFRNFLAKRTDFPKFKKKGVSDSFRFPQGLKLEHHNNRIFLPKLGWLRYRNSNEVLGTVKNITISQKCGKWYVSVQTEREVETPVHSSTGIIGVDLGIARFATLSNGQVFQTVNSFKKKQIKLARYQRALARKIKFSHNWKKQKDKISKLHITIANIRKDYLHKTTTTISQNHAMIVIEALQVRNMSKSAKGTIKAKGLNVKAKSGLNRSILDQGWSEFRHQLEYKQLRLGGRVLAIAPHYTSQRCSCCGHIANDNRKSQDKFACVSCGYEANADLNAARNILAAGHAVLVCGEMVQRGRSVKHEPTEGTHKSAREPVGISAL

SEQ ID NO: 17195 - protein, 395 aa, unknown
  TnpB Polypeptide
MLRGMKIALDLTDEQEQQMWKSAGVARWVYNYAISREKKHYQDYLDDKTSQKFLSEGTIRKELTMLKNTTHPWLKEVGSNVIKQAVKDWDDARNRFFKGLSKAPKYKTKTTSKPSFYVNYESLRKVSGGFRGERLGFIKTTQPLPRIPKGTHYKRPRISFDGKFWYLSLVYEVPTISVDLTDLIIGVDLGIKTLATLSTGEFIENINKSHRVKQLEKQLRREQRHLARQLQANTNGYLTTTNGGRKPIYKRSLELCSNIQATKRKIKLLYRKLSNIRMNHIHQLTSYLVKQLPKGIVIEDLNVSGMLKNKPLAKHIKDAMFYEFRRQLEYKCLQYGIYLVVADRFYPSSKMCSYCRNIKSKLNLKERVYKCSSCGLKKDRDLNAAENLAYYFYRG

SEQ ID NO: 17196 - protein, 428 aa, Streptomyces sp.
MSRFRMYPTQQQEEQMLLHCAHARYVWNLAVEQHSHWYRGRKSAPGFAEQCKQLTEARRDNEWLSEGNCDVQQQALKDFAKAKAAKFNAGFGEPTWRKRFKHEGFRVIGTDRVPAYDTGGGLLVSAKTGKQVFSRSVVVQKLNRKWAQVKVPGCGWVRFRNTRHGLPDAKTFRITFRNGQWHIAFAVIPDPITAPGTGEVIGIDRGVTITAALSDGRTLNCPQLTIKERAKIRKHQRRAARAPEQSGRKTAEYAKAAKLKAREADRRKDWCEKTSTTLARSYDLIRFEKLNIKNMTRSAKGTIEEPGKRVRQKAGLNRAILAQGWGLLRQRTEHKAPGRAEDVPAPYTSLRCSDCGWIDKNSRKNQAEFVCTVCGFTCNADTNAAINVAVGQAVRPRPKRAGTGGATPRKRSSARELQHPTGVGIPQP

SEQ ID NO: 17197 - protein, 386 aa, Thermus sp.
MHIENTTHKKAFVYRLYPTRAQEEALVRILDLTRELYNAALQERREAWKKAGKSVTVYDQMRLLGKVKAVRPEYQGVYAQVLQETLKRLDRAFQGFFSRVKRGEKAGYPRFRGRGWWDSFTFPQVWREGKWVGPGKPLDNGKIKIPGVGHVRIKQHRPLEGVPKTLTIKRSAGCWYAVYVCEVSFQPLPPSDKAVGIDLGLSHFVATSDGKTFAPPKAYRKAEAKLARTQQALSRKKRGSNRYKKLKMRLARQHQKIANRRRDFHHKLARNLVNRYGTIVHEDLRVSRLARSSLAKSVQDAGWAQFLAILSAKAASAGRRVVAVPPHGTSQICPQCGRVQKKELSERIHACKCGCVLDRDVAAAKVILALGLDGAFGGGGRVTAPA

SEQ ID NO: 17198 - protein, 413 aa, Thermoplasmata sp.
MQLTQQIRIRPTEAQEDVLNDLSEKCRLIYNFALEERKKAFEEEGKRISYIEQQNQLPKTKDEYPEYKWVYSKVLQHTLRILDADFKSFYSLKKKGDESARPPKFKGKRYFTTMVYNQSGFKFGEGWVRFSHKHPSKTELKFDIPEKFSFDTVRQVSIYKKDDDYYISVTYEEEEQEYVDNGLYQAFDLGVLKHTAVNSKGKTIEFTNERPDRYWEDKIRAVQSKRDHCKKDSRRYKRYDKALKRMKRKCADQMKDFQHKLSRKIVDNTRSNTIIVGDLSVKDMCSQNKYQKGLHTSLHNTGHIGRFVRFLTYKTRLVGKRVVEIDERKTSKRCCVCGSEKDMPIHKRTYECGDCGSEMDRDENSSINIMSRYLSQNGLWTAYQRFVDNLRQTGIAIQEQALYSQEAPSLGAV

SEQ ID NO: 17199 - protein, 402 aa, unknown
  TnpB Polypeptide
MLLRNYEFRIYPSPRLQVQLEHWLTLCCQLYNAALEERRDAYRKAKITLTGYTQSKELPAVKSCAPEYKEVNAQVLQEVLDRLDKAYANFFRRVREGNEKPGFPRFRKRDRYNTFTFPQKGFVLDELAGRLILSKLGGMKVKQWRQLGGKIKRCTIKRRAGKWYAVFCTEIPQPAALPKTGKAIGIDMGLGAIVTDSNGRTYGDLVALKAGEHRLRHKQRLVSRKKKDSKRRKHAVQNLARAHDHLARQRVHALHNISRTLMRENDEIHLEELNITSMLQKAPITFGARMGRGLRRNIHLAAWNALGQQLVYKAEEAGRLVRHKNPARTSQECPQCHRIVPKTLGDRWHNCVCGLSIPRDHAAAQVILQRPLRGPRGEVAQEGSSVKRKGLSRSNKKFRKSV

SEQ ID NO: 17200 - protein, 442 aa, Nostoc sp.
MTFRLYPNKKTELILRYHRKLHKDLYNAAVNNRFNQYKIYNHKVDYFEQQNCLPAFKEIWIEYKELPSHALQATLKRVDFAFERWLKGLGKRPRFKSIRHYSGWTYPDCAGFKVESEGENGYLNLSKIGRIQMRGQAKYWGKPTTCTILYRNSKWYASITVNVLDQILKPEILSCGAVGIDLGCKSALSITDGENHQQIDAPKFLRSAEHLIKKASIDKRRKRAPNRKKKIKASRRFKKAQLKVSKLTRKVANQRQNWVHRVATEIVSSNSFVATEKLEVKNMTAKAKKGKRKKQKAGLNKSILDVGFGMLRSTIKYKVEQIGGVFIEVPTRRVLPSQTCPKCGNQHKKTLSLRVHECSCGYVQDRDIAAAEVMLYWAKGNLPGSGTGLADADVTSSTSRTRKQAGSMKQLGQMKRQKSQVKLAKNDFGNVETPSSGEASLG

SEQ ID NO: 17201 - protein, 192 aa, Shigella sp.
  misc_feature (24)..(27): Xaa can be any naturally occurring amino acid
  misc_feature (124)..(127): Xaa can be any naturally occurring amino acid
MRYRNSRQVTGVVKNVTVSQSCGXXXXKVKFSNNWQKQKRKIQRLHSCIANIRRDYLHKVTTTVSKNHAMIVIEDLKVSNMSKSAAGTVSQPGRNVRAKSGLNRSSIGIKTPKRLKKHHKTDVXXXXYWIRAGMKCAASLSTSSSGVAVRCLLFRQRTQASVARAVVIQRKKTACHKVNSDARYVDIQRTPM

SEQ ID NO: 17202 - protein, 427 aa, unknown
  TnpB Polypeptide
LKVVSDDDYHRRTAITRLAVSPTDDSLLRDTIAEWTQGCQIAVDKAWERCHSKSDVQQLAYDDVREETSLGSQHAILACHQAAENIKSCISRRQDGKTASKPTYTSPTVTYDSRTMTVFPENEQVSLTTHGDHSRVRADLMLPDDEDGYQHQYLDSDEWEPIESTLHYRDGEWYLHLGFRKPNGTETTTENGTVLGVDLGVNEIAVTSTARFFSAGELNHKRREFERVRGALQECGTRNAHRTLEAVSGREDEYVKHVLHSVANGIIEEALRYDCDGIVFEKLDGIRDRLPEAAWHSEWAFDRFYEYVEYKAEPEGLFVDTTNPKNTSKRCAECGYIHDDNRPSRDWFECQQCGNQNHADYNAAKNVADVYLRREQQSSRRRGVSQYALKSGTVTPNRGYTPYPDGFEAESTDKPHPQRSERVSTSE

SEQ ID NO: 17203 - protein, 171 aa, unknown
  TnpB Polypeptide
MEKAYKFRIYPNKTQESLLQKTFGCVRFIYNHFLDRRIKAYKQNKKNIGYNECSKELTQLKKEKKWLKEPDKSSLQNALKNLDTAYKNFFNRQKAGFPKFKSKKNRYKSYKTNMTNNNIVFLGNKIKLPKIGKIKIRDKYCQIEGRILSATVSQTPSGKYYVASKRINMLA

SEQ ID NO: 17204 - protein, 373 aa, unknown
  TnpB Polypeptide
MVKVETNPEQAQALRKTMHQFNAACNDIAKTAFELRCANKIELQKTVYYRVREQYNLSAQMAVRAISKTVEAYKRDKSIQVEFDLDGAMPYDQRIMSWKGLDRVSLLTLEGRLIMPVRICEYYSPRMNRPRGQVDLIFRNNTFYLAVVVDAPEASAIDATAVLGIDLGVKNIAVDSTGEVFSGDAIKKTRIKIDAIKADLQCCGTPSANRHLKKIGKRESRFRRDVNHCISKKMVVKAKDTSSIIALEDLEGIRERATVKKAERRKHLSWGFDQLRQFVDYKAAIAGVPVVYIDPAYTSQECHVCHHISRSNRPTRDDFVCTCCGSSAPADYNAALNIRARVVANLPIVARLFAELQAPHLAANMPANSLAGS

SEQ ID NO: 17205 - protein, 204 aa, Okeania sp.
LPHSFGKFWSGKQVKSLRRKYQKLRRQLQEAKKLKKIKDIERRERRIMTHINHVISQQLVQFAQDYNMGLRFEDLSGIRQSSLQRQKTKSDASKNRDHWAFYQLEVFTRYKAIRAGIPVESVPAPYTSKSDHRNGVLGKRVKHTFTGFDGYQCNADWNASQNIGQWLGKSCPLSLQKAVSVMDMDDFNVGVNDSPSTDGCKNRG

SEQ ID NO: 17206 - protein, 367 aa, Okeania sp.
MKSIRTKLKLNNKQKTLMAQHAGYSRWCYNWGLSLWNAAYTDGYKPNPSFGMLRKRKLREVFTNHTKPLYPWMKNLSSKVYQYAFINLGEAFKRFFQGLGKRPRFKKKGKSDSFTIDNCGKPIELNGWSHKLPFIGMVKTYEPIEATTQKITISRQAGDWYLSLSYEFTPSPTPTTTEVVGVDLGVKTLATLSDGKVFESVKSYRRFETKLSRLQYLNRNKIIGSANWRKAQLKIARLHRRVASIRKDALHKLTTYLAKNHSVVAIEDLNVSGMLANHKLAKSISRQCFYEFRRQLEYKTRWHGSKLVAVDRFFPSSKTCSRCGHVQDMPLSLRIYDCPDCGLSIDRDLNASINLRDAVGSTVNACG

SEQ ID NO: 17207 - protein, 228 aa, Streptomyces sp.
MYPTPQQEQQMLLHCAHARYVWNLAVEQHSHWYQGRKAAPGFAGQCRQLTEARRDNEWLGSGNADVQQQALKDFAKAKNARFTSGFGEPSWRKKYRHEGFRVIGTDRVPELTDDGSAKLNAKTGKQVMGRSVVVHKLNRRWAQVKVPGCGWVRFRLTRPELPKAKTFRVTLRGGQWHVAFAVIPVPLEAPDTGEVIGIDRGREHHGRPVGRAEAELPAAHREGTRAGP

SEQ ID NO: 17208 - protein, 391 aa, Streptomyces sp.
VGVVRVVRGGKRLLNTRHHPQAAQLTEAQWRRRWQVERRFLQADGESGKRFGNETIRVTPDGEVSLRLSAPLVHLANARHGRYLLASRVAFAYRGEQWRDRVTANRAVAYRIHEDTVRGRWYLTASWTIPPVKTVPLAAARVRGMVGVDINADHLAAWRLDEHGNPVGEPLRFGYDLTGTAQHRDAQVRHALIGLLHWAERHHLGIAVEDLDFTTQTTREKHGRRKRFRKLISGMPLSRLRDRLVSMAAELGITIVAVDPAYTSRWGAQHWQKPLTSTSRKPTRHDVVAVAIGRRALGHPIRMGAPPRPLRHWGRMASPLHDQRDREGHRTAQAGSDTPGREGNRPRIPGPRTRSVGAGRGANAVDQNAQHRPGRPTEHESWQQDSLPLSF

SEQ ID NO: 17209 - protein, 372 aa, Bacillus sp.
MNITITAKLKMNPTIEQAKLLEETIFAYRKGCNFVSRIVFESKNLVQVSLHKATYHVLRSSYGLRSQMAQSVMKTVIARYKTNKSNGHDWSLVQFKKPEYDLVWNRDYTLSVGTFSVNTLQGRVKIPFETKGMEQYFDGSWSFGTAKLVYKHKKWFLHIPMTKEIQEASVHNIKQVVGIDFGINFVATSYDSQGNTSFFNGKIIKHKRARYKAIRKQLQRKQTPSARKRLKEIGNRENRWMTDVNHCVSKALVSEYGADTLFVIEDLTGIRVATERVKCKDRYVSVSWAFFQLRQMLEYKARMEQSKVIAVDPAYTSQICPKCGHAEKANRNKKKHIFCCKTCAYTSNDDRIGAMNLQRKGMEYIVEVTKEA

SEQ ID NO: 17210 - protein, 430 aa, unknown
  TnpB Polypeptide
MAWEVTRTVRVRLDVPDDRKSDLYATNDKFQYCANRTADWAWRYPDEDCVTSKSDAEDAIYDDLRDETNGLHANLVQKAIKRATDDIDNCVDRLADGENTSKPEYDTFSIVYDKRAATYYRDKVSLATVNGRVECEYDLPDDPEGTPHGEYLLNEDYSFSTSTVHYDSEADEFYLHAVMERELDVDSPEKAEDSKVLGVDCNVNDHIAVTSTGAFVGNADYLNHQRREFEKRRASLQQTGTRSAHLTFQRIGDRFGRWSEDYLHQCSKAIVEEARRHECTHIAFEDLERIRERISDGKKFQQWAFNALQTMVEYKSNEYGIIVDIVNPQYTSQQCSKCGCTLEENRDDQQFKCLDCSYTANADYNASKNVARKLALNLQRGQKSPAGGAFCQYALNSGVMIVNATEVASDTPVSAERESTDKPTPLGVGS

SEQ ID NO: 17211 - protein, 370 aa, Clostridium sp.
VVKVVEINKAYKFRIYPNEKQIEIIEKTFGCSRFVYNHFLNQRNEVYSNEKRCMRYTEQQNQLPSMKKEFVWLKEIDSTSLQMALRNLDTAFKNFFQGRVDKPKFKSKRDNYKSYTSNFVNSNIEVKKNKIKLPKLNWVKAKVHRYVEGRIINATVSITPSGKYFVSICVETEVNPLEKVDSIIGLDLGLTHFAIFSTGKKVDNPKYLKKSLERLAKEQKKLSRKQYDSNNYHKQRIKIAKLHEYITNQRNNFIHQLSKRIINENQVIILEDLSVKDMLKDKDLARSISDVSWSKFITMLEYKSKWYDRVLHKIDRYFPSSKICNNCGYVIEELPLYIRKWDCPSCNTVGIDRDINSAKNILQQGLLKLA

SEQ ID NO: 17212 - protein, 379 aa, Bartonella sp.
MQLRKAFKFEILPNGEQISKIKKFCGCARVVYNRALAWQNEQYKQDNDFKFRYTQIANLLPQWKQELHWLTECHSQVLQQSLKDLESAFKNFFQKRADFPKFKKKGVKESIRFPQGFKVEQDNNRLYLPKIGWIRYRNSRVITGKVKNITVSQKCGHFFVSIQTECEVEIPFHTGGEIGIDMGVVRFATLSDGHFFKPRNAFKTQKDKLARLQKQLKNKVKFSQNWRKVKAKIAHLHYKIAHCRKDFLHQISSQISKSHARIYIEDLQVCNMSKSAKGTVEEPGRNVKQKSGLNRSILDQSWFEFRRQLDYKSQWKGGMLMSVPPHNTSRICPCCGHISKENRKTQATFTCVECGYSNNADLVGALNILSRGQTLSETI

SEQ ID NO: 17213 - protein, 417 aa, unknown
  TnpB Polypeptide
MDVRRTVPVALDVDSDDAALLEDTIDTFLWSAQYVVDHAFQGEYVTTSKTTLDDATYGDVREKTDGFNGGLVQAARNKAAEACKSVVARWKHGKKASKPTFTSPHVVYDHRTATFHDEYVSLATTDGRIEADYVLPDEDSNTPHSKYLFSNEYETTGAELHYHNGKWTLHIHCKMEVESDTSEQATPENGTVLGVDLGVNTLAVTSTGTFWTGNEFDHWRREYEKRRGDLQQCGTRWAHQNIESVGQKEEGRFKLLLHRISNELVTEARENGCSVIAFEDLTDIRERTGASWGHKWAFDRLCNYVEYKAEEHGIAVEQVDPKNTSRRCSHCGFTHPDNRDGEAFECLKCGYENHADYNAAKNIGLRYLRRIQTGGDGGAPLGVRLNSGTLNVNGGYSPASGEARTGVHAESHDLSRG

SEQ ID NO: 17214 - protein, 387 aa, unknown
  TnpB Polypeptide
MRTFEFRLYPTKDQQVTLLRHLDICRQLYNHILESLNTARTNGEKHDWNWTSAMIPQWKRSTFPQFKEVYSKVAQMTNDTLWDNIKSLSALKKKGFRVGRLRFKGQGWYNTLNYNQSGFKIDYDHKKIEFSKIGIINAKIHRQINGKVKGIIIKHTSTDQWYACIQCDTESVLLPRTGKSVGIDLGVSKFAHDSDNHIIENPKYMQQSLAKLKTLQRSVSRKKKGSSNRRKAKFKLTKLHAHIVNQRKDHLHKASSYYIKNYDTICVEKLNIKPLTRKGKSKTLHRNILDAGWGLFFQYLSYKAQSAGRQLIKVPPQYTSQNCSQCGTRVPKELSDRLHVCPHCGYIADRDYNASLNIKKRGLEQTSLLMESRPTPLLITSSGESGR

SEQ ID NO: 17215 - protein, 399 aa, unknown
  TnpB Polypeptide
MNVDRTIKFKLELSEQDKEALRQTMIISNQVFNEIAKYGFENRTCSKVSIHHATYYGIREKHPELPCSILQGIRDVACEALKGAQLKKLPKSKQYSAIRYNKRVCNINLSKKVVTLASIKGRIKAAFPIPEYYRQYLDWELRTSTLSYNKQKNTFYLHVTIRNQSNQSPQPVGGNKILKILGIDRGIVNIAVTSNNKFFNSKPIKNVRAKYAYLRAKLQGKGTRSAKKLLRKVSGKEERFVTWVNHNISKEIAAMPFDVFAIEDLNSIRVQSRISRTRGTEFTRELNNWSFYQLEQFLRYKAEAAGKSVVLIDPRYTSQKCSNCGHIYKGNRKGNSFHCVKCGFQIHADLNAARNIADIGKSGLGRLTVNQPYMTCDEVEARMGIETEHSYNAPHLSAK

SEQ ID NO: 17216 - protein, 372 aa, unknown
  TnpB Polypeptide
MNEKEYLCYEKNYHLLKNSPNYKLLNSNMAQQIMKQVDSSFKSFFALLRKCKAGTYNYKDVKLPRYLPKDSYSALVIAFVRLNGNKLVVPYSQSYKKCHKPIEIRIPPLLQDKRIKQIKIIPKYNARFFEIQYTYEVSEGQRKLDTNNALAIDLGINNLCTCVTSAGKSFIIDGKKLKSINQGFCKSLSKVQSVYDKQNVKSGNIKQRLIIKHNNAVNDYISKTARYVVNYCLSNNIGNIVVGYNETFQKNVNLGRKTNQTFCNLPFGILRNKLEYMCKVEGINFVKQEESYTSKASFFDKDIIPTYNFDNPQEYTFSGRRVKRGLYVTKNNYRFNADINGALNIMRKSNVVSLEALYSRGVVDTPVRIRIA

SEQ ID NO: 17217 - protein, 311 aa, Desmospora sp.
MHKAFRFRLYPTKEQAILINKSIGCSRFTFNLFLAKWNEQYAQTGKGLTYQACSNQLPSLKKELEWLKEVDSTSLQNALKDLADAFSRFFKGQNDQPRFKSRRNPVQSYTSQCNYPKGKPSIAVIGNKIKLPKLGWVKFAKSKEVEGKILSATIRRTPSGKYFVSVCCEMHACPYVPVDKDKAIGIDLGLKDFAILSDGRKENAPKYFRKYEKQLAKAQRVMSRRSKGGSNWNKARIKVARIHEKIVNARRDFLHKLSLRLIHENQVISIEDLQVKNMVKNHNLAKPLRMLPGRSLLPCWNTRHNGTGEHL

SEQ ID NO: 17218 - protein, 413 aa, Haloferax sp.
MEYSHRYHAYPTQEVAERLEHHLNVHRQLYNHVRWDYEQAPEDDKPTEFDQNNKLPEWKQKWPIFADTYSKAAQATVARFHRNLSNLRKKKEKGYNVGRLKRQAPTEYRSVTYNQSGFDLDEKRDRDRIAYVRFSKIGWVKIRYHRPIPDHATIKEITFKKETTGEWFVSFGLETDDDDLPEKHDVNSLDASNSVGIDLGILNYIHTSNGTTVDWLNLEDDYDRLRREQRKLSRKQKESNNYEKQRLKVAKVKRRIRRRVLDYQHKITTWLVKEYDAVFVEDLDVKGMLEQSHNARNKQDAAWRQFITLLEYKADLYGCHVVQAEARGTTKECASCGVETAKPIWIREHSCPSCGFETDRDANAAMNVLKRGFSELGLGWPESTPVETVTATDTADFQRVSASHVVETGSLGA

SEQ ID NO: 17219 - protein, 367 aa, unknown
  TnpB Polypeptide
MASIRNKNLLKRTARVYLNDLNTGKSQVVRQFLCQCHDVMQYFVDLFWQRKDFSGKLASLPTVHRAKDKFGITTRLSQALAKQAGECVRSQHKKDRKRKPQLRWHTVTLFYHFVTIEPFKGNGFDWCVKLIGSGAPKLDIPLKSTKMINQRLKDGWQLSKTIRMGLREGRLWIDFIFEKERRPLKTEGKIVGMDSNYKNGVVFSDFQVVGETIYPRIQGFKKRQKNTHAEIKSMLGHALKSVDWSSIQVLSIEDLKKVKHGKRGTFSRVFNRRLSHWLYRTLVQLLERKCEEEGIQLVVKDPFKTSQFCSCCNRWDRRNRKGDRFKCVHCGYQSHADHNAAHNLELLGAAGVYGLRFYLSSKRQSFG

SEQ ID NO: 17220 - protein, 383 aa, unknown
  TnpB Polypeptide
MEQTLTYICKLLPTEEQAKYLDDTLSAFADACNWIHERVSKRMRNKERMQEMVYYEVRDRFGLSANLAIQAIRRVCANRKAAHTNKSRVVEFDPTSIQYDQRIFSFREADWTVSLTLLNSRERFALDLGDYQREKLAGQVSKAAQLCLHRDGSYAIHIQIEIPTEPPAPTDKAIGVDLGRTDIAFTSRGKSWSGEQIRRIRDRYSRLRAGLSRKATKGTRSTRRRCRQLLIRLSGREKRFQRHLNHEISKDIVATAQGEGAMVVLEDLTGIRERTNKQRRTRTERRRSNSWAFYQLREFIGYKANLASVPVVLHDPRYTSQMCSSCLHLGQRSGKRFSCQSCGYADDADHNAAKNLEILGLNLVTQARGPWLSCAWAPTPQGS

SEQ ID NO: 17221 - protein, 417 aa, Mycobacterium sp.
MLTGRRFRVEFTDEQAVFAEQIGAACRVVWNTGLEQRREYRRRGESMNYGPQAHELAEAKTEHLWLKDVPGHCLQQTLMDLDRACREHGTWKVHWRSGRRWVPSFRFPEGNKMVVEKLNRRHARVKLPKLGWVKFRASRSLEGETIRSATLSRDGAYWFVSLLVEDGVETPTVHAAPGTAVGVDRGVVVAVATSDGELVDRAFVTTGERTRAVALQRRLSRAAKGSANRTKTRQALAKLRATERHRRQDFCAQTAHRLAHGNAVVVLEDLKIRNMTRRAAPVANPDNPGQFLPNGGSGKSGLNRAVLGKGWYRFEQALTSVSRYTGTQVIKVPAAFTSQRCSACGHVDPKSRESQAVFRCTTCSTAAQHADVNAAKNVLAAGLAVTVCRETTTPAGVAVTSTQEPAGNREELLLRPV

SEQ ID NO: 17222 - protein, 541 aa, Streptomyces sp.
MADLRPIAAPFVALGPSGVAIRTRFKGLTADDDKVLRAVGVHLGSLASKDLKRRCADGLEHSTETWAARKRELTEDSSSRWAGSITKGTHDQWALSRRAQLAHIQGLEAGIRTVAHRLSLPVGERGTKRAPGGYRTKQEWFVKTRRLHLLEDRLERERADRETGRVRVVRGGKKLALGRHNLDAARLTEDAWRQRWEAERWFLAADGESGKRFGNETIRVTPDGRVGIKLPTPLAHLANARHGRYVPIGTVQFHHRGDQWADRVAANRAVAYRIHLDVERGRWYLTASWTIPPVQTVPLTQARTGGLIGVDTNADHLAAWRLDAHGNPCGEPRRFSYDLSGNTRHRDAQVRHALTRLLHWAKRYGLSIAVEDLDFGSEKTREKHGRRKRFRRLISGMPVARLRARLVSMAAELAIPLVAVDPAYTSRWGAEHWQKPLASKNRRTSRHDAASVAIGRRALGHRIRRRTAPPHDDQSDRRGHRTAQAGHRDRGREETRPRIPGPRTRCVPPDAERTRATRTPKTVRDVRSDQIWVQDSPLPTE

SEQ ID NO: 17223 - protein, 231 aa, unknown
  TnpB Polypeptide
MAIDPGLGSLTYATEDGTIAKVQIAPSADTDHRAVRKLQRAMERSRQATNPDNYEAVDVVRHGKKKKSFKVKSGRLQWRFSKRYESLRAELAEIFRLSAATRKREHGEVCNWLLGHAGSIIVEDNSFKAFQKGHFGKSIGRHAPAAFYTQLTSKAESAGLQVTVVSPRKLKPSQHNLLTDTFVKHELWERRVRLGNDDDDRWIDRDAAACLNLLYADLEKQIHGQLPICKG

SEQ ID NO: 17224 - protein, 409 aa, unknown
  TnpB Polypeptide
VTGAQFARPNEGPDLEFLFVKLTVRVKLLPTPGQARALEATLHACNEAANHVSVTAFATGTTRNRELRAFAYTHIKHTWGLGAQAAQHVIKKTSDAYAALRGNLRAGNLGRAGSKRHTAATGKPIVFRPNSAQPYDDRMLSWQADRQTVSIWTTAGRLKHLAYTGHEGQLELLARYRQGESDLQHRNGQWYLLATLELPEGAQNPDPQTFIGVDLGIANIATTSTGRRHSGRRLNRTRENDTALRARLQKRGTRSAKRRAKRHAGKEARRTRDINHKISKHIVAEAQRTGRGIALEDLSGIRERVRLRKPQRVTINSWAFGQLGAFIEYKARRAGVPVVHVDPAYTSQECSRCHHIDKRNRPHQAVFTCTSCGFVEHADVNASHVIGRRGWWLWVRGAESQAPALTLIA

SEQ ID NO: 17225 - protein, 373 aa, Proteobacteria sp.
MLKAMKYRLKPTKSQAHLLESQLEECHLLYNHFLAERKTAYEERKESLTYYGQKATLPQLKAACPALRHVHSQVLQDVSMRIDLAFKAFFRRCKTGEKPGYPRFRGYGRYDALTFPQYGNGCQMVDGVLKLSKVGALRMVQHRPLEGTPKTCTIRRSSPGKWFVTIACDVEATPLPTTGEAVGIDVGLLAFSTLSTGESTPCPKFLRTDEKDLKRTQRKLSATTKGTPERKKRCNVVGRVHERISNRRTNFTHQESRRIVNRFDVIAVEDLSVHQMVHNHCLAKSIQDAAWSQCATFLSYKAAWAGRAFVAVNPAYTSQDCSGCGHRQKKTLAERVHACPCCGLTLDRDHNAALNILTLGQQSLRLVPRSPSL

SEQ ID NO: 17226 - protein, 324 aa, Proteobacteria sp.
LPKYAWWRQLGSQAIQDIARRIDKGYQRFFQSLKERKSGKTTRRVGPPTFRKVRKAKSFTLTQASWKLRGGNRLKIGTTVYRFAKSREIEGTIKTVTIKRDTLGELFVYFSCLVESEPSDRVMTGNSAGFDFGLTTYLTGSDGTEYHAPQPFKQRLKALVTASRKLARKQRGSCNCHQAKLHLARVHRRVAHVRQAFHWALAHDLCRQYDIIRLETLNLSGMKALWGRKVSDLGFASFVDILHHVAAKTGVLVQHVGRWFPSTKLCAACGHVNEPITLRDRVWTCVACKKTHRRDLNAAINLDQEGASSCGGHPVSLASASVDG

SEQ ID NO: 17227 - protein, 599 aa, Kribbella sp.
VLLQIGTSPLVTRSRRDHPVPVLPPKQHRMPRLPVVDRSHQCLLARLSRHPPYDVRGKPRHINRRHENGAEFVSTQLNLPQTSAQRGTHALLPVACDDHLDWFGCQGGCHLVGLGAYDDQHWRASSGGEQAGGADYPGDAVGVVHERLGPAHPPAGPGCQHQCRDLHLIVAGKLRPPGREDPRLPPFGDRGLSVPTDWINSMSRYRLYPTPAQQPALLEHCGHARYMWNLALEQWSMWTRDKGATPGFAEQCRQLTKARAAFGWLRAGSHTVQQQALRDFDQAIKNFYAGTHRRPTWRRAGVHEGFRIVGSQASRIVKLNRKWAKVNVPKVGWVRFRLTCPIPAAKSYRITRDRVGRWHLAFAVVPESIPAPGTGELVGVDRGVTVSAALSTGELLACPGLSDREQVRLKRLQRRLARCRRGSNRRHAVQAALAKLLARGADRRKDWVEKTSTDLARRFDLIRVEDLRIAQMTKRPEPKPNPERPGSYLPNRRRAKAALNRGILANGWGQLVGRLEHKAAGRVERIKPAYTSQTCSVCGHRAPENRKSQAVFRCVACGHQANADVNAAMNIAAGQAVSARRETPPRVSPKREPQLATSA

SEQ ID NO: 17228 - protein, 420 aa, unknown
  TnpB Polypeptide
MAHWGVTLLVMKRIERVRLYPNRRQQSALARMLDITRQLYNAMLQQRRDAYRLRRVSVSAKMQYAELTVLRAEDRRIACVYRECEDAVLHRLDLAMQAFFRRVKGGEAPGFPRFKSRSRWAQLQFPHGDRALKFDDRQTRVTIPGIGSVKLRKGRAVPAFKRAWIVARNGRWYACFECERAPVQGPMDRRRVLGVDRGVHALAATSDGRLHRNACALEKHRRRVEQLQRTVARRKRGGKQRRKAVAALARAHERVANARRDRAHKVARKIVDRAAVIAIETLRLRAMTRSARGTVEQPGRNVHAKAGLNRVVLDAGFGLLQQMIVAKAEEAGCAVVAVDARYSSQTCSRCGHVAAESRRRRRFVCIACGFRVHADINAALVIRGRAELPARRERRGVGRPQRSPKVPDAGEKLARREVAA

SEQ ID NO: 17229 - protein, 487 aa, unknown
  TnpB Polypeptide
MFVPSLGELSNESWGPAPTPAGIPREGIYPVEHKNRRTNVVRLLPNGHQDRKLRKLADVTAKLYNELNYERRQQFFHNEGVDFKGTWNKYYEKYKGVLGPANAQAVIQKNNEAWNSFFSLLNLMKERKLPPHITHVSPPGYWKDEETGKRRLIIVVRQDRYEVDVERHVIILKDFDMEIKFVGRLRWFGKQGRLEIIYDESKGAWYAHIPVDVGVEETRTGKKSKHIVNGERKTIQVESPKGNKVASIDLGINNLASVVVSDGTWLLYKGVRTKEDYFYLQRLISRIQSLRDSLKDKLLDDAIDELNHEMRRLFGKLMRRLLHLYRNFAKHLIEQLHELGVSTIYLGYPFNIAQQKGNKFNTNMWSYRKLMEAIELKAQEYGIKVYEVVEYNTSRYCAYHNVEVKRQPRGVVSCPKGHKLHSDLNGALNIMKRAIGRVPLVIKKPLSFIVDHNRVAPAKRGVTLKTLGNPAKKAGKGQYVCRGFWCF

SEQ ID NO: 17230 - protein, 325 aa, unknown
  TnpB Polypeptide
VERPQSIIAFDINENTVAVSKIDLSTTVDKVAYWNRQYITPQLYEIRTDFGKLARRYEKVRNAIIEKLKPGFALPNGKYINITNTREFRKYVKHLKEGVRKVGRIRHVANELTKTPAIIVTEELGENPQDEMINGVGKGELRHRIKQTPFKALEKTVEDKALERGSKLFHVSSYRNSRVCPIHFTRLEKTDDWHVLYCPKEHYVHRDYASVMNMTWKATPESWTKGVWWNLRREMEWGEHEGKSNPIIPKYIIQHLYAILKTLTASEQSPAVLARGKPMNPAGGADEGWARKPPQHGEEASGTLYGVGVVEVQGVQFVALQLALP

SEQ ID NO: 17231 - protein, 373 aa, Streptomyces sp.
MRSALVRTPVPPGCRSLPLGSCPSGSRPRRGLPGGKLRLPEVGDVAVKWSRALPSVPSTVTVIKDSAGRYFASFVVETGPEEGLAPVTPEVGVDLGLGHFAVLSDGRKTDSPRFLRRAEKRLKKAQRAPSRKEKGSRNRDKARLRVARAHARVADARREFHHQLSTRIIRENQAVAVEDLAVKGLARTRLAKSVHDAGWSQFTAMLEYKARRYGRTFVRIGRFEPTSQVCSACGAKDGPKPLHVRQWTCAECGAVLDRDINAAVNVAKAAGLAVSACGAQVRPGFVLAQRDEAGTHPKPHPTTARQAGIALLQVGEEVKPASSSAPGDLLDGYRAALFVPFTAVLLASALSAYGLLRRPRSRVVARESRVGTP

SEQ ID NO: 17232 - protein, 551 aa, Actinomadura sp.
VPGGEGAAGELRAVAPPFVAAGPRGVAVRTRLAGLTGTDERVLRAVGAHLGSLAARDLKARCADGLEHGADTWAARKRELTGESSARWAGSITKASHDQWALARRCQVAHLRSLEAGVRTIECRLALPIGQKGTKRVPGGYRSRREWFAKSRRLRILQDRLAAERADFEAGVVRVVRGGKRLARTRHNLDEAGMSERKWRTRWEAGRWFCQADGESGKRYGNETIRVTPDGEVFIRLPGPLAELANAPHGRYVLAARVRFAHRGTEWADRVQANRAVAYRVHLDVGRGRWYLTASWQIPRSPAVPMAAALAGGVIGVDTNADHLAAWRLDRHGNPIGDPRRFGYDLSGPSGHRDAQVRHALTRLLHWAQDSGVRAIAVEDLDFAGEKTREKHGRRKKFRQLICGMPIGRLRARLTSMAGQTGIAIVAVDPAYTSKWGAQHWQQPLTSKNRTTTRHDAASIAIGRRAQGHPVRRRTAPPPAHRSDEQGHRTAQARPGTRGREGTRQPATDRAHDAPRRAGQVGRTRGTSASNTVRDARSTGPWVQDSLLDTA

SEQ ID NO: 17233 - protein, 420 aa, unknown
  TnpB Polypeptide
MLLSFKTELKPNNSQVTRFRQHCGVARHAYNFGNAVIMSVLKLRESDKTVKIPSAIYLHKRLVAEIKPENPWYYESSKASPQQALADVRKAWDRCFKKVSKQPKFKKKGKSHDSFYLEQGNKAKPGISNDGKRIKLPKIGWVRLTEALPVTSVHNCVISRTADKWFVAIKYEFEKPVVASNRPSVGVDIGIKELAVTSDGKVFSNPKAYRRMSKRLKRLQRSVSRKNKGSRNRSKASGKLAKLHAKVSNIRKDAIHKLTHYLAKNHSTVKIEDLHVKAFLKNHKLAGAIADCGMYEFKRQLEYKTEKFSSELILVDRFFPSSQICSNCGNHRHKMPLKDRVFVCPDCGHIEDRDLNAAKNIERWFEGIFIPERSDKAVSSTVSACGVDKPLRSHSKTAMKQEVNIKAINVQLSLDLGSFG

SEQ ID NO: 17234 - protein, 389 aa, unknown
  TnpB Polypeptide
MSNKHKSIRKEEGFVVYTALKVRLIPTQTQEVALRQHAGTHRYAYNFAKSFSERYYEEHGESASANDISKAFRETYASIPWIADICKDVNHEAIRDYGRARSNSFRKYKNGYRTNYKSRKDIIQGFAVDARKLKFKGKVYLPKIGWISVNQTPKKRLYKNPRVIFDGQHWYLALGMEIETEPVELTDKVLGLDVGLKTLVTVSDGTTFENINTTAIVKKLERKKKQVQRQMARRYVKGSKTQSKNYYKSRKEHLRICRKLTNIRENHLHQISSALVKTKPKAIVMEDLKIQNLLNNRRLSKAIQDAAWYKLRTYLTYKSKRQGTEIVLAPTTFPSSQTCSNCHQRFDTSAQNRTWGLDIRVWTCSYCNAEHDRDKNAALNLKWYYNHQV

SEQ ID NO: 17235 - protein, 464 aa, unknown
  TnpB Polypeptide
VEQQKELDKRFRMATDIYRKSLFEIFKRVRNIKKDPLYKKAYKLPKGKERNRILTTLDKKYGMNSWQLFTAFANNYRKARHYDLHIPSTSAYKLGIRAYDAYSKVKFGASKRVTVPKMIDSFEGGDGNGLRIRNRQLVFSKKTHRMFIPIQFRNSEYEAWVLQDNLKFIRLLRREENFRVQYYIQLVIDGTPPNTHYRSSATGTVGIDIGTSTVAIVSDTKATLQELAPTIDRQADELARLQRKLDRQRRANNPDNYNEDGTIKPGPKRWVESKRQRKTRETIANIQCKQAMTRKLSHNAQTNEVLQLGDTFIVEKMNFKGLQARAKETTVSETTGRFKRKKRFGKSIAHRAPASWVSTLAYKAAYAGKTFIEADTYALKASQYDHTTGEYTKHSLSTRVKQVGESTVQRDLYSAFLLSCVNDAGNEIVQENVVRKFPQFLKHQEDAMQQLKSTLQSTGVKHWK

SEQ ID NO: 17236 - protein, 364 aa, Escherichia sp.
  misc_feature (267)..(334): Xaa can be any naturally occurring amino acid
MMMLILKAYKFRLEPTHEQSQRLRQLCGCARFVWNLGLAETKRILGSGEKLPSAFELNRMITVWKKMPEYIFLQDAYTDNLQQKLKDLHTAWKRCFDKKLAAKAPVWKRKNEGRDSIRFVNFEKYCCLENRRVKLPSGLGWVKFRQSQRVNGKIKNATISQLAGQWYISFQVEIETAEPNHTSTTIVGLDAGVAKLATLSDGTVFEPVNSFQKNQKKLARLQRQLSRKVKFSNNWQKQKRKIQRLHSRIANIRRDYLHKVTTTVSKXXXXXXXXXXXXXXXXXXXXXXXXXXXXXXXXXXXXXXXXXXXXXXXXXXXXXXXXXXXXXXXXXXXXLRFTLQHQWSGWMLAWLNLPRCQMAQSLSL

SEQ ID NO: 17237 - protein, 399 aa, unknown
  TnpB Polypeptide
MLARTFGSCRVVFNDFVIERQRLYRAGLHKDVSFAETARLVTTLAKQTPERAWLGEVSAVPLQQAVDDASRAYRNFFDSHTGKRKGRRMGMPSRKRRSHRQSARFTANARFKVLDTNGSRWGKVRLPKIGDVRFARSRDLPSDPSSVTVVLEPDGTYWVSFVVDEPTREAVPAVKVAALDLGLTDLAAVVSINPETGETTREKIANPKHFRAAQRRLARQQRALSRKEKGSANRTKARIKVARTHRKVRDLRADHHHKLARRLVTNHDVLVLETLSLVGMGRTRLAKSVHDAGLGNLIRLITEKAENQGRTVLRIGQWEPTTQACSVCGTPGGKKPLSIREWTCGGCQARLDRDYNAAVNIMVAAGLAETLNACGPGARRTLACAVGDEAGTHRSEAAA

SEQ ID NO: 17238 - protein, 355 aa, Epulopiscium sp.
VQNKAYKFRLYPTKEQEILINKTFGCARLIFNKILGDGIDYYKEHKKSKLNTPASYKSEFEFLKEVDSLALANAQLQVRVAYKNFFSGSGFPKFKTKRDNHKSYTTNNQKGSIRIEDNKIKLPKVGFVKLKIHTEIQGVIKSVTISKNPSGKYYISILTEQVITPLPKSNKQVGIDLGIKDFAITSNGEVFENPKYLRQAEKQLAKAQRELSRKQKGGKNRNKARIKVAKLHEKVKNQRKDNMHKVSTQLINENQVIVIEDLAVKNLMKNRKLAKSISDVSWSKFRTMLEYKAKWYDRELVIAPRFFASSQLCSNCGYQNSETKDLSVREWECLSCKTVHNRDINASKNLLKLAV

SEQ ID NO: 17239 - protein, 397 aa, Actinomadura sp.
VSRYRLQPTPSQEAALLELCGQARFVWNLAVEQHRYWRPGRRSAPGLAEQCRQLTQARAASEWLRAGSQTVQQQALRDFAQAMAGFFARTHRRPTWRKAGRHEGFRIVGRRGMHWEVRRVSRRVGQVRIPKVGWVRFRWSRPVPDEVKSFRVTRDRAGRWHVAFAHVPDAIPAPGNGDGVGVDRGVAVSAALSTGELLHAPGLTRAEAARLRRLERKLARARRGSARRAGVRAAIACLKAREADRRRDWVDKTTTRLASEFDVIAVEDLNVAVMTRSAKGTIDAPGVNVRQKAGLNRAILTNGWGALVQRLENKAPGRVVKINPAFTSQTCHACGHRAPDNRESQAVFRCVACGHRANADVNAAINIRNAAGHAVSAREGPRVAGPVHREPQLVLLS

SEQ ID NO: 17240 - protein, 382 aa, unknown
  TnpB Polypeptide
VILTYRYRLLPLKSQHRALERLCAAQRALYNAGLEERIDCYRKTGKTRTYIDQCKSLTKCRHELPDMGELPANLQRWTLKRLDEAFQEFFRRLKTRSGKAGFPRFRGKGRWEAFGFSEFRGIRFDGKRLRFGGMPGALKLHLHRELPDGADIRSCVFRQDGSGWFVCLQVAVPTPEKRAIESVIGVDLGLTVFAYCSDKGEVPNPRIARRAEKGLRRRQRALSRCQRGSHRRHKVRAQLARVHRKIANTRNSWLHKESAKLVKRADLIVVEDLKVANMIRHPTLARSIADASWSRFVSMLDYKVEKTGGHLIRVDPRNTSQECSRCHELVPKSLAVRTHQCPSCGLVIHRDYNGSLNIRRAGIGARALNVVGCDERAPGNIS

SEQ ID NO: 17241 - protein, 411 aa, Halopiger sp.
VSETVTKTLQATLATPTAGKEQRLQWLLDTYRDALHDAFDDEADTMAAVNDIVTPYDLPYQAKDALKSYVPKLRDTYDAEELDDEHPVRLVNRAAKFDYSDERDYGFVWQVPQPGRGTNFWIPLRINPEQESLWFGLLDEDVTAGELRLQRHRTSWELHVTVEYPVEEPTESDDETYIGFDVGESALITGCALKRDVPRKPMLISGSRARHLRKEMHTTLQRLQERDAAEWRVDERFDHYQNALTDIVEKASRQAVEYARSFETPVIVLEDLSYIREHLDYGKWMNRRLHNWAFARVHARIEDKATEAGIRVEYVNAAYTSQTCHACGRLGRRTEQAEFVCPHDDCHVTEFQADINAAVNIARRANPWGESVRWEPGRDDSPRDGSARDSATVHRETSEKSSQMTLAAYTD

SEQ ID NO: 17242 - protein, 367 aa, Okeania sp.
MKSIRTKLKLNNKQKTLMAQHAGYSRWCYDWGLSLWNAAYTDGYKPNYGKLREVFTNHTKPLYPWMKNLSSKVYQYAFINLGEAFKRFFQGLGKYPRFKKKGKHDSFPSECYANTIDNCGKPIELNGWNHKLPLIGVVKTYEPIEATTKRITISRQAGDWYLSCSYEFNDITTAKKTDVIGVDLGVKTLATLSDGKVFDSVRSYQTFEAKLSRCQYRNRNKIIGSANYKKAQLKIAKLHTKVANIRRNALHKLTTYLAKNHGSVVIEDLNVRGMLANHKLAKSIADQGFYEFRRQLEYKCQWYGSEVVVVDRFFPSSKTCSNCGHVQDMPLHLRTYDCPECGLSIDRDLNASINLTDAVGSVVNACG

SEQ ID NO: 17243 - protein, 293 aa, Streptomyces sp.
VGFAHREQEWADRVEANRAVAYRIHLDTERGRWYLTASWQIPPSPAIPHTAALAHGVIGVDMNADHLAAWRLDTHGNPIGQPRRFPFDLSGTAEHRDAQVRHALTRLLHWARACGVKAIAVEDLDFTADKTREKHGRKRRFRQLISGMPTGRLRARLTSMTDQTGIAVIAVDPAYTSKWGAQHWQKPLTHDHRKTTRHEAAAVAIGRRTQGHPIRRRTTPPPAHQSDVQGHRTVQADRRALGREGPRPRIPGPRTRCVPPGRGVNAGNQNAQHRSGRSAEHESWQQDSLPLSP

SEQ ID NO: 17244 - protein, 237 aa, unknown
  TnpB Polypeptide
MYFVKNNPKDCLCERHRIKIPTLGWVRLKEKGYIPASKDGFVIRSGAVSMKAGRYYVSALVDIPAPEADGNFTDGIGIDLGLKDFAVVSNGTVYRNINKTARIRKLEKQLRRAQRKLSRKYENLKKGESTQRANICKQKLKVQKLHHRIENIRTDHINKVISEIVKTKPSHITIEDLNISGMMKNRHLSKAVASQKFYEFRTKLKIKCAEYGIELRVVDRWYPSSRICHCCSCIKKI

SEQ ID NO: 17245 - protein, 389 aa, unknown
  TnpB Polypeptide
MYKAFKYRISPTSSQKELIAKHIGSSRFVFNLALETKNSAYLGSKHNFSPFDLIKQLPELKKECEWLKEVNSQSLQQSIQNMDIAFKKFFKGAGFPKFKSKHKGRQSFSVPQNVIVENSLLIIPKFKEGIDIVLHRPIKGTIKSATISVTPTGKYFASILVDTNEIAPPKKPINESTTIGLDLGIKDFAITSEGEVFENPKYLRKAQSKLKYVQRKYSKYKGKKTKKKLALLHEKVVNKRKDFLHKTSTKLIRENQTIALETLNVAGMVKNHNLAQAISDVSWSTFVTMLEYKADWYGKNILRIGRFAPSSKTCSCGVINKDLKLSDRTWTCKSCGVTHDRDILAANNIKSFALKNILSGTDSKNQNELPRLRGVLTSEAHPIAFGVGG

SEQ ID NO: 17246 - protein, 406 aa, unknown
  TnpB Polypeptide
MLKIRKAYKYRLKTNKESEVLLTRFCGSARFLWNKSLAMNLERLEKRQEILWYNELAFWLTVWKRSEEYCFLKECPSQVLQQKLKDLERAFKDYFDKSQPLKRAPVFKKRGLNDGIRFPQGFKTDNRRIFLPKIGWVGFHKSCDISGKIKNITITNRGGQWYASIQVEQMIEIRKHPSVSEIGIDVGIQCFAAFSDGTKVEGVHSFRMHEDRLAREQRKLARKKKGSNNWKKQKRKISKLHHTIANVRQDFLHKLSTEISENQAKVYMEGLNIKNMSASAKGTIEEPGRSVKAKSGLNKSILDQGWYEFRRQLDYKLAWKGGMLSEVNPRHTSLRCSCCGHTAKENRMSQDVFRCQACEYEENADINAAKNIRTVGQTGMVCEANHRSGRQQEPIRTREEVLSLVI

SEQ ID NO: 17247 - protein, 370 aa, unknown
  TnpB Polypeptide
MEYSYKFRLYPNREQEKQILRTLGCCRFVFNHYLAKRKEVYAQDGKTLNYYDCAGDMTQLKKSLAWLREVDATALQSSLRDLDTAFQNFFRRVKQGEKPGYPRFKSKHNHRQSYKSKCVGTNIKILDHAVQLPKLGHVKCHISKEVKGRILSATVSQNASGKYFVALCCTDVEIAPLPSTGAVIGLDMGLKSFTVTSDGLEYPNHKFLTKSLRKLARLQRQLSRKSKGSKRREKARVKVARLQEHISNQRQDTLHKLSTQLVRDYDLIAIEDLAPKNMVKNHSLARSISDASWGEFRRQLEYKAAWYGKQMVTIDRFFPSSQLCSVCGAQWPGTKDLSVREWVCPSCGAVHDRDTNAAKNILNEGLRLLA

SEQ ID NO: 17248 - protein, 396 aa, unknown
  TnpB Polypeptide
MRLVDRHIIKDNRFEDICLKSGLLYNYVLYLVRQGIFNKEYLKEYDLSTKLGRENQFDFRQLPASVSQQVVGQVFKSVNSWIKLKSDFDRNPDKYNNHRPHLPKYKKGKKQNMVVFTTFSCRVKDDGYIHFVKNVIEPIKTNVKKDELKQVRIVPQATCYVVEVIYERKETDLNLDKDNFLSIDLGLNNLCSCISNVGIKPFIINGKVIKSLNRWYNKKKARLMSYVGDNGTSRRIRRISLYRNCWIDDKMHKISKYIVNFCVSNNIGRIIIGLNKEWKQEINIGRRNNQHFVSIPHSKLIDKIMYKAKLLGIEVVTHEESYTSKIDHLAFEEMKYQDNYLGKRKRRGLFQSSIGKLINADINGAIGIARKVVGDSCINTIVSSGLAFNPIRLNIL

SEQ ID NO: 17249 - protein, 291 aa, unknown
  TnpB Polypeptide
MVFASYGVKAGEKPGYPRFRGDGWYDSFTFKQYGFTLAEHGLLLSKIGGIQIVQHRAVAGKIKTLTIRRDAVGNWYACFSCEVEPAPLAMSTKGVGIDVGLESFATFSTGEKIENPRFFRRDEKELAKAQRKLSQAEKGTPERAKRRKAVCHIHQRIANRRKDFAHQLSHRIVSEFGIIALEKLNTQGMLQNHCLAKSISDAAWNQLAQYTQYKAENAGRECVLVDPHNTSRICSRCGALVEKSLAIRVHDCPICGLKIDRDENAAMNILALGLESLGFDRRSPTALAVGE

SEQ ID NO: 17250 - protein, 184 aa, Sutterella sp.
VEPFIVWRKHVMPYMKPDTGYMKEARASDRHVKYCRIVRRTLNGVKRWFVQLVVEGLPPVRKVYASKCEVVGIDPGSSRIAYFHERHAAIVEVAPHVDLKEPKIRLLQRRIDRSRRANNPDGTVKKGSSTWNTSNRGRRTAARSKLRKTITDLFNAASDGRQTGGEWVSLWSISNARLKAPAAR

SEQ ID NO: 17251 - protein, 421 aa, Calothrix sp.
MLNLSYEYKLKPTDEQISEIERTLVICRKVWNYILRERKDWINSRKCPINACSIVSEYIIPADAPYPNYYVQANGLTKAKELYPELKTVNAQMLQQVLRKLETAFVDMKRKGMGFPRFKNKYRMRSFVFPQMLKNCIKGNSIKLPQLGVVEFIKSREIPDEFVVKQARIVRKASGYFVILSLECDVNVPEPVTSGFPIGIDLGLDQFLATSEGKLVKRPKFLNTEHRKLKLLQRRLKNKKKGSNNRHKLNRKIARLHQRVTDTRKDWQFKLAHEVVKDAGMIFVEDIDFRVWAKGMFCKHTLDAGFGQFISILSWVCWKRGVYFEKVNKDFTSQVCPNCDTHTGKKELNNRVHACPECGYTTHRDVAAAQVIRNRGLSAEGRFVDIKEIACGDGLAGTGNSLVKNPRSRKKSGEARIHAAS

SEQ ID NO: 17252 - protein, 388 aa, Domibacillus sp.
MAVHKAYKFRLYPNKEQEVLMAKTIGCSRFVFNHFLSLWNETYGKTGKGLTYSACSSRLPELKKEFTWLKEVDAHALQSSLKHLTDSFERFFNKQNKAPRFKCKRNNVQSYTTNIEKKNQFPDVSITDNKLKLPKLGWVRFAKSREVDGRILSATVRRNPSGKYFVSLLVETETNKRAKTHSSCGVDVGLKDFAVLSDGTVYKNPKFFRTLEKKLAKEQRILSRRKKAAMKRKCRLSEAKNYQKQKLKVARIHEKIANTRADYLHKISTEIIQNHDVIGIEDLQVSNMLKNYKLAKAISEVSWAQFRTMLEYKAKWYGKQVIVVGNTFASSQLCSNCGYQHKDVKNLAIREWVCLSCHTHHERDLNASINLKNEAIRLLTAGTAGLAY

SEQ ID NO: 17253 - protein, 572 aa, Desulfomonile sp.
MKEIQLTYTQRLPDGMQLGVLSYLSVSMKNTNEVIAGLWGRLNEFMVGEGPAWKQVTGKIVPTEKHGNRQWRCEAETAGRILRSQASRKEIFKQIYPLLSSNLIVGEGKRRRKDRKEIFAGIGLLKGKLAGDAGKTAYMLNLVEQACNYYLENDKFPASYEELQGIPVLKTGMITFAGDDGGLKGQAYRYEIKESRLTLRLKMPDEKGKWGWAEPVEIRLSEEATAFVKEKKRLAAPTLRAVKQSDGSLVACIDIIVERDCPEQPIWQNQENVLGFDWGVRKLLTVVVLSPDGSQISRPFYLKTGGFDGKQARLRRQIDLLKAKRDEFSKDSRIYKKYQNEIDLCWHAYEKRNHALAHLSANFLLLLAETFGCHAIAGEWLSTLKSVGRGRSTNSRWRNWRNNTTIRSAITTILKYKSKLAGITLRFEQPRNTSHTCPRCHSHADTFSSPDSTKITDWGAWLICKNCGWNGSRDYAAAINIARLAVAFFLNKKLNPDRHSYSGFSMSFPLIKPASYIGAGSVLPFLPTDRHNASLVRLPHRHNRFFFAGWTNSVSFSPILLPRSHVYVCLHC

SEQ ID NO: 17254 - protein, 213 aa, Anabaena sp.
MPVFTTERQNISVLVILLVTMISKIFCQSSKNVASEKLNIKGMTRRATAVCSSRETLSAVPPGGNPQDRTASPRNCLKKGSKRKHQKTGLNRSLLDVGIGNLISLIKYKLDECNGVFVYVPLKIAPSQTCPRCGHKKKKELSQRVHNCEVCNFVADRDVAAAMVMLNYAKGLGTSLSNADAEPLSKNPQHCGGFRKVQQVKRLKPRDVAKRSP

SEQ ID NO: 17255 - protein, 315 aa, unknown
  TnpB Polypeptide
VARFEVPEGWTAQAYRFALDPSPAQERAFRSHAGGARKAYNTMLALVKAVMDQRAAERSYGIAEADLTPSLSWSLAGLRKEWNRRKDEAAPWWAENSKEAYNSGLDALARGLDAWDRSRKGERAGKAAGFPVFKSARSRRSVRFTTGTIRAEASRRHVTLPRLGRIRTHESTRKLARRIGAGTARILSATLSEDPTGRWFCSFQVIVQRAAGTPAHIAAAVPAVGVDVGVKAGSRPRNPSPLPRDGCGRSRGRPPASRAPGIRAPRAGGRRRNAGAGRTGASAASTLMPPPCAGTCCTRPPRPWRSSTGSSRWRR

SEQ ID NO: 17256 - protein, 528 aa, unknown
  TnpB Polypeptide
MVKKKKLFTIELEHFVSGVQSVNRVLINRYPDKKHIISKKSTLILASLLLLRKRKRFISVEHMPQNKWVILSNDETMFDDDTILFKNWLSMICLTHSAKKKIFYPFWNNRCMEISNNIWLPTQNVIDSKSNSWTSQTIENTNLTYLSEYMFISREKCDEKGIRARKIRIYPNKTQSNKLKNWIGTSRYVYNQTLNYVRTKGNKELNFYQLRDRFVTAKNNSKLKEWEFLTPKDVRAGAIKDMVNAYKTAFSNLKRGNIGQFKINYRCKKKDRSIEIPKTAISYKDGSLFIYKKYLNSKIKKCKETIPEIRYDCRLQWERKQWYLIIPIDVECKDSGFDKTEACALDPGSRKFQTIYSENKVETVRIRKDQIKKLQNKLDKMKSLRDKKIISRKRYKNRENKIYNKLDHLIDDMHFKTINSLVKNYQVIFLPIFESQEIVRKNKYGNRNLLQLKHYRFRMRLAERCKIEKETRLVVCTEEYTSKTCTRCGLLNDVGSSEVYQCSNCDLIIDRDVNGARNIFIKCINEIM

SEQ ID NO: 17257 - protein, 420 aa, Bordetella sp.
MQRLQACKFALRPDGRQERQMRRFAGSCRVVFNEALSLQKARYEAGKKKLGYAGLCKELTAWRNGALLPSGRTAPWLADGPVHTQQQTLKDLERAYTNFFAKRADFPRFKKKGQSDSLRYPDPKQIKLDQGNSRVFLPKLGWLRYRNSRDVLGAVKNVTVSLSCGKWFVSIQTEREFEQPVPNGGAVGIDMGIARFATLSDGTFYAPLNSFKRHETALRKAQQAMSRKTRFSNNWNKARARVQRIHTRIGNARRDFLHKTTTTISQNHAIVCVEDLQVRNMSRSAAGTADAPGRNVRAKSGLNKSILDQGWFEFRRQLDYKLACNGGHLIAVPPQNTSRTCPCCGHVSAENRQTQERFACVECGFEENADLVGAINVLRAGHARCACEVSGAVMPPATGTHRSDSSRLDAGLSTVGISRL

SEQ ID NO: 17258 - protein, 400 aa, Alloactinosynnema sp.
LIGMSRFRLQPTPTQERVLVEHCWHARFVWNLAVEQHAHWRPGRRAAPGFIEQCRQLTEARAANPWLAAGSVIVQQQALKDFTEAMANFFRRTHRRPTWRRRGRAEGFRIVAVKPGDVRRVSRKVGEVKVAKIGWVRFRWSRAVAEGVKSYRITCDRAGRWHIAFAVAPKPIAGPGAGAAVGVDRGVVVSAALSTGELLNAPTLRRPEKARLLRLQRKLARAQRGSNRRSKVKTAIAKLRARETDRRKDWVEKTSTYLARQFDVIAVENLKITNMTRSARGSRDVPGRGVRQKAGLNRGILANGWGLLVTRLEHKAPGRVVKVDPRYTSQRCSACGIVDREARESQAAFRCRSCGFAANADVNAALNIRHAAGHAVTARGGPPLGELMNREPQRDLLPVR

SEQ ID NO: 17259 - protein, 540 aa, unknown
  TnpB Polypeptide
MYKTKGPDLLLPLYNILQGELNRILSTSTYVEALSKIEFKYKDENGVEHSKLNGMLWAEIDDIIGNSLRGKGLYVWYIRILYHNIISLLKSRQEQIKIYEILKSNQYKIDNTLRDKLAQEKLYPTNPYLEILANAKDMPVLSKRKTFILDFSVSDKQMFRVGKNSNAYEIKIYNKKEIKENNLKTGWISFDMYLPTYIRESFTGKTAKPQFYWDCNKNEFVCAIPCEIKKLPHEYENIMGVDLGKIKAYSATVLREDGSISDEYVPTEELQNLVNKLKRMNQHIKSVYEKRKRSSKYGNFTNRQARRKLDYKRSRNKRTKLQFAIARLVAVEVVNIAIKEQCKEIHLENLSWIKNSSGKWNFAQVQACIEEVAELFSIKVVKVSAYNSSKTNPVTLEIGKISNRDVIFKNGQKVDRDQLAGLNLALREPKKVKQRKIKTLNVRNSVVIQRQSRRFNNYLMKKSVMPEIKSKRKIHKEYLRAKQVSSKPDLIKKENKKIVMFSHDKAKSDFAIVSVYKSSNFKLKFYFANNLQFKPIYTNL

SEQ ID NO: 17260 - protein, 421 aa, unknown
  TnpB Polypeptide
MCINHIKHKIQKGGEIMNLTEKEIIYSTDERFDLIKELCHLSKNLYNASLYDVRQYYFETKSYRTWQTQKPIFVKSKNPDYYALQSHIAGEVLMQVGHQFIGFFNNKSNKKKRIPKYKDKNGYNIVTFTNRTISKQIEFDEDKQLYTYTLCRRSYNLKIQSTKQNVKMVKFVYDEANDLIKCFKIYEVEEPKLKKDNSRYFSIDPGLNNIVSIYNNIGIRPLLYNGRPIKSINQYYNKTNAKLRSELPNNVKTSKKLRQLSFKRSNKIDYEMHKISSHIIKEAVKNNISKIFVGNNIGWKSEIKIGRKNNQNFVNIPHTKLFNQLLYKGLLNGIEVIFTEESYTSKASFFDKDELPIYDESIKHKFSGRRIKRGLYRDSKGNIWNADLNGAANIMRKCSDKAYKGIRKTKELIKRPILVTL

SEQ ID NO: 17261 - protein, 474 aa, unknown
  TnpB Polypeptide
MKRTVKIKANCSNNEEEILLIGTIQRNIKNYVWSRYSGISSLLKQSGWTVRDELIQKDLLSKKIPKTLSRVAVENSASTIKTNWSLTKKQVKKAITQNENLTKDDKRYLYLCLKHTPTLYNILNYKKVDYQTDYLKDLKVNVHRLNNLLRRYIRRYKAKPYTKKANVILTSNLYKFNTNNRIFMFSGKAKNSRIEISLIGNIPKLKGTLELVKNQKTNQYYLHIPLDRIIAKKNMTAESEILGLDVGITDLVTLSNGSVYGANSSELFYNLSDNLINKNRSRLFAHQRKLEQKIVIEQDQSKKFILEQKLKNLEDNNLGSKKRISKISKYKSRIVSHINCELNKMVKEEDIKEIVREDLNWSSKKRNKRNVRRKQQNRFSTWTKGVLLERLSVKLAEKGITETIVNPAYTSQVCCKCNHLGIRKGKEFKCSNCNLSIDSDFNASINIKKRKSIKEIDIYTPYKEVKKYYENLAV

SEQ ID NO: 17262 - protein, 385 aa, unknown
  TnpB Polypeptide
MYKFRLYPSRKQKVRVINSLKTCKQIYNELLELNIKTYKETKKVLSKFDYDKINSGKYKEIFSQSTQNVSDRVYKAFQNFFRRVKENAKEKGFPRFKSRVNSITYPQMGFKLVSDKKLRVSKIGNIVIILHKVPKGKIKTLTIKQNKAGQWFATFACEMEEKEVKHRNNKSVGIDVGIEKFAMLSDGIKIDNPRYLIKSEKRLDKLHRVLSRKKKGSMNRRKARFKLAKQYLKVDNQRSDFLHKLSHKLTQDYSNIVVEALNIKGMVKNHCLAKHISDALWGRFIEMLSYKAVTSGGKLIKINPRNTSKTCSKCGNVMEMPLKKREFKCSCGYEEDRDLNASKNILKVGTDCAEFNACGHDVRHLARDAVVNEAGTIRREISQCQ

SEQ ID NO: 17263 - protein, 387 aa, unknown
  TnpB Polypeptide
MIKAHKIRLNPTAEQAVYFAKAAGTSRFVWNWALAEWNRHYEAGAKPTALKLKKQFNEIRREQFPWTWEVSKNASDQPFLDLGKAFTAFFEGKARRPRFKSKKRSKPSFYLANDQLELGDHRIWIPKLGWVNMAENLRFKGKVAGARITKTADWWFVSIQVELPDALPEKKPAAVGIDVGLNRLATLSTGEGVENQAFLKTALKKLRQANKRLHRRKLGSKNREKARKQVARLHYRITCLRDDVLHKLTTRLANCYGIIGLEDLNLKGLLKNRKLARSFSDAALGRLVNLLTSKMEQRGGQVQKVGRFFPSSKTCHACGWKWEEMQLSDRVFRCQNPKCAYYQFEQDRDHNASLNILHEALRLIGLIDQVVNGIGSDNDVNLPADAG

SEQ ID NO: 17264 - protein, 373 aa, unknown
  TnpB Polypeptide
MGMKQTLTIKLHPTPEQFNILKETMEAFNEACNSISEIAFQTKTFNNWQLHHLVYRDIRQKFKLSAQMTVRAISKVADAYKVTKSVKATFDLHGAVVYDQRILSWKGLEAVSILTIEGRQKIPMQIGIYQQARIDKIRGQADLILHGGGQFYLVATIEVPEAEPFAPKDFLGVDVGVKNIATDSDGERWVGKELNGVRSRYAKVRSKLQSKGTKSAKRLLKKRSRKEHRFATAINHVISKRIVQKAKDTLRGIALENLKGIRLRVTVNGSRQRRIIHSWGFNQLQSFIEYKAKIVGVPVAYVEPRDTSRTCPKCGYVAKTNRKGEEFHCGKCGLLGHADHVAAVNIGRAVFNRPYVSKDFFRHVSLSPLGTIS

SEQ ID NO: 17265 - protein, 406 aa, Actinopolyspora sp.
MQVKRAYKYRFYPTEQQRQELLRTFGCVRKVYNLALDARTRAWFTEQRRVNYTETSKLLTEWKRSDEFSYLGEVSSVPLQQTLRHLQTAFTNFFDKRAKYPTFKSRKMSRQSAEYTRSAFTFGDGRLRLAKMHDPLNIVWSRPLPDGAEPSTVTVSRDAADRWFVSILVETSTDHHEPTDNTVGVDVGVDSLATLSTGEKVTNPKHERRDRRRLAKAQRELARKQKGSNNRAKARRDVARVYARITDRRRDHLHKVTTRLVRDNQTVVLEDLQVRTMLRNGKLARAVSDAAWAQFRTMLEYKAAWYGREAIAVDRWFPSSKTCSACGGLAESMPLHIRTWICNGCGTTHDRDVNAAQNIKAAGLAVSAWGAGVRPQRESSRTGQPARKQEPSGASRKEIPALRGGE

SEQ ID NO: 17266 - protein, 313 aa, Microcystis sp.
VSKCAPQWALRALSDAWKRCFKKIAKPPKFKKKGKQDSFTLDGSLKVAHQKIKVPGIGWLKTYERLPYRCQPKSVTISKKAARWFISFKIEIEQQTTDKIYEVVGCDLGVKSLATLSTGEIFEGAKSYRKYEKKLSRLQYLSRRKIKGSSNWKKAQRQIAKFHLKIANIRKDTLHKLTTYLAKNHGQIVIEDLNVSGMIANHKLAKAVQDMGFYEFRRQLDYKTQLYGAELIVADRWFPSSKICSNCGYKKESLSLSERVFDCEQCSFVCDRDLNASLNLASLAVSSTVSAWGVDSADTATLKQEINVKFAHE

SEQ ID NO: 17267 - protein, 147 aa, unknown
  TnpB Polypeptide
LHRRIAEIRADVLHKLTTELMRYRTVVIEDLNVAGMLANRHLSRAIADVGFFEFRRQLEYKAAMAGSTVIVADRWYPSSKRCSVCGVKSENLTLSERFWTCLSCGASHDRDINVAVNLARYPESSPGSAHGADGSGGEDDLAAKPAA

SEQ ID NO: 17268 - protein, 420 aa, unknown
  TnpB Polypeptide
MRNKRQANYSYKFRLYPTKEQEQFLKRVIGSVRFVYNYMLARAKEEYRLVGKRWNVYEYKKLLPLLKEEHPFLKEVPSQSLQEAVFNLDRAFKNFFAGRSEFPSFKKKKHGGSFYLPQGWRIERVNQKWGLLYLPKLKEPVRVRLHRDIEGEIVSINVRLTPGGSFYLTVRVYKEIQKLKPVDRICAIDVGLKHFATICYLDGNVEKVENPKYLVKTEKRLAREQRKLSRKQKGSKNYEKQRLKVAKLHEKVKNQREDFLHKLSKRIVSENQAIVLEDLNVKGLLSGDLSKHIQDSSWRKFLQYLYYKAVWYGRDLIFADRFYPSSKTCHVCGYKNQSLRLIDREWVCPVCGSKHDRDINASKNLLLYGVAHLTSGRVGTTQAKACGDGSASGTALLPVYEASIVEAGSSCRKAGSPSIN

SEQ ID NO: 17269 - protein, 376 aa, unknown
  TnpB Polypeptide
MAKKKNDNKNTITYVLELLKPTKKKQRLFFRNIDEVVKSRRAIAKELNNDNKKLSTADFSYINLPSAVKNQDIREVKALHKRFKKSNSKKETLEFKANQPICYNNQNYKVHGHIVSIPLFSNKTSRYAFPVKQNERFVALQRHIEKGAKLGKASLFYKGNKWFFAVTVSFEIKKVNSKNTMGIDIGLRQLAVASIKTSEGKEISRRFHSGNHAGFIRKKYNALRRKVGQVKKPKAIEKICNKEQRWMTDLNHKISRQLIDLAVHEKVSTIVMEDLKNIRQTAKSHKRPDRNLNRWTFYQLQQFIEYKAKLSGINVIYVKAKYTSQRCSKCGAILKKNRKKNLYTCQCGNHMHSDLNAARNIADQHLKGWQVRQQPA

SEQ ID NO: 17270 - protein, 412 aa, unknown
  TnpB Polypeptide
MIKTLNIRLYPTKEQERLMYNHIGCMRFVYNWGLAKQIENFKKTGKKLTATDLGKKLTLLKNTQGYEWLYGVSNASLKESLRDLDKAYQRFFKTQKEGEKYAKAKIQKSVRTGKLLGVYDLKGHPKFKSKKKAEPKFYSRYDKIYFKEDIVNLEKIGKVKYRCDYELDLTTIEKFTNPRVIFSGRVWILSVGVDIENPNTQLEDKVLAIDLGIKKLAVVNIDGLDVVNINKTKVVKNLEKKLKRLQRQCSRKYEINKTKMKGGENRYQKTANIVKLEKKIKKLHGQLKNIRLDHIHQATAKMVKAKPSVVVMEDLKVSNMMKNKHLSKAIGQQGFYTFINQMKYKCQWHGIKFIQAPTFYPSSKTCSSCKEIKKDLKLSDRIYKCKCGFTCDRDKNATYNLENYGLVKSQAV

SEQ ID NO: 17271 - protein, 362 aa, unknown
  TnpB Polypeptide
MSKNKKQGGETVQITVKAKLIPTAEHREHLKTATVEYIRLINTIVSECIEADNGIKYTSGTVSATLPSALKNQAIQDAKSVYKKFRKTKIRSVLKKPVCIWNNQNWTLKDGILRFPVLVNGKSTRINMPVLLSTYQLEKLNGKLGTLRITEKSGKWIAQIAVTIEDAESKDSGVLGVDLGLKCPAVAVTETGKTKFFGNGRENKYMKRKFRSKRKKLGKAKKQKAIKKLNDKEQRWMKDKDHKTSRQIVDFAIQEGVGKIRLEQLSGIRQTAKTSRKNEKNLHTWSFYRLAQYIEYKAGLSGIKVEYVDPKYTSQTCPECSQRNKARDRKYKCSCGFKTHRDRVGAMNIIKAPVIDGNSLSA

SEQ ID NO: 17272 - protein, 298 aa, Limnoraphis sp.
  misc_feature (4)..(7): Xaa can be any naturally occurring amino acid
METXXXXPKHIEFIDKKGIGKLKLVGTWDLAFYPVEQIKRVRLVRRADGYYVQFCIQVDVKVKTQPTGKTIGLDVGLKEFYTDSNGNSEPNPRFYRKNEKQLKLYQRRVSRKNIGSANRLKAIKRLGKAHLKISRQRVGVARRRLEHAKKLARCVIQSNDLVAYEDLRIKNLVKNHCLAKSINDAGWYQFRKWLEYFGSKFGRVTVAVNPAYTSQTCSNCGAIVKKSLSTRTHICQCGCELDRDHNAAINILNSALSTLGHSGTWILDQNATLRERLRRTGDFTSTVIGEILSQQVES

SEQ ID NO: 17273 - protein, 150 aa, unknown
  TnpB Polypeptide
VEAVGVDLGPARLATLSDGRSLGNPEPLERSLERIGVLQRALSRKRFLLNNWLKAKRKLAGEHEHVGDFRRNFFFKLGFLLAPEYDVLVLEDLGVQGLIQKDVTGKRRLRLHDSVFSELRAVLEWEFVKRGKLVLPVPAYNTSRKCFECG

SEQ ID NO: 17274 - protein, 543 aa, Oscillatoriales sp.
MSQISGLARKHISGSSPMKARSKASKTKQDKDSTMLSHTSAVQLSWELFANVASVQPNSETTLLGKLNLCENDIQKLKSSKASALDSTLREKDCKPYWSELCAQISSRLLLPVETSKADSDLSYSSLWSSKTVENSWFSQTLFTALKPNSQPIFLPSFTATVAECTASGATARKSRKIRIFPSPEQKALLKRWFGVSRFVFNATIKYLQEPGTKANWLTIKTGILNSLPDWASSVPFQIKSIAIKDACQAVKKAKADFKKDGQVRRCKFRSRKDTKQSIYIPKSAIKDCGIYHTILGRSKLKEALPKDFSDGRLMLAYGEYYLIVSEEVQPRQTDNQGRVVALDPGVRTFMTFISESSYGYLGNDSNLQIQKLCFKLDRLISKMSASPSAQKKRFKKAADRLKSKVQHMVKELHDKTAKFLVDNFDVILLPSFESSKMVSKSRRKIRSKTVRQMLTLSHYQFKKHLEWKAWESGKVALTDINEAYTSKTVSWTGEVKKIGGSRVIRDRDGRCMNRDLNGARGIFLRASVDTPWLREHLSLCIC

SEQ ID NO: 17275 - protein, 452 aa, unknown
  TnpB Polypeptide
MPSSGQLSGYEERGPISPAIPEEGVYEVKYENRRTNVVRLLPNGFQERKLRKLADTSARLFNEVNYERRQQFFRGEKVDFQGTYKKYYEKYKGILGSANAQQVLDKNNEAWSSFFSLIKLKGKLPPHMNHVSPPRYWKEEKKRKLILVVRQDRYEVDEKNHKLILKGFNLEIEFAGRLRWYGKQGRLEIHYDENAWYASIPVEVGVEETKTGKKSKYIVRGERKTIQIESPKGNKVASIDLGINVLASVVVDDGTWLLYKGVRIKQDYFYLQRKIAEVQSLADKARNLGEYEAQEGLNREKRRLFKKLIRRLLHLYRNLASDLLEQLYDQGVSIIYLGYPFNIAQDKGNKFTVNLWSYREFMNAIELKAQEYGMKVYEVVEYNTSKYCAYHDVEVKRRPRGVVSCPKGHKLHGDLNGALNILKKAVGIAVSTMKKPLSFLVLHNGVAPTKGV

SEQ ID NO: 17276 - protein, 396 aa, Cyanobacteria sp.
MLVFEFKAYGKSSQFVAVDEAIRTAQFIRNSCIRLWMDNKKIGQYDLQKYCAVLAHKFPFASELNSMARQASAYRAWSAISRFYDNCKKKTPGKKGYPQFQKDCRSVEYKTSGWKLASDRKSITFSDKKGIGKLKLKGTRDLHFYQISQIKRVRLVKRSSGVYVQFGIDVIRKESTEPSGKTIGLDVGLKEYYTDSNGVTIENPKFLRLGEKVLKHSHRRVYRKVKGSKNRAKARQILAKRHLKISRQRKDHAIKLARCVVESNDLIAYEDLKIKNLVKNHCLAKSINDASWYQFRIWLEYFGKVFGRVTVAVNPQYTSQECSNCGGIVKKTLSTRTHVCKCGCSMDRDENAARNILSRGLSTVGHTGTFGLDPSNALGESISTQAGEILSEQVGS

SEQ ID NO: 17277 - protein, 511 aa, unknown
  TnpB Polypeptide
VRYKRAQVYAAELSPAQAETFALQRAGVTAFFNEAVASQLDRWKHHAGVESCMSLSYAVSVARKAGCEFRHHGQTHPFTIVPSVMLHGALRQLSASWTRHFTMLKEGKPSSPPRFRSVHKGGSLYWQTQEGSVRCPLPGVIRPGRPGRAMLKVPGAIGLVKIRYHRVLPEDTLVGFASLRVDDTGRYWATVQYDTAEVRQPATSGVVGVDRGVTVTAMTSDGETYDAPGLSAGQQERKRRLQVAMARKRRLNPCRHDTWTQRNGRAHLLRGYCPPPGADGHDCDCWKHSRRYLRDKMAHLKLMQHETRQRTAGAHLASRALAARYATVVMENLDVSAMTASAKGTEDAPGRNVKQKTGLNREILAGNWYQLQQFVAYKTTLVKVPAPHTSQTCPGCGLVDAANRPSRAVFQCVGCGLSGHADIIAAGNIKDRFTAVAQTVAAREICQPVREQPVNSPNSIEAARLPSAAEPSGALVPSAWGLGPPRTRKHRRRRRARTQGCLTAQRGDMRA

SEQ ID NO: 17278 - protein, 212 aa, Chloroflexi sp.
LKVSGVGRIKVRWHRPYQGDVKTCRIVRKAGQWYVSLMCEVPDPVPLPETGRVVGIDMGINVLITTSEGEQAHNPRWYREAQAEPRRKQRKLQRAPKGSNQRKKKLLDVQRQHEHVKNQRQDFFDKLVYDLVQTYDVIVLEDLKIKNMVKNRHLSKSFLDAGWGYFKQRLLDKVAGASREVVLVDSAYTSKSCSNCGAIFEGLTAGTSLGRM

SEQ ID NO: 17279 - protein, 443 aa, unknown
  TnpB Polypeptide
MKTLKSYKFRLKPTKEQLAMLKQHGGNVRFVWNKLLEYSNKEKERTNFYPTQSQLQKQVLALKTENDFLKKGHSQPLQVNAQKLVKTFIKAFKPETIALRNKKIAIANQEKNEELRQRKLAKALNFGFPKFKSKRDCNDNLFYPQYFKIGKSRISFPKLGWINYIKHTEVKGKPLFITITQDGSDQYFVSITCELKIKEKVKPNLDKANIIGIDVGLKSMAVFSDGTIIENPRTLKKNLKKLRKENKSLSRKIYDEDTKKSSNNRIKQISKVQKVHRKIRNIRKEFLHQLTHQIITKYDGVILEDLDIQGLLQKEKRNDRAMNRSISDVSWFEFGRQLEYKSIWNSKYFCKVDSYFPSTQLCSKCGKRAKLLLENRVYFCETCNNKMDRDYNASWNLHDEGIRILRNKNTLSTRGIKACGSGELGRKQEQVVIGAATDLSIAV

SEQ ID NO: 17280 - protein, 369 aa, Hungatella sp.
LLRAYKYRIYPDREQEILLGKTFGCVRFIYNYYLDQKKSKYETEKKSMSKTACNNDLNRRLKQEYPWLKEVDKFALTNAIWHLEDAFQKFFKEGAGYPKFKSKHSHYDSYTTNFTNHNIKADFGKGMIQLPKLRQVKAKLHREFTGQIKSATVRRVPSGKYYVSVLVETEELVSAPFSDKSVGIDMGIHEFLVDSDGNHVQNPKYMKKYEKKLAKEQRKLSHKKKGSRNWEKQRIKAALVHEKIRNAREDFSDQLSAQIVRENQIMISEDLQIRNMVKNRHLAGAISDASWGNFIKKLEYKSRWRGRTCHKVSPWYASSQICSVCGGKNPEVKLLSVRDWECECGAVHQRDENAAKNILQKGLEELRIV

SEQ ID NO: 17281 - protein, 369 aa, unknown
  TnpB Polypeptide
MILSHKIRLNPTPEQEQYFWRAAGTVRFAYNWGLARWKELYEAGEKPSAHSLKKQFNAIKYEQYPWVAEVSGRCTEYAFMRLGKAFANFFRRVKNGEKEVGYPRFKSRKDPHQSFYVANTELKLNGHWVKIPRVAKPINMAEELRFSGKIMSGVISLYGGHWYIAIAVEMPGRETAVSGAPVGIDLGVKDAAILSDGQVFENQKHLARELRKLARLNRELSRRQKGSGRWWRTKRRLNRLHAKIRNRRLDGIHKFTTAVTKEYGIIGVEKLNVKGMMSNGRLARAVGDVGMYEIKRQITYKADLYGAQVMEVGQWFPSSRLCHACGWKNTNLTLVDREWTCSECGMVHDRDVNAAINIRNEALLLATEW

SEQ ID NO: 17282 - protein, 368 aa, unknown
  TnpB Polypeptide
MIMNRTIKFKLELSKEDMLKLISTMGTASKIYNKITEYGFKNKTHNKIKVHNATYKQIRQEHPSMPSSLVQGIRDVACESLKGVKLKTQPISNEFSAVRYNKRVITIKYSIKTASIATTYGRIKVRFNIPEYYHKYLNWDIKTSTLCFNRKKCQFYLHTTIEKQTPELNIATPEVLGIDRGIVNIAVCSNNIFFNGKQIKNVRAKYKYLRQKLQSIGTRSAKRKLKRISEREKRFVTNTNHVISKSIVNMPYNVIAIEDLKSIRVQKRRINKQFKTKLNNWSFYQLEQFLTYKCELQGKKVILVDARYTSQKCSKCGDIRKNNRKGFEYKCKKCGFELHADLNASRNIAQAGISCLSRLPVNQPIVAI

SEQ ID NO: 17283 - protein, 502 aa, unknown
  TnpB Polypeptide
MVVKRVLPIKLSSRYRRKVRSFIYDVAQFQNLLRIFILGWDKKTCDIFRFFNPSLLYSLLADKIRSNKSEWQRKELEEVKGIIEKDEELKSWIEKLKEQKKRVNEAWICSQVINQEVRNLKSWAKSMKEYKKNPEKFRGRLGLPKPRKLKNLTRFTVVVPCVRDSRRLSLKLRNGEKPLEVLLPEGFDYKVKEVRLVYDMDWIEVQVVYEKEINMNVVGMYRAGIDIGLDNLFSVVSDNPELRSLIVSGKELKSYNRWWNKKVAEIRSHMDRILNLIKEAKDEEKRKVLEKHYWWLKRYLWNLCKARKRKLDTWMHQVTRRLADLLYETGHRVVYIGKDAIDKNGMLFSKVVNQNYVYIQHRKFVNMLKYKCEELGIEVVEVSERYTSKASPIGDNVVEIQAKKVDGEEVEFSGKRVSRGLYKDLKLDKVFNADLVGAMNILKVGAKLRRLVVDMKTLFIKLCNPVKFRMWDWIYESNPESLFIGIGIGASRPVARQEALAL

SEQ ID NO: 17284 - protein, 347 aa, Microcystis sp.
MEKAYSYRFYPTPEQESLLRRTLGCVRLVYNKALHERTQAWHERQERVGYAETSSMLTEWKKQEELNFLNEVSCVPLQQGLRHLQTAFTNFFACRNKYPNFKKKHQGGSAEFTKSAFKFKDRQIYLAKCTEPLPIRWSRQIPESCEPSTVTVRLHPSGRWHISIRFDDPTIKPLPVTDKAIGIDLGISSLVITSDGDKVSNPKHFKKHYRRLRKAQKSLSRKQKGSKNREKARIKVAKIHAQITDNRKDHLHKLTTQLVRENQTIVVENLAVKNMVKNPKLSQAISDVSWGEITRQLAYKCRWYGRNYIEIDRWFPSSKRYSNCGHIALEDAVKCSRVGLSRLWDTP

SEQ ID NO: 17285 - protein, 420 aa, Ignavibacteriales sp.
MVRGVGANVREIPMQRAHKIRLNPSAEQEKYLRQACGVARFVFNWGLAEWRHQYEADEEPSAYKLKKQLNAVKRQEFPWMYDVTKCAVDTGFRNIDAAFKNFFRRCKNGDTKKGYPRFKSKRHSRKSFRMDGNRVKIDGHWLKLEKLDEPINMAETMRFDGEVKSVTISEDAGHWYAAVNVEVELPKYGHPQKSVGIDLGIKTLAVLSDGRGFENQKLLRSELRKLKRLNRELSRRQEGSGRWNHTKAKLARFHRRIADRRMDYHHKMTTEIASTYQIIGIEDLNVAGMLRNHRLALSIADAGFGEIRRQLQYKAEWYGSELVEIDRFFPSSRLCRFCGCINGDLTLADRIWTCACGAILDRDRNAALNIEEQALTILGRGSGFTESLNGRGQNVRPSRAILNEASKVAEERRPSIPAVV

SEQ ID NO: 17286 - protein, 386 aa, unknown
  TnpB Polypeptide
MEKPKSRFKLIESAYFRLKQYGLHTHYLLSACEIAYSVYKNKNRKSSPYVKQAFLKLDNQSYTLNHMLLRIPVRPREFIYLTLQGSDYHFQYIDDPTLKRGSITLGRNSLSIAFSKEVADEIKPLGNVGIDVNERNITTSDTLGVTTAFDTSSVMEVKERYRAIRAKIGRQTRQDVRISQRLYAKYGRREKNRTVQRLHIVSKKIVQQAKEKKLRIIMENLKGIRKLYRKGNGQGALYRGRMNSWTFREVQRQIEYKAAWEGIPVTYVNPRGTSRNCPECGSRVVMLAERKLYCPRCDKTWDRDELASLNIMSKKKMKKMTCVVPQARSSIDEAVKGNEQTVRRTAPILQAEGWKLTLVPKSYQNLKAGSVYLPHRNSHHNPIDMG

SEQ ID NO: 17287 - protein, 382 aa, Eubacterium sp.
  misc_feature (215)..(215): Xaa can be any naturally occurring amino acid
  misc_feature (370)..(370): Xaa can be any naturally occurring amino acid
MNIAYRFRIYPNREQEVLLAKTFGCCRFLYNQMLNDKIREYEASKKMLRNTPAMYKKAYPFLKEVDSLALANVQLHLEKAYKNFFRDPKIGFPKFKSKHRIRKSYTTNVVNGNIQVEDYRIKLPKLKWIRMKKHRDIPEKYCLKSVTISTEPSGKYYASLLYEKSDCENQAEEFDYEDAKILGIDYAMHGMAVFSEDIQKENEGYFRKSEERLAXDHRIKLPKLKWIRMKKHRDIPEKYCLKSVTISMEPSGKYYASLLYEKSDCENQAEEFDYENAKILGIDYAMHGMAVFSEDIQKENEGYFRKSEERLAREQRKLSHCVKGSNNYYRQKKRVALCHEKVRSQRKDFLHKLSHEIAEAYDVVAVEDIXGTIRKVLCKSII

SEQ ID NO: 17288 - protein, 397 aa, Nocardia sp.
MIRMQPLDDEKLREELYRINVYMAWWAKDNVIDARHGIVVSNQAMSISAMLVKEWLRRNPFPNLSRARTMAMDGPIAKVSTSTNSHAEFWVKVTTLEKRKPVNIPLQGYEYFNKADGEVRNFCQIHVSESGTVSFVLVKKSLPTPQRDRGESLGLDWGLKNTFATSDGQLLGRGLYRWLCQRDKELNELGATLQRQGICPSRSKRYLKLNLRIREHVRNEVCRVLNRLADKDIRELVVEELDFRMGGLSARLNRIMGRAGRAAVRAKFASIVQTHGITVTRVNPAHTSRCCSGCGYVDKKNRPSQERFMCRFCGKRLPADINAARNIRGRSADSNGHRGQSREQVLAEMDRLFRTRWRFEPTLLRERHARGCSTASSPQRRKPSRSTRTSPIRILHS

SEQ ID NO: 17289 - protein, 203 aa, unknown
  TnpB Polypeptide
MRLVDRHIIKDNRFEDICLKSGLLYNYVLYLVRQGIFNKEYLKEYDLSTKLGRENQFDFRQLPASVSQQVVGQVFKSVNSWIKLKSDFDRNPDKYNNHRPHLPKYKKGKKQNMVVFTTFSCRVKDDGYIHFVKNVIEPIKTNVKKDELKQVRIVPQATCYVVEVIYERKETDLNLDKDNFLSIDLGLNNLCSCISNVGIKPLL

SEQ ID NO: 17290 - protein, 405 aa, unknown
  TnpB Polypeptide
MNKGYRVRLYPNKQQESQININTNCSRFIYNAMLAEHIEVYNQLQDDKEELYAYKYKKASEYKVDFPWLKEASSWALSESCRNLSRAYANFYRNIKQGKKGGFPKFKSKKAVKWSYTEAQQRGGIRILNNKIHLLKMGWVTFRGLSKDFQGIIKSVTVTKTRTNKYFASILVECGDVKRERVSDNVVGIDLGLKELAVCSNGEFITGIKDRMAEIENKIKQQNRHLSRKKLGSNRYEKCKLQLNKLWEYRNNYLSHFQWHLVNKLCSENQAIGLETLNVIGMRKNRKLSHAIQNINWGSLVSKLEEKAKEYNTVVYKIDRWFPSTKLCSSCGALHEMRLSDRIYSCGCGNEIDRDLNAGINIRNEMLDNISLKNSDYRRGETVKPVRLDYESDGSFVEALTMKIA

SEQ ID NO: 17291 - protein, 362 aa, unknown
  TnpB Polypeptide
VQKVVKAKVVRLTNIKRQILDHEYDGLQRFLQGDQSVELYSANKQQAQRFYRVVKPEQEYPLSIRKDLIRVERSGTKLAHYWVRIPVKLRRGGVWVAIKPHCEITDGLEICESKLLRRGGEYFLNLTVKREVELKTSYSSVLAIDMGIRHVACSVDTRSGETRFHGRELRKARGHYFHLRRSLGRKKLLKVVKRIGDKEGRITNDQLHKIANTIVDEAERTNAIIAIGNPKGIRENGKGRRFNRKLNSWPFWKLRQYIEYKANWRGIRVVEVNEAYTSKLCWRCGALGKRSGSHHGLFECPRCGLKENADRNGAFNIGRRALGQVSKVGAVVSQPVTGALPPAELGSVVQYPTPEATQLVGW

SEQ ID NO: 17292 - protein, 412 aa, Halococcus sp.
MNYNYRYRIRPPDDVANELRRHIDTCRQLYNHCLYVLNESDDIPARYEVQGTLPDLKQRWGGLKNVHSKVLQMVVKRLYDNLSTLRERKKRGYRVGHLRWKPPREYRSLTYNQTGFKLENKSGQPTLWLSKIGDIPIVLHREIPDNATVKQVSIKREPTGEWYAVLGLDTEDEAPPKPDNPEKAVGIDVGILKYTHDTDGLSVGSLDLSDERERLEREQRALSRKDHGSANYHKQRRKVAECHADLKRKRRDFLHKLSTWYAKEYDFVAVEALNAKGLMELPSNSRNRASAAWGTFLRMLEYKCEREGAYFVDVRPHGTTKECSQCGVSTDKPLWVRQHSCPACGFECDRDANAAHNVLNRAIEKSDIGMGQPESTPVETGAATDTEIPSVSARTVVEAGSPILNEAASAAE

SEQ ID NO: 17293 - protein, 403 aa, Halococcus sp.
VRDDFDSLGFAASKLWNVARWTVGRVWDACGQIPSAFDLQKYLKSHERYADLHSQSSQRVLAELGEAFTAWYGHRGNGNTKANPPGYRKHNDEHPRSTVTFKQAGFKHDAANQRIRLSKGSNLKDGWGDFILCEYDVIGPRDTTVEHVQQVRAVYEHGVWRLHIVCRVEVDVADSPGDRTAGVDLGICNVAAVSFGDESLLYPGGSLKEDEYYFAKQRAKCADSFSREARRLDRKRTDRRTHFFHTLSKEIVEQCAERGVGTVFVGDLGGIRDGDDGPKNWGRHGNLDLHGWAFDRFTTMLTYKAEIRGIAVETVSERDTSKTCSACGTKSDSQRVERGLYVCEECGTVANADTNGAENIRQKSTSESSHEDRSTGWLAQPAVRLFDKTRGGFLPPEQATREP

SEQ ID NO: 17294 - protein, 423 aa, Halococcus sp.
MPTRTIRTFEATILNQRQVRDDLDQLGWAASKLWNVGRYYAQGMWDDTGEIPDDGELKRELKGHERYTDLHSQSSQRVLEELAEAFNGWFAKRRNGDDRARPPGYRKHGDSHPRSTVSFKAAGFKHDAQYQRVRLSKGRNLKEHRSDFVLCEYKTRPDVDLTEWDIQQVRAVHKRGEWRLQFVCRTTIDPQPPGDEVAGIDLGICNFAAVSFGGDSLLYPGGALKEDEYYFAKKRAECDDSFSREARRLDQKRTDRRTHFLHTLSKEIVAKCVEREVGTIVVGDLGGIREDENGDPTNWGDHGNMDLHGWAFDRFTTMLDYKAEAEGIEVETVSERDTSKSCSVCGRCDDSQRVERGLYVCDECGLVANADTNGAENIRQKVLPNLATDGGDRDNGWLAQPATRLFSRTRGAFFPRSEAGCEP

SEQ ID NO: 17295 - protein, 419 aa, Halococcus sp.
MAIETVVRTHRASIRNQRQVRDGLDTLGFAAAKLWNVARWTAGRVWDACGQIPDHSVLKSYLKSHERYADLNAQSSQRVLEELDEAFRGWYGHRDSGDENANPPGYRKNGDEHPRSTVTFKEDGFKHDARNGYIRLSKGRNTKAHWSDFILCAYDADPDVEIENVQQVRAVFEHGEWRLHIVCQHEIEITSAGDGTAGVDLGICNVAAVSFGDESVLYPGGVLKEDEYYFAKERAKCNDSFSREAQRLDRKRTDRRTHFLHALSKHIVQECVECEVGTIVVGDLGGIREDENGPRNWGDHGNMDLHGWAFDRFTTLLDYKAEAEGIEVETVSERDTSKTCSVCGTKADSQRVERGLYVCDDCGLVANADTNGAENIRQRVLPNPRREDRDNGWMAQPAVRLFDKARGDFLPREQMDCEL

SEQ ID NO: 17296 - protein, 216 aa, unknown
  TnpB Polypeptide
VTREVPDFDRKNPSAVVGIDQGLRFLITAYDGKKTTFVSGKPIAKKRAHYAKLRARLQSKGTKSAKRLLKKLAGRETRWMTDINHQLSKALVTEYGANAVFVLEDLTGVSFDERNLKRTKEGRNELRSWTFYQFEQFLQYKAEAVGAKFLKVSAKYTSQRCPKCGKIDKAQRDHDHHEYRCTCGCRMNDDRVAAINLQELGRRYISGEDDPKIIKE

SEQ ID NO: 17297 - protein, 405 aa, Fervidicola sp.
MLAANRIWNSCVWHSREAFRQENRWPTEAELKAKFKSFAAWHELHSQSAQAVVEEYFEAVSSYSRHRENGHLEMNPPNFKPKNHLRTVTWKRQGFDVEDNTLVLKLSRKKEPIKVALPEGWNVVTLPDGIGMKGVPVEVKVKAVVRRRKVENLVLHVTFDLGVVPVYRTGAVSAYDYNSGLVARAALSGQLDLFVCRELLSLVQYRNKVLAEFQEKMSRLKEGSRRWRKLSRAKARKLRKLDRRIRQMEHALTKLFAELDEAEGVAFAVVGDLTNLRRSARTGMKGRKATQKINQMAYDRLHAEQRYKNLMRGVQTDPWTEKNTSSACCLCGTRNPAWRKHRGLWVCRKCGLILQADLNGAANLLKQYLFGSCTGRELPFAFGESRVWRWDKRSNKFEQVSPRAA

SEQ ID NO: 17298 - protein, 454 aa, Halobiforma sp.
VTELTKTLELKLMDPNVHKRQKLRETRNAYQQALQAAFAAGCDTQSAANDVVVEYDLSGYAKNALKKYVPQLCGNSYDADELHDDHPVRFTNEGLQLDHQPQNAVEWYVKVPHHEDYHLWIPARAIPEQREWLEALYADDAEMGESRLFERDGTWYLHVTATRNVEDKYEASADERTPPDESGEPCLAGLDRTPIGVDIGEASLVTVCHRDESGSPIRPRLWADDGKAVRRLRKTYFTAKRRLQQRGSERIAESYGDALWDQIDDVFHRVTREVVDYAESVENPVLVLEDLTYIRENMDYGEYMNRRLHGWGFAKLHAQIRYKATEKGIPVETVNPRNTSKACHACGEHGYRPRQATFRCSNDDCWLGEYQADVNGAINIADRYRSGESHRQSDRASRQKAGDDDSATDGASLTGPQDSQAVNESRRDSFAHQKSPISGDDAENQQVTLGTYAS

SEQ ID NO: 17299 - protein, 278 aa, unknown
  TnpB Polypeptide
VAEAVRQHLRLLRRKGGSRQAASSRFRLDDDPPARRYPDARAVSAVLKREAGRWSAVVCHPLAVPQPEDDGTAVGIDMNAGQVAASDGRLFLAPDTRRLEARKRRYQRMVARRRRASRRRDRARRRLARTARRIAMARRDWHHQVSRRIAEAAHTVAIEDLKVRNMTASARGTAEEPGTNVRAKAGLNRVILDTGRAALRAMLDDKAARVIAVDPATPAGPVRPAAMSTPHRAARRRCFTAWPAAMPTMRTRMLPATSGAGDWRCCTGRLPGCRAVEP

SEQ ID NO: 17300 - protein, 158 aa, unknown
  TnpB Polypeptide
MEDLKTSKHLQKLYQKKNDCIKDYIHKMTRYITNYCVKNDIHTVVIGDIKGICKERNLGRKTNQKLHGLPYARIYMQLEYKLKMKGICLIRQEESYSSQCPPQSEEVSHIYAEKRNRKKRGIYIVDTVIYNADAVGAYNILRKYHAVSGKEIDMPVTG

SEQ ID NO: 17301 - protein, 421 aa, Deferribacterales sp.
MSNDGRMLYNCFLGKLKEQYDKDEKFISYYTQQKELKDYKSDFLTFDAKKEILRTLHNNYSSFFKLIKHNKDLNPKPPKFRGKDYFFTLSFTQDFIIKENILKISYSNYRKLDIKLNFIEPIKDLKCLRNKTSESEIKQLKIYKQNNSYFASITYEKKEDKLKDIDKNKVLSIDLGKKNLLSVYDVENNKGIVYSSKHLSKNQKFLDKRIDELKSLKDIKKKDSRKFKQIKNKLNTVYSKKKTQTNLTLQKVTKDLSNENKTILIGELTNLKKNIKSNFRSLNRQMQNNWNLQTFIHLLEYKCKLKGNQVIKVNEAWTSKTCCKCGSINYDLDLSDRQYICDCGNNINRDINGAINIYKHFMGDYNPPFETLVVSERFDWCHINQMNRNHNLIYRFLYYIPTTCITYFRFYMQTYDLSKFT

SEQ ID NO: 17302 - protein, 562 aa, Fervidicola sp.
MPKKHKKDKFSMTVCGEFFPEVYPAFRSGKWSRGEEDPLVTEMRLFSACMRWAFNRLLEGASRDEIKKLGQELFGINSRYVDDARLKAQAVLDSQKELLELEIEETGNKLSRARKKLSTAMKKLAKAEERGDAPDIVEKLRLAVKGRNNRLASLEKKLAELEIHRENGTIPKVVFGGRKLWEKVCKGRATREEWQASRKNRLYSRGDETKGGNPNMKVSFDGQEFRLAVSISHLSQQTGTDKLGRPKMSRAPRVEGMLWLPEKQRDLVRIWLAMKLPYTIELVRTPEGRYIVHLTFDLGGMKEPDFAKGCLALDTNPDGVVLCNVSALGQPEPWPEGFNIPCPGNLGKYEGEFQVITYPNGFLYIRIPDLAYASSFRRDYLIGVLAKAVVDIAFFLGKPIALEELNFSKDRLDTNKKFNRMASNFPFAKMVEAVCRRAVKEGMPFKLVPARHTSTIGYWKYTKRYAVPVHCTAALVIGRRAMGFKEWVTKELKQLVAQIKQNLTCKVDPYTPREGRGMTRRVRACLRRLEEKLLQHNGLARWQQEAYYSVWHDLKKLALSLR

SEQ ID NO: 17303 - protein, 399 aa, Chloroflexi sp.
  misc_feature (350)..(391): Xaa can be any naturally occurring amino acid
MRTFEYRLFVKKDQSRLLMQCLHESRLLYNEMLETMNQQYERDGTFPSKYDLTAQFKGRGGEHVPATTVQMLADRLTKALKRFRAVKELGMPDVGFPRFKKPNRWHSIQLRQYGISRDAWLDADGKHLHVPAKLGKLLKIKMHRPIEGTPKTVHLVHRADGHWYALVVCEMEPKTEHDPSTCEHPDIGIDVGLKSFLTDSEGNTVENPRFYRTSQKTLRRKQRQLCRRKKGSKRRRKAARNTAKTHLKIKRQRRDFHYKVAKQYAEQYQVLAVEKLSILNLLQNHALAKSIMDASWGAFLDILEAKAASAGHQVIRVNPRYTSQKCHKCGEVVQKSLSVRTHICPFCGYXXXXXXXXXXXXXXXXXXXXXXXXXXXXXXXXXXXXXXXXXXELQILCKV

SEQ ID NO: 17304 - protein, 361 aa, unknown
  TnpB Polypeptide
MLKSFQFRVYPTKQQHRQLNMLLETARRLYNNALAERRDAYQNDGKTLNYYDQANKLKAKRKEDPYLAQLNFSACQDVLRRLDKAFKAFFRRVKAGEKPGYPRFKGKGRYDSITFPSYGDGCKVKDNRLYLQNVGLLKVKWHRQIEGKIKTVTIRRKVDKWFVSFSCEVEPTPLAPCSEAVGIDLGVKHLVITSDGEFYKHPKFLRDAERKLKRKQRAVSRKKKGSNRRRKAVRDLARLYQHIANQRKDYAHKVSRKLVNRYGLIAFENLNVQGMVKNHRLAKSIVDAAWNQLVQFTMYKAEEAGRRVVLVDPKNTSQLCSNCGEIVPKKLSERVHRCEHCRYVQDRDVNAAQNILKRALA

SEQ ID NO: 17305 - protein, 291 aa, unknown
  TnpB Polypeptide
VELDRGMVRVIIRDKWYALKLKHRREYVEKFESLRWKEVHVKYENGRLFVSVVFEFRYEPYTPKGLMALDINLRMVAAYDGFKVRRYRTRFAEALSKRKRAEDLQRKYPERWRYGEKILSRVKELHRKARNIVADWSWKLAKQIILKTLKKGYAIALEDLEGLRENANSKSDAVAWKFTMFAYRRLKHSIISKTLEYGVPVIIVDPRNTSSTCPRCGERLLYIHRLAICGGCGFKADRDTVGAMNIWFRALQAYAGVPGSPPRASAMKDETRQSGGTKHEGMKKTIRAIHR

SEQ ID NO: 17306 - protein, 400 aa, unknown
  TnpB Polypeptide
MASGCEGLLTLTIKMRVSPEPGSEQELMNLMRRYREALNHAIKVVIESKALSLGKAHKLLYSVLKERYGLPSKVAQDCYREAIAVVRSWLSNPSRGGVPRAKTLRIWLANGCSYRIRDGYVEVLGGYKLRIVGWDRRYDNHPGGDAVLLFKDGRFVLGISKRVPRPAKYVARGVLAVDINEKQIAVGNSTAELRIGTAVEKALHYKRLAEVLQKKHSSPKYNAWLRRRGVRDRIRYFHRRARSIVEDWAKKTSHKIVALAKQHLYAVAREDLTNLVEGLRKLPKEYRVPLLILSYRKLGQWIDWQCEKNGVPVIVVEPRGTSTTCPMCSSKLIENGYRRMRCHTCGFEADRDIVAVLNIEKSALEEMWEALTPLNAPQVTDVAPNRWGEPVNRPEGTLAL

SEQ ID NO: 17307 - protein, 384 aa, Brasilonema sp.
LLLNYQYRAYPNTNQKQDLNEWLRICQYWYNKQLGDRFDWWENNRSRIDACSIISCPLPELRDNPDFSSQKKQLPTLKKDLFKVGHSGELLDFSRVPSQTLQDVSKRVDKAFSRFLQGDCNGKRSGKPRFKNAARYRTMRIEGQAITIERIEKDWLFLSISKLDGWIKVRLHRPLPNGFVLKNALLTKKADGWYITICLEDPNVPVFTSDEITPTWDNTLGLDAVLHEEDYLATSENTKLPSLKSFRKSEKRLARVSNRKSAKKKGSKARRKLAKREARKHQRIARARKDHAFKTAHAVVRTNKKVFVHEDLNLKALSKRNKAKLDVNGTYLPNGQSAKSGLNKSWNDAAFGQFFTILEYIASKASGVGHSSKTCLHVSITRIS

SEQ ID NO: 17308 - protein, 542 aa, Streptomyces sp.
MVDRRPISAPFVALGPSGVAVRTRPKDLTPEDEKVLRLAGAHLGSLASKDLKARCMDGLEHSTESWAARKRGLTAQSSSRWAGSITRATHDQWALARRGQAAHVQSLEAGITTIRHRLSLPVGQKGTKRAPGGYRCPHEWFHKTRRLHVLEDRLEKVRADREAGRVHVVRGGKRLLGTRHHLDTAQLTEAEWHERWEAGRWFLQADGESGKRFGNETIRITPQGQVSIKLPAPLAGLANTEHGRYVLAAQVGFPHRGQEWADRVEANRAVAYRIHYDTGRGCWYADASWQIPPAKSIPLKAALAGGVIGVDTNADHLAAWRLDTHGNPTGQPRRFFYDLSGNSQHRDAQVRHALTRLLHWARSCGVKAIAVEDLDFQAEKTREKHGRKRRFRQLLSGMPTGRLRARLASMADATGIAIIAVDPAYTSKWGAQHWQKPLTSKNRRTTRHDAASIAIGRRAQGHPIRRRTTPPRAHQSDVHGHRTVQADRCAPGREGPRPSIPGPRTRSVPPDAASTRATRTSNTVRGVRSDQVWVQDSLLLTD

SEQ ID NO: 17309 - protein, 530 aa, Streptomyces sp.
VGDVLWKLAAPFVVPGPCGVAVRTRLKHLTHGDEEVLRTVGAHLGTLASRDLKTRCRDGMGHDAEAWAARKRALTPQSSARWASAITKATHDQWGLARRCQLAHVQSLEAAVRTIRHRLSLPVGEKGSKRAPGGYRSRQEWHAKARRLRVLEDRLERERADRRTGTVHVVRGGNRLARVRHHLSDAQLTEAEWQQRWEAARWFLQADGESGKRFGNETIRIGPDGEVSIRLPAPLAGLANAPHGRYILAGRIGFAHRGQEWADRVAANRAVAYRIHYDVTRGRWYLTASWQIPVTRTIPLAAALADGVISVDMNADHLAAWRLDTHGNPVGNPHRFFYDLTGSADHRDAQLRHALTRLLHWVRTCGVKAIAVEDLDFTTKKSREKHGRRKRFRQLISGMPTGRLRARLTSMADATGIAVIAVDPAYTSQWGAQHWQKPLTSNNRKVSRHDAAAVAIGRRAQGYPVRRRTAPPRIHQSDGCGHRTVQAGPGAPGREGTRPRMPGSRTRSVPPDRGAKAGNQGIQNRSGCPQ

SEQ ID NO: 17310 - protein, 429 aa, unknown
  TnpB Polypeptide
MKRLQAFKYEFMPNGQQARQMRRFAGSCRFVYNKALALQKERYERGEKKHGYAGLCKLLTEWRNSAETAWLSDAPVHPLQQTLKDLERAYSNFFAKRADFPRFKKKGRSDSFRYPDPKQIKLDQGNSRIFLPKLGWLRYRNSRKVLGDLRNVTVSLSGGKWFVSIQTEREVEQSFPRGGAVGIDMGITRFATLSDGSFYAPLNSFKRHEASLRKAQQALSRKVKFSNNWKKAKARIQRIHSRIGNARRDFLHKTSTAISQNHAMVCIEDLQVRNMSRSAADTTETPGKNVRAKSGLNKSILDQGWFEFRRQLDYKLAWKGGWLIVVPPQNTSRTCPCCGHISADNRQTQARFECVECGFEDNADVVGAINILSRGMQLLRDEGTDTTDASVGTRAGGLPVSARMACGSNRTGGRKQEPTETTTHGVIHA

SEQ ID NO: 17311 - protein, 416 aa, unknown
  TnpB Polypeptide
MNYRYRIYPDATQQDTLFRWMDVSRSAYNYALREIKDWCNSRKCMIDRCSIEREYILPASLKFPSEVNQLNALPDAKREFPRLGEPPTHVLQQTIKQLHRAWENFQGRGFGFPRFKKYGQVKSLLFPQFKESPVTGVHIKLPKIGAIPINLHRPIPEGFVVKQVRIIKKADRWYASINIQCNVSVPDPIPHGHPIGVDIGLEKFLATSDGVLVKPPKFFVKMQSRLKVLQRRLSKKQKRSKNYEKQRIKVARMHHTIDNNRKDFHFKQAHALCDSADMVFMEDLDYRVSAKGMFGKDMLDGAFGQFRNLVKYVCWKRGKFFTEVNARGTSQECPECGAEVRKNLSVRVHFCPECNYTTDRDVASGQVIRNRGIALISTDGRSGKETACADDLPGVGVTQSRQVSKPRKGTTKKTSK

SEQ ID NO: 17312 - protein, 408 aa, unknown
  TnpB Polypeptide
MKKTLRYNYRLKPTAEQETKLVEFGAYARGVWNLLLSENMRRYRYDKAFLFYHEMAGLIRDLKRFDEFSWLKAFDSAASQQVARDLETALKNSFTKGRLQKFPTFKVSFKQKKLHDDSFRCVNNSNCIRIEKGAISIPKIGKVPIVLHRKLASKIKTSTVQTRHGKWYVSLTQEVECKSAKEVLSTLVGYDINSQHTVVGSNGLYVINPKVFKKSSNKLKQIQVQLSRRRKGSNRWQKTKVRLNKLHGKISRQRLSFAHEISCSIAKTSDIIVFENLNVKGMQQFNGKMVNDNVMGMLTELTKYKAELNGAVYHEIGRYVKSSGICYECQHEHKFDLSVRNFACESCGTVQCRDLSAAKSVASTGEKDLIANGILVRALPKPQQKSASKTKVFEQSKFGAGSEKKEAA

SEQ ID NO: 17313 - protein, 436 aa, unknown
  TnpB Polypeptide
MERTRPVREAQQPTAVLQAYRYALDPTPRQRRALASHCGAARYAHNWGLALVKTRLDQRQTNPAVQVPWTLFDLQREWNQAKHEVAPWWAENSKEAYKSGLYGLSRALKNWSDSQSGRRKGRPMGFPRWKKARSRKACRFTTGAIRVLGDRKHVQLPRIGVLKTHESTRKLARRLEHGTARIVTATVSQTADRWYVSFTCEVQRRLPTSNGRDDVVGVDVGIRHLAVLSTGTIITNPRALERSLRTLRRLNRELHRRRSRSRRRNQTHRRLARVHARAANLRRDALHKLTTTLATQHGIIVIENLNLAGMVRNRHLARVLADAGLAELRCQLAYKTAWHGSRLLLADRFYPSSKTCSGCGWVKAKLALAERTFICEVCGLQLDRDLNAARNLARIAEHVAQSGWETQNARGADRKPQAAGQAATKREPSSPLLQRA

SEQ ID NO: 17314 - protein, 483 aa, Ktedonobacter sp.
LYAWKQQSIPSCVCAKPHAICSNWSRSYPMKAWWRRLIGLHGKNWLVFRKSRKSQMLPCTKRRKEVPDVKRSHVIRLHPTPEQEVYFRKACGVARHAYNWALARWKDSRAEGKWAKIKDLKAEYNRIKGEQFPWCSEVTKCAPEQEFRHLGQAFDNYWRMKKEGTLPKLKHPRKDGEEGGFPRFKSKKRDRLSFYLANDKFSVAGQTIRIPKLGAVNMTEALRLQGKIMSAVISSRAGWWFVSIAVEVEHDVPTHNGGAVGIDLGIKTLATCSDGVVFENQKHYRQTLGRIKSLSKGLSRKGEGSQNWGKHARKLAKAHYRIACQRQGTLHKMTTSLARRYALVGLEDLNTKGMLSNHCLAQAVSDASFFEVKRQLLYKAEQYGGYVQLVSQWYPSSKTCHACGWIKEDLTLDERVWVCEQCGVITERDLNAALNIRTEALRLLTDVPVVASSGHKFACGAESAGSRCVESETFCDEAGTRML

SEQ ID NO: 17315 - protein, 213 aa, unknown
  TnpB Polypeptide
VREGRLLNILLLRFREVILSILPIDVLVLHFTIAPLESLVVSYMSDSSVKFYGNGRNNKYMRRKLQKAKHMNTVKRINSKEQRIMKDIDHKLSHNIIETAAAHNVKFIKLERLANIRSTTRTSRKNNHSLHTWSFYRLAQYIEYKAGLEGIKVEYVNPAYTSQTCPVCGHVHHANDRNYTCKCGFHIHRDLLGAMNICNSTEYVGDSNVRHTA

SEQ ID NO: 17316 - protein, 304 aa, Oscillatoria sp.
MLRATKYRIYPTSEQRQHLAQSFGCLRFAWNYALNLTNETYKTTGKGLGRFAIQKEITHLKKEYEWMKEPYSQCLQVVALNLSRAFINFFEGRASYPQFKSKHRKQSISYPQNVSLVEDGIKFPKMGIVHARLHRPIDGAIRTVTVSMNANGQYFASVLVDDGRDIPEKTTEGKAVGIDLGLTHFAITSDGSKFDNPRWLAKHEKNLRAKQKRLSRRQKGSNNRNKTRKQVAGVHNKISRCRSDFHHKLSRRMVDENQVIVVENLAVRNMVKNHCLESRNQSGGVGPVLYHAEVQSRARRESLP

SEQ ID NO: 17317 - protein, 394 aa, unknown
  TnpB Polypeptide
MKKVLDSLCDYRRYCWNQGLDLWDTLYDARLIGMSDELRAKIKASLTDKTIQFSEEEQALIALFPAPSENKIRDELVAQKAEWQFELSPRVLQQAIKDLATAWNLFFNNPKTANKPGFQSRKKPKQGFKTDQARIKNGRLMLDKPQKYKDKWSSIHFKGASIPDGKLKLCAVTRVKGKYIATITMEVEIVEPPKTGKKTAVDANVDHFDTTDGQTSLKPEILDCLYVRVNVYQRQLARKRKVNKNYRNSKSYQATRAKLQVTYERIRNIQNDLLHKFTTDLYRQYDTIVIEDLDVKGMQMKKKAKNLHRSLFGRFRQYMEYKAEKFGKTLIIADRFYPSTQRCSNCGHVKTGDDKITLHGNQKHGTKHNEYVCYHCGYVDDRDHNAVLNLLALA

SEQ ID NO: 17318 - protein, 628 aa, unknown
  TnpB Polypeptide
MTALNSLKLEKLPNILESQHNVSENGRNREELHRKEQLKEQDSSSFLSISQKKHLNRSDIKSSIVESLPPSSEEILTDKSLSQEKNIPNMKSSAISDPGLTGKGQDLEESWREHQKERYKKLLSFTGIDYVDLGSKSLNTSLASTRQDLWCTNKTSINLEPKNFLKTSWLSHTSSHVPTTDQGNIRAKKVKFLPNKTQKKILKMWIDHYRFTYNQAVEASKANGYTSNLKEFDLKKSLVTEKNLPEKHKFLTKTPYDIRAAAVFELCSNHKSEVTKNLKYYYKRLSDFKKELSKKIDAKEKAKTEKTKLKHQDRINELEKLIEDLEKNPTYNPDIKFKQKKAKRIVMDITKAKCDVKNGSITIFKRTLGKLRTKEKIDDLQHDIKISWDKSSGWYLIIPYTKPDERSQNPSANFIAIDPGYRTFLTGVDSNGRIREYGAGWYNDLNKNVETLDCLKENMKTQRENSKNHSYSNKERQYYRVLSLRTKKTMQMCETKILNKINYMHKKFARQLLDEYETILLPKMNSKNMVKQDLSPKINRMIMMGAQSKFHDYISFQGKGRVVKVDEKYTTKTCAKCMVRTDIQASKIFSCPSCMYTADRDINSAINILNKNFGVFRNTPTVDNADAC

SEQ ID NO: 17319 - protein, 361 aa, Clostridium sp.
MLKAYKFRLYPNVEQRIYLAKTFGCTRFVYNRMLAERIKSYEENKDLDIKAMKYPSPAQYKTEFEWLKEVDSLALANAQMNLGKAYKNFFRDKSIGFPRFKKKTNTNSYTTNNQNGTVYIENKHIKVPKLKSMIKIKQHREFNGLIKSCTISQVPSGKYYISILVDAENIQLPKTDSKIGVDLGIKEFAITSNGEVFHNPKYLKKSAKRLAKLQKDLSKKQKGSNNRKKAKIKVAKLHEKISNQRKDMLHKVSTQLINENQVIVIEDLKVSNMVKNHKLAKSIADVSWSEFRRMLEYKAEWYSREIIVAPSNYASSQLCSACGNQSSQTKDLSCRTYICPVCGMIMDRDINASKNLLKLAI

SEQ ID NO: 17320 - protein, 547 aa, Streptomyces sp.
MADKKKQLRTIDPPFVAVGPSGVALRDRLKHLTPKDEKVLRLVGEHQGRLASVDLKARCAAGHKHDNDAWASRKRDLTEQSSSRIAGAITKATHDQYGLARRCLLAHVQNLEAGVRMLRHRLSLPIGEKGSKRAPGGYRSKGEWFHKSRRLATLEHRLDVARDDWKSGHVRVVRGGRRLLKNRHNLQAAQLTEREWRQRWEAERWFLAADGESGKRFGNETIRVTPDGEVSIKMPAPLAHLANSKHGRYVLASKVAFAHRGDEWRDRTEANHAVAYRIHCQVERGRWYLTASWTRSVVQTMPMATACAKGMVGLDTNADHFAAYRLDRHGNPVGDPRRFHYDLSGTADHRDAQIRHALTRLLHWTKQTGAQAIGIENLDFAAEKTREKHGRKKRFRQLISGMPTGKLKARIVSMAAEHGIAIVAVDPAYTSMWGDQHWRKPLISKTRSMTRHDAASVAIGRRALGHPIRRRTAPPQHHQSDGAGHRTVQADRGERGREETRRPVAERAHDARCRTGTTRTRGTSASKTVRDARSSGTWVQDSLLDTA

SEQ ID NO: 17321 - protein, 402 aa, Escherichia sp.
VKRLQAFKFQLRPGGQQEREMRRFAGACRFVFNRALARQNENHEAGNKYIPYGKMASWLVEWKNATETQWLKDAPSQPLQQSLKDLEWAYKNFFQKRAAFPRFKKRGQNDAFLYPQGVKLDQENSRIFLPKLGWMRYRNSRQVTGVVKNVTVSQSCGKWYISIQTESEVSTPAHPSASMVGLDAGVAKLATLSDGTVFEPVNSFQKNQKTLARLQRQLSRKVKFSNNWQKQKRKIQRLHSCIANIRRDYLHKVTTAVSKNHAMIVIEDLKVSNMSKSAAGTVSQPGRNVRAKSGLNRSILDQGWYEMHRQLEYKQIWRGGQVLAVPPAYTSQRCAYCGHTAKENRLSQSKFRCQVCGYTANADVNGARNILAAGHAVLACGEMVQSGRPLKQEPTEMIQATA

SEQ ID NO: 17322 - protein, 429 aa, unknown
  TnpB Polypeptide
VLEKLLKTLKRTIILEGWTNRIGRQALREIEEAYREMLGEMTDYALEHRASQSTLHRIFYNRFREEYPWLPTRVIKGAYRDAVRRARSFKKKKRKGETEKDRPEIRSITTTYSDSQDWRLREGYIEVRTHRGWIRIGYRNNKQLHRYLYSGWKPSSELKLKLTDGKILVYLTLTKEFKVSYNPDNAVAVDINENNVTLAVFVGRKLHEIYRIETNIGRIVIAYSERRRRITEGRSARDRIARKALRKLRERERKEDIIYKTARIIEEIAKKYDATLVVGNAHRGKNRMASNARKSLRHRIHQWCVSKLIEILNNKPLHVVEESEAYSSSRDPFSGKPIKRYTPSVIRFALRGGRRVKVIKIQMRLAKLSNGLTLDRDMIGAINIGLRYLSSDGRSVAFPSTGPHAAWAKLVIPSLGPTPLTELKIFTSI

SEQ ID NO: 17323 - protein, 364 aa, unknown
  TnpB Polypeptide
VKTYKFKLYSSKRNKKLHRQINIAGSIYNHCIALHRRYYRIFRKSLRTFSLSKHLTKLKKITKYSHWNLVGSQAIQDISERISRAYALFFRNLKHNIKTAPPCFKKIRKYKSFTLKQAGYKYTGQDNSIIIQKQKYRFFKSREIEGKICTVTVKRDSLGDIYIYFVCRNDDNKVLARTGKSVGFDFGLKTFLTSSDGQDIESPLFFRRNSSAIAKANRRLARKKQGSANRKRMKNDLCRLYKKTANQRNDFHWNLANKLCGKYAVICMEDLNLKGMQKLYGRKISDLGFAEFLQKLEYVAHQTGTTIIKVDRFFPSSQLCSCCGQQNHQMKDLRIRKWQCSCGAVHQRDRNAAINILNEGLKYL

SEQ ID NO: 17324 - protein, 431 aa, Bacterium sp.
VTTLSLKFRFSPVPEVDRLLEKCGAMVRAAVAWALENGKTATHTIVQALYPSFRARFPDLHSTWAQKSARTAAAVVHAFRRRRRRGREGKDKPEVRRTWVYVDKSVFRWAWDGTELTVRIAVRPHDGDPIVLRFRPHGKYRRLVEAWARGECVAGEPTLSRTTLIIPLKFPTLPVYEPGEVYGIDSNERSLDGYGLDGTAWTVDTSWAAEKNAEHDRRVRRGTRGKQNPRAKKKIAEKHGRRRHNRTREFWHIVACAFVWMALSASGALVLERLRGLKERVAASLPKRLRRRLLNHWSIRTFHAILRHKARVYGVPLLEVNLRGTSSTCPVCGAGLRGREELVCPRCGLEGNRHILAAWNIALRGRARLPLGGTGRSEEGRDLFGRLQSPRWGQGVMGAPGRPLPVRVGLDGRRPGRRPAARTQGEAQATA

SEQ ID NO: 17325 - protein, 414 aa, Thermoplasma sp.
MKTMRTEQIFIRDNGVISRMCHLSKNLYNQVNYIIRNQFFNREKLSSYKDLAKQFSKPSDIEENNNFQKLPAQTAQWTIRKVKESWNSFFKALKTYKKHPELFNGIPKPPKYKNKDGEFILIFTNQQCSIDNGILKFPKIMDLEVKTRLDDNTDLREVRIIPFGVRYNVEIVYSKEISDVSELSPKRILGIDIGVMNIVTIGNNISEKGIAVKGGVLKSINQYFNKELSRLRSISDRQRKNRENTKRIDKLFMERNRKVKDIMHKLSRSIVEYALSRKIDTIVIGHNDGWKQDTDIGRTNNQNFVQIPFNMLIQQIKYKAEEKGINVMIQEESYTSICSFLDNEIIEHHNTYMGKRIKRGVFQSANGTLIHADLNASYNTIRKAVPEAFDGIEGIGLYPRSLSIKEMITSRGGC

SEQ ID NO: 17326 - protein, 421 aa, unknown
  TnpB Polypeptide
MLTQKYKLKLNEDEKFIIDKLSYHSARLYNSCVYNIRQYYFNNNSYLNYVDQYHLIKDDVNYKLLITDSAQQTHRLVDRNFKSFFSLLKLKQKGKYSNPVNVPSYLDKDSGWSVLVAGRSSRVKNGKIYMGLSKQFREEYNVLKRDIIFNLPKNIKTNKLQQLQIKPIYGGKEYELIITYVAEDNVKKLNHNNILSIDCGLDNLLTSYNTKNKSSFIIDGKPLKSVNHHYNKEKARLQSEYEKNKLKDKNTKKFIKLSEYRKNYINNYFNQSVNKIVKYCINNDIGTIVIGDFKGMKNEINIGKVNNQNFVSVPFGILKRKLETKCEYYGINYVLQEESYTSKCSSLDLEKIEKHEEYLGKRIKRGLFRTKKGKLINADVNGACNILRKYKSKSDGDLSLTDVSGVINHPVRINPTKPIGL

SEQ ID NO: 17327 - protein, 155 aa, Enterococcus sp.
VDSLALANTQLNLDKAYKNFFRDKSVGFPRFKSKKNPVQSYTTNNQNGTIALIENKFVKIPKLKSLVKITLHRKPKGLIKSATISRHSSGKYYISLLCKEEVSELPKSNSSVGIDLGITDFAILSDSQKFDNNQFTSKMEKNSNVNNVSCQDVPY

SEQ ID NO: 17328 - protein, 541 aa, Actinomadura sp.
LRPIETPFVAAGPSGVAIRARLKGLTARDEQVLGEVGAHLGSLAGRDLKARCRAGTAHDAEQWAARKRELTGGSSARWAGSITKATHDQWALARRSHLAHLNSLEAGIATIERRLSVPVGQKGTRRAAGGYRSRREWFAKSRRLHILKDRLAAVRADWDAGRVRVVRGGKQLLNNRHHLDAAGLTQEQWRARWEAGRRFCQADGESGKRYGNETIRVTPDGQVSIRLPAPLAHLANAPHSRYVLTARVAFAHRGAEWADRICVDRAVAYRIHHDPDRGRWYLTASWQRPAIPAIGLEAARARGMIGVDANADHLAAYRLDSCGNPVGDPRRFSYDLSGTTGHRDAQVRHAITALLHWAKRYGVAAIAIEDLDFAQDKTREKHGRRTRFRQLISGFPTGKLKARLVSMATEAGLAIVAVDPAYTSRWGDRHWRKPLTSNKRQMTRHDAASVAIGRRALGHPIRRRTTPPRTHQSDGCGHRTVQAEPSARRRKGTRPPVTERAHDARPRTGTPQRTRATSASKTARDTRSTRRWVQHSLLDTV

SEQ ID NO: 17329 - protein, 352 aa, unknown
  TnpB Polypeptide
LNKVESIPKEIIPTYQKGTYPKGCTRIISNAINGIWQTCRSVKQIPLDRQSSKIERKDGIMFFKIQTNLIPFRVKTVDRLDDLLLNHYNSAVVWLKGNKWVADVAVDIEDKYIEGKPEVVVGIDLGKWHNCYSVWYDGEEKYRAFDKFGSYHDTLEKISFEIADFQQSFTGNRKELSKGLQPLYEKKRSVLRQYYGTLRNKILSHIPEGYNAVFVVEDLEFLSRNKLNKKQRTWANQELANGIFYHQIEWNGYKVVKVDPRGTTHTCWKCGKPVKSGVDRKVICETCYPNGLDRDLNASRNITQRYMLLGIPQHTCIGSVLDDPQNAICKEVISEKERVSESKVTPILVAGV

SEQ ID NO: 17330 - protein, 470 aa, Rhodococcus sp.
LTASPSAVSAICFAASSSSDRSSRAGPRRSISTPIWRIRSTTVATACSHSRISRETCCRILIRESFGANPVLQVRDSRSGLSDRVASVWVMAGKVVKRAFKYRFYPTAVQAEQLARTFGCTRYVYNRALAERTRAWSQEQRQVTYADTSKMLTGWKRDAETAWLAEPSKGPLQESLRQLQGAFEKFWRKQTRYPQFKKKGQSKDSATYYSNCFTYRGGQVRLAKQAEPLDIRWSRPLPEGAVPSQVTVSRNARGQYHISILVEDTITELESTDRVVGLDAGITSLYTLSTGEKITNPRHERADRARLAKAQRALAKKQKGSRNRAKARLKVAKIHGRIADRRRDYLHTLSTRLVRENQVIVIEDLSVRNMVKNRSLSRAISDAGWSEFRSMLEYKADWYGRRVVAVDRFYPSSKTCSVCGVIVSAMPLNVREWTCRCGVVHDRDVNAARNILAVGLTVAACGDGVRPPRT

SEQ ID NO: 17331 - protein, 220 aa, unknown
  TnpB Polypeptide
VTVSREPTGKYFASLLFDCENQTAEKRQAEKFLGIDFAMHGLCVFSTGERAGYPMFYRSAEKKLAREQRKLSRCEKGSRNYQKQRKRVALCHERIKNQRKDFHHKLSHDLAEKYDAVCVEDLNLKGIAGGLHFGKGIQDNGYGQFLSMLGYKLEERGKYLIKVDRYFASSKICSVCGNRKKELALSERTYICECGNWMDRDVNAAVNILKEGKKVYKKCA

SEQ ID NO: 17332 - protein, 494 aa, Candidate division AD3 bacterium
  misc_feature (303)..(303): Xaa can be any naturally occurring amino acid
  misc_feature (385)..(386): Xaa can be any naturally occurring amino acid
  misc_feature (444)..(444): Xaa can be any naturally occurring amino acid
MGRCQPTPPTFVAEFRLDATPRQRAVVQRRLRAGAQVYNRCLQVGLERLAAMRADPRYEEARRLPASRERGAAFAELRREHGVREYDLQGVGSAVRGCYLGEQIGAHEAQTVATRAFRAVEEHAYGKRGRPRFRATRRGLDSVEGKSSDSAVRFGRRVIDGEERPVLCWGRSLAMPLRIEAGNPVQLWAAIHVAGGGLRHARLVRRRVKGREYLYAQLVIQDRPCPRHQVGTGLVGADLGPSTIAVVSDSEVALERFCAELEPQWQRVRRLQRRLDRQHRAGSPACFDERGRHLRGRCAWTRXHGNLVNRILSHGTDIRIERLSYRAWQRGHFSRSVRDRAPGLFVSELKRKAASAGGSVVEFDTRTTALSQVCVCGRRERKPLXXARHVDPRTQALDARAAQRELSMRHDIAARTASIPGPNRQLGWHPAARTEASVRAGRPXVRPPDGRRARGECGNLRASARRGCQLARPPSPGLSSSKCRRCRWDAAGPR

SEQ ID NO: 17333 - protein, 419 aa, Paraoerskovia sp.
MRHRYRAYPTPGQQDALARTFGCVRVVFNDAIAARKNAHARGEAFISASALQSQVVAQAKRTPQRQWLTQVSSTPLEQAVRDADRAYRNFFDSLTGKRKGAKMGLPRFRSRHDTRQAANFTRSARFKVRTTTHGVGHVYLPKVGWVRFALSRDLPSDPSSVTVIREADGHYYVSFVVQRDVEPQAPTHPGRGAGIDVGLSGFAAITYTDGTRETIENPRHLRTRQRRLARAQRALARKQRGSANRAKARTRVAVEHRKVKDARQDFHHQLSARLIRENQTVAVEKLNVVGLARAGAKNAQGRGLRRSVHDAGWAAFLTHLAAKGTEHQRTITTINPAYTSQTCAVCGVLDGPKPLHVRAWQCTGCGQHLDRDYNAAVNVMVAAGLAETLNARGGDVRRRLAAATPAETGTHRHDQTLAA

SEQ ID NO: 17334 - protein, 315 aa, Pseudospirillum sp.
LHFSKRACINLDKAFQNFFDPKLPSRYPKLKRKHGKQSSYHCMSVSAGDRWIKVPKMKPIKARVHRALVGKLKSITLSRTATGKYYASLLVEDNVAAPTPVQSVDTVLGVDMGLTHLAIDSNGNKTANPRFLRRAAANLRHKQKALSRCQKGSKGRAKARLKLAKAHERLANARADFQHKLSRQLIDENQAVVVETLKVKNLLKNRKLAKHIADASWFGLIQKLEYKAKAQGKHLVKIDPWFASSKTCSCCGHKIDILPLSVRTWACPACSVVRDRDINAAINIRQQGVMKLRAEGLSVPANGGLRKSGHAPVAA

SEQ ID NO: 17335 - protein, 201 aa, Clostridium sp.
  misc_feature (147)..(180): Xaa can be any naturally occurring amino acid
LVEETDIKISNPNNAGVGIDLGIKEFAVCSDGIKFKNINKTSTVKKVEKKLKREQRKLSRKYESLKIRNKNIKEGRATRQNIQKQIIKVQKLHQRLTNIRTDYINKIVSSIIKQKPSYITIEDLNVKGMMKNKHLSKAITSQKFFEXXXXXXXXXXXXXXXXXXXXXXXXXXXXXXXXXXLGKARLYEEGNFSIWICLTIF

SEQ ID NO: 17336 - protein, 412 aa, Planktothrix sp.
MKLVERHLVTKNHPLWSDLDQKAFLSKNLFNLANYHYRQHFFQHYQKLNFNQLYHLLSQTPDYKALPTKVSKQIIRRLDSAWTSYFQAVKVWQKHPENFLGQPKIPRYKHKTKGRNILPYPHESISKKALKKGICHLSMSEIKIPTSQRSIIEARIVPKSSCYVIEIVYEKAEETTNYQEIAGIDLGVNNLMAVTTNQIGVRPLLIKGRPLKAINTFYNKQRSSLQSQLKLKHNQTQSQRLKNLTHKRNCRVENYLHTASKRVIDWCTQHQIGILVIGHNATWKQSINLGKRNNQQFVNIPHYRLIEMLTYKAQLKGIRVVITEESYTSVASAVDGDALPKYGEKRPRFQGHRIARGLYKTAKGRLLNADVNGSFNITRKVIPDVVDQGIKGLPFNPVVLDPLRMTELSAFK

SEQ ID NO: 17337 - protein, 426 aa, Planktothrix sp.
MTKASKTIGVQQILLSPDLETCALLEYLCQQSGKLYNTGIYFARQTLFKTGKLLTGKFDLAFEPSVSKSLLAQSMPSTPMQQTLMSVTEAFKSFKNLRDSHKKGQLHFRPKPPGYLQGSKLFKVAYPNSGGQRPTLIDGQLRFALGLTVKRWFGVSEFFLPMPSNLDYSKVKEFTILPKNGVFYLEMSYEVEKQNHELDINQALSIDLGTADNLAACVDTLGNSFLIDARAMKAMNQLWNKKVSTRKEGKPQGYWDNWLDCVTRKRNHQMRDGINKAAKLIINHCLKYGIGTLVMGWNEGFKVDANLGNLNNQKFVQMPLGKLKSRVKQLCDLHGIRFIETEEAYTSKASFLDGDSLPKYGEKPMGWKASGNRIKRGLYRTSDGFVVNADLNGAANILKKVSGRLGLSLNQLSRRYAAVVARIRLN

SEQ ID NO: 17338 - protein, 478 aa, Nitrospiraceae sp.
MVRTYRVNHNANIGKQDKITAVIKEYRKTAQSISSAQWQRFYKEGKSFNKYFDIKHIQTSLSERYKQTCQYQVVSILNSFISNRKNDFTRMVYRSHLPEQIKIDLFTINKYGWWFRKELKKIDTDTLKLARKIFKYILSEHRNPNFKNISMHLDHKVALMSGKVQDKATSFDYWVRLSTLDKNYPVYMPVKTNPYFENIEGKLKHFCQIGLKEDRDITLSFIKDVPNEKDSYKPVINKISLDTGLKMLFATDKGDLVGRNFYETLQKFDRQITKLVSNRQRQKLKVRCRKYDDLISKLNAYLKNEINRCLNKLVDLYLPAEIVVERLNFRNLNLSKRMNRLITILGKTLIKTKLQSLHETYRIKIIEINPAYTSQECSVCGYVDKNNRQEQEAIKCRFCNTSQHADVNGARNHLVRSSDEVINIYKNKKAVLHILVDRFLYKLSDTERKYAMPHSKAMALLSKNPYFSGSLAQAKGFL

SEQ ID NO: 17339 - protein, 388 aa, unknown
  TnpB Polypeptide
MSNLKYFRYRIYPNKEQTGSINQMLGNARFIYNWALEARIKAYAKDKSSVSAYTLMTKVTQLKRQPKYEWLQLSVAQSLQCSIVNMEKAFTRFFKQKKGFPKFKSKKNKRQSVSFTQNTRINFGINRIWLPKLKWIPARLSREFEGGIKTSTLIKTSTDKYFVSILVELPEIKIKQKPIRKKTAVGIDTGIKVFGTFSDGKTIENPKHLKSSITKLKTLNRRASKKQKGSINRKKANLKLALLQEHIANQRQDFLHKITTQIANEYDTVIVENLNIAGMTKNHCLAQSIADLGLGNFYKLLEYKFADRGKNYIMIGRFQPSSKLCSSCGYIKKDLKLSDRTWVCPECGAEHDRDYNASKNILSFGLEKQNLINKIPMGRRDYKSVEIV

SEQ ID NO: 17340 - protein, 431 aa, Acidilobales sp.
VSEVVRTVVVESAPLPRRVFRVFVELEGMYRNMVEQLTMYAVRNSVASFTKLKALKYRELRALYPHLPSHYAYTACQDASTRAKSFLRLKKKGLTSREYPEVKRISIWLDDHLWRLRGLTSIELATHKGWVRVELEPHKQYWKYVNAGWKVASEARIKLDKKSRKLIIYLTFKKTVEVYEPRGFIAVDVNENHVAVMVDGRVYLFETRFKDIVLGYYYRRKRVQEKYDTLYGVRCRAKRKIFRKLKERKRKSDLRWKLANIIVRAAKERRYAIILEKLGKNPAREMINHVRDEQLRHRIYQASFRGVQRAIEEKAREHGVPVVYVDPRNTSKLCPVHGAIIVYSNDSRVGRCSIGDELWHRDVAACINLLLRARLGNGSSAPSLGGLTVDGSRMQFGSTATHDPTGIPKSLWARWKSLDATNKHKLMRMNI

SEQ ID NO: 17341 - protein, 370 aa, Acidilobales sp.
MREYIHCVARWIPEGVCHRALKAEVEVVDGKLNELLWDLALYRHAMQRTVDALWDLDKVPKKSRAHQMFYNILRSHGFRAHVARNIYSHALTLVESTRKNKGSKPVIKKLSARLDYQDARVELGKGVVRVIIRDKWYTLKLKHGGDYIWRFKELRWKEVHVKYENRKLYVSVVFESDYKPYIPRGIIALDVNLRAITTYNGSEVRRFKTRFADALTKRKRAEELQGKYPKRWRRNEKILNRIRSLHRRARNIAADYCWKIAKLVVLDARRKQHAIAVEDLEGLRESFNNKSDRVTWKLTMFAYRRLQHSIISKALECGVPVIVVDPRDTSRTCPRCGFARDRDSIGAVNIWLRALYAYMGCLSHSREPPR

SEQ ID NO: 17342 - protein, 209 aa, Microcystis sp.
LIDVKRQEYHKPTGQITGIDLGLKEFYTDAQGNTVENPRCLIKSEKRLKKAQRRLSKKFRQGKKQSNNYHKQRTKVARLHLKVSRQRKDKAIKDALALVQSNDLVVYEALKVRNLVKNRKLAKSISDASWYQFTEWFEFFAKIYRIVCVAVPPHFTTQDCSVCGTRVQKSLSTRTHQCPNCKTVLDSGGRGARGGESPTSGFLMETLRI

SEQ ID NO: 17343 - protein, 320 aa, Microcystis sp.
MRVIEFKLKTNLHQKIAIQEAIRVEPFIRNKCLRFWMDSTKADQVNYTTLCKLTTESANSSEFPFVGKLNSMARQASAERAWFSISRFDNNCQRGWAKKGYPKFKKFSRSVEYKTSGRKLTEDKKFIHITDKTGIGKLKLIGTFNREIIDKSTIKRVRLIKRADGFYCQFVLDIERVETFDYTGKEIGIDLGLNHFLTDSNGDKIDNPRFLRKSEKRLKKAQRKLSKKKKGSQKRLKQKSKVARLHLKVSRQRQDFAVKTAKALIQSNDLVVYEDLKVSNMVKNPKLAKSIQDASWSMFTDWLDYFGKIHGKFVVAVNPQ

SEQ ID NO: 17344 - protein, 381 aa, Clostridium sp.
MILANKVRVIPNIEQQQKLWQSVGTARFIYNWTLARQEENYKNGGKFINDGDLRKELTILKKSELNWLSGVSNNVAKQAVKDGCNAYKRFFKGLADKPRFKSRRKSKPSFYNDNIKLKVKANMVLIEKVGWVRTSEQLPMDVKYTNPRVSFDGKFWYISIGIEKEAPIIESTGISIGVDLGLKNLAIVSNIDNPFKNINKTKEVKRLKKKLKRKQKQVSRKYEKGKIQIVKEGENRYKFTKTYNIKKLEKEVKLIQRRLSNIRLNHIHQATTEIAKTKPSRIVVEDLNVKGMLKNKHLSKAIQEQCFYKFISILEYKSKFNGIEFVKADRFYPSSKTCSCCGEIKKDLKLKDRVFICPSCNNKIDRDKNASINLSRYKQSA

SEQ ID NO: 17345 - protein, 436 aa, unknown
  TnpB Polypeptide
MGDKNITAQIANTVSVYREAVMYLIDVVNAEWESVGPVYKAKKNEGQRAVERLIHTTKKNSAKYDFDSRFVKFPSYFRRAAISFALGTVASYRSNCANWEASGKKGNPPVLPKRVAAMPAFFCKNMSESKDMLTGKTACVKLKLYVKNDWIWVTIPCRKQDVKYLVKWWSAITPGAPVLQEKRKRKAKTVYFLRYSFEEVRDLSLNDASLDSRSILAVDLGINTDATCSVMQSDGTVTARKFINFPVEKDHLYHILNRIKKKQRQHGRTGGKTDWKIVMQISDELSKKIASSIVDFAVLHGVNVIVFEHLSTGGKIRGSKKQRLHLWRKRSIQEMTEHKAHRCLIRISRICAWNTSRLAFDGSGRLQRDKNNHQLAAFANGKQYNCDLSASYNIGARYFLREYCNAYPKIAGQIPKASQRVYADLRNLFGNTNQAV

SEQ ID NO: 17346 - protein, 388 aa, unknown
  TnpB Polypeptide
MRIQRGFKVKIYPTPEQEQQLLRTAGACRWIYNHYLEERTNYYLEHQKTLTYKEMSANMTRLRKELEWLSDTRLQTLQQSLRQLEDAYKRFFRNDSKFPKFKNKYGNQSFRKVTGWSVNNNKLFIMEGLTVSFRGKLPISREGTLTISRDKTGSWFASAQGFEERNQPKLNGSIGLDFGLKNLVITSNGEKFNNIRSLDGLTVQIRSAQKALSRKQKGSNNRAKAKLALARLHKKVESKRTNHLHHVSKAIVGKNQATIVVEDLAIQNMMKNRRLARTIGDAGWGDLLRMVTYKQEWAGGKVIKINRFFPSSKTCSECNFVRKDMSLSVRNWLCPSCGIEHDRDINAALNILKQGVERLGVEKKALALASAKVKLSSVKHGNEQIALG

SEQ ID NO: 17347 - protein, 225 aa, unknown
  TnpB Polypeptide
MEQYPDWYYQKKAHKEDLWYKQLPSQTAQEVCKLLDKAWKSFYALKRSGGIETPRPPRFKQESIPITYMQMGIVHERDTDRVRLSLPKALKKYMEETYQIHENFLYLENKIFRGMDQIKQLRIYPPEKGNCKIIVVYEVPDQEELPQNGHELSIDLGLHNLMTCYDSENGKTFILGRKYLELERYFHKEIARVQAQWYGQQSGKGVKHPVTSNISGSYIRENKTQ

SEQ ID NO: 17348 - protein, 485 aa, unknown
  TnpB Polypeptide
MWRARDSKLRRFDDSYLERKFDILTREWETDSHQIRGGVRTVAEADVDVVRHRRTHKARLYPVPVQAAALDGQGYTARALWNLLHEWYTCRNGGIARRPSIAEIDQQLRDARANPLPGWEWLTDLPAQATQQVLKHYLGAWDRYFGRVSKPPRFKKRSVHMAVDVPQASALKIARLSRHWGEVNIPLVGRVRFRWTRPLPEVSRGCSGRITGARLVKDPLGWHICFRIEERVVVVPVNPGPPVGVDRGVVHTMALSNGEIFDMRSLLTPGEQRRLRGLERKAVRQQFAYKQQRAHNSTALMSKRQRHTYEQIAALRARQARRREDWLHKTTTDLAKSHGVVVVENLRIRNLTRSARGTIEHPGSNVRAKAGLNRSILGMAWGKAEHMLAYKCPMQGGVLVRVDPRNSSVECARCGHSAPTNRLSQATFRCVACRHAANADTNAARVLLERGLTALSGATPGCGGTAREARLAVPLREPLLATPNL

SEQ ID NO: 17349 - protein, 521 aa, unknown
  TnpB Polypeptide
MKKKKKYNNLKYQELLYSIKKYSKYVPLYDIFFENPNRLETHSIFNMYNYNIFESNNYSYEFKNDIDFDEKKIIACKKIILEPNEEQKIKLLNMLEGYRLVYNKTIKFFKERRYNYSHEPKINKDNITVVKKKIKANIKKNEIEKDVIFTVNNILKNICKEEDKEKRIDRVSKLKENNSIITDEKIIRTYFIKKDINRISKEYKTPVHCLDYAVKLACSSYKSALENLKNGNIKHFNLSYIKKTKKSLVMDIEKVAIKSNTIYPSLMGKKLKNKENLEYSNVFDCKIHYNFNKKQFTLLVPIEKDKNIIENNNWICIDPGIRTFLNCKTNNGFIEIGKNLSNKIRSKIVLIDKQENIKNIELTNKLKAKISNISNINNYIKDKKCKIRNKIKNWVDDSHWKIINYLTSSYKNIVIGKWSTKSIIKKDDSILSRLTKRVTQNLSFYKFLQRLKYKCKIGENNLRIQDEWYTSKTCSNCGWKDENLGGNKIFNCKNCNIQLDRDYNAARNIMLKSLLSVNILS

SEQ ID NO: 17350 - protein, 159 aa, Proteobacteria sp.
MRCLKGHASQGTIKLWCSRRGLWYACLSVSMEVPDAESTGRWMGIDRGQHIPLAAVTPAGPVIFWKAKRLRHIRRVYARRRRQLQAAGKQRAVQKLERHEGRIVAHSNHCLSKDVVALGKRCGAGIRLEDVSGIRSRSRQRQATKADAGQNRDYWPFLQ

SEQ ID NO: 17351 - protein, 535 aa, Streptomyces sp.
VPFVASGPSGVAVRTRLKQLAPADEEVLRLVGAHLGTLASRDLKARCADALAHDGEAWAARKREMTPLSSSRWAGAITKASHDQWALSRRCQLAHIQSLEAGISTIRHRLCLPLREKGGRRAPGGYHSRQEWHAKARRLHVLEDRLEQARTDRDAGVVHVVRGGKHLARTRHHLAAAQLTETGWRQRWEAERWFLKADGESGKRYGNETVRVSPEGEVSIKLPAPLKELANAPHGRYVLACQVHFPHRGQEWADRVEANRAIAYRIHYDTARGRWYLTASWQIPRTQTVPIEAALTQGVIGVDMNADHLAAWRLDVHGNPVGDPRRFPFDLSGPAGHRDAQVRHALTGLLHWARACGVTAIAVEDLDFTADKTRERHGRKRRFRQLISGMPTGRLRARLTSMADHTGIAIIAVDPAYTSRWGAQHWQKPLTSKIRKTTRHDAAAVAIGRRAQGYPIRRRTAPPPHDQSDRAGHRTVQARPGIPWREGTRPRIPGPRTRSVGPGRGANAGDQNAQHRSGHSAEHESWQQDSLPLSL

SEQ ID NO: 17352 - protein, 393 aa, unknown
  TnpB Polypeptide
MRKSFQFRIYPNKKQEVALERTLTTCRHLYNDSLAERKRQAELNRLKQSFDVFPWGKTEWINYYDQANQLPLSKTAFQKEVHSQVLQNTLKRVEQSFQNFFNGAGYPRFQGRNRYNSFTYPGSGLKLNLNEGKLILSKIGNIKIVLHREIEGKIKTCTIKRDVDQWYVTFSCQIDNPSPVEIKTKIGIDVGLKSLITLSNGEKIEPLKYLRASEKRLAREQIHLSKKKKGSNNRNKQRIIVARVHRRIRFQRKDFNHKLSTNLVNNYDHVVFEKLQIQNMVQNHHLARSILDASWSQLIDLTIYKAEYAGKIVELVNPNGTSQTCICGHHVPKDLSVRVHNCPNCGLVMDRDHVSAILIKNRSSTAGIAGIQAQPSNPNREAMKREAPCESKE

SEQ ID NO: 17353 - protein, 382 aa, unknown
  TnpB Polypeptide
MKTAYKFRMYPNRQQQAQLDVTLETCRHLYNTALADRKKAYETEGISRSYEDQAAMLTVERKNGNFLGIYAHCLQDVLRRLDKSFKAFFRRVKAGEEPGYPRFKGKGWYKSFTYPDSKTGYKLDGSKLTLSKIGSIRIFKHREVKGRIKTCTIKKDNLGHWYAILVSEVDDASPIEPNTAIGVDVGLKSLVALSSGETVEYPRYYIKAEKKLAVAQRNLSRKKKGSANRRKAKAKVAKISRDVQNHRDEFLHQVSRKLVDSADLIVFENLNISGMLKNHHLAKHIQDRAWGKLIQFTQSKAAKAGKIVELVDARYTSQKCSQCGIIVPKTLADRVHLCPNCGLEMDRDINASLNIRTLGLRGRAYREMANNRPLCEVGSHGL

SEQ ID NO: 17354 - protein, 292 aa, Aneurinibacillus sp.
LLYSRFFKKQNDAPRFKSKKNKVQSYTTKHTNGNIAIVGNKIKLPKLGCVRFAKSREVEGRILHATIRRNPSGKYFVSLLVETGVQPLPKTNSEVGIDVGLKHFATLSNGEVFGNPKFFRTLEEKLAKAQRILSRRQQVAIKQKRKLSEARNYQKQKRKVARIHERVANARGDYLQKISTHLVKNHDILAIEDLQVSNMMKNHKVAKAISEVSWYQFRTMLEYKAKWYGRTVVAVGKTFASSQLCSCCGYQNKEVKNLNLRQWKCPSCHSEWDRDVNASLNILAEGKRLLSA

SEQ ID NO: 17355 - protein, 367 aa, unknown
  TnpB Polypeptide
VVGHILIGQGAKAHTIGDNGYLELSNLGQIQMRGKAKVWGTPTTCTIVHRHGKWYASITINCEPVSRELGTGTVSLTGVATTGGTPATRSLLNGGNLRTQLTSSIGIDLGTNTAAAISDGENGYFIENPRWYKQMLPKIKKASKDKRRKRAPNRKKIKASRRWLKASKKVSRLQRQAANQRQNWVHHQAIQLIGGSSLIASEKLETKKMTAKPKPGSKRKRQKIGLNRSILDVGWGMLTSAIKYKLEEGGGIFVEVPTKKVKPSQTCPKCGDQKEKERGQRVHFCKQCGCVQDRDLAAAEVMVLWARGILPGSGTVLANVDVSSSTVKTKMRKHCGSMQQLGQKKRSKSQLAVGDVETPTKSVSRSG

SEQ ID NO: 17356 - protein, 336 aa, Bacillus sp.
  misc_feature (8)..(41): Xaa can be any naturally occurring amino acid
  misc_feature (175)..(175): Xaa can be any naturally occurring amino acid
  misc_feature (286)..(319): Xaa can be any naturally occurring amino acid
LYVFFATXXXXXXXXXXXXXXXXXXXXXXXXXXXXXXXXXXKVPTIGWIRLKEYGYISKNTTVKSGTVYQRAGRYYVSILCEVKEVKPNSILNAVGLGIDLGIKDFAVRSDGKTHKNINKTVQVKKIEKRLKREQRSLSRKFENIRKRGEQPVTNKRANINKNILRVQKLHARLXNIRLAYVKSIVNDVVKTKPTFITVEDLNVKGMMKNKHLSKAVAQQCFYTFKTWLSTKCREYGIELRQADRFYPSSKICSCCGQKKSDLKLSDRVYTCDCGNVMDRDLNASXXXXXXXXXXXXXXXXXXXXXXXXXXXXXXXXXXVILQKVESSTYSFSDHI

SEQ ID NO: 17357 - protein, 252 aa, Bacillus sp.
  misc_feature (201)..(234): Xaa can be any naturally occurring amino acid
MATKLALNKIGLGIDLGVKDFATRSDGIVHENINKTMKVKKIEKRLKREQRSLARKFENLKKRGEKSVTNKRVNIDKNVLRVQKLHARLANIRIEYVKSIVTNVVKTKPTFITVEDLNVKGMMKNKHLSKTIAKQSFFAFKTWLLTKCEEYGIELRQVDRFYPSSKLCSCCSQRKADLKLSDRVYTCECGNVMDRDLNAAXXXXXXXXXXXXXXXXXXXXXXXXXXXXXXXXXXLLIFSFVLHKISLNMKLT

SEQ ID NO: 17358 - protein, 362 aa, Bacillus sp.
MIQNDYRALPTQCSQSIMKGLFQNWKSFFASLKDYKKNPNKYAGPPRIPKYIRSSEKEILYTNQDCIIKNGRFLKFPKTKLQLNIGKLGFTEGKLKQVRVIPKYNEYVVELVIDVPSEQQIIEENARYMSIDLGIDNLATIVTNTGMKPVLVKGKHVKSINQYYNKMKSHFTSILRNGKQTNEGPFTSKRIEKLHQKRYLKIKDVFHKVSHHIVKLAQEEEVCKIVIGQNKSWKQETNMGKRNNQSFCHIPYSLLIQMITYKANIVGIQVVVTEESYTSKASFLDNDFIPTYGENDQNTTFSGKRIKRGIYRSANKTLINADVNAAANILRKVIPNTWTNGIEGLGVKQLANVLTPLTLIVR

SEQ ID NO: 17359 - protein, 371 aa, unknown
  TnpB Polypeptide
MKITRSSKCSLKFSTDNKIHQLRKVLSEYGDVVNTFIEYFWLLGELPLKSKLLKQIVDIPIYGENPSWLSARLRKVAAREAIDMILASRKRWGDKAVIPVHKGKRMSVSCTIADLLPAVNSTEFDCWLHLASIGDKIILDLPIKLHKQYHKWNELGKRLNAYIITDKYVQFSFEIETGAKREGKKVIGIDTGINALASVSSGEQYGLEMNELIDRVKRCKYGSNGQKRARRALKQRIDEIAIEVIKTENPDLIVVEQLKNMGHKSKAKRLLAKNIRRNIGIWNWRYWLMRIEQQCQRNRVSFRTVAPYYTSQTCPSCNHVDKKNRYGTEFKCQNCGYTDNADINAALNIMNRFILGKYGSQYKQENIRSFT

SEQ ID NO: 17360 - protein, 397 aa, unknown
  TnpB Polypeptide
MEIRRTIIIVLPDDDDLRRTLGMFRAVQQDVSKTCYNDGSPLSAVALQRAVYHNAKGTLNAQMTITALRLVAGAYISAKRNKRPATKPFTFARKSAMFLIGKRGRDADFRKDGTLSIWTVGGRKHITYRVPDDFRSMFTAAKEIDSLTVIERDGKLIGRVALTLDVPEPQGVLPVGIDLNETNALVAVDADGRQLFVSGKVIKVANTKTRKTRSRLQRKLATRKAERRDTRSVRRVLKRLGRKQRNRTTTFCKTTAKTLIQWVPDNAVVVVEDLNMPQPSKKAKQRKGVRRRMSQWQFGQMRAAIEGKAAERGIAVALINPAYTSQDCSRCGLRGVRRKHSFVCPHCGHAEHADKNAARNIRDRFTSLRRSAGQSMPAEARSPHGDAGKSPALAGGR

SEQ ID NO: 17361 - protein, 495 aa, Acidilobales sp.
MSSGGNPRGVSARDPDPLQSFRELVEKRKKSNKRTVRLRLLPEEHEEEMLFNIGLTSVRLWNELNYEKRQLFFKNDLTPEKREEINRRYYHKYKNFLGVNAGQIINKNEEAWESFFELLKMKRQRRLPPHIRKISPPGYWKDRITGKKKIYMLIRNDRYYLEPISDGEGRLVLKDFKLSIGYVGRIKWEGKQGRLEIIYEAGRWFAYIPIEVGVDPPKSNLKGYIRSNYRDKKDRIFNPRSIKQKDPVGDKKAFIDIGLNNLFAVVVSDGSALLVKGGSIKSEYYWWKREISTYQAVRDLLKNAGFSTWIKYHEKYVKALYKKNERLRHLYRTAIRFLAETLWSRGVRKVYIGYPIMLNQDNGNEYNANIWWYRKIVLWIVDIFIEYGIDVEIVPEDYTSQKCSICGEIHRNGRIYRGLYICRKTNKKINADINASLNIARRIGYRIIISRKIESYLITHNGVKPLIPLQRANTRDPEVRNPALKGGEGSYKRMS

SEQ ID NO: 17362 - protein, 466 aa, unknown
  TnpB Polypeptide
MRADARARKRGKHDGPVAVRRYSYRIYPELEAAENLRRVFGSCRFVYNSYIALARERYAAGGKHPSGYDAAKTLVTEARKSPNTAWLAEVSHTALSAAVHDAADAYRRFFDSAAGKIQGRRVGRLRFKSRRTSRKSARFAEDSFTIRGGWQNTRRGGGALHLANIDQDIPVNWHRPLPGYPSAVTVREDPDGEFWVSFIVRVPVEASKQPTRRPRAAGIDVGLNDYAAISYSDGTREKIANPRHYRAAEATLRRADKYLSRKTPGSHNYAKAKRARARAHRRVANLREDHARQLASKLSRENQTVVIETLNIAGMANTNMAKSINDAGWGQFLRFLEEACTRKGVDLIKAPRFYASTQICSVCCESGGKKPLNIRTWQCDSCGVSLDRDYNAATNILAAGPAVYACGRDVRLQLAEAVPDEAGSHRSEASTGVSRRRKRAAGRRVQASSDPRKIKGFRGVVESRGA

SEQ ID NO: 17363 - protein, 463 aa, Bradymonadales sp.
VSSQYRSKCCFSTSEILRLICFMNSNHICICYNHDMKLAYQYKLLPTDEQRCRMDKWLDLLRCQYNYLLAERFDWWEMNRCPVDACPLVCRIAEPREQPEYYGQKRSLVSLKQEREWYGDIHADVLQDMVKRVDLALARFIKGDKNGKCSGKPRFKGKNRYRTFAYQRVKPDCIQGNKVTLPKLGEVKFIQHRRIPDGFTIKRALVTKKADGWYVTLTLEDKSIPELPEIEIEPTESNSIGVDAGLEYFVACSDGTTKQPPKFYRQAEDKLAKLQSKRDARAKGSKPRRKLNQRIAKLHQRIARQRRQWHFETAQELIDKADVIFVEDLKVSNMARRNQPKQGEDGTFLPNGQAAKSGLNKSFADAGIAGFLNEILPYKAAKAGRLVVKVNPAGTSQHCAICLNRVPKELSDRWHDCLHCGTSMPRDVNSGVLIQKVGLGIASLKNAKPRSQSSGRRSPRRNA

SEQ ID NO: 17364 - protein, 400 aa, unknown
  TnpB Polypeptide
MKQRYKYRIYPTSPQVYSLAKLFGCCRVVWNDSLASCNSSEKLPSNGDLQKTFITQAKKSEEREWLAEVSNIPLQQSIADLGVAWKNYFDSLKSTRKGRRISRPKFKKRNSRQSARFRIGGFSIKHGKIYLAKIGKLKVVWSRELPSPPSSVTVIKDAANRYFISFVVEVAPTKLPDNGQSVGIDLGITDFATMSTGEKVKAPKPLKKNLRKLHKAQRKLARKKKGSKRRELARRKVAKIHAKISDIRNDFLHKLSTRIIRENQAIILEDLNVSGMIKNRKLSRAISDLGWRSFRTILEAKSEMYGRDFRVISRWEPTSQRCSCCGQIGGKKELSVREWTCLFCGAVHDRDENAAINIKVAGGLPETINGRGGRSKTAVNVASSSEASTHQFPRQLSLFG

SEQ ID NO: 17365 - protein, 277 aa, unknown
  TnpB Polypeptide
VTVSKTPANRYFVSILVETKDVDPVKPKINKDTAVGIDLGLKDFAVLSTGEKITNPRFNKAKEQEQIKRLNRIISRQWRMSSNTKTTDTREKKSKHSNNRQKNCIKRARLYEKISNRRNDFLHKLSTKIVRENQTICLEDLNVNGMMKNHKVADSFASVSLSTFVNYLEYKSEWYGKNIIYINRFDPSSKISNCCGWYNKHLKLSDRNWVCGDCGKVVDRDTNAAKNIKDFALQRQNLITQVPLDERELTLQEKDPLRGSQKTSGQVSSVNEESAML

SEQ ID NO: 17366 - protein, 297 aa, Actinomadura sp.
MAGTCWPRRFRSRTGAKEWRDRITANRAVAYRIHLNVATSRWYLDASWTRKDLPLIGLDALRAGGVVGVDTNADHLAAWLLDEHGNPTGAPRRFHYDMTGAATRRDAQLRHALTRLLHWAKTAGAAAIAIEDLDFQESKTREKHGRKKKFRQLISGIPTGKLRARLLSMCAEAGIGVIAIDPAYTSMWGAEHWQKPLTTTRRPASRHQAAAVAIGRRALGHRIKRRTAPPRQHQSDADGHRTAQARPGDQGREGNRPRVPGPRTRSAGSERGRNAVDQPIQDRSGWVQCQFDLHDQL

SEQ ID NO: 17367 - protein, 416 aa, unknown
  TnpB Polypeptide
MGLKGKKLKNTLRATKDRRKSMDCKVFGVKFDKSKFSTEKKNYLNRLFNEAKWLYNSILGDQDIFLYNTKCKTVDVLNKDKKWENREFEAISSQMKQGVGKRIIDSIVGLSRRKKNGHKVGRLKFKSEVNSIPLKQANVTYKIVNDKYIKLQGFKKPFRVKGLHQIPVGAELANANLVRKAGDLYLKITCFVQKEEKAKTDNVVGLDFGIETNVTTSDGEKLNFYLPETKGVKKASRKFNKRKKGSRRKFKAKINLQKKYNKLNNQKKDIKNKIVSKLVKENDIVAIQDESLAEWHKSKLCSKKVQHSIMGGIILGLKQHPETLIVVDKYFPSTQLCPKCEAKNKHTLDQRTYHCPCGYSCDRDIHGARNILNEGMKQLGTERIKPMLVELTTSERSPSDKSKVDCVETRSLYALA

SEQ ID NO: 17368 - protein, 408 aa, Chroococcales sp.
VQKAFKVILIPSRNQEVLINKTIGCSRFVYNRFLARRKEVYESEQKTLNYSGCSQELTQLKKEIEWLKEVDKFALQNSLRNLETAYKNFFADLKKPKQKRQFGFPKFKKKHGFKQSYKTNFTNGNIQVRENYLKLPKLGWLKFRRSQNIDGSIINVTVTRTKTGKYIASILCEIEVEKHPYVDKSIGLDLGIKSYLVTSDLKEIENPKHYRQHLRKLRRANKKLSHSVKGSMNRAKAKTKLARIHERITNVRDDFLHKLSTRLIRENNIICIEDLRVANLVKNHKLALSIMDASWSKFVAMLEYKALWHDRIVQKVSPFFPSSQTCSCCGFINPEVKDLSIREWDCPACNTHHLRDCTAAVNILREGLRLLTVAVGAPDTQNACGESVRPGNTQAGLDEAGIMRLIVV

SEQ ID NO: 17369 - protein, 431 aa, unknown
  TnpB Polypeptide
MFDAVKVALDPTPSQERRLLSHAGAARFAYNAGLARVKAALDSGEVLDWSFFALVNWWNSCKDELAVGGDGEPWWQENSKEAYSRALESLAKALSNWSKSRRGDRKGRKVGFPKFKVKGRSVPRFAYTTGGFGLVKGDPKALKLPRIGRVHCMENVAARVGDAKVKRMTISQRSGRWYASLTVEREDKPVKRAPKGGAVGVDLGVKTLATLSDGTVVENPRYLKKSERKLKQAQQALSRKTKGSNRCDKAKAKVARLHARVANQRLDGLHKLTTWLTEKYSDISIEDLHVAGMVKNRHLAKPISDAAFGEFRRQLEYKTARTGAALHVVDRWYGSSKTCSGCGSVKAKLSLSERTYTCEGCGLVLDRDLNAAINILVAGSAPETLNAHGATVRRSDRSGHATLVAVKCEPSGGENRASLGAGGRKGALQTN

SEQ ID NO: 17370 - protein, 382 aa, unknown
  TnpB Polypeptide
VNLGAVDRAYASIENDPFTDGEIILKMVIQGSWYRLIFDFDNKRFTEGRVTLPVIKVQDGQPVFIFTVVTDNPVVQFSGDYTIGVDVGINNYATVVVRDVKTGRIVHETTLSQRVHSLWNSVRASQQQVRDLKKKAATLLRYRQARMSALDEAQLHREAASRKKRELAILAAQEIAYLSHVWGNAVVAVEDLSWIRNTMSSGRWNRGAFVQWLTHYVSQNGGWVVSVNPANTSQQCHTCDAKVSHPNRKLSVCPEHGVMDRDVNAAANIAERAVQRVAKARVTRSKNRKLQPQATLRTPPARASLKYPGRDRTKNKPTPKRKNHRLVSREVILPVCPARAQASRLSASVLADQGVHGTLGTSKAALKQDTNVVYSCRLRSPI

SEQ ID NO: 17371 - protein, 435 aa, unknown
  TnpB Polypeptide
MGSYEAVRVRLDPTPRQERLMASHAGAARFAYNAGLAHVKEALDSGELADWSHYALRRWWNANKDVLAVNRTTGEVWWSQNSKEAYSEAFRDLARGFSNWAKSRKGQRKGKRVGFPKFKSKNTTMRFAYSTAFTAPTASDPYGLKLPRIGRVHCMENVHERISGARLIRISVSRRAGRWYASLTVEREPSVTTAPKVGAVGVDLGVKSLATLSDGSVIPNPRALNTGLRSLRKAQQALSRKVKGSARREKAKERVARLHARVADVRADAMNKATTMIANTYSVVCVEGLHVAGMVKNHSLARSLSDAALGEFRRQLEYKTARSGAVLRVVDRWFPSSKTCSNCGTVKAKLSLSERVFNCNACGLSIDRDLNAAINIEVAGSAPETLNARGGTVSRNRPSGCVTLDPVKCEPSVRHSGAVSLGADSQKAVLQTASR

SEQ ID NO: 17372 - protein, 435 aa, unknown
  TnpB Polypeptide
LLEGVKVALDPTPSQERRLLSHAGAARFAYNAMLAHVKAALDVGENPEWSFWSIRKRWNADKDTIAVGEDGKPWWQENSKEAYSSGIEALAKGLSNWSKSRKGDRKGRRVGFPKFKSKSKTTPRFAYTAGGFGLIEGDPKTLRLPKIGRVHCMENVANRVGDGRVLRMTISQHAGRWYASLTVERDDKPVTNPPKGGAVGVDLGVKTLATLSDGTVVENPRYLRKSERKLKKAQQALSRKAKGSNRRAKAKAKVAHLHAHVANQRSDAMHKLTTWLTNKYSDISIEDLHVAGMVKNHHLAKSIMDAAFGEFRRQLEYKTTRSGARLHVVDRWYRSSQTCSQCGSVKAKLSLSERTYTCDNCGLVLDRDLNAAINICVAGSAPETLNAHGGTVSRNHPSGRVALDPAKCEPSVRGGRRAVRLGAGDRKVALQATTS

SEQ ID NO: 17373 - protein, 411 aa, unknown
  TnpB Polypeptide
MYLTAKAKIPELAQLKEVGNICTKIWNKANYYCRQQWKQTGKIPSYYELQRIFKDDFWCRQVHSHTAQAVLHKLAESYRSWFQLRKVDATANPPMFRKKDSVSTVTFTKFATKINDTQMELTLKKGTHVQLNYQLQPNVKITQKNIVRIEVKHGFANIVYRVEEPPLKQSGQVMGIDLGVINTATTVKENGEARIYTGRSLLSTQRYFNKEIGRVQSIVMAQSKGKKKWSRQLSELAKKRTRQIRHILHAQTKAIVDGCVKSGVNVVAVGDLHNIRKLRSDTKKPEKLVKARSWGRVNNQKNHAWSFSWFTATLMYKLRREGILLVQVNEKSTSKTCCRCGEMRKRNRKTRGLYICNKCGLKINADVNGAVNILSKYLQPLGRSSANVNLAKVIKWKENHLSLEALPFKVG

SEQ ID NO: 17374 - protein, 408 aa, Moorea sp.
MIIAYQYRLKPTKEQKAQIDNWLSMLCAQYNYLLADRFRWYEQNRCSVNACPLVCYLPELRNNPNYYSQKKSLPNLKKTHPWYKDIHSQVLQDVVKRVKLAFDKFIKGDSKGKRSGRPRFKKTHRYRTFTYPQMKEGCLEDNLITLPKIGKVKVVLHRPIPDGFKIKTATITKKCDKYYLILSLEDKTVPEVKPDINPDSIIGIDVGLKEFLTTSEGETIQVPQYYRKAQKRLKVIQKRVSRRKKGGVNRLKAIKQLGRQHKKVADKRKDFHFKTANYLLSKYDVVAHEKLNVKGLAKSRLAKSVLDAGWSSFLTILTSKAENAGLLAVPVSAQNTSQNCSGCGKKVPKKLHVRWHDCPHCGCNLDRDHNAAINIKNRAAGQSVLKAQCLRSDGWIDWEAYTEPVRSV

SEQ ID NO: 17375 - protein, 307 aa, Moorea sp.
MVFKKYHRYRTFTYPQMKEGCLEGNLISLPKIGKVKVVLHRPIPDGFKIKTASITKKCDGYYLVLSLEDKTVPVRAASASPKVKPDINPDSIVGIDVGLKEFLTTSEGETIEIPQYYRKSQKRLKVIQKRVSRRKKGSNNRLKAIKQLGLQHKKVADKRKDFHFKTANYLLSKYDVVAHEKLNVKGLAKSRLAKSVLDAGWSCFLTILTSKAENAGLLAVPVSAHNTSQNCSNCGKKVPKKLHVRWHDCPHCGCSLDSPKATLRERDHNAAINIRNRAEGQSVLKAQRLLSNSRIGWEAYTDLSGSV

SEQ ID NO: 17376 - protein, 373 aa, Brasilonema sp.
MFLSVKTKLKLSKAQKTVMSKHAGIARFTYNWGLATWNNLVKDGLKPNKYILKKFFNNHVKPEFDWIKEKGICQRITQYAFDNLGDAFSRFFSGKGGYPNFKKKDHHDSFTIDAGGKPIPVGGKSVKLPTIGWVRTYEGLPHVTCQSITISRTADSWFIAFAYEQEHEPTAKQYEVVGVDLGVKELATLSTGVVFPNPKHYKSALKKLRKLSRELSRKKKGSNNRHKAKIKLAKHHLRIANLRKDTLNKATTFLCKNHAKIVVEDLNVKGMLANHKLAQAIADCGFHEFKRQLEYKAKKFASEIIIADRWFASSKTCSACGHVQDMPLKMRTFNCENCGSSIDRDLNAAINLSHCSTRVSRLEACGVLRLAKA

SEQ ID NO: 17377 - protein, 405 aa, unknown
  TnpB Polypeptide
MIRSSKVSTKFANANKQSNLKIFLKEYNRVSRLLVDELWEYESLPKFLSKDVTKKFDTWLSARMLQCIGKQIAGVVRGTKQKQKQRLFVIHKLQSENQTIKANKLQDIYDKTKVTKPNLDSVCPELDARFIKVDLHNNTSFNGWVTVSSIGNKMKLIFPFKKTVHLNRVLEDGKLKNGLRITKNSFTFMIDLPDQPIKSDGTTLGLDIGQTTLYSCSNNVTSVKNKHNHDLNSIQSRLANAKKGSNGSRRSQQHRTNYINWSINQLDLSAVKQLNLENIKHLRRNRKSSRKLSHWTYTDIKRKLESKCEQQGVLVVYVSPTYTSQRCSHCGWVQKSNRKGKNFNCVSCSFAADADINASKNIALRLSPLSDGQRLQQNNRTGFFCRAVGDERIVRHTKKTKRNRS

SEQ ID NO: 17378 - protein, 423 aa, unknown
  TnpB Polypeptide
MQLAERHIIKSTEHRFAPIDELAFKSKNLYNAANYVIRQSFVYGWGYVNYNEMNRLMKSHKAYKAMPAKVSQQILMILDKNWKSFFEAVKAYKIDSSKFTGRPKLPKYKDKVKGRNILVYTIQAISSKQLQKGIIKLSGTEILIKTKVNPDRICQVRLVPKCDSYIVEVIYNEPESTVSDEKSIASIDLGLNNLVALTSNQPGFIPLLINGRPLKSINQFYNKRKAQLQSQLKGSRKSSPRIQRLTRCRNQKVDNYLHHTSRLIVDILVAGQIGTLVIGKNAQWKSDINLGKQNNQNFVGIPHDRVIEMLEYKAKLVGIKVIVQEESYTSKSSFMNLDPIPVYGHIGADGVVFSGKRIKRGLYKTSVGQLINSDINASYNILRKAIPNAFSNGIESCVVQPRRVNPLKVRAKGEGLNASYVMS

SEQ ID NO: 17379 - protein, 476 aa, Actinobacteria sp.
VSQTFQKSRFFLLHPEVNAGKVERLESLHREYVAYVRICVQAMIDGRRLNLARSEKQAFFPCSETLTSQIEKNARDHAIQVVSTWAKSRYTLRVKGVISKAKRDGEVSPEQAKALYTIGKYLRDQPGRGITQDDIDLYWKFLDERGGRKPEISDTLPMRLTEMTARLEDPKEASIGDFWLRVSSLEARKSIWLPLVGSPYITKADQVSKGILVRKTKKGFWRFEVVEKREWVVPEPKDLPSHAPRLGVDVGLNILAATSDGDLYGASFKPRFDRLYKRVRDLRANRMRQGFRDNSPRLDALESKLSGMIKTETGRIANNLVQRHPGTVFVLEDLDLRGCRGQKRFAYRALYRALSSKAPVEVVNPAYTSQECPSCGYISRSNRSGTSFSCRSCGRKAHADWVGASGILRRSEDKSIGCGDHPSSVKATLQRRFLVKRNSPARSLLAPSPLGRSLTTEVLVQSGIGTGSNLVSASPP

SEQ ID NO: 17380 - protein, 405 aa, Planktothrix sp.
LYRAIKVRIYPTSEQSQKLSQVMGCARWWWNYALNLCNETYKETGKGLTQIALNKVLPKLKKAEDTAWLGECYSQVLQSTTLHLTKAFKNFFEKRAKYPRFKSYHGKQSCQYPQNCQILERGIKIPQVGIIKASIHRLFAGQLKTVTVTKASTGKYYASLLFDTSLETPEVVVTGKVIGIDLGLKDFCVTHDGNKTSKFANPRHIKKHEKNLARKQTKLARQKKGSKSREKARKLVAKVHERISNARQDFLHKLSKKIVNDNQVVVVENLNVKGMVRNHNLAQAIADVGWGTFINFLDYKLKLKGGLLVEIDRWFPSSKTCSNCLYQMSEMPLDIREWTCPSCGTHHDRDENAATNIRAEGIRQLSVLGTRTAAEGGEVSPSSGRKSVLRHSPVNSEAPSVYTVG

SEQ ID NO: 17381 - protein, 333 aa, unknown
  TnpB Polypeptide
VIEKLQLAWKNYFKGHTKKPPGFQPKDGHFPVRWKRGGIKIVDGKLRLSLSRQTCEYLKEAHGIESRYLWLELSKIPAFGVVQEVEIVPKKIYGHWRYFLHIIYRKEIESRKPGDKVMSIDLGVVNLATIVIENEKQPYIFDGRVLVSKLRWFAKRKAQIQSVLSKQGSKSSKKLYKLVVKEHAYVKDYLHKVSRWVVELARAEGVGKIVVGSMHKNIAQMDLGHQNNEKLHRIPFGKLVAMIKYKAQGYGIEVVTVDEAYTSQICSICGFKDKSSRKHCGLYVCKGCDSVLNADVNGARNILFRVVPNPVSDRDSGFGHPRRIRVLQAPNFA

SEQ ID NO: 17382 - protein, 141 aa, Geobacillus sp.
MKRSWRTGSGFCREERQVDRIGTKLVEKLLSFMRKSPTVGTISCTNCPHRLIRENQVVCVEDLRVRNMQKNRKLAKSISDSAWGRLLNMLEYKAKWYGRTVVRVGRTFPSSQLCSCCGHRAGRREIARHPSVGVPKLRSRT

SEQ ID NO: 17383 - protein, 345 aa, unknown
  TnpB Polypeptide
MSESNTHFKAFKYRLYPTPAQARQMLLVLNICRNWYNMCVSERMWAYKLEGRGVKQAEQEKTAIQYRKTFAWAAQSVYSQTLQTVCADVNKAYQAFFRRVKAGEKAGYPRFKGHNHFHSFAFKQFGSGAKLDGRRLELYGIGRVAVRWHRPIEGTIKTVRIIHKAGRWYAAFACEVEGKPELPKTGRTVGIDVGISALVTTSAGDTVENHTFYRANQIRLRILQRKLARAHKGSKNRRKALLRVQRQQEHVANQRRDYAHKLSHGLVKDFDLIALEDLRIRNMTRNRHLSKSILDSGWGIFRQFLTYKAASAGRVVIAVDPALYVQMLLELRCHVSKLRLVYPMG

SEQ ID NO: 17384 - protein, 367 aa, unknown
  TnpB Polypeptide
MADENITQRKTYQHRLYPSRAQTMRLNGTLALLCELYNAGLQERRDAYRLERKSIRYIEQANQLPEIKEARPELNEIHSQVLQDVLRRLDKAFQNFFRRVKERKEKAGFPRFHSRKRYDSFTYAQSGFSVKHGKLRLSKIGDVRIKLHRPLTGKIKTLTITRSATGKWFACFSVECTLEPLPENDRAVGIDVGLSHFATFSTGEQIANPRFFRTDEKALAKAQRKEKRKAARRIHERIANRRRNFAHQLSHALVSMFGLIAFESLNIKGMVRNHCLSKSIQDAAWNQLIQYTTYKAEYAGRVVRTVEPRGTSQRCSACGAIVLKDLSQRIHDCSCGLRLDRDHNAAINILALGLQCVGIRAKEAPSF

SEQ ID NO: 17385 - protein, 274 aa, Streptomyces sp.
VKRAFKYRFCPTDAQAAELSRTFGCVRKVYNMALAARTEAWARQERVSYHQTSAMLTAWKKTGELAYLNEVSSVPLQQALRHLQTAFTHFFGRRARYPRFKSRKTSRRSAEYTSSAFRFRDGALTLAKMAEPLAVVWSRPLPEGAKPSTVTVSQDAAGRWFVSLLCDDPGVKPLPANGNAVGIDAGLEHLLTLSTGEKIANPRHERRDRAALARQQRRLAKKEKGSANRARARLKVAKIYARIADRRRDTLHKITTRLVRENCENQRVLSRAVA

SEQ ID NO: 17386 - protein, 385 aa, Streptomyces sp.
VKIVTQVKLMPEAEQAAALRSTLRTVNDLACWVSEVAFAHGVPREYELRKHTYPRLKAEGLGAQAAQHTIKKVRDAYTTLKANIRAGNLGKEGSKRHRKAESKPIAFRPEAAQPYDDRCLSWQYDQQTVSIWTTAGRIKNVRFVCSADALKTLRECRKGESDLIERDGSFYLAATCEVPEAEQYEPDGFIGVDLGIVNIATTSTGYQAAGRGLNRYRKRQRALRAKLQKKRTKSARRRLKERSRRETRHVKNTNHIIAKTIVTEAERTSAGISLEELKGIRQRVRLRKPQRVALHSWAFAQLGDFIVYKAKRAGVPLVFVDPAYSSRECAECGRIDRLNRISQAKFACRSCGVVAHADRNASHVLARRGEDVWTAGRESRVPATP

SEQ ID NO: 17387 - protein, 229 aa, Streptomyces sp.
LCPTILVGRLSGVRADLVPDDLWERVAPLLPPAPERRHCHPGRLRVPDRAALAGIIYVLRTGVAWRDVPAQAMGCSGVTAWRRLRDWTEAGVWPRLHAALLTELRRAAQDAAGRWFVSLLCDDPSVQPLPATGQAIGVDVGLNHLLTLSTGEKIANPRHERRDRAALARQQRRLAKKEKGSANRARARLKVARIHARIADRRRDTLHKLTTRLVRENCENQRVLSRAVA

SEQ ID NO: 17388 - protein, 364 aa, unknown
  TnpB Polypeptide
MIIKAVRVKLRTNEKTVAALADTMSRFNAVCNALSQIAWDTQTFRQFDLHKAAYHQIRTDFGLPSQLVVRAIAKVTDSYKTDRSQLHTFGPRGAVVFDARCFRMKGVSSAELTTTQGRHSFSLAHGGKQREQLSRGVMGEADLLFVDGAYYLSIAVKFPDPPKADTSGGVLGCDMGIVELATDSEGQSYSGAVVKAVRCRVREHRRQVQKKKSRSAFKRLQKINRRASRFVHDVNHVISKSLVQKASILQKALSLENLSGIRERASGFSKAIRWQMGNWAFADLAAKIVYKAAEVGTPVVFVDPRNTSRTCSMCGYCDKANRKSQASFQCQHCGFCANADKNAAINIEARGLLSRPLMFRPAMG

SEQ ID NO: 17389 - protein, 350 aa, unknown
  TnpB Polypeptide
MLISKTLKCKVFKPTQKKLELLNREYSNFQIYVRSGRDFGIYSLTKATFDFKYKKKVRRKKQPMPLHNQSTKLKITNHKLTPYWFRVPIKGKRGGIWLPIIPHENIDSSWEIREAKLFKRKKDFWIYITIRKETHLKTSYSSVLALDIGEKVIAAAVLSSEHKPIFLGREVRGIRRHHAWLRKRLQERELFKKLKEMRGKERRRVELVLHEVSKQIVELAERNNSIIVMGDLKGIRKGGRGKRFNRIVNAFPFNKLSFFIEYKAHLKGIAVVKIREDYTSKICSRCGEEGKRIKQGLFKCPYCGYQANADFNGAMNILKRSLEYISKDGAVAFSPEPPMTEKTRAEAHDI

SEQ ID NO: 17390 - protein, 368 aa, unknown
  TnpB Polypeptide
VESYPFQRFIKAENASSIMLVSKTLKCKVFNPTESKLQLLNDEYSNFQIYARSGKDFGIYSLTKSTFDFKHRREIRKKKQPMFLASQSTKFKITNNKLTPYWFRIPVHGKRGGIWLPIRPHENIDFSWEIREAKLLKRKKDFWVYITVRKEVQLRTSYSSVLALDIGEKVIAAAVLSSVHKPIFLGREVRGIRRHHAWLRKRLQERELFKKLKEMRGKERRGVELVLHEVSKYIVELAEKNNSIIVLGDLKGIRKQDKGKRFNRIVNSFPFNKLSFFIEYKAHLRGIMVVKMKEDYTSKTCSRCGEEGKRVNQGLFKCPHCKYQANADFNGAMNILKRSWEHVFQDGAVAFSPEPPMTEQTRAEAHNI

SEQ ID NO: 17391 - protein, 427 aa, Sphaerisporangium sp.
  misc_feature (398)..(421): Xaa can be any naturally occurring amino acid
VSPQIIRQGFRVELAPTLAQRARLGQHAGLSRVVENFCLEKVKAALEQREAEKTYGVADKDLTPVPWSAPALERLWRLEHRERFPWFGEEGLSSRVPKEACRVRAAGFKNFFDSRSGKRAGRKVGFPDWRKRKHGSRFRYDADRARPVSARVAQLPGVGKVATLEDMSWLTDRIADGRARVIGSTVREQAGRWWVSFQLEIDRADVNERRTVSNDAPACGIDVGVKIFATIVDDDGTVSEIHAPKPLKSALRKLRKANKAVARKQRGSSNRAKAAKRLGRVHLEVANQRVDFLHKTTTMLARTKRAIAVETLNVAGMVKNRRLARAISDLGFGEFFRQLEYKTQWYGSRLRAADRWFPSSRLCGGCGAVNGGLTLADRTWTCGCGLEHDRDVNAARNXXXXXXXXXXXXXXXXXXXXXXXXLEQQAA

SEQ ID NO: 17392 - protein, 369 aa, Lactobacillus sp.
VSNEEKYGFTRQYHVLLTDKQKIQHEKALKTQNALFQYALKYLFKTYGVKHIGRPMPFSQKPIQYVLNKIKTGFIKDKYGLARWKKSVLFLSSHSADEFLKTVYTNFSQYRKCLVKADKSMDEKARYNFKMNVTKDKYGKHKNQLHKSWYRKGSINFLRNSASFRTITSQKLPEDSKGGIRIEDKHTDNHTFLTVADFGTVEVIEDLSELNLKDIALTKIKKLPDGSYRLQLTFSLPRKKQKSKTIQGFDWNMAGNEVFCSSDGKRIKVSDAAIKRADEYEQKINAIKSARDLEGNAHGQSKLYRKLDCRQQKLNAKRSNMLTNEYRHLVHEVVDDCDTIVVEKLDAYEMRKRGKGSAQRKGINRTLTI

SEQ ID NO: 17393 - protein, 239 aa, Lactobacillus sp.
MTEQIEEVPAELIQTRVYELRPNETMRRVLDEACNYRRYCWSQGLALWNEMYKARQALKSSSASDSKKRVQNGAAACESKNYLKTKAKLQACYRKASNIQNDLMHKFTTELVNDYDKIVIENLSVKGMLMSHVASKGVHRSMFGKFKQILTYKCDWYGKDLILANKLYPSTQRCAACGNVKKGDDKITLYGNEKHGTKHNEYVCYNEKFPNYNKVVDRDKNAMLSLLALTEHPELNHAL

SEQ ID NO: 17394 - protein, 209 aa, Lactobacillus sp.
MNLVLSATSKKKAVITLLSRKIKAEDVKQPDKTGKATAVDINVGHFDYTGGRVNVLSKKLDRIYKKIKHYQRQLAKKRVQNGAAACESKNYLKTKAKLQACYRKASNIQNDLMHKFTTELVNDYDKIVIENLSVKGMLMSHVASKGVHRSMFGKFKQILTYKCDWYCKELILANKLYPSTQRCAACGNVKKGDDKITLYGNKKHGTKHN

SEQ ID NO: 17395 - protein, 568 aa, Lactobacillus sp.
MTRRKLRTQIKTIRAYTVRLSDDELQELDKLFNNYGRCRDLLYGQLCGINHMTDVENWRGPRDRIRQHEGKIKQARKAVRSWKKAYAENKTQNMKVPDSGTVRLARQKLLNEQFHIQGRHVTEAVKEVCMNLNSMWTNLGLKLKKIVQANESLAKEERQYLNYVFTASYYWQLILQGRENEAESSKESKYPVLRAALTKDQLRHCFGYIRRLTRKHKPYPHSSAARCMLYDEIMWKVIQKDGADHLDIMTAVSGKRKQLKLTGPFCYANKKKRGDVQLILDRDKKRLEVHRAIKAAVHDLHKSKKKKVGMDKGLATLLSCSSGHEYGFNFSQLVNAEAERINRRNTNRNEYIQAAKELRYELSALQAKLAIKHSAKTERRLRNRIGSLERRISRLEERHLGSKLYHRQHAQKQCNMERIMNMSIRKMLLTEKPDVLVKEDLSFTKEKLPKAANRYEAKVRRKLSSWSKGTLDDRIEYLCDCLGIRTVDVNPAYTSQFCPNCGARFSERKGTHHELTVCPNCGEMNANTAAAVNILRRADDKNITLYTPYKKVEKILEDRYANKQSVMA

SEQ ID NO: 17396 - protein, 232 aa, Cyanobacterium sp.
MRFYKDSQILKNCVEVNQIKLSQLGWVKSRNIQGGFELRQARILRGASGYLVMFSMQLKGNIPYVPFHWHPLEISLSLDKFFAISDGEFVDRPRFLNQLHRKIKLLQLRLRNKQTGYNNSYKLYQKIAQLYRRISDTRKNWHFKLVPHFCDQAQSAFIENIDFRSWGRRILSKDSLEDGFKRAVTILKLVAWKRYVFIAEIDKNLISQIYINYGFHTGKKTFDVRKHNCFEY

SEQ ID NO: 17397 - protein, 729 aa, Spirillospora sp.
VRNSTICGRDQPLVSQVVVTSPSTDRTARMAIPRLSTGMTIQRSTFPSVRGMTGTLVRHFIGQNTGHPRGVRQSPATWARQPSPIANPTKLMSRSCISQTAMSASAQSARADWGSLPSKSRPTPRSPKPTIMKRQAHQAYTTWVASRSMARAMPMANRIEWVACRCPPDSLQTHLHMCLVIGPKVFAMRPLWWSMSGRIAAPAVTTAPAAICSTDRSTANSPISRSCAITGTAASHASAPLSACVRPIIRLFPSVDTPACRQGRKRNSCGAGQGGRFAGRGGPAVYLGKPGPGSNRCAILPGVTRRVQRAFKCRFYPTREQADLLNRTFGCVRKVYNLALEARSMAWSQHQERVGYNATSAMLTAWKKTEDLAFLNEVSCVPLQQTLRHLQAAFTAFFDKRARYPRFKSKRKSRASAEFTPSAFRWREGRLTLAKMAEPLDIVWSRPLPGGQAPSTVTVSRDSAGRWWVSLLCQDTIEPFPATGNAVGIDAGLNHLVTLPTGEKVTNPRHERADRERLARAQRNLARKEKGSANRAKARLKVARIHARIADRRRDHLHKLSTRLVRENQTLVIEDLPVGNMVKNHSLARSISDAAWRELRRMLEYKAGWYGRDLVVIDRWFPSSKTCSACGALAEEMPLNVRAWTCRCGAVHDRDVNAARNILAAGLAVSACGAGVRPQRDSSRTGRSAVKQEHPRATKGIPALEGREDVKRGSALPERSAEMIASPGL

SEQ ID NO: 17398 - protein, 464 aa, unknown
  TnpB Polypeptide
MIVQQAFRYELDPSDAQRTLLAKHAGAARFAWNWGLARRIELFTQNEGTARFTNAVRQHKEWNVWKRTHAPWWTEVSKCAPQEALRDLDRAFRQFWRDRKAGRPCGFPKFKKKGRDDSFRLTGSIRIDGPRHIVLPRIGRIRVKERTDKFDGRILSATVRREADRWFVSLCVKRTRPDPVPVQGPVVGVDVGLSSFATLSDGTRYEAPKPLAAKLRLLRRRCRQLSRKQKGSRNRQKSAILLARLYRKIRNIRMDAIHKFTTMLAKTKSVIVVEDLSVRKMMRNRYLSRSIADVGWGEVIRQLRYKTAWYGSELVIAPRYFPSTRRCSGCGNVGPRLSLSCRVFRCGSCGLVLDRDENAARNLAWYGQFGRNQRACGESSVGGTAVGRSPRHGSMKQEADATYPPWDTWVSSAERYAGPEAFALHEASACGYDLSLTCGEAMNRTHSDERARVHLREGMRLESA

SEQ ID NO: 17399 - protein, 405 aa, Oscillatoriales sp.
MIIYESKLEGTQNQYEKLDAAIRTGRFVRNSIIRAWMDNQIKSRNEAYAYCKTLADHPEFPWAKQLNSQARQAHVERAWASIERFYRNCKAKVPGKKGFPKFRKSQVRDSVEYKVTGWKLSEDRRHLTFTDGFQAGTFKLWGSRNLHFSQLNQIKRVRVVRRHDGYYAQFLIDHKREEKKELTGRQIGLDVGLNHFYTDSFGEKIDNPRFLRKDERRIKKLQRRLSKTQKGSKKRVQARNKLGRAHLKVSRRRNDWVCKLAQRVIRFNDLVAIENLKVRNMIKNHYLAKSISDAAWYRFREWLEYFGVVYGVPVIAVNPSYTSQNCSNCGQKVVKTLSTRTHKCPHCGYIADRDENAAINILKFAFKQSATTVGRTECEVSGEIPLCLVLEAEKSKGTPRKRKPK

SEQ ID NO: 17400 - protein, 390 aa, unknown
  TnpB Polypeptide
VEKVIKAIKVMLVPNNVQRTKMFQYAGAARFAYNWALAKENENHNNGGKFISDSELRKEFTKLRNSNEYSWLQNISNNVTKQAIKDACAAYKNFFKGLQKYPVFKSKKKSKPKFYQDNVKIQFSDTHVKLERFSLSRKHNKQKLNWVRLAERGRIPTDTKYMNPRVSFDGLNWWISVSVEIDKNIKTLNVDGVGIDLGIKDLAICSDGYKYKNINKSLRIKKLEKHKRRLQRSVSRKYIKNLKEGKYCKTRNIIKNEKVLLKVNHRLTNIRNNYLHQTTSNIINRKPRFICIEDLNVSGMMKNKYLSKTVQNQNFFEFRKQIEYKCNYNGIQLIIADRFYPSSKLCSCCGKIKKDLKLSDRIYRCECGNIIDRDFQASLNLKSYGEQFAN

SEQ ID NO: 17401 - protein, 403 aa, unknown
  TnpB Polypeptide
MLVFEFKAKGKTTQYSAIDEAIQTAQFVRNKCIRYWMDNRGVGQKELYRHNTTLRADFPFVKDLNSHACQTAVERAYSSIARFYSNCQKAIPGKKGYPKFKKNCRSVEYKTSGWELSETRKQITFTDKKGIGKLKLKGTYDLNFYQLGSIKRVRLVRRADGYYVQFLVNAENRVEIQPTGKAIGLDVGLKEFYTDSNGYKEPVPQFYRKGEKRLSFFQRRVSRKEKGSTNRKKAINKLGRFHLKISRQREEHAKRVARCVIQSNDLVAYEDLSIKNLVKNHCLAKSINDAGWYQFRKWLEYFGVKFGKITIAVNPAYTSQKCSSCSAVVKKSLSTRTHVCRCGCILDRDWNAAINILKLGWCTAGHVGTRILDPNALGDLASTLIGEILSRQAELMSKESPHL

SEQ ID NO: 17402 - protein, 366 aa, unknown
  TnpB Polypeptide
LLKVFRYRIYPTKSQRTRMVETLELCRWTYNETLAVRKNAYDQEGKSVSYYETKKLLPQWKEEKPELKEVHSQVLQEVVKRVDLAYQAFFRRVKAGEDPGYPRFKGYGRYDSFTYTQSGYSLKSGKLWLSKIGDIKIKLHRPVDGEIKRLNIRKTPTWKWFVSFLVEVEPDEPLPKIESSVGVDVGLKSFITLSNGDRVDNPRFFVQEERALAKAQRKLSKAQKGSLKRDRALKVVHRVHERIANKREDFIQKLSLSLVKSYDIIVFEDLNINGMVKNHCLAKHIADAAWSKLIASTSYKAEWAGKRVELVNPSNTSQICSGCGQMVLKSLSERVHQCPFCGLTLDRDHNAAINILRLGLQSVAKA

SEQ ID NO: 17403 - protein, 385 aa, unknown
  TnpB Polypeptide
MVYRTIEVSWLPRSRSGWATFTASRLESARLWGDLVERHVRIRRLNWKWPSKARWQRWVKRRYPNLSAQSAQQVIGEFCEAVESSRRLRANGHAESRYPWKKPKYRSVPYTNQDAKLRDGVLRLPNGQAGALLVRMPSTVELPGRLMEVRLEFGRVLLVCETPEAVRPSGPTIGVDLGVNTLIAATDGETAILVSGREVKATIQWRNKKLASASQRQSAMTKGSSRWKRIQKRKRQMLRKADRRIRDMTHKATRLVADAFPNAHAYAGEPFNDASEKASRFSAQAISQAVNRTVIGMLDYKLGGAIVIPEPYTSRTCPVCGGRRKCRRTYRCPCGVTAPRDVVGATNILSLGVHGEIVQRAIPLRIMYRRPDRRSSRGHRAGSSG

SEQ ID NO: 17404 - protein, 441 aa, Oscillatoriales sp.
LLTNYVYKLRPNQTQELRISNWVDMLRSHYNWCLNDRITQYSQQFIQGNYCQIRTQSEACPLTSCVSKNGATGEPWKIGKTNKDGKIKNPRRNPGDIQITALPELKAARPWFAGIDSTVLQQNVKRLDTAYKNFFDGRGFPKFKNRSNFTSFTFVMGVKIQGSKIYLPKLGWMRFYSSRPIPNGFTIKACAVKRRQNGWYISVRIEDKSVSDPTRKPLRDVIKVIGCDMGITKLVHLSDGSQIENPKFSTTKKAKRTLKIRQRRVSRKAKGSKNRKKAAKKLGLFHQKISDKRQAYQWKVANKIVSRNVDAIALEDLNISGMMRRCRVKVDEKTGRFLKNGQSRKRGLNRSISDASWADLILKIEYLAAKQGKVVIKVNPKYSSQECRNCGHIDKSNRDGEKFICTECGYHEHADIGAAKTICDRALNLVRGDSAKPGVRA

SEQ ID NO: 17405 - protein, 313 aa, Sulfolobus sp.
MWRAKEKSNTIQLSFKYRIYPTREAEEKLLRVMEIEAKVYNALLDAVNNARKERKKITPKDTQAMLKDLKIEGKELVYSKVPQMVNNQLWYNINALHELKKKGKKVGKLRYKKIMKTINYNQSGFKVQGDRLVLSKIGEVKVLFHRPLEGEVKGVIIKRGATGWYAIFQVEVEKKPLEKTGKVVGIDLGVEKLVTTSDGVVIENPRVFDKVEGKIKILQRSLTRKKRGSRNYEKTRKKLVKLHEHVKNLMSDYIHKVTSWLVEQYDEIYMEGLDVKEMVENNESKTLRKHILHSNFSKFKSYSPTRLKELVGG

SEQ ID NO: 17406 - protein, 280 aa, Sulfolobus sp.
MKEQLIAVKIIDFGKLKTIYQDICYFRAYSTAMRKMEGGKFSPPPSIPREVISSIQGKGPVRLGPVEVQRVSENKVRLKDYNTVVEGVVEMGEPLYAIVDMSDGIKVFLAYESKKVVVGIDVGIRHLITIVSLIDGKLWKVRYFGSDLMKEDFARYLGENQGYSHLQAIRDKVRFQTNEAVRFIEELNPRVVAMEDLRLYDNKIGRGLKTIQNALETELYKRGIRYRRLEPYNTSKVCSNCGYKKGEVLGSIFVCPACGYKADRDFNAAFNIALRCYYSC

SEQ ID NO: 17407 - protein, 198 aa, Sulfolobus sp.
LLYKGVRAKADYFFLQRRIAQAQSLVDKTKDLGEDEARAELTREKRRLFKKLTRRLLHLYRNLAFHLVRTLHELGVSAIYLGYPFNIAQDKGNKFTVNLWSYRELMDAIELKAQEYGMRVFEVVEYNTSKYCAYHGVEVKRYPRGVVNCSLGHRLHSDLNGALNILKKAIDKVVLTAKKPLSFLVFHNGVAPVKGCNP

SEQ ID NO: 17408 - protein, 410 aa, Sulfolobus sp.
MPRPLGRGWKFKYFFLEILLMARRSKKAIRATVSMKIVLSEPLLDLVNNYVKAIRFSLFWLKENVRNPEEKGVLGKVHEGLYRKLRKEYNLPSKVAEDCYRDALATYKGWYNDPRRGRFPRVYKPTLWLTPKASYSVDFETRSVKIAGVGELPILGYPRNLKEYADWRMREARLVVKGDKVFLKVVFEREEEKVEVKGSIAVDVNMGEVVVGKDGTHYVRISTRLEEAHRFKSLAERSQKKYQRRWKENKRILYRIHSFHLKAKMVMEDYARKVGKWVVEIARMMGANVIKLENLKNLIKNVDKLSKEFRDKLYLMQYRRVQYWIVWQTKKRGMIVEFVNPSHSSVSCPKCGKRMEEVAHRYFRCSSCGYENDRDVIAIMNLNGRGSLTLSTAPQMRDVNPKSMRGTLAL

SEQ ID NO: 17409 - protein, 183 aa, Lactobacillus sp.
IKHQQRILARKLEENGQIAGKRSKSYQKARIKLQKLYERAHRMQDDAMHKYTTHFVKEYDAICIEDLDVKGMLMSHVASKGVHRALFGRFRSYLEYKCKSAGVKLVIANRFYPSTQRCAACGNIKKDDEKITLSGNKKHGTKHNEYVCYNKKCPNYGKVVDRDMNAMMNLTFLIDHPRYNKAL

SEQ ID NO: 17410 - protein, 368 aa, unknown
  TnpB Polypeptide
MTLTAKIRLLPTEKQIKLLKETSDAYKQGCNYVSKAIYESLELSQKKLHLQTYYPLRSKFGLKSQMAQSVLKTVIARYKSLQANNQDWTLVNFKLPEYDLVYNRDYSLTEEYFSLNTLEGRTKVKYNNTAFEQYFDGSWLFGTAKLVNKHGKWFLHIPFSKEVEDTKPAEITNVVGVDLGINFLATAYDSEGKTTFYNGRYIKDKRAKYKRLRKQLQKRQTPSARKRLKAIGQRENRWMTDVNHCVSKALVEKYGSNTLFVIEDLSGIRAATEKVRIKNRYVQVSWAFYELRKFLEYKSQKSGAMTIAVDPKYTSQTCPKCGHVDKNNRDKKKHIFCCKECGYTSNDDRIGGMNLHNKGIKYLQAVAI

SEQ ID NO: 17411 - protein, 375 aa, Haloferax sp.
MKPEMGRTVRTFEATITNQQQVRDDLDQLGWAASKLWNVGRYYAQKQWDETGEIPDDGELKAELKGHERYTDLHSQSSQRVLEELAEAFNGWFGKRRNGDDRARPPGYRKNGDSHPRSTVSFKAAGFKHDAQFTRVRLSKGRNLKEHRSDFILCEYETRPDVDLTEWDIQQVRAVYKRDEWRLQFVCRTTIDPEPPGDEVAGVDLGVCNFAAVSFGGESVLYPGGSLKEDEYYFTKKKSKCDDSTSREATRFDRKRTGRRTHFLHALSKAIVEECVKRGVGTLVVGDLGGIREDGENGEPRNWGDHGNLDLHGWAFDRFTTLLTDLGVWAHRRQPACRTWVVRVRGVRYGCERGRERCGEHSTKGTPESRHGWRR

SEQ ID NO: 17412 - protein, 350 aa, Burkholderia sp.
MILVYRYRVKSLNGLLNKQSRAVNYVWNFCNDTQKHALKWNKKWPTGFDLNVLTTGSSKALGIHSGTVNATCEQYAKSRSQHRRPYLRYRGRKSLGWVPLKGRDLKREGDAFRFAGNTFRVFNSRPLPEGKIRDGTNFAQDARGNWFLNIVIEMPDVPARPIRSGVGIDLGLKDFATLSTGEKLPNDQFGRRAAEKLAKAQRARKHKRHIAKLHAKIANARADFQHKLALDLVRRFDYIAVGNVSAAKLARTRMAKSVYDASWSSFRNKLRYKAMAHGATFEEVNESGSTQSCSACGSKDSTTRPKGIAGLRMREWACDGCGVFHDRDTNAALNILRCGRASPAVGIFHP

SEQ ID NO: 17413 - protein, 515 aa, unknown
  TnpB Polypeptide
MTRDPRRSQATDDGLVTRAVEVVLDPSPSQERWLRSYAGSMRAAYNWALGEVRDNLEVRAGERARGLAEDELTPALSWSRESLTSRWRQVRDEAHPWWRDVSIHAFRTGLDNAAAALDNFSQSKAGKRRGAKVRFPRFKNRHSRQAVTFVELADGVDHHHWINPDTRAHVRLMLPQRANDGTWERRHTRPKSQQAPGRDRRSEIAWLHTLQPDTVNEVWQLCDTGRAKVQALTIKFEGGRWKAVFRLRLLDSTRRLRNPGEPVRQHGGTVGVDLGLKHLVTLDRPIPGLTDEHGHVPNPRVLEQHLARLRRLDRAIARCENGSKNRAKLLRRRAKLHGKIAATRKLYLHELSRRVAGGFDLVCVEDLNVAGMARRKGLKNGRSVAEASMGELVRQLDYKTADRRAGLVQIGRYYPSSQICSGCGARTKLALWQRVYHCPDCGLTLDRDVNAARNIAAEGLRLQRLQHQQHVASIRGETRNGEPRPGETEPVPDGAGGHGSFEAATGPAAVPVAAA

SEQ ID NO: 17414 - protein, 418 aa, unknown
  TnpB Polypeptide
VSYFNKIILYHKTDKEMIKGYKYRLDPTPEQIVQMEKTFGCCRYVYNWALDLKIKTYQGEKRSLSAVDLCKQLTLLKKDDNHLWLNEVSNECLQQSIRCMDSAFTKFFREHTGFPKFKSKHRNKNVFKNVNSVKFDFENNRVKIPIIGWIKFFANRSFEGKIGTITISKSSTGKFYASVLIDDGIPNPDKFVIDSDTTVGIDVGIKDFAVLSNGQVFSNPKYFESAQKRLGCLQRRFSRKHKGSNRWKKAKHDVAVCHERIRNRRQDFLHKVSKKIVSENQTIIIEDLNVGGMLKNHCLAKGIASASWSEFFRMLQYKSDWRGVNLIRIGRFEPSSKMCGCGYIHRDLKLSDRVWTCPECGSVNDRDLLAANNIKRFGLEKKNLLTQENINKTPVVNREGGVELSALAGTVKRQNVLV

SEQ ID NO: 17415 - protein, 389 aa, unknown
  TnpB Polypeptide
MNVMSFRAVTLRLRPNKHQQKVLEETRLICMRLWNHLKDECIATYMETGRVMSAYDLNMLIPPLKKEQPELRSVHSRTLQNVSRRVHDAVVGALKRKGKKAFRFPRSKDPKTYRCYEYTSPKDFRIEGDLLFLGKMNDVGGIRFRCSQRMTGDIRRCQIVKRKSHWYARILIEVQGEGTEWLEDYRTEVGMDLGLARLATMSDGTVFENIRFDKAMSEDIARIQRKMSEVEEGSSGWWKLKNRLENRFGRISDLRSNYLSHVAKSMVESYRFIAMEDIDIKQLVQKERRSTRRSQYNASWGILENRLTRAAERSGTTVVEVDPRGTSQMCSGCGRIVAKDLSVRVHDCPHCGLVMDRDRNASISASATGICVSSEVITESGQIFVCPTS

SEQ ID NO: 17416 - protein, 490 aa, unknown
  TnpB Polypeptide
MSKNKTPTFIHELKLLTTLYQERKLRIKFRALRELYNTILGQAIKAVNNLKNDPLYQTTLKAHFKNKKLANSKNPKVIEQFKQEKKRINELFFALKEQYNVNKYYFQKIATSTKNKTYMKDHLDGDTVQVISDRAYESVENWLYGKRGKPRFKTWERGLSSISSKKNACLSFKNGKVKWKGLIIDVMYDKKDKHGVEAHALSQEIKYCRIVSRRLRGKDHYYLQLCLKGIPKQKYKINKKTVGIDIGVSTIAAVSKEKAVLEPFCLELFDEQKAIKYHQRLLARSLRLNNPQNYDKNGKIKKGKKTWHKSNNYKKINHKILELYRKQRDKRKYLHNVLANHILTLGSNIKIEKNNYKAWQKGWYGKTIGFRAPSAFVSTLKRKAESAGGSWQEINSFEAKLSQLCHQCDQHNKKHLSDRLHSCCNLNIQRDLYSGLLAYYTNTKNKVNTTRLRKEWESFDTTLSDAVLTLKNKLKLVNKHYKVPTSLGIA

SEQ ID NO: 17417 - protein, 521 aa, unknown
  TnpB Polypeptide
MQKTITIESKIHNQGDLYGCLDEFGSFYCFLERTLFNELSNTTIINSDLRKNLKRQYIAKYQIHARLFNVIWNDVKGSIDSLKELDKINRKDLSQKVAKYQKKITQAERWLKRGFRKTKSNPLKPHEIVWLKQNLVQYKNVIHKLKNKLDKPFVPKMIFGGRKFYKSQWNDENYVQDHELWKSEWSRKRNGHFSFIGSKDETNGNQLCQYKNDKITITLPYCFERKHLEITVKFSSDDKTNKQYYNYFHDAYKNKQALSYKFIKRENDTWYVQVSFSINSESEHEFTETIGVDFNYNLIATTEIDRFGNFKRVQNYKFDSDNLSTDQSNDLMSKIVLDIVERAKQNNMSISIEKLDLKKCKQGNTKVTNKKVNLLQYGQFRDKLETKCIKEDVWLKQVNPAFTSIIGKYKYKNKYGMSVHNSAAMVIARRANNYKDKVPSQICRVLHSGGNEFFRIQSTCHHWKHWSYVNKNLEKSLKEFNSATDKFCGKNNLTSRFNPADYVVHPQVSNELTLVSFSNFN

SEQ ID NO: 17418 - protein, 367 aa, unknown
  TnpB Polypeptide
VEKAYKYRIYPNKKQKEIIAKTFGCCRFVYNTYLAKRIETYEKDKTTFTYVQCANDMKNLKTKLEWLKEVDSTALQSSLKDLDSAYRKFFKEHTGYPKFKSKKTHRYSYKSKCTNGNIRYCGKHIKLPKLGMVKTKNKLIPQGRILNATISQAPSGKYYVSLCCTDVDIKPLKKTGNSVGIDLGIKEFCITSDGEMIENPKYLNKSLNKLAKLQRELSRKSKGSSNRNKARIKVAKLQEHIANQRKDFLQKLSTEIIRNNDVICLEDLQVSNMIKNHKLARSIADVSWSEFIRELEYKANWYNKKVVKIDKFFASSQTCNVCGYVNKETKNLSVREWDCPCCNTHHDRDINAAINIMNEGLRLLKVA

SEQ ID NO: 17419 - protein, 442 aa, unknown
  TnpB Polypeptide
MHKRKFTVFTQLHEENNADLIEYVDDCRKRQSKIMRKTFHAIKNSDKFNKSSYNTYLQNEYGITYRTANSIILDAQGRLNALKGLKVFEKRQLEQKIEHLEEKVLPKLISKRDDYIAQLKSNPKSSLVRLRNIRRKIVAKKNKLNRLKQKLNNVIYQIESGRLKLCFGTKYLLKRDYEGFVEQRDSQMTFVGSKSEKAQNSMLQLSYNPKNNQFGIKLRKDFRAFKNVSKYVYGRVYFRHHKSELISILRQGYSPLSYKIIKKRNRFYLYCTFEIHVDNDEFLTRSSYGAIGLDFNKGFVTLSETNGYGHLLRTQVLPYRFKAGSKTTTDLQKLVNDVVDIALQTGKDICIENLDFKKKKAKTESRQGRKYNEMIHSLAYRQFSDFVEGIAFRNLVYVRKVNPAWTSWLAERLYCPRMKLNVHVGASFVIARRGQGFKDTFK

SEQ ID NO: 17420 - protein, 429 aa, unknown
  TnpB Polypeptide
MGMRGYKTELDLNNVQITACKKHAGCSRFAYNWGLARKQEARAAGNRMPSAMELHKELNALKASDYPWMYECSKCAPQEALIDLDDAFTHFFRKSKLKKQGQFQGKCGYPQFKSRKKGVGSFRLTGTIHLFEKSIQLPRLGKLRLKEHGYLPVGAKVAQATVSEQAGRWYISIQVETQGPEPQPALGPVIGVDLGVKTLAVVSDGRQIANPKAMRTRLKKLQRLSRWHSRKQKGSANRKKAQRKLARMHAKIAHIREDVLHQATASLVAKTKPQEKRPAVIGIEDLHVSGMLKNRKLARAIADVGLSEFRRQLTYKAEQAGVQIHVVSRWEPSSKTCSGCGWYHADLQLADRVFVCQECRLVMDRDVNAARNLELLAYLELMSTASYAGFYGSGQGGSGLLETEGETALVERATEPVPMWLVHKSPSFG

SEQ ID NO: 17421 - protein, 393 aa, unknown
  TnpB Polypeptide
MSRYRLLPSPAQEAVLRDHCAHARYVWNLAVEQQSWWRPGRASAPGYLEQCRQLTAARAEFGWLRAGSQMVQQQALRDFAQAMANFFAGTHRRPSWRKAGRDEGFRIVAVTPGHVRRLSRNTGEVWVPKAGWVRFRWSRAIPASKSYRVTQDRAGRWHVAFAAIPEPVPGPGTGVIVGIDRGVTASAALSTGELLTVPRLSAGRQRRLRRLQRRLSRARQGSARRAQVKRAIARLRAREADTRKDWAEKTSTDLARRFDLIRIEDLQVAGMTRSAKGTLTEPGRNVRAKAGLNRQILASAWGLLARRLADKAPGRVQKISPAFTSQRCSACGHVDRKSRESQAGFRCTACGFACHADVNAARNIAAGHAVTARGRPGLPGRANREPQLALLPA

SEQ ID NO: 17422 - protein, 370 aa, Oceanobacillus sp.
MAKQNKAYKFRLYPTKEQELVIRKTFGCVRFVYNKMLAERKETYESLKDDKEELKKIKHPTPAKYKKGYEWLKEVDSLALANAQLNLDKAYKAFFKGNAKFPKFKNKRHKQSYTTNMVNGNIQLLDGHIKLPKLKMVKVKQHRKIPSEYQLKSCTITMTASGKYYISILVEYEKEIESKKIEKVVGLDFAMDGLFVDSAGEKANYPKFYQQMLDKLAIEQRKLSRKKKGSSNWNKQRIRVAKIGEKVANQRKNFLHHKSKKLVTIYDAVVIEDLDMKGMSKALKFGKSVADNGWGMFTTFLQYKLKEQGKQLIKIDKWYPSTKICSNCGSVKEVKLSERIYQCTCGLCINRDYNSAINIKKEGIRLLASA

SEQ ID NO: 17423 - protein, 476 aa, Asgard sp.
MTVQECERLKRITARDTRICQTYLRIIKHNEEKQILVNGEFRRLIKKDLTVDKSILDKLTLTTSKRTTVPHDLKKRYSHCSHNEFQECRDKAIWTDESWRKLQAYSTMELKRPQFKTKTSRPMYPRITQGSYTVRVHFESGNTDAKLWLELRDSLDSKKSNKRIHKRLKLPLTYSPYHENKLKPEQIKQIELVYKSKERQWYAHFIQKYSVPSYQSTNPPAVLGVDLGIKKTAVAVLLTPRGKVIMDELCFIVNKERQSKIWQLNKRIKDIQKKLDTKINNGQSHNQLNVKLSQLRRKRRSITEQELGYAVNQLVEFILQLKKQYNLFVSVGYPKDIRKSYLRGSGSKSHRRQLHKWYYRLFITKLKYKLKRYGFEPHHVVAVKEKNTSNTCSSCNSTNTTRTGQGQFNCHKCKYELDADLNGAKNIAKRLIRYALKPKLRHPLKPKNYYVWDLLTKDNHPIELFKSLRPLGKWLR

SEQ ID NO: 17424 - protein, 423 aa, unknown
  TnpB Polypeptide
MQLVERHLIKPGHELYGVLDGLTFKAKNLYNHGLYLYRQSYFEYKKSPENPVLSWVDIDKNLRKQGHKDVRALPAKVANAVLKNLGESITSYWKLVRLKREGGLAQKPRLPRYLHKTEGRYPVSFNYQTFGNKRGTNNELILCPKGINLPIPTKVEHPKQVRIVPKHNNFVIEVIYDAEERAPRHTSRYAGIDLGVDNFATVTFSTQNKPLIVKGLELKSINQGYNRLIAKAQSLLPATQKTSKSIHRLWSRRSWVLRTKIHQMTAFLTALFDEMQIETVFIGKNKNWKQNLPFGKAVKQRFAYLPYETFIEQLHYKCRLRGISVTVQEESYTSKASFLDNDNIPVYGETDNPRFSGRRIKRGLYRAGDGRLINADVNGSYNILRKGLITNHQSLQMDNPLIQPLVVKGIGKEPNKKLVKLYM

SEQ ID NO: 17425 - protein, 505 aa, unknown
  TnpB Polypeptide
MDLDGELLDSGTVMPLLASEVQGVAGYATFVVRNDTALGEQLALTNASSPAEAGRQAGVVLPDFLVTGRTGRSRKEKLVQYNVVAAYRSWSERVKAVNGTSSKYASQGWKRTMNASAPAYGEAYINLGAVDRCYAVIENNPVVDGEIVLKMVIRGQWYRLIFGFDNTRFPEGKVALPLIKVQDKQPIFIFSVVTDNPVVQFSGDWVIGVDVGINDYATVVVRSTNTGQIVRETTLSQRVHSLWNSVRASEKQVRFLKKKANRLLYQRQARMSALDEAQLHREAASRKKRELAILAAQEIADLSHQWGNAVVAVEDLSWIHNTMQNGRWNRGAFAQWLTHYVSQNGGWVMSVNPANTSQLCHICGSRVTHPTHKASVCPAHGEMGRDTNAAANIANRATPKIAKARKTRTKNRRLQPQPPIKTPPTRISLRHPGRDRTKNNPTPKRKNHRPTPKEVNLPISPARVQATCLETRVLADCGAYGATETRKAAIKQDYVTHECRLYNPN

SEQ ID NO: 17426 - protein, 525 aa, unknown
  TnpB Polypeptide
MLTKNRTYKAFTARPSHVLDLNGEVLDSALVLAQLTSEIQGISGYATFVARNDMRLGFELAQVGAVQPTTAGRRAGVTMPRFFVEDEDGKPIAGKSGRSRKEALIQYRVVTEYRSWWERVKAANGESDKYVSLGWKRTVYTSPPSYGEDYVNLGAVNNQYAAIENDPFVAGEIVLKMVIQGMWYRLFFRFDAARFREGKVTLPLIKIENNQPVFIFTVVTDNPVVQFSGDYTIGVDVGVRNYATVVVRNSKTEKIVYQTTLSQRVHSLWNSVRASEKQVKQLRKKAKSILYDRQAKMSALDEAQFHREAASRKKRELAILAAQEIAYLSHFWGNAVVAVEDLSWIANTMQNGWWNRGAFTQWLAHYVSQNGGWVISVNSANTSQVCHKCGSKVSHPTHKVSLCPEHGILDRDVNAAMNIASRAVPKAEKARKTRTKNRKLQPQAPLKTPAARDTLKYPGRDRTKNKPTPKRKKRVSKGVNLPISPARVSTTTVLADQDASGVLKTSMAALKQGNIAYDCRLYSLN

SEQ ID NO: 17427 - protein, 526 aa, unknown
  TnpB Polypeptide
MHTYFLRKSTHFQGGEAVRLYDTVTRRRFTSDDGVDVERVGCDLVQMVTWLAEAEREVLASEEFHDLALKVLRGDRPTGSLNSWGRRRLSRYGFSFQKHNMNEMLVSNAVGTLELYAMSVGLFQVMSTHPSTTKPDRILSYYRGTYPDAPQPPSGMVRAHLTRYHKKGDRKASLPGVSAQLNLAVCDTYFAPKASRSESDPLSVTVHVKTPTYGLTRIYLRLPDNAGRFGDGKVCRPTIRLSSKGQIVFDLTIEHKTDERKTNKVVGIDLGKVEPFIATVIDPRSNQRSAPYHARYKRRLGSLVKAEKKRRDLVVHLYKRAELCERHNRADHADVLRIEAKRVSAKSTRIKHEINQCIANQIVSIANKNDAHIAVENLSWLDSRGRRWAYAEIQNRIERTAKRYGLKTVKVAAKDTSRTCSRCGGKVTSNSKTRVASCTKCGFELNRDVSASREIGLRAASNTRNRNKMRSLLRQRTLKQSSATTRQPKPVTALSGIQGHTGTSNNTLEAALMMVKETLDPRKSPT

SEQ ID NO: 17428 - protein, 416 aa, unknown
  TnpB Polypeptide
MPDRIERALVHRSHPDFKKFDGLCFLAKNLYNSTVYDIRQVIFENRERRAEGKKLLKVPSHYDLVTLYAKNDDVDYRALPAKLAQEVVKNAHAGFKSFLGSLNSSKVKHKPSLPGYKHSVYGRSVVIFNKQMISKNITQIRDNLFEYTVMPKTLGWKFYSTKDNVKNIRIIPGTDHYAVEFVYSTPVVEPVKTGVVMGIDLGLRNVASLITSNGGAVLINGNPLKSVNQFYNKKLAELKSKLPKGVKTSHRINNLHCARNRKIDWEIHNISRFIVNHAVSTGVDTIIIGQNKHWKQGTNLGKVTNQNFVSIPYTKLINQVVYKAEDNGIKVIVTEESYTSLASALDNDALPVYRQKISHIQFSGKRRGGLYYRSNGSVLNADLNGAMNIARKVVPTINFKGIEGAVVRPSKVKTLR

SEQ ID NO: 17429 - protein, 209 aa, unknown
  TnpB Polypeptide
MIHFPKSFNGFVCKFYCCNRPDFVKLNQVRFLPHYNCIVIEIVYEVEITDTVKQNQNYISIDIGVDNIATVANSFGKQPFIVNGKPLKSVNQYYNKHVSKYRSIANQMNGVAYTKRMDKLTEKRNRKMEDYLHKTSREIIEYCKKYNVSKIIIGNNKEWKQNSKLSKKVNQHFVQIPYNRLIQMLEYKAQEIGVTVIITEEVIRAVLLL

SEQ ID NO: 17430 - protein, 264 aa, Streptomyces sp.
VARQVKRAFRYRFYPADGQAAELSRAFGCVRLVYNKALEERTRAWYGEQRRISNPRHERRDRARLARAQRELSRKAKGSANREKARRKVARVHARIADRRRDFLHQLSTRLVRENQVVVIEDLSVRNLLKNGRLARAISDASWTELRSMLEYKCAWYGRELVVIDRFFPSSKLCGACGTVAAKMPLNVRTWTCECGTTHDRDVNAARNVLTAGLAAAACGDGVRSQRESSRTRQSSMKQEPQRATAGTPRLQAGEEVKPARPRR

SEQ ID NO: 17431 - protein, 432 aa, unknown
  TnpB Polypeptide
MSVLVIVIFFHAIDIGKSLIIYKIFYIFVSDMGKINRTYKFRLYPNKLQSDLLARHFGCTRFVYNYFLNQRKEQYRLTGKSDNYYAQAKTLTALKKQEATAWLKEVNSQTLQFAIRSLEVAYTNFFQKRAKFPNFKSKHSKNSFTVPQFASIVGGRLFIPKFKEGIKCRVHREIKGKIGKVTISKTPSGKYFVSVFTEEEYATPLEKTDKSIGVDMGLKDLLITSEGEIFKNNRYTRKYERKLARAQQHLSRKKKGSRGFENQKLKVARLHEKISNSRADYLHKCSISLVRRYDTICIEDLNVKGMERNHHLAKSVADASWGSFVSMLTYKADWNGKKVVKIDRFFPSSQTCNVCGYVNKQTKDLSVREWECPSCHTRHNRDVNAAINILRFGLNHTSAGTVDYTGGENVRANLLKGRSSVKPEAHESLVHG

SEQ ID NO: 17432 - protein, 408 aa, Haloplanus sp.
MIRTNEFVVMPETDQDRELLYRLLDGAASLWNQLTFARRQQFFDGEDIWAADRFYDEYKGLLGSATAETMARVNDRAWRAFFSRRGRDSSAQPPGYWGNEEDGRDLRLFLRNRAYSLQWGQYSRIEFTVGREIKPEYGLTPNERPRVPIHGNPKWKGTQGELQIVYDDLTNGFRAYQSVTVDPKLERSSNGGEAAALDVGAVNLVACATTKGVQFLYDGTRPWEQFEATSNAIAQAQSKLPEGEHTSKRINRLYRRRSSRRDHCVDALLRDLVERVIDDGIQTIYVGDLTGVVRRTPWKSTNRKLTEFWANRRFTDRLGHLCDEHGIELVTVQEFDSSQECPDCGTVEGTTRDRDRLRCRCGYEGHADLTAARTLLSREIGKLPRPMARPVRFQWDNHRWRSTTDATA

SEQ ID NO: 17433 - protein, 416 aa, Haloplanus sp.
MDVRRTAVVKLIISDEPRDALHRTSDQFLYCANRTSEYCWSNTSYTECKTNKREVRDALYAELRAETELPAQLVQAAIRRAVEAVKSVVERWKKKQRVSCPTFTAETMDYDARSATFYRTNVSLATVEGRVEPSFILPADSPTPYERYVLSEDYEFRESTLRYDATTDEFYLHVSTRRVNDEDAEASTDTGHSDQTVLGIDLGVNSLAVSSTGTFWKGDDYDHWCREFKKRRGEMQKRATQAGHNALLRLGKREAAWRKQYIHTVANELVSEAIDYGCDVIVFEDLTDIRERLPHATWHHIWAFRRLFEYVEYKAPEQGVFVEQVEPNYTSQRCSRMNCGFTHEDNRDGEHFECQKCGYEVNADYNAAKNIGVRYARKQIHRLRSSPTSGSGDARVDVRLNGGTLSGESHQPIAGD

SEQ ID NO: 17434 - protein, 414 aa, Haloplanus sp.
VTELTKTLELKLVDPNVHKRRKLRETREAYQHALRDAFDAGCTTQTEANDVVVNYDLSGYAKNALKKYVPQLTTTYNAGELHDDHPVRFTNEGLRLDHKPENAIEWYVKIPHHEDYHLWMPAQPNPEQRDWLEALNAGDATMGESRLFERDGTWYLHVTATRDIEERSDVSAEERTPIGVDIGEASLVTVCHRDGHGSPTAPELCADEGKTVRRLRKTYFTAKRRLQTRGSERIAESFGDYICDQIDDVFHTVTREVVEYAESVENPVLVLEDLTYIRESMDYGDFMNRRLHGWGFAKLHAQIRYKAVEKGIPVETVNPRNTSKECHACGEMGYRPRQATFKCTNDACWMGEYQADMNGAINIADRYLSGESHSREHTDGNDSAEDGGAFDRPTRHPSRCYHAGDAWDVCVLKP

SEQ ID NO: 17435 - protein, 477 aa, Haloplanus sp.
MNPTTPPQSTVDSPTGYSTPNPNFNDKTPHNQLWKRFTMHIHRTYRAKILNHQQVEDSLDRHGWSVSKLWNVANYHSRQVWDETGEIPDDSDLKSELKTHNKYKGLHSQSSQRVLEELAEAFNSWYETRKSDDRANPPGYRKKNYYDSEGRRVHEEHPRSTVTWKQKGIRHDTNNGRVRLSKGANHKDHPRAWEYILVEYETRPGVTVENLQQVRAVYDKAKGRWELHLVCKHEVETPDSPGDETAGIDLGIRNFAAVAYSTEEADLYPGNRLKQDGYYFPKEIAKCDDSDGQEATRLHSKWSERRTHFFHSLAKHIVERCVEQEVGRINFGELAGVREDENGESKNWGKHGNLDLHGWAFDRFSNILEYKAKVKSIEVVEVSESDTSKTCCVCGRKDDSQRVERGLYVCETCDAAFNADVNGAENIRLDINDESNSESAPNLGGDRSTGWLAQPGVYLHDLSSGFQPREQVVDCKP

SEQ ID NO: 17436 - protein, 285 aa, Haloplanus sp.
VWRTPRTTGAWYVSFCIETETPKKPVVEDIDSEDTVGLDFGVLNFIHDSDGRSVGRLDLSDERERLKSEQRSLSRKTYESNNWQKQRRRVAAVYSRMSNKKHDFKHKPAHFYTTEYDAVFVEDLNVKGMLESPENARNKAEVGWRDFITILEHHGEKNACHVVQVNPRGTTKECASCGVSMDKPLWIREHSCPACGFELDRDWNASLNVFSRGLKKLGVVHSEATSPEIEDFWCANESQSDSLTPVETATAVSTDGGDFSSIIVDASRVVEAGSPALKEAAPAAE

SEQ ID NO: 17437 - protein, 457 aa, Haloplanus sp.
MSTTVTKTLQATFAPPTAHKQSKLNDLLETYRDGLQAAFDAGASTMSAVSDIVTPYDLPYQAKAALCNYVPKLRKTYNAKELDDEHPIRLTNQAAKFDHSEERDYEFTWWVPRPGRGTNFWIPLRINPEQEDLWHDLVSEDAKAGEIRLRQHRKNWVLHVTVEYPVEEPATDGDATHIGLDIGETALITGCALKDGSPTDPLVRSGSRAKHLRKEMHTTLKRLQERDASEWRTDERFDHYQNALTDIVEKASREAVEYAKRFEDPVLVMENLTYIRERLDYGKYMNRRLHSWAFARLQGRIEDKATEAGIPVEYVNPAYTSQTCHSCHRIGRRDSQAEFRCPHDDCHVSTFQADINASANIARRVDPWGESVPLDKAERDDSPRDGSGSDTATTPTETTSSSRGHERRDASLERHREMSETPSQMTLTAFQKSEPSASVHETASREPTRTSGSGDDD

SEQ ID NO: 17438 - protein, 466 aa, Haloplanus sp.
LTGIQVLSERVLKWLMKRTNTFAVRPLSNDGEQVLRDLLDASAALWNEINYQRLMRYNDEDGFEGDVWDVDTGRLEGKYKDVLGASTAQTVRRANTEAWRGFFENKNAYHDDSNTSVTQHPDPPGFRGNQDDGRVLKGVVRKDAYTADWGERSRLEMVVGEELRDTHNSPKSRLRLEIVGAPNWPDYEDQSRLELWYDETDSTFRASQPVTVTDARETPLADEKAALDIGANNLVACTTTTDEQYLYEGRELFQRFRDTAREIARLQSKLPEGRYSSERIRRLYRKRTHRRDHAQEALCRDLLEQLYAEGVDTVYIGGLTDVLETHWSVETNAKTHNFWAFKRFTGRLACTAEEYGISVKVRSEAWTSQECPQCGSTGRTTRHQDTLTCQCGFEGHADLTASETFLRRHTEQAVRPMARPVRFEWDDHEWSEPPRFPTRESPKEQRTDPSTVDRDGNVASGDSQAV

SEQ ID NO: 17439 - protein, 423 aa, Haloplanus sp.
MVEVSFQYHAEPASEEVARRAWSDIQTCREVYNHALTQEYHPAPDGDKPSYTAMQNKLPDWKRDWEQWGEVYSKCLQMAVRRITHGETVLKELKAKGYDVGRLKWKNPREYRSITYNQSGFDVDSNTGRLDHAVVDFSKIGRFHLTYHRPLPEDGTIKQIHLKKQKTGAWTVSIVVDYNPDYPEKPAVEDIEPEDCVGIDLGIRSFVHDSDGRAVDRLDLSDDRERLEREQRSLSRKQHGSKNWERQRRRVAEVHQRMTDRKDDFKHKLAHFYTLEYDAVFVEDLDVRGMLEADGNARTKAEVGWRDFITVLTHHGKKNGCHVVEVEPVGTTKECARCGVETAKPLWVRTHDCPSCGFEADRDRNAALNVFSRGLEDLGVVHSEGTPVETALPVGTDSVPAKRVVEAGSRCLKEPAKQASRQG

SEQ ID NO: 17440 - protein, 434 aa, Haloplanus sp.
MGEEATKTIQTRLHIASGERSWLHDARLASREIFNDTIRLKRQGYTRTEIQREVDRDDFLRNNKCAVVGKALHTWGSYQSLLDWWREQNDPDGDKPTPPSTDKSGAYPLVMAHTEGYRLTVDDDTNRVQFRISPQPYKKVNGHLRGEPAAMDELRDALTSDEVDVGQAELLYRDGVYYLHVTVTREFDVPDPDTSDTLVGVDINERNVALTALDRETMRTKGTLVLDYGRVKQERQRYHTITTRCQEHGKTSIHRKLGDKEEQFTEWVLHRLSSAVVEFAEQFLNPLIVFEDMEGIREEMQYGTYMNRRLHKLPFHKFETFVSYKATWREIPTDTVDAYYNSKTCSCCGERGSRQGRRFHCTNTECNVVQDHADRNASVNIAWRETAKLDGKDTNYRTHKTQPQVRLVRLSGSGRVSRPTSSRSLAEQGVLAHS

SEQ ID NO: 17441 - protein, 413 aa, Haloplanus sp.
MNRTNTFDLVPQSETTEEILVRVLDASASLWNQLTYDRRQRFFDGESVWECDGYYDEYVDVLSGATTQQIARVNDTAWRSFFELLDDPAYDPSPPGYWGNRDEGRNLHTYIRDDSYTIRWNERSRLEIRIGMDLKDEYGFGMYERLRLPVRGNPKWRGDSGRLEIRYDSVEETYRVHQSTTVEEIETSESNGSEAAALDLGANVLVACTTTSGEQYLYNGQTPFEQFRETTNRIADAQAKLPDEQHTSQRIKRLYRTRSRRRDHAVNALLRDLVERLDAASMTTIYHGDLTGVLGEYWSVEANFKARSFWAHQQCIDRLESVCEEFGIDVEAISEAWTSQTCPECGERERTHRHRETLTCPCGFEGHADLVASKALLEQATNTTVRPTARPVRFQWDDHQWHPVEGTIVTPNE

SEQ ID NO: 17442 - protein, 411 aa, unknown
  TnpB Polypeptide
VKLTGLEPREKALLDETFEQFRHAAQRAANYGWDGNPSKIIDSKSKLHHGTYEDIREETDLTANHVQAARSLAAETLDSCTELYFEEGQEISRPTFRGSVVVYDGRTITFNDDHCTLSTTEDRVTAEYVFPGDTSDTPFETYWEAPEWEKSSATLHKRDGTFYLHVTFQKEPETDVSAVENGTVLGVDLNVDGSLAVTSTGAFLGNADYLNHKRDEYEHKRGNLQETGTRSAHRTIQSMGDRFGNWSEDYLHRVALAVVLEARRHDCGGIAVENLKQIRERISDGKKFQQWAFNQLQDYISYRAEEHGIVVDDVRPQYTSQRCSHGECGFTHEDNRTGDEFECQKCRKELHADYNAARNIGWRLVQHWLKSGAGRVDCQVALKSGTLNRNGDFTPTTSRGQTGSPLISPPL

SEQ ID NO: 17443 - protein, 410 aa, Caldilineales sp.
MSRASHPATPPVEGVPRGRVKAHRIALCPNDRQASLMAGHAGWARGASNRSRDRLAAAWFTDEGGDHEGLADMNLRRPFKAVKRDRFPWSRKLSQNVAKNAIIHRGKGLEAWGVYKKARKKGQRPGPTVGIDMGIQVLATLWDGDEQTEVENPRPLREALAELRRIDKAISRSRKVHGRHRTSHRRETLYTRRRRQHAPVSRLRSDHHQTTTVIAKRGGTVKVEPLHLAGMQRNRRLGRALGNAGLGEFVRMPECKCAWYGTAFEKVDRWYPSSKRCSACGAVKQSLLLSERPYRCLPCGFACDRDENAVRNIQAFEPAARSAVADAATWPSGPPRGLPGRRSVHRTGIRIRFTQEVEIAIGSGDHLGGCSTLLTRHGLAFCRVNTGKGCSMHGGMAVPAWEICPIAKSA

SEQ ID NO: 17444 - protein, 360 aa, Desulfobacteraceae sp.
MKLIAQVKLNTNSEQFSALLLTLETSNDAANFISEFAWDNKIFRQYDIHKSQYYIIRQRFNLSAQVVVRVIAKVADAYKMGVNRKCVFVRHGAIPFDPRILSWKLDKKNISIWTVSGRIKIPFLAGVKQIDMLNSLQGEADLIFRDGAFYIHQYCNVVESEEFIPDGFMGVDFGIVEIASTSSGKSYSGKELTGRRIRNVKLRRKLQKKGTKSAKRLLKHRRHKESRFSKDVNHCISKHIVADAERTNQAIVLEDLNGIRERVRVRRNQRYIHASWAFQELKHFITYKAKRSGVPLIIVDPRNSSRECSVCHCIDKRNRKSQSVFSCISCGHSANADANASLNLSYRGRLAVNQAIAVSA

SEQ ID NO: 17445 - protein, 429 aa, Aeropyrum sp.
LKKLSKTLKRTVVLEGWVNRIGKQALREIAEAYKTMLQETLDYALKHRASQATLHRVFYQKFREKYPWLPTRIIKGCYRDAVRRAKSFRELKKKGLAKTDKPVVRRVTVIYSDSQDWRLENDVIKVRTHRGWVEVHYRNYKQLHRYLYSGWKLSSELRLKLTGRKVIVYLTFMKNFEVVYNPHNVVAVDVNENNVTVAVFKYRKLCEVYRIETNLGRIVIAYAERRKRITKGKSTKVSSVKKALKKLRERERKQDIMYKTARMIEKISGKNNAVVVVGNVHKGKGKLVSNVKKSTLRHRIQQWTVAKLVEVLNNKPIRVVEVSEAYSSTMNPFSGKYIRKYTPSMTRIAVRGSRRVRAIKIQLRLAKLGNGLVLDRDVVGAINIGLRYLSSDGRGMAFPSTEPHEVRVKLMSPHQGLTPLTELKLPKSN

SEQ ID NO: 17446 - protein, 424 aa, Micromonospora sp.
MDQRAAERSYGISEEELTPPIMWSLPALRRAWNAAKAEVAPWWKQCSKEAYNTGLDALARGLKNWADSRSGKRAGRRIGFPRFKARRRSAPTVRFTTGTIRVEADRQHVVLPRLGRLKSHESTRKLARRIESGTARILSATVRSAGGRWYVAFTCEVQRVDRMPHRPDTTVGVDLGVKHLAVLSTGEMVPNPQDLGDASRRTRRLARCLSRRVGPDTRSGRRPSNRWERARRRLARAHARLANLRRDRLHKLTTRLACEYGKIVVEDLNVAGMLRNRSLARSIAGAGLAELRRQLAYKTIWNGGQLIVADRWYPSSKTCSGCGTVKAKLALSERTYTCAACGLSLDRDLNAARNLAALAREAFDARSGRESPNGRGADRKTSPEGLVAVKRQPGTANADKTGTVPSQGGTSDQMLSTHHERRRL

SEQ ID NO: 17447 - protein, 372 aa, unknown
  TnpB Polypeptide
MYQVRRVKIGTSAQLDELARACGRLYSSCLVSFWRTVRHQGIWLSPAQMMRWHTSKQLHAHTADACIQAFFSALKSWRARRATDPNAHPPRRRRWYFRIEYKSTAIRHKDGQLILSNGKGNAPLVLAWPWKLPRTVVIRWTGQEYEAIATYHVQTVVQPCLPLVEERVAGIDLGEVHMAVSHDGTATHILNGRLLRSKRQYQNKLKAKLQHKIATIEHKQTTRLISTLHRAGVQTLVIGDVRAIRQENDVGSTNNQKIHQWSHGHVRHLLSYKAQRRGMAVALQDEYHTSRTCPVCGHVRKSKPQGRVFRCTNKRCRFTWHRDGVGAVNIRQKYLGCGPVVGGMAPPTGMRFRPHTRVARKEQLYLREAGPL

SEQ ID NO: 17448 - protein, 284 aa, Geobacillus sp.
VFLLGSILCGMAQTIVQLSIFRAIQGIGGEALVPIPKGQVKEIELVYDRGLWLCLLYEDGKEPKENKNQNRVAIDPGEIHTIAAVCENGENLIITGRKIRSIHRLRNKKLKELQKLMSRCKKGSKQWKKYNRAKQYVLSKSEAQLKDALHKTTRQFVRWCLENQVKEVVIGDVEGVQRNTKKKRNKKTNQKLSNWSFGKLFDYLKYKLNAEGIEMEKKDESYTSQTCPVCGKKNKSSSRNYTCQCGYKQHRDIHGAMNLFAKVYYGEIRPLEFTVKPFTYRRIA

SEQ ID NO: 17449 - protein, 371 aa, unknown
  TnpB Polypeptide
LERDLGRERVSIRPRRPVAAQVRRLLRAVENPEGAARFPASCTLAAVAANIARPRRCLREGLRSEARCRGAHLQEKKSTFKAFASRKGSRVERSGVFLPKIGWVAFRLSNRTAKRKIEGEVHNVAVRLEAGKWYVSFQTEREVDETIHENAGAVVGVDVGVARFAALSDGTFFQGANALKKYERRVAFLQRRLARKAKFSANWRKSKARITKLHSQIANIRRDQIHKASATISKNHAIVVLEDLVVVNMTASAKGTVVAPGTNVAAKSALNRRILDQGWGEFRRQLRYKLTWKGGTLLLVDPRNTSRTCSSCGHVSEENRLTQATFGCVACGHAANADTNAAINVLRRAGWARIACGDAKASTKQEAQRAA

SEQ ID NO: 17450 - protein, 358 aa, Anabaena sp.
MLLSIKTKLKLSQVQKIIMSKHAGIARFTYNWGLATWNSFVKDGLKPNKYILKKFFNNHVKSEFTWIKETGICQKITQYAFDNLGDSFSRFFSRKGGYPNFKKKGHHDSFTIDASGKPIPVGGKSIKLPTIGWVRTYESLPHTTCKSITISRTADSWFIAFAYEQKHEPTVKQHDVVGVDLGVKELATLSTGVVFPHPKHYKNNLEKLRRLSRKFARKNKVSNNRYKAKIQLAKHHSRVANLRKDTLHKITTFLCKNHAKIVVEDLNVSGMLSNHKLAQVIADCSFYEFKRQLEYKAKKFGCKIIIADRWYPSSKTCSNCGHIQDMPLKERTYNCGSCGHSMDRDLNAAINLSRLAKP

SEQ ID NO: 17451 - protein, 248 aa, Limnoraphis sp.
VIRRHDGYYAQFLIDYTREENKELSNKQTGLDVGLNHFYTDSFGSQIDNPRFLRKDERRIKKLQRRLSRTKKGSQNRKKARNRLGRAHLKVSRRRNDWVCKQAQQVIQSNDLVAIENLRIRNMVKNHHLAKSINDAAWYRFREWLEYFGRIYGVPVIAVEPAYTSQNCSNCGEKVVKTLSTRTHKCPHCGYTSNRDENAAKNILKSALKQLSNTVGQTEINASRETDLCLSGETQLSKSTHRKRKPKQ

SEQ ID NO: 17452 - protein, 388 aa, Geobacillus sp.
  misc_feature (144)..(144): Xaa can be any naturally occurring amino acid
  misc_feature (175)..(175): Xaa can be any naturally occurring amino acid
  misc_feature (191)..(191): Xaa can be any naturally occurring amino acid
MPTITLKLELHKPTKAKQEMYKQMTEVNTAFANWLATHPDLNKATSKIFQDFSSQRFPSAIVNQTIREVKSQTKHQKTKQFRKQWCCFNNQNWKVERKGDFYTVSFPTLEKRIGVPVVTRTYQAAWLDRLLDGTVKQGAAKLYXKRKKWYFAITITFEVEPRKETKAMGVDLGLXYIAVASVGTKSLFFKXNQCAFVRRRYAALRRRLGKAKKLHAVRKIGDKESRWMKGVNHKISRQIVNFALANGVGVIRMEELTGIRKRATSAKEAGRSLHSWAFHQLQTMIAYKAEMAGIRVEWVNPTYTSQTCKCGHREKANRNGIHFQCKKCGYTIHADLNGAINIAKAISGLSAEPSALVTGAPPIGVHPNPMGRGDDTPLNLGVVRTRNG

SEQ ID NO: 17453 - protein, 433 aa, Clostridium sp.
MFAESEVIIMYLTMKQQVKQLTKEDYKNLKLLSHIAKNLANEAIYNIRQYYFSEGKYLNCQKNYELLKNSPNYKILNSNMAQQILKEVDGSFKSFFGLLKLAKKGKYNFKDIKLPKYLPKDGFKTLIIGFVRIKGNKLLIPYSFSFKKEHKSIEINIPPKLVDKNIKEIRIIPKSKARFFEIQYIYEVEEVQSNVDKNKVLAIDLGVNNLATCVTSTGKSFIVDGRRLKSINQWHNKENARLQSIKDKQGYKKKYTNRQFLNTRKRNNRVNDYMNKTARIIINYCLENGIGTVVCGYNPTLQKNSDLGKKNNQTFVNIPFGVLREKIEYLCELYGITFVEQEESYTSKASFFDKDEIPVYENIIEEIKNWFPRKEYKFSGKRVKRGLYQTKDGRLINADVNGALNILSKSKVVDLEVLYNRGELDTPIRIRVA

SEQ ID NO: 17454 - protein, 370 aa, unknown
  TnpB Polypeptide
MRLHRQINVGGAIHNHCIALHRRYYRLYKKSLSCFTLNNHLATLKKLPKYAWWKQLGSQAIQGIAARIDRGYKAFFANVKARQAGKVRRRVGPPSFRKVRHAKSFTLSQAGWKLLEGNRLKIGSTVYKFAKSHDIEGTIKRVTIKRDPLGDLYVYFSCLVDEQPIARLMTGQSAGFDFGLTTYLTGSDGTEHQAPQPLKKSLKALAKANRRLSRKQHGSCNRRQARLHLARVHKRVAHQRQAFHWELAHTLCATYDTIALETLSLQGMKALWGRKVSDLGFATFAETLRYVARNVGTGVQHINPWFPSTKLCSACGCVNHAITLRDRVWTCPDCGTTHQRDHNAAVNIFREGASSHGGHPVSQVSACVDG

SEQ ID NO: 17455 - protein, 393 aa, unknown
  TnpB Polypeptide
MSRYRLTPTPTQEIILARHCSHARYVWNLAVEQQSWWRPGRCSAPRYYTQAAQLTEARAEFGWLAQGSQMVQQQALRDFAQAMVNYFSGTHSRPSWRKEGRNEGFRIVAVKARHVRRLSRHAGEVWIPKAGWVRFRWSRAVQAASSYRVTRDRAGRWHVAFAVIPPPIPGPGTGEVVGVDRGVAVSAALSTGELLQCPTLRPEEQARLRRVERRLARAHNGSGRRRRLKKTIAKLKARERDRRRDWAEKTSTSLARRFDVIRIEDLRIRSMTRSAHGTPARPGRRIRQRAGLNRGILASGWGLLDRRLMDKAPGRVEKINAMFTSQQCSTCGHVAADSRKSQALFRCTDCGYVSNADVNAARNIAAGHAVSARGRSPLGERENREPQPLSLSA

SEQ ID NO: 17456 - protein, 428 aa, unknown
  TnpB Polypeptide
MKTVARLRGILARLDPKPVALGKIHQFGGCRRYAYNRLLAEREAAWKALGASPDVETKKAFNREWYYVGMTHKITLWRSKLEWLRACPVHVLQNAAWDLQDAYEKWWKGLAKRPRFKKKSHGADSWTESDPACFGVNGQAVKLPKIGWVRARISQRIEGVVKRITVKQEGEHWHASLLVEEAVEEPKPNGKPAVGLDLGVVHDVADSDGNIYDTLTRTKEEKRRLRRLARAVSRKKKGSRNREKAKRKLNRARLRIDRRIRHEIHVLTCRLAKNHGLVAIEDLDVKGMTGSAAGTLEAPGRNVGAKRGLNREILERRWGETRRQLGYKCPWNGSRLVAVPAPYSSQECSSCGHADKQNRPSQAVFQCVSCGHEENADVNAAKVIRKRGIVLAAGHAATACGEDVRPPRKRRRTSVKQEPSEGAHTCVA

SEQ ID NO: 17457 - protein, 424 aa, Bacillus sp.
VEFKKKTDLYYQAYQFEHQYLDDQIKALKSRLGRLEFRLDRLQKQLHSLKRNVKSVVFGGKKLFKEQHTLHHYRNNRQQWLEDWEQARYSKMTISGRKDAKYGNFVFTYVPETKNLHYTTLTGVAIEIPNLQFPYGQENVEKVIQAQVEMSSQLKKDHGKAVAWSIEDHDDYYLLKCILDLPANENINHGKSDGVLGLDLNVDHIAWSNINVKGQLIKSGVVEFDLENKSSGQATKIIEAEVIPLVDLADKLNKPIVIERLNTTKSKVSHAYGNKKANKKMSMFAYRKLISAIKNRANKMGVAVYEVNPAYTSQIGKIKYMKRLGISIHQAASYVIARRAMGFKEKLPPVLHSLLPEKIVGLHHWAQWKWVSRCLSDVHTHCLYQIELSVPSMHYSMSDLFPLGALPDLGEKGLSKKESRKSIA

SEQ ID NO: 17458 - protein, 367 aa, unknown
  TnpB Polypeptide
LRVKEGSEVRNLLRAYKFRIYPNKEQMEYFAKTFGCVRFIYNKMLEDKINHYNKTKQMLKNTPAQYKKMYPFLKEVDSLALANAQLNLERAFKNFFRDKSIGFPKFKKKKGVQSYTTNNQNGTIYIEDGYIKLPKLKSKVKIKQHRQFNGEIKSVTVCKTLTNKYFVSVLVEEDIKPLPKTDKKIGIDLGIKAFAVTSDGEIFENPKWLRKSEQRLKKLQRDLSRKKIGSKNREKARLKLAKLHEKIANQRRDFLHKLSSKIINDNQVIILEDLKVKNMLKNENLAKDIWGASWSEFRRILEYKAKWYGREVVIAPSNYPSSQLCSICGYKYEEVKNLALREWTCPKCGTHHDRDINASKNLLKLVI

SEQ ID NO: 17459 - protein, 400 aa, Acidimicrobiaceae sp.
MATKPQRCRTFRYRLHPTVRQTRALSTQLDYQRELYNAALEERIGAWRWERRSVTYFDQCKTLTGLNEVRPEVIESGITLCRGTLKRLDRAFAAFHRRAKNDETPGFPRFKSAQRFDSMEWEDRSGWKVKTEVSRLYLLGIGEVKANIHRPLVGTPKAITVKREGAKWWLSVRCVDVPAMTLPPTGREVGLDLGITNVVATSDSELIVGEHFGTQTRHRLKLEQQRLSTKQRGSRRRRQVEVVAGLHRKVANQRKNAAHQLSRQLVNRYDLIALEDLSIRNMVRKPQAKPDPKEVGTFLPNGAAAKAGLNRSILDAGWGQLASLLSYKAESAGRVVVTVDPRHTSQTCAECGHVEAGNRVTQEAFRCCSCGHADHADINAARNILRAGRALQALACVDRN

SEQ ID NO: 17460 - protein, 404 aa, Chthonomonas sp.
MQIAVKYRLYPTSSQETTLLETFDLCREVYNSMVHWRKYDFEVHGESPTAYDQRMALPRWKEAHPELCQVNAQVLQNVATRVDLAFQAFFRRVEQGQNPGYPRFKGAGQYDSFTYPQATAFGVGFDSLRLSKIGCVKAVVHRALPGTAKTCTVRLQSGKWFACITCEVEAKPLPESKRQVGIDVGLNHFASTSDGEFIANPRFFRKDEKALAKAQRKVERIKACRTADRKARLRKANRVVARIHERTRNRRHNFVHQLSRKVVNQYDLIAVEALAVENMMRRPAPRPDPENEGLFLRNGASQKSGLNKSISDAAWSMFRSVLTYKAERAGRQVVNVDPAYTSQDCSRCGNRVPKSRSERIHACPYCGLILDRDVNAARNVLKKGMGLHTVPARQDRSPRVYAGE

SEQ ID NO: 17461 - protein, 382 aa, unknown
  TnpB Polypeptide
MMRTASIRLDTTAEHVGRLAALQVAYADACNRLVPIVREHRLYNRVGLHQRTYTMLREATPLGSQMCCNAIFSVCKAYKAQKELGRIRKDAPIPDIRFNRASVHFDKRTYTLKGKTVSLYTLDGRITVPMRLGEYQRRILESGQPKEAELVLRKGQWFFNLVVEQGDVEPVASGPVLGVDVGENNLAAHSLGKVFGGERLRDKRDRYLALRRRLQSNGSQSARQKLRQVSGKEARRVKHINHETSKAIVQAAIQTGVAKITMEDLTHIRSRIKAGKRMRGRLHRWAWRQLQTFVEYKAKAAGIAVEYVNPAYTSQTCSCCGGLGKRSKHRFECPHCGLRAHSDLNASRNLARIGETAVSPRAAVNTPDVGSVDMGNHVCASQ

SEQ ID NO: 17462 - protein, 550 aa, Mycobacterium sp.
MIARMRTCKQATRVAELTGGVQLAGKPKPDGTQTLSRYVDVGADFEPHRAVVESVSVLFDLYDGDADGYAASGSPGEPLPTGWMVTAVKFEVDWPTDPDRAALVRSHFGARRKAFNWGLAQVKADLDASRTDPAHESVDWDLKSLRWAWNRAKDTVAPWWATNSKECYSSGLADLAQGLANWKASKNGTRQGRRVGFPRFKSARRDAGRVRFTTGTMRLEDDRRTITVPVIGELRSKENTRRVQRHLAGGRAQILNMTLSQRWGRLFVSVCYALRTPISPPVVAQPTVRAGVDLGVRTLATVATIDTTTGAETIVEYPNPAPLKATLAARRRAGRELSRRIPGSHGHRTAKAKLSRLDRRCVHLRREAAHQLTTQLAGSYGHIVVEDLDVAAMKRSMGRRAYRRAVSDAAMGLVGPMLAYKTTRHSSTLTVADRWFASSQLHHGCTAPDGTPCRLEGKGRIDKNLVCPNTGVVVDRDRNAALNLRDWPDDASCGPVGTTAPSAPGPTTPVGTGHGADAGASGAGGASVRPRPRGAGRGEAKTPTPQGDAA

SEQ ID NO: 17463 - protein, 415 aa, unknown
  TnpB Polypeptide
MYLTVKQQVKHLSKEEYFAIRELCHTAKNLANEAIYNIRQYYFAEKKFLNYESNYKQLKNSHNYKKLNSNMAQQILKEIDGSFKSFFALLKLAKEGKYDFKDCKLPHYLPKDGYTTLVIGFVRLKGNKLVLPYSNKFKKTHKSIEITIPPILLDKKVKEIRIIPKSNARFFEIQYTYEVDCVQRNLNKKHGLALDLGINNLVTAVSNKGGSFIIDGKKLKSINQWFNKENSRLQSIKDKQHLEKTTNRQKAISRNRNNKVNDYMSKAAKKIIDYCIANDIGILVLGYNEDFQRDSNLGPQTNQNFVNIPYGKLRDKFEYLCELNGITLVIQEESYTSKASFWDNDKIPVYDVEKPQKYKFSGKRVHRGQYKTSTGKTLNADVNGALNILKKSNVVSLKTIYDRGDVDTPVRIRVS

SEQ ID NO: 17464 - protein, 417 aa, Cyanobacterium sp.
MAIKRVTFRLYPNKAQNEKMHYWRRLHKDLYNACITHRREQYKRYGRSVTYFEQQNSLPEFKEVWIEYKKLGSHALQATVKRVDFAFQRFFKLKSGYPKYKSARHYRGWTYPCKAGWKALSNGKHGRLKISNLGEIKMRGQARDWGEPKTCTILYKQGKWYASITVECIPTRYQTDKGVIGLDFGVNDAIADSSGNFIENPRFLKESQQKINKVAKKARKKRNPRKGIKASCRWKKSAKAVGKIQSKVARQRHNWHHQVSVEIVSRNSFIGTEQLNIKGMTKKAKKGSKRKKQKTGLNRSILDVGIGELKSMIAYKVTEAGGMYIEIPTRKVKPSQTCPKCGHQKKKSLSERVHKCENCGFTTNRDTAAAMVIENYIRGMERASLDAESSSSTECGNMRQIGAKKRQKRISQRSGNA

SEQ ID NO: 17465 - protein, 398 aa, Cyanobacterium sp.
MLKVVKVRLYPTNPQKESLAKAFGSCRWLWNHFHALTNETYKQTGKGLSRYDLQKQLPSLKKEYEWLTETYSQCLQVVCLNLSRSFINFFEKRASFPRFKSKHGKQSLSYPQNVKIKGDIIIFPKLGEIYAKIHRSIDGEIKTVTISKNKAEQYYASILFEDGKEQPLPNTEGKAIGLDMGIKDFCVTSDGSKFDNPRWLARHERNLKNKQKDLSRKQKGSNNRNKARIKVAKVHNKISRTREDFHHKLSRRIVNENQVVICENLNIKGMVKNHCLAKSIQQVGWGQFQTMLKYKCEQEGKIYLEIDRFFPSSKTCNHCLNIVDSLPLDIRQWECPRCKTKHDRDMNASCNIRDEGLRILSLGTSESASCPDVRPSKGGRKKATTRLSVGDEAHTINL

SEQ ID NO: 17466 - protein, 407 aa, Cyanobacterium sp.
MLNLSYEYKLKPSKFQVEQIEHTLDVCRSIWNFALLERIDWVRSRKSPVNACSIQQEYIISPETKYPNYNQQAKSLTLARKQNERIASVNAQVEQQVLRTLERAFADREKKKLGFPRFKNRNRMRSFVFPQMLNNCIQGNRIKLPQLGWVKFRQSRPIPDGFLVKQARIVRKATGYFVILSLQSDVDIPRPIPHGHPKGLDLGFILAVVTSDNESIPRPRFLNKYARELKRLQRRLKNKQKGSCGWRELQKRISRLHFKIACHRKDYHFKLSHHLVQDTGMIFVEDLDFKSWQRSFLSKSSADFAFGQFVNILEWVCFRTDTYFEKVDYRYTSQECPECGVMTGRKYLQERVHHCPECGFTTGRDHASALVVLKRGLDLVAVGQPVQEKASGDGRSGGEFIRLATNL

SEQ ID NO: 17467 - protein, 344 aa, Cyanobacterium sp.
MKNYGCQQNLINPNPDSLAILEFLCEESNKLHNCGVYLGRQLWFKGRRYLKKFDLNKLLKSNNHYRILYSQVAQQLLLSVTESFKSYYELQKQYHKKTITDKPRPPKYRKKGGFCGLTYPKQALKLRGNQIRLPLGKTVTRWFGLSEFFLPMPTNLSFSTIKELRIVPRNRVFYVEYVYEKEIVMQKNDPEKVLAMDHGIGNALSCVTNIGKSFIIDGKKAKSLNQWYNKKVAKLKEGKPQGFWSDDLARTTEIRNRQMRDFINKSARYIVNFCRHHRIGTIVFGWNQGQKQSVNIGKKNNQSFVQIPMAKIKDRIHQLCDEHGLKFVELPEAYTSKASFLGAT

SEQ ID NO: 17468 - protein, 436 aa, Cyanobacterium sp.
MYGSQQVLLNPDKDTKSVLEYICIEANKLYNIGLYYARQIYFKEHRYITKFELDKEIKTNLHYRALRSCVAQQTLRSVYEGMSSYKTLKSKANKGDLHFKPKLPNYRKKGLYQAVYPARWVKLAKNNQLKFTLGKQTKVWFGIDHFYLQMPSNLNYKDIKEYRIIPRNGCFYLEFVYEQKIEPISLCQDNVLGIDHGINNWLTCVSNVGTSFIVDGKQVKSMNNWYNKKVAILKENRTQGFWSKRLMRITEKRNRQMRDAVNKSARIVINHCLQNNIGTIVFGWNQGQKQEANMGKKTNQKFVVIPTARLKDRIKDLSELYSIQFIEQEESYTSKASFLDLDFIPTHGEKPEIWKSSGKRVKRGLFRTANNLYINADCNGSANIIRKKVTAKSSILSNVNLDGVSMGALIHPQRIRLWSAKTKRSNVDLSHWSADA

SEQ ID NO: 17469 - protein, 302 aa, Cyanobacterium sp.
MLKVIKIRIYPDSSQKLALAKAFGSCRWLWNHFLNLMNETYKQTGKGLSGYDVKKLIPELKKQEETSWLSETYSQCLQQVCLNLGVAFNNFFEKRAKYPNFKSKHGKQSLQYPSNVSIKGDCLNVPKIGLVYAKIHRPIDGKIKTVTITKNCCNQYYASVLVDDGKDKPKVSSEGKAIGIDLGLNHFAITSDGSKFDNPKILKKHEVNLKRKQQQLSRKQKGSNNRNKARLKVAKVHKKITNCREDFLHKLSRRIVNENQVIVLEDLNVKGMIKNHCLAKAIQQVGWGQFCTMLKYKAEQER

SEQ ID NO: 17470 - protein, 485 aa, Cyanobacterium sp.
MNKAYKYKLKPSHYQQRMMANWLDMLRSYYNYCLRDRIESYEQVKQPKLGNYCDLRTKAECCPLTCSVSKNSQLGEPFKGDKKRSAYEMQSSELPNLKKTRSWYKQIHSTVLQQNLRKLDTAFKNFFDGRGYPKFKTRQRFKSFNYPPNQVKLKGNKIYLPSIGWMRFFQSRQIPEGFSLRSVTVRQKADGWYVSISIEDKSIPQSQPKDLAQVKSLIGCDLGIKKLLALSNGEQINNPQFEKQLERTKTIRQRRASRKKRGSKNQKKAYQKLARIDQKIVNQRTNYQWNIAHHLTRLADVIVLEDLNIQGMSKRCKPKQDENGKYLKNNQSAKRALNRLIRDCSWGELKLKIQSVAEKFGCIVLEVNPKFTSQTCSNCGHIDSASRNKEKFVCTNCGFIADADNQASVNIGMKGLEILGISPSKLLVDNQKVTAKSELTDSSKKREKSMALVVEPSNPRQLELFQWINGQVTGCSESPVTARRV

SEQ ID NO: 17471 - protein, 428 aa, Cyanobacterium sp.
VLTLNYTYRIYPDGKQSAQLGNWLETCRCTYNYALQELKDWIKSRKTPVDRCSLESEYIMPANYPFPSYHQQQNNLPKAKKIFPRLKEVPSQVLQTTIRRLHDGWDFFQKRGYGFPRFKKYGQMKSLLFPQFKTNPITGWQIKLPKLGDVVINLHRPIPEGFVVKQVRVIKKAKGWYAVIVLQSDISIPDQVPHGHCIGVDVGLLSYMSTSDGFVEPRPKFLKELYRRLKVLQHRLSKKQKRSKNYEKLRKQIEALHNHIAFKRKDYQFKLCHKLCDMADSIFLEDCDFRIMAKGMLSKHTLDASFGQFRSILKYVGKRRGVFVDEVDHRGTSQTCPNCRTEVRKELSERWHSCSECNYKCDRDIASAQEICNRGIEKYSTQGLWGKEIGYQVGLSGAMCLDKWRSDGSLRRRKTQGKVHQERIANSQ

SEQ ID NO: 17472 - protein, 497 aa, unknown
  TnpB Polypeptide
LNGELLDATPVMAELASEVRNISGYATYVVRNDEILGAELAQITATAPAEAGRQAGVAMPDFLASGRGKSRKERLFRHRVVTEYRSWQERIAATNSESAKYISQGWKRTVNASAPSYGEDTVNLGAVDKQYALIDGNPFIDGEILLKMVICGTWYRLIFNFDNTRFREGKVTLPLIKIQGGAPVFIFTVVTDNPVVQFSGDYVIGVDVGINDYATVVVRSTNTGRVVHETTLSQRVHSLWNSVRASEGQVRYLRKKADKLLYDRQGRMAALDEARLQREAASRKKRELAILAAQEIAYLSHFYGNAVVAVEDLGWIRNTMQNGRWNRGDFMQWLTHYVTQNGGWVVSVNAANTSQLCHVCGEKVAHPEHKLSVCSEHGTMGRDVNAAANIAARALSKVEKARKTRAKNRKLQEQAPLKTPVARDSLKYPSRDRTKSAPTPKRKKKGVKTLMSPARVQASCLDASVLADCGANGTTETRKAALKQGNVAYKCRLCSLI

SEQ ID NO: 17473 - protein, 457 aa, unknown
  TnpB Polypeptide
MPMHQIITAKLKLITTPEQFAQLRHTQLAYRDALNAVSVYDFEHGKTSSADKLQKGMYAELRMRYKLPAQMACNGPRQVGATYKGLWTKLKKNLEHRRAGHTKKRFKGLDQPPKYVSPTLTYNYGRDYGFKVGQQVSLLTLQGRTILDYKGYAPHVALIQKGATIGAAKLWYDKPHKQFYLLVSLEVEVAEPTPTIQQQVVGVDVGQRYLATTATLDNKSQFFSGKVVRAKADHYARTRKRLQQKGTRSAKRRMIALSGRERRFTLNTNHIIAKTIVNAHPNTLIGLEDLTGIRERTKRPKRRRKGKQILPLTTKQRRANRHASKWAFAELHGIITYKAALSKTSFAVKVDADYTSKACPLCGSIDKRNRPGNGLTFECQNKGCRYHVHTGHAYWLHADLVGARNIAMRTCLIRQDWVRTGHLSVAPDVSDREAKAARLKRYVELRWSPDISLLREQ

SEQ ID NO: 17474 - protein, 404 aa, Streptomyces sp.
MVIAMQLRYGFRLYPNNPQRSALARAFGCARVVFNDALRVREDARAAGLAFVTSGELSKRLTASKKTPQRAWLGEVSSVILQQSLRDLDTAYRNFFDGLGGKRPTMGAPRFKSRKDNRQSIRFTANAGWKITPGRKLRLPKIGDIAVKWSRPLPSVPSTVTVIKDAAGRYFASFVVETEPSEVLPETVPEVGIDLGLSHFAILSDGTKIDSPRFLRRAEKKLKKAQQALSRKAKGCNNRGKARLKVARAHARVADARREFHHQLSTKIIRDNQAVAVEDLAVKGLARTRLAKSVHDAGWSAFVGMLEYKAARYGRTFVRIGRFEPTSQTCSQCGVKDGAKPLHVRIWECAACGAVLDRDINAAVNVAKAAGLAVSACRARVRPGPVPAQREETGTHPKLHPTTV

SEQ ID NO: 17475 - protein, 442 aa, Microcoleus sp.
MQLTERHIIKSTEHRFAQIDELAFKSKNLYNAANYVIRQSFIYGWGYVNYNEMNRLMKSHEAYKALPAKVSQQILMVLDKNWKSFFEAVKAYKVDSSKFTGRPKLPKYKDKTKGRNLLVYTIQAISSKQLKKGIIKLSGTELLIKTQVNPHQVCQIRLVPKCDSYVIEVIYDACTERSRSEPESTLGNANSVASIDLGLDNLVALTSNQPGFTPILINGRPLKSINQFYNKRSSQLQSQLKGSRKTSPRIQRLTRWINQKVDNYLHHASRLIINLLLTKQIGTLVIGKNAQWKTEIDLGKQTNQNFVNIPHSRLIEMLEYKARLAGINVIVQEESYTSRSSFLGLDPIPVYGKTEKEPVFTGKRIKRGLYKTSVGQLINSDVNAAYNILRKAIPNAFSNGIGSCVVQPRRVNPLKVKRKGEGLNASHVIAINDYSFTSYLLH

SEQ ID NO: 17476 - protein, 344 aa, Microcoleus sp.
MQTLTYEYKLDPTPEQSPDDEKSLEICLAAYNYTLPKRKEGVNSRQCSVNSGSLKQEYILPVGAPRRTFYTQCKSLARAKETNRNLKIARTHVLPQVLTSLEALLFVAMCDQGRGWSLFDRQIDSFVSAQLNKVSVKPERVNIPKICPLKMRLSHPLPLGGFVRQVRVAKQANGFSVKLAPQAPVEIPQSMAYSCGVGMDLGMQHFLATCGGQLIARPRFFVRRQCKLKLLQRQLKHQTRGFRELQRLQRRIALHHEFIWNAQKDFHFKTTHHLCDSAGMIFGLNLNFQAMSAGMLCKHTLDAGFEQFVNILAHRCFNPDVCEAKVDANSTSKTCRYFQTRTSQ

SEQ ID NO: 17477 - protein, 365 aa, unknown
  TnpB Polypeptide
LQAAKALSLRYNASDELSSLFEDFRLMCNDAIRIAIQYEEEHGGEKVRNRFRLIELAYSRLKEYGLHTHYILSACEVAYSACRNKKRESRPYVKRTFVKLTSQSYVLNHLILRIPTRPRRFIYLTLEASDYQLSFIENPALKRGSITVTSSTANISLSREMAVVESRGQIGIDINERNITWSDSAGRTEGADTSEVAELKERYREIRSKVARRTHNDSRVRHRLLSKYGKRESDKTIQQIHRVTKKIVEHAKANQFGIVMEKLKGIRKLYRKGNGHGPSYRGRLNFWAFYEIQRQIEYKAKWDGIPVAYVNPRGTSRTCPDCGSSLTKLEGRKVMCPSCKQIEDRDVIASKNIMACVVPQARPGR

SEQ ID NO: 17478 - protein, 445 aa, unknown
  TnpB Polypeptide
VRLRLKPTNTQAAVFLRAGGARRFAFNWALSQIKANQDQWAAEATYDIPKSGRTRPLSYFDLVRRWDEARDTVAPWHGEQSVWTFRYGIWAAHMAHSRFLKGQSRFPKFKARRRDRHRFTTAGTGVQLQPGRIRVARYGWVKLAAPCRAQSKLRRLLVRGRARIMNVTLSRDAGGAWYASVCFERALTAKPQAYNRPAGATVGVDVGIKTAAVVATSGRTHVASLEASRALRDALSHIKHLQRALSRTQKGSANRAKARLRLGRAHARVAAARNSRLHQFTAVLAKSHRLVVVENIATANLMRNHHLAQAIGDQGWGELARQLSYKTTRAGGTMLPAPRWFPSSKMCSACGAVKPKLSLAVRTYRCDVCALVVDRDINAAANLAAWGEQQQGTRPAAGTQAGDRHPGGPSAQLAEHACGGSNEPVTLTAGALVEAGTSRPRTRAA

SEQ ID NO: 17479 - protein, 363 aa, Flavobacteriaceae sp.
MGLEIRIASWKSRQKFVSKFELINQLPELRKIEWIADAPADSLQAVIERLDKSYQKFFKGGGFPKWAGRRKYNSMLFKRATLESNKIKLPKIGLLKMFKDSEIPGNIKTVTIKKELTGYFAYIVTDAVKEISRPIGENQAVGIDMGISSFCVTSDGHVVENPRHFKKYERKLRIEGRSLSRKKKGSSRWKKQARKLGLLHHKIGNVRKDFLHKESTKLAAKYSTVYLEDLKVGNMSRKAKPQQDESGAFIPNGQSAKSGLNRSILDAGWGMYREMLEYKITVETVNPKHTSQECFICGHISPDNRKSQSVFECTNCGHSDHADSNASKVIKGRGTAHSRERKSLDYALAVEPSFGYVSNPRRR

SEQ ID NO: 17480 - protein, 540 aa, unknown
  TnpB Polypeptide
MGTQKIRQSKHPTQKTPTFLLELPLQVEAGQARLLRAHLEAGRQFYNALLSEGQKRLRRMQADPAWQAARALPRTRPLERQAAFSALRTEYGFSDYALQDFAKDLRVSWLADHLDAVLAQRLATRAYQALNRVCVSKARRVRFKSRGRGLSSIENKRNDTGLRFVLHTPQAGHAGYLVWHNEQFPAIINWNDPVVKYGLDHRIKYARLIRRRASSPRAHGADSQGDRYYVQLILAGVPYQKPKHSVGSDTIGLDLGPASIAIVPREAEARLDPLCAELHPDAKAMRRLQRQMDRQRRANNPEHYDEQGRVKKRGKQRLRWKTSRSYERTRRRKATRERKLAAHRKSLHGRLVHEIVSVGNTIILEKISYQGWQKLYGKSVGLRAPGMLVEHLRRTVASTGGTLLEVSTRSTKLSQWCHGCGVCRKKPLSQRVHQCPCGVGPIQRDLYSAFLAAYLDPATPIPSCAQYQRYWEGAEARLRVAHERVQERANAGQVLPQSFGVPRAGVRLPESLGEPKQEPVLLLSRGRLEAWQECSEPPVL

SEQ ID NO: 17481 - protein, 444 aa, Rhodocyclaceae sp.
MALQRKITYRMYPNASELEALDNWRGLHCRVTNTLLEEHRRRYEAGEKAYNFSTMCKDLTVWQGYADALRGLNAQSLQVTAKRVALSFDAFFRRLKSGDEPGYPRFKPFQRFAGWGYKTYGDGWKLHQSDGKHGKLRLSGIGEIRIRGKGRFTGTPKTAEVIHKAGKWYLSVTYDVDETVVARQRGSEAAAFDWGLNTLLTIAKADGTLEEIDNPRWLKSKLDAIKSLQRTVSAEEIKAKAQLGLAADEPLKKGQRLPVTAKLKRLYAQVRSLHGKVARQRHDFYHKLTGEMVKRFAFLGTEELAVKNMSRAPKAKPDPDQPGEFLPNGAAAKAGLNRSILDAAPSMLLGMLRTKAAEAASVFALANTREVKPTQRCHRCGAIVKKELKDRVHRCTCGCECGRDENAAKTLLRWLLEGDFWSGTGQTGSAFMAGLPSETPPIAA

SEQ ID NO: 17482 - protein, 310 aa, unknown
  TnpB Polypeptide
LDAQLKTIKHIDWIKDVPHECLSTTVEVMDRAYQRFFKTFKTGGGFPRFTSKKKYNSIRFKHALYVKGNFVRIPKIGYMKMVNDSAIIGDIKIITVKRELGAYYACITTDAVKSIQNQDESQVLGIDMGIARLLTDSQGGYVENPRHYRKYEKRLRIENRSLSRKKRFGKNWIKQAKKLSKLHRKIAAVRSDFLQKESTRIAKSFHTVIIEDLNISGLKRGNVGKSIGDAGWGLFRKMLEYKTQVIAIDPRFTSQTCNDCGECDKKSRISQSEFVCTACGTRSNADENAARNILDQGMVIIRKRGVRARA

SEQ ID NO: 17483 - protein, 358 aa, unknown
  TnpB Polypeptide
MLTFKRKLILTQAQANRLDSWIGVARMVYNMCLEIRKEAYKNQQTTIHRFELDGQLKTIRDIDWVADVPFDALSDAIKRMDLAYRKFFSGGGFPKWATKRKYASIKVRHNISIKDRYIKLPKIGLLKMVKDSPVIGKIKTVIVKKEVHGYFVCITTDAVKQIQNQDENQILGIDMGIARLFTDSNGVHSENPRHLKKYEDRLRIENRSLSRKSRGGKNWVKQVIKLRRLYVKISSVRADYLHKESTSIASKFNTVILEDLNIVAMSKNRKLSKHILDAGWGFFRQALEYKTNVIAIDPRYTSQICSHCGEKDKKSRISQAEFICTSCGAKSNADYNAAKNILDQGMIIIRQRKARAYA

SEQ ID NO: 17484 - protein, 329 aa, Crocosphaera sp.
VNEPGLQYLNSTTTAKIISLEKKGYPKYSKRTHSVEFKKSGWKLNRDTKRITFTDRKNIGELKLIGSRDLFYFQEWQIQRVRIVRRADGYFVQLLLKLDARDITPQLEPTKKCVGLDMGLKYLYADSDNNVVEPPKYYRKAEKRLNKLNRRKSKKFRRGQKQSNNYIKARRKYAKGHLKVSRQREEFSKRLALRLIQSNDLIAYEDLKVKNLVRNKKLAKSINDVAWSQLRKWIEYFGLKYGRLTIAVNPAYTSQECFNCGKLIKKSLSVRTHVCSCGYVEDRDKMASLNILKKATQGHWGSWSEDLNDWGDLSSILVGSNTCQDNLSQ

SEQ ID NO: 17485 - protein, 442 aa, unknown
  TnpB Polypeptide
MFRSSISARRANARDSAIRTSARESCASSRRRRGIAPRPGRSRSPYIRTASFVNVRFRYRISPTNEQQAILAQQFGTARYAYNWALGQRTAAFGRGERMNYNQSSAAWSRHRHETVWALETSSIPPQQALRHLQTAFVNFFAKRARYPKFRKKAHAQSAEYTRSAFAYDPATRTLTFAKLGRMAVRWSRAFVSVPTTATITKSPSGRYHVTLCHDEPETANFPKTGQSVGVDLGLNRLATLSTGERIANPKHLGKRLGKLARAQRTLSRRKKGSGRWHRARVRVARIQERVADARADRLHKVTLDLVRRFDLVAIEDLNVRGMIRNRSLARSLSDASFGMFRRFLEYKAEWYGKKVAVVDRFFPSSKLCSDCGYVREHLSLSERKWTCGNCGELHDRDENAALNILAAGQVVTARGFGVSPKRTSVRGGSRSGSVKRQKVSR

SEQ ID NO: 17486 - protein, 495 aa, Caldilineaceae sp.
MTTLPAKPHSTTENRAERYRIRFDKRAHAAKCAQIAGACRLVWNILLADCERRYRLSRELGIDDNGGHPIDKSVSFFTLGKRFTDLRSRSDAAWVRDFMDSPQGKRYRDMDLSWLRDMPYAPLRYTAKYLADAYTRFFKVWAEAKSEGTPLGRRQSDGKPKGFPKYRKKFDRDDGFAIPGDVRMDGDRMHIPKVGWVRLEGSGLYRGCKPKQVRIRKEGTEDRPKWYAYVFYEVPPDHLKQPAWTGAIGLDRNVGQATDSDGEVYETPDDPQLEGKIKRKERKKAKSLARSKANGKPVSNRGRRIGGQLKKLKRKQKRRRENAAHQHSRKMADTAHTVVIEDLDIKDMTKSAKGTVEEPGKNVKQKAGLNREILKSNWGRTERMLDYKAGQVLKVPPAYTSQTCAACGHVGKENRKTQAHFRCTACGHTANADRNAAQNILEQGLALLPKARGNGASARREALDPCLLPGATGKSTSMTREQGMLATLEPPGSGA

SEQ ID NO: 17487 - protein, 269 aa, unknown
  TnpB Polypeptide
MHVKRVSLSKIGSVKVKLHRPIDGTIKTCTIKREGELWYVVFAIARSPNDVCEVEPEPMEENRETVGIDLGLLHFVTLSTGETIENPRYYRKAEKKLVKHQQSLARKKRGSHRRRKTVKGVAKAHRKVRHQRNDFLHKASRHLVNTYGTIVFEELQPANMSKRPKIKQDENGNYLPNGAAAKGGLNKSINDAGWGQFQQFCTYKAENAGRKVLFVNPKYTSQACSGCGTVKKKELSERWHSCECGTELDRDHNAAINVLRLGRSRQASA

SEQ ID NO: 17488 - protein, 393 aa, Moorea sp.
MESMTYTYRIHPDIDQEAKMLDWLEQCRRVYNYALRQRKDWINSRKCRVDACSLRQEYIISADEPYPDYYKQQNALTVAKKSIREFQAVHSQVLQDALKRLDRAFKIRQQRQFGFPRFKKVGRYRSFVFPQFKSNPITGWQIKLPKIGKMPIVLHRAIPKGFVIKQVRVLMKASGWYAQLILHSDISIPDPMPHGEPLGIDWGISSFVATSQGELIDNPRFYIQSQSKLKWLQRRLSKKQKGSKSYQALTHKISLLHEKIGNQRKDFHYKVSHHLCRQAGMIFAEDLNILGLSKGMLAKHVLDSAPGQFLNILDWVCRKTGTYYQKVDAKGSSQLCPECGADVPKDLSVRIHSCPECQIVMPRDVASGKIIVNRGIAAVEGLAVVKLGVEEES

SEQ ID NO: 17489 - protein, 366 aa, Moorea sp.
VFPSKELHKIWKTWLNAYRWIYNWSVAMLKNGYKGSAYDLQKLARKVDRPDWVNQLPGHQLQEAVADAIDSFKQAKANQGYVKFKSCRETRQVIKFKAGDFKKKCWYPTKVKGLSYRSPQGFPEECIYGTQLVWIKGKWYGIFPEYIEPIPTAQDKVIALDPGVRTFITGFDGKTYVEIGSGDIGRIQRLCQQLDRLMSRIDLSSAKRQRRAMKNAAHRLRQKIQNLIKDCHNKSASFLVNNYKLIFLPTFETSVMVVKSARKLNKKTARNMLTWSHYKFRQHLTQMADRHDVLVVLVNESYTSKTCPECGQIHEKLGGSKKFQCPKCGFSLPRDWNGARNIMIRALSATTTRFSPGAIQIIPADG

SEQ ID NO: 17490 - protein, 402 aa, Escherichia sp.
VKRLQAFKFQLRPGDQQECEMRRFAGACRFVFNRALARQNENHEAGNKYIPYGKMASWLVEWKNATETQWLKDSPSQPLQQSLKDLERAYKNFFRKRAAFPRFKKRGQNDAFRYPQGVKLDQENSRIFLPKLGWMRYRNSRQVTGVVKNVTVSQSCGKWYISIQTESEVSTPAHPSASMVGLDAGVAKLATLSDGTVFEPVNSFQKNQKTLARLQRQLSRKVKFSNNWQKQKRKIQRLHSCIANIRRDYLHKVTTAVSKNHAMIVIEDLKVSNMSKSAAGTVSQPGRNVRAKSGLNRSILDQGWYEMHRQLEYKQLWRGGQVLAVPPAYTSQRCAYCGHTAKENRLSQSKFRCQVCGYTANADVNGARNILAAGHAVLACGEMVQSGRSLKQEPTEMIQATA

SEQ ID NO: 17491 - protein, 372 aa, unknown
  TnpB Polypeptide
MHKAYSFRLYPTKEQAQQIRRTIGCCRFVFNHFLARRKEVYDRDGATLNQYACMRELPALKEQHPWLREVDSTALQRTVEELDDAFQRFFREKKGYPHFKSKKHPKQSYTSKRNGRKDDKATIRIEGNRIRLPKVGWVKFAKSREVKGRILSATVRLAPSGKFFVSVLVDTKIQPLEPLITSVGIDLGLKAFAMLSTGETIPNPRHLRKHEEKLKRWQRILSRRKPGGGNREKARLKVARLHEKVRNARLDFLHKLSTRLIRENQVIILEDLRVRNMQQNHKLAQNIADASWSEFRRQLEYKAVWYGRRVVIVSPTFPSSQLCSRCGHRNVETKDLSVRQWTCPECRTTHDRDFNAAKNILSEGLRLLSTSA

SEQ ID NO: 17492 - protein, 388 aa, unknown
  TnpB Polypeptide
MVKFINKSFIFSIYPNKEQEKHLRMNIGCARYVYNSCLETTTTDYKNKQNHPKNKTIKNIPNKTYFNKHLTSLKKLKPWLCEAESTSLQASYERLINAFDRFFKGKNKYPKYKSKHNPVQSIKIKANKSTNNKLTIRFENERLKIPKIGSIKYKNKRKIEGKILSATIYQKAGKWFASINCGDVPVQAKEKTREVVGIDLGLTDFCILCNGEKITKLNIKQEEKQLKRLQKALSRKKRGSKNYQKNKLQLERKHQKIAAKRTDFLQKLSTRIIEDYDIIYTETLKIANMMKNHHLAKSISEASWRKFLEMLKYKSQWYDKTLYSINQYFPSSKTCHCCGHINHDLKLHNRKWICPQCLKTHDRDMNAAINIRNEGIKKNTCTVGTTGI

SEQ ID NO: 17493 - protein, 286 aa, Alphaproteobacteria sp.
MPCRAGETARPSGTRARILKSASCRVAARIICGRTQTHRSRAHLARFASSSSRDGKEAPELPKTIPAEAIVGVDVGLTHLIIESDGRKTDNPKFVTRAQRTLRRKQKSLSRKKKGSKNRAKARFLVAASHERVAARGDFQHKLSRRLVDENQAIIFETLNIKGMQKNRSLAKHIADASWGSLRIKTAYKAERAGKHCLTIDRWAATSKTCSDCGFKCEAMPLDVRDWVCPNCGSEHDRDINAARMVKHFGILELRAGGWHVPVCGGLRKTGNSPAAAYEAESSRAA

SEQ ID NO: 17494 - protein, 320 aa, unknown
  TnpB Polypeptide
LGGTREAAPGLPVRARSHPDPRAEAPLPCRGGALRLELGPDPGQGAVRSREEVVLGGRTSSALERGEEDQARSGLVEGELQVRLPGGLQELGPSAPRLPEVQDGRKGGRRLGFPRYKKKGRCRDSCRFSTGVMRCSGSTVTLPRLGTIRTHEPTQALAGKIAEGKAKILSASVSRSAQRWFVSFAVEVEREVPDHHRRPRTAVGLDLGISSLIMAVDRQGADSGESDQAFRLNPTTWFGRIRPGGSGLSDQGAETWQRRLYSIRTKDRPTAFSPSAARRSLGNRHRCLTPQLRSEATAGPGTFCRTGGGGGDRRPVRDGR

SEQ ID NO: 17495 - protein, 434 aa, unknown
  TnpB Polypeptide
VRNCHHGLVKQQLELVAQAHGSRDALAIFKRIIAGQQERIDVVNDGEMSKISYKTEWERPSPSNGQGESDPARLASHAIFYRLSGEEKEETYMKTIRVYRLNNLSPTLLRRLKAAQMEAARVWNLCTQTHKAARVTHAQWPGQRELEQATKGQFALNAQAVQQIVHAFLANVKTTRTLRREHPEMRMKYPWREKRFYPVKWPAQAVHREEGRVVLPMGKGHPSLMLPLALPENAGACMLVWNRGFELHACLEVPQASEAPGSVQATVDLGEIHLAAVTTNSGKALIVTGRGIRSLKRQRGKQLGQLAKKQRRCQKHSRRWKKLQRTKNKVCRRAEQRIRDLRHKATRTVIDFCIKHQVGTLFIGNPHGVRHRDCGRHHNGRMAQWEYGRDIDYLTHKSKQARISCSTGSERGTSSRCPRCGHRHKPKGRTWACR

SEQ ID NO: 17496 - protein, 427 aa, Scytonema sp.
LRSAPTGLADRRSQHGKLDEAIRTARFVRNSCLRYWMDNKDIGKYELSAYCAVLAKEFEWANSLNSMARQASAERAWSAISRFYDNCKKQKLGKKGYPRFKKEQTHGSVEYKTSGWKLSEDRRCITFSDGFEAGTFKMWGTRDLHFYQLKQIKRVRVVRRADGYYVQFCIDQERLEKREPTAHNIGIDVGLNHFYTDSDGNTVANPRHLRKSEKSLKRLQRRLSRTKKGSKNRVKARNKVGRKHLKVSRQRRDFAVKTARCVVQSNDLVAYEDLKVRNMVSQHVGRVPRLEATGEPVRVRNRHLAKSISDAAWTQFRSWVEYFGKIFGVVTVAVPPHYTSQNCSNCGKVVKKSLSNRTHTCQHCGHTQDRDWNAARNILEKGLRTVGHTGTLIASGDIDLCAGVSEAGRSPETPPLKPSRGKRKPKK

SEQ ID NO: 17497 - protein, 482 aa, Streptomyces sp.
VGLEGRVILAGGLREVAAPFVVPGPLGVAVRDRLKQVTADDEQVLRLVGDHLGALASRDLRARCAAGLDHDGDAWAERKRVLTGQSSSRWAGSITKATHDQWALARRGQLAHVKGLQAAVRTVAHRLSLPVGEKGSKHAPGGYRSRREWHAKSRRLRVLEDRLHTARADWQTGVVHVVRGGKRLLTTRQHLAAAGLTEAQWRTRWEAGRRFLQADGESGKRYGNETIRVTPDGEVSLKLPAPLTHLANAPHGRCVLTARVAFAHRGEQWRDRISVNRAVAYRIHEDTVRGRWYLTASWTIPPATTVPLAAARARGMVGVDTNADHLAAWRLDPHGNPVGAPLRFGYDLTGTAAHRDAQVRHALIRLLHFAKRHGLAIAIEDLDLQAEKTREKHGRRKTFRKLISGMPTSKLRARLVSMATELGIPLIAVDPAYTCRPRRGAQYWQKPLTGKTRKPTRHDAASIAIGRRALGHPIRLGYLPGP

SEQ ID NO: 17498 - protein, 440 aa, unknown
  TnpB Polypeptide
MAWPVEPVPGDATLRRRDDTPRFVGAHRLGAHARGARQVDRAERLQLHPAIFVFMIYMVMHKQTFQYRLYPTPAQATAMQHALDECRWLYNRLLEERKLAWEETTTSVRLYDQVNRIPALRGERPALGDVHSQVLQNVAARIDLAFAAFFRRVRAGEKESGFPRFRGHGRYDSFCYPGSGHKVEARGDDTTKGRVFLSKIGHVKAVIHRPLEGNVKTCCVKRTATGKWYATFSCEVEDAPLPATDAVVGIDVGLASFVTMSDGAEVTNPRFFRQDEAALATAQRRLATEPRTPKGQRPTPARRKRRKVVARVHERIAQRRKDFAHQESRRIVNAHGVIAVEDLSVNRMVHNHCLAKSIADAAWSLFAQFLSYKAASAGRQFVAVNPAYTSQDCSRCGHRQKLTLADRMYRCPCCGLEIGRDHNAAINIMTLGLQSLGARP

SEQ ID NO: 17499 - protein, 255 aa, unknown
  TnpB Polypeptide
LADALKLAEADLIRDRKGRWRLLVSAHFQDPPTVDTEGVLGVDLGRTDIAVTSEGATFSGERVTVRRDHYARVRRSIQRKASQGTRSTRRRARAVGKRIAGQERRFQKDVNHVVSKRIVGQEVASGQAIACEDLTGIRERTNKQPRTKTERRRSNRWAFYQLRAFLAYKCQALGVPFVLVNPAYTSQMCHCCFVLGDRAGKRFSCCHPACAWRGDADYNGARNIARLGLVLMQPGGPPLCCLYQPGGRATTSRAL

SEQ ID NO: 17500 - protein, 498 aa, Calothrix sp.
MGMVFKLKPTKQQATELSNWVDMMYHQYNYNLKDINYTYYATQEDWTTSKNFPLIHCPLTCCISRNGASGEVYTQKPDKKTGLLKRRSAGAIQDANLKELKKSRPWYRRVNSTALQQNVKRLDNAFDGFFGNGKGRPKPKRRSKFKSFTITNIENKDITSTGINIKSLGWVDYHNSRCIPDGFKVKSATIRQKADGWYISIKVEDKTIPQSVEVKPEEIKTVIGCDLGLTKLVHLSDGSQINNPRFNTNKRTKRLMRVRSRRASRKKGKNNKRKAYNRIGRLHKRIKQRREAYQWQVANKIVKRADAVILEDLNIKGMSARCKPKKDENGNYSKNGQSRKVGLNRSIADASWYSLTQKINVVAAKLGVLIVKVSPQFTSQKCSYCGHIDKSSRDGEKFICSNCGHFDHADLQAARNIKLKGIEQLGIPVACRFPAKYSKTVRVDCSEPKQLRLFETPYPESTGVKEIKRRSRSKKRLPGNSLGEQLNLFDVDKIVDSN

SEQ ID NO: 17501 - protein, 508 aa, Calothrix sp.
MARKTTPSFITELPLKVDSKIEKQLNARFQAGRQLYNTCLNEALIRMELVRNSESYKQAKKLNREKDKKQRKELFKTAREQAKFSDYELQSFAVLTAKSSKWIAVQVDSNTQQKLATRAFKAVERILFGMAKQVRFKVTTRFKTVEGKSNKQGLRWLKNQVVWCGLKVEPIIDWNNPVIVHGLNSPVKYCRILWRNLNGKKRWFVQLINEGLPYQKPKNYVTQGIVGLDVNISNVAFVADNKAGLLPFAEKVPTFEREIKALQRKMQRSQRMHNPDNFEADFDKKVGNRIVRKKGKVKKGKKQWIKTRNYRRIQAKKAELERRKTAYAKSQNRKLVNEILRHGNQIKTEKVSIKGWQKRYGKAISAKSPGYFQSELKRKAENAGGYFLTFSTQTTALSQTHLDGTRIKKKLSERVHRDVTGIKPMHRDLFSAYLARCVYNNKLSLWDAQCEYPGTEPFLLDGWQQYQSANRVAECKSRNSYSSLEQMSNEVLTSNQIAKKGDKLEGNA

SEQ ID NO: 17502 - protein, 327 aa, Calothrix sp.
MKTSYQYRLKPNKEQREIIDNTLDMLRCQYNYELAQRFDWYERWRCSIDKCPLVCHLPELKDKPNRFSQQASLKQLKKERPWYKNIHSQVLQEVPKKVEIAFDRWLKGDSNGKKSGKPRFKGAGRYKTFTYPQFKQHHFVGNKITLSKIGDVKVIVHRPIPDGFVIKTVSVTKKNTGYYVTLSLDNKEVPTIKLDFNAENIVGIDVGLIDFYLLADNTRIAAPKYLRKSERKLKSAQRKVSRRKKGSNRRKKAIQKLGKQHKKVADTRKDFHFKTAKKLLSKYDVIAVEKLNVKGLARTRLAKSIHDAGWGQFINILSFKAVSGARR

SEQ ID NO: 17503 - protein, 423 aa, Calothrix sp.
VPRKTTPSFVTEIPLIVNSVDNRELEARYHAGQQLLNAVLGEALIRMELVRNSEPYQQAKKLKGDDNKAQRKKLFEEAGSLHRFSDFELQSFAVRTANSSKWIANKLDSNTIQKLATRAFKAVEKILFGKAKKIRFKTNERFKSVEGKTNKQGLRWTLRQKKREATIGKKSDYRNKIKCSEYVLSWSGLELEPVIDWFDPVIAHGLNSPIKYCRLVWRRLNGKKRWFLQLINEGLPYQKPKNYVTEGLVGLDLNISNIAFVADNKAGLLPFADKVPEFEKEIKATQRKMQRTQRMHNPGNYEHDFEKKVGNKTVVKKGKVRKGTKKWNNSKNYLKLCCKKADLERRKASYAVGSNRGLVNEVLRHGNNFKTENVSVKAWQKRYGKAISAKSPGFFQSELTRKAAKCATGSIPVVTFAKMLVGS

SEQ ID NO: 17504 - protein, 515 aa, Calothrix sp.
MLLGYRYKLKPNREQTLKVLSWIDMLRANYNYNLADREATYQARFVQGEYCNLRNKSAACPLSCPISSNSATSDTGEVYKVKNKTGEIKLKTAEEIQITNLPVLKKTRPWYKGIDSTVLQQNVKRLQIAYNNFFAGRGKYPKFKNKSNFKSLTFTAGIKLTDKVVYLPKLGWVGYFNSRSIPEGFKIKSATVRLKADGLYITLKIEDKAVPAFPVISAEEVKTVAGLDMGITQLAHCSDGSQYNNPKHSTNKRTRKLLKIRQRSLSRKKKRSNNRKKARVKVSRLHQKITHRREAFQWKLARELTKKADAIIVEDLNISAMKKRCSTKEDSNRKGRFLPNGQSKKRGLNRSISDASWYSLTQKIEYLAAKQGKVFERVNPKFTSQICSSCGHKDKASRSQEKFICTNCGYHADADINAARNIKKRGIEIHSFPVSCKIKIKMVPEDFREPRQLRLFEMPTAESTEGKRRRAAPRVPLKVFFEEKTFKGARESKRRVPGNSARQLTLFEDIPVNLV

SEQ ID NO: 17505 - protein, 316 aa, Calothrix sp.
LNIFVTNLITYITAPFPQARQVWFKTGKILSGYDLTAQMKTNKHFNAGYASSMQQTCLNVGEAFKSFKKLLSKAKKGELNQKPLPPKYRKSGGLFTVTYPKRWLKLKSGLIRFPLGNQVKAWFGISEFFLPLPTNLNWSNIKEIRILPRNGCFYAEFVYKTSVEPIKLNKSNVLGIDHGLNNWLTCVSNVGTSLVVDGLHLKSLNQWYNKSIAKIKENKPYSFWSKRLARITEKRNRQMRDAVNKAARIAVNHCLENNIGTLIFGWNEGQKNSSDMGKKNNQKFVQIPTARLKNRIEQLCEQYGIEFVETAIFLYF

SEQ ID NO: 17506 - protein, 488 aa, Massiliomicrobiota sp.
MDKRRFALTLRLMTTEDDEAILAKRFRIASHIYNVMVKEARKRLHKLRKDKDYQEIMKHLSVSKGKYRKGDKTKLRELNRLYGLSEYNFHFYIDRGQKQYSQNIDSQARQKIATNVWRATEKVLYSSGQIIRFHKERNLNSISGKSNATGIRYRSEHLLWNGLDIPIRIRRNDSYARECLEHDICYCRVIRKWHKHKYRYYIQIVFKGIPPQKHVIKDDNIQTGIDIGPSTIAVVSNKGIIFTELASDIDSIDADIQRLNRKLDRQRRNNNPDNYNKDGTIKRQTKSFKRNWKWSSQMKKINDRIRHLYAKRANKLKQSHFKLANEILELGTDIYIEDMNMQGLAKRSKKIEISENTGRYKRKKRFGKSVGNHAPAMLINILNNKLSYMDKQLCKVNTYETRLSQLNHLTGEYEKHDLSYRWKVIGKYNVQRDLYSAFLLSHMKTQKEVDIDACYDDFDNFMIKHNAKIDELRKQKHDGYIFPSCMGL

SEQ ID NO: 17507 - protein, 294 aa, unknown
  TnpB Polypeptide
MVDQVLTVMCKLAPTDTQARSIEETLLVFADACTWINQNVDPKVKGGIKMQYLIYQDARETFGLSANLTIQAIRRVASNRKTAGKNKIEEFQPTSISYDQRIFQYREADEQVGLTLLHGRERIPLDIGNYQRNLLKSQKPTSATLVKMRSGYYIDIQVKSEAPDTIETDKVIGVDLGITDLAVTSEVETYSGSEIKTVRDHFAQLRTDLQRKTSKGTRSTRRRCRQLLKRLSGKEQRFQRWVNHGISKSIVQRAIETESAIALEDLSGIRQTSKSSNQVFTQVGVLPAERVREL

SEQ ID NO: 17508 - protein, 343 aa, unknown
  TnpB Polypeptide
  misc_feature (35)..(36): Xaa can be any naturally occurring amino acid
LNGQANLTQRHVKLRLNVPFLRSSVFLLIAKPKKXXKKDTRSLRNILVPVEYKQSGWALSNDKRCLTFKDGFVAGKFKLIGSRDLHFYAPGEIKRIRIVRRADGYFAQFCINVERTEASITTGKAIGIDVGLNYFYTDSTGATVPNPRHLRKSEKALKRIQKRVSRKKKGSSNRKKAINRLGRKHLKVSRQRKDFAIKTALCVVKSSDFVAYENLQVKNMVKNHKLAKSISDAAWSQFAQWLQYFGKVYGKTVIAVAPQYTSQDCSACGNTVKKSLSVRTHVCGCGTVLDRDHNAALNILAKGLKARAGINLSLNTVGHTGINAWGQNDLYSLVVASTGKPTD

SEQ ID NO: 17509 - protein, 297 aa, Mycobacterium sp.
MPKFEVPDGWTVQAFRFTLDPTEDQAKALARHFGARRKAYNWTVATLKADIQAWHASGTVTAKPSLRVLRKRWNTVKDDVCVNTETGVAWWPECSKEAYADGIAGAVEAYWNWQTSRAGKRAGKRVGFPRFKRKGRDQDRVSFTTGAMRVEPDRRHLTLPVIGTVRTHENTRRIERLIKAGRARVLAISVRRNGTRLDASVRVLVQRPQQPKVVHPGSRVGVDVGVRRLATVATADGTAIEQVENPRPLGAALRELRHVCRARSRCTKGSRRYRERTTQISRLHRRVNDVRPITCTS

SEQ ID NO: 17510 - protein, 311 aa, Mycobacterium sp.
  misc_feature (253)..(284): Xaa can be any naturally occurring amino acid
MARFEVPEGWCVQAFRFTLDPTEDQARALARHFGARRKAYNWAVATLKADIEAWRVTGIGTVKPSLRVLRKRWNTVKDEVCVNAETGAVWWPECSKEAYADGIGGAVDAYWNWQNSRSGKREGKTMGFPRFKKKGRDQDRVTFTTGAMRVEPDRRHLTLPVVGTVRTHENTRRIERLIATGRARVLAISVRRNGTRLDASVRVLVQRPQQPNVAQPGSRVGVDVGVRRLATVANEAGAVLEEVPNPRPLDAAXXXXXXXXXXXXXXXXXXXXXXXXXXXXXXXXSPGQRCPHSSPACPDNTIGSNPRPHRC

SEQ ID NO: 17511 - protein, 297 aa, Mycobacterium sp.
MAKFEIPEGWMVQAFRFTLDPTAEQARALARHFGARRKAYNWTVATLKADIDAWQATGIQTAKPSLRVLRKRWNTVKNDVCVNIETGVVWWPECSKEAYADGIDGAVDAYWNWQNSRSGKRDGKRMGFPRFKKKGRDPDRVTFTTGAMRVEPDRRHLTLPVIGTVRTHENTRRVERLIAKGRSRVLAITVRRNGTRIDASVRVLVQRPQQPKVTDPGSRVGVDVGVRRLATVATADGAVLERVPNPRPLDAAPTSYGMSAGHGRAARKAHVATVSAPPKYPGCTAGSTMFAPTTCTV

SEQ ID NO: 17512 - protein, 407 aa, Azoarcus sp.
MKRLQAFKYELMPRGEQQRQMRRFAGSCRFVFNKALGLQKERYEQGEKKLGYAGLCKRLTEWRNSTETVWLAASPVHPLQQALKDLERACTNFFAKRADFPRFKKKGQSDSFRYPDPKQIKFDQGHSRIFLPKLGWLRYRNSRDVLGAVKNVTLSSSGGKWYVSIQTEREAEQSLPSATTAIGIDVGIARFATLSDGSYIAPLNSFRKHEQRLARYQRGMSRKTKFSNNWKKAKARVQRIHVRIGNCRRDFLHKATTTISQNHAMIAIEDLQVRNMSKSAVGTAERLGKNVRAKSGLNKAILDQGWAEFRRQLDYKLAWNGGHLIAVAARNTSRTCPCCGQVSADNRRTQERFACVGCGFEENADVVGALNVLRAGHARFACEVSGAVMSPAAGTHRSDSGAAQCRA

SEQ ID NO: 17513 - protein, 494 aa, Cyanobacteria sp.
LAKSKTSTFVTEIPLIVDSRQEKELLSRFQAARQLYNACLNEAMARMNLVRNGAAYQLAKQIDRKLLKARSDAFNAARREYRYSDYDIQAYATIVSNRSQWIAQLIDSNTQQTIATRAFRASEKVLLGKAKSVRYKIPSRFRSVEGKTNKQGVRWKGNQLVWGKLKLSPLIDEDNPVVQHGLNSAIKYVRLLWRDLNGKRRWYVQLINSGMPYQKPKNYVADGVIGLDLNISSIAFVGDNKAGILPFADKVPTYERDIIALQRQMQRSQRCLNPLNYETDFTSGLGRKSVVKKGKPKKGKRQWKKSKTYQKIARKKRELERRKSAYAKSLNRRIVNEILRHGKQIKTENVSVKAWQKRYGKAIRAKSPGFVQSQLARKAENAGGSFMKFSTQKTALSQTHLTGERIRKKLSERVHFDRTGFAMHRDLWSAYLGRFVNEEGVLLLHLAVEQWERSEPILHEAWKDFQTNREQLGASSHLAVSFSLGAVLGRVRKC

SEQ ID NO: 17514 - protein, 435 aa, unknown
  TnpB Polypeptide
MRRFAGSCRFVFNKALALQKQRYEAGDKRLGYAGLCKLLTQWRNSAGTAWLADAPVHPLQQTLKDLERAYGNFFAGRAGFPQFKRKGAGRQSFRYPDPEQTKLDQTNCRIFLPKLGWVRYRNSRHVMGEVRQVMLSSSGQKWFVSIQTEREVQAQHHPSGSMVGVDLGVAALATLSNGQVYAPINSYRKRQKRLAVLQRGMSRKTKFSANWKKARSMVQKLHAKVADCRLDFLHKTSNEISKSHAIIVIEDLAVQSMSRSAAGTVEQPGRSVKAKSGLNKAILDQGWSELRRQFEYKQSWRGGRVVAVPARDTSRTCPACGHVSRDNRRTQDAFSCVECGFEQNADLVGAINILRAGHARLACEVNGARNAVSSRNPPRGARPVRRPVGIPSPVAGEDVNESETKAISLREAPVDFEGNLHCWLDCSWDPIHKPA

SEQ ID NO: 17515 - protein, 486 aa, Escherichia sp.
  misc_feature (190)..(274): Xaa can be any naturally occurring amino acid
VKRLQAFKFQLRPGGQQEREMRRFAGACRFVFNRALARQNENHEVGNKYIPYGKMASWLVEWKNATETQWLKDAPSQPLQQSLKDLERAYKNFFQNRAAFPRFKKRGQNDVFRYPQGVKLDQENSRIFLPKLGWMRYRNSRQVTGVVKNVTVSQSCGKWYISIQTESEVSTPVHPSASMVGLDAGVAKLXXXXXXXXXXXXXXXXXXXXXXXXXXXXXXXXXXXXXXXXXXXXXXXXXXXXXXXXXXXXXXXXXXXXXXXXXXXXXXXXXXXXXTLSDGTVFEPVNSFQKNQKTLARLQRQLSRKVKFSNNWQKQKRKIQRLHSCIANIRRDYLHKVTTAVSKNHAMIVIEDLKVSNMSKSAAGTVSQPGRNVRAKSGLNRSILDQGWYEMRRQLEYKQLWRGGQVLAVPPAYTSQRCAYCGHTAKENRLSQSKFRCQVCGYTANADVNGARNILAAGHAVLACGEMVQSGRPLKQEPTEMIQATA

SEQ ID NO: 17516 - protein, 298 aa, Streptomyces sp.
VVKDAADRYFASFVVETEPDEMLPGTDAAVGIDLGLTHFAILSDGTKIESPRFLRRAEKKLKREQRRLSRKAKGSGNRARARVKVARAHAQVVDARREFHHQLSTKIIRENQAVAVEDLAVKGLARTRLAKSVHDAGWSAFVAMLEYKAARYGRTFHRIGRFEPTSQVCCVCGAKDGPKPLRVRFWECQECGAVLDRDINAAINVAKAAGLAVSACRAQIRPILVPAQRVEAGTRRDGQPTVVGIPGLQAGERKSSQPGDDEGGRKAVEVSHDALGVLDDIEGLLGDQVLNYARRGAE

SEQ ID NO: 17517 - protein, 368 aa, unknown
  TnpB Polypeptide
MIQRAHTIKLKPNKAQSVLLSKTAGTARFAYNWGLAKWNEMYERGEKCDQYLLSRLWTQTRPDWSKEVFSGAGFKAIMNLGGAYNAFFRGFRKHPQFHRKGQNDSFYISNDKAKLYGSKIRLPNIGRVRMMEELRYSDCKIMSYTVRRKADGWYVSICVELEEERRTESESFVGVDVGCKHLAVASDGTICDTPGKLKDLERQLKRRQRLLSRKQRGSKNRQKARQKLFRTFQRIQNIKQDTVHKFTAHIAKNHGTVCLETLDVKDMKEGSNKLIRKGVQNSCMSEILRQLKYKCNNFIEVDKYFPSSKTCSNCHSLKADLDLSERVYKCDNCHIELDRDLNAALNLRQEGLRIYTEGHSGSACREVR

SEQ ID NO: 17518 - protein, 382 aa, Sulfolobus sp.
MARRGNKAIRATVSMKIALSEPLLVLVNNYVKALRFTLFWLKENVPNPEEKGVLSKVHEALYEKLREEYNLPSKVAEDCYREALATYKGWYNNPRRGRFPRVYRPTVWLTPRASYNVDFEAMTVRIVSVGELSILGYPRNLKEYMGWKMKEARLVIRDDKAFLKVVFEKEEQKVEPKESIAVDINMAEVVVGKDDKNYVRIPTRLEEVHHWKSLAERLLKKYPRRWRENKRILYRVRSFHLKARRIMEDFARKVGKWVVDVAKRMGVNVIKLESLKNLIKSVEKLSKEFRDKLYLMQYRRLQYWISWQAKKRGMTVEFVNPSYSSVSCPKCGKRMVEVSHRWFKCSCGYENDRDVIAIMNLNGRGSLTLSTAPQMRDVNPNR

SEQ ID NO: 17519 - protein, 371 aa, Sulfolobus sp.
MAPSSGQLLGDEEREPTPTPAMPEEGVYEVKYSNRRTNVVRLLPNGFQERKLRRLANLSAKLFNEVNFERRQQFFHEGKVDFKGTWNKYYEKYKAILGVNAQAVLQKNNEAWSSFFSLLKLKKERKLPPHMNHVSPPRYWKDREAGKRKLILVVRQDRYKVDAGNHKLILKDFDMEIDFVGRLKWYGKQGRLEIIFDETKNAWYAHIPIEVGVEETGKKSKHVVKGERKSIQISKPKGNKVTSIDLGINVIASVVVNDGTWLLYKGVRTKEDYFYFQRRISEVQSLADRTRNIGEYDAYLELLREKRRFFKKLTRRLLHLYRNLASHLIETLHELGVSTIYLGYPFNIVQEKGNKFTVNMWSYRKLMVSLD

SEQ ID NO: 17520 - protein, 233 aa, Sulfolobus sp.
VVVKLTRSERIYITFVVDHEFPKLPNTGKVVAIDVGVEKLLVTSDGEYFPNLRPYEKALWKVKHLHRELSRKKFLSNNWFKAKVKLARAYEYLKNLRTDLYMKLGKWFAEHYDVVVMEGIHAKQLVGKSLRSLRRRLSDVGFGELRDVLKYQLEKYGKKLILVNPAYTSKTCARCGYVKNDLSLSDRVFVCPNCGWIADRDYNASLNILKGAGSERPLVWSSALYQYSGKVGL

SEQ ID NO: 17521 - protein, 460 aa, Sulfolobus sp.
MPSSGQLYGDEERELTPTPAIPEEGVYEVKYSNRRTNVVRLLPNGFQERKLRRLANLSAKLFNEVNFERRQQFFHEGKVNIEETYKKYYEKYKVILGVNAQAVLNKNNEAWSSFFSLLKLKKEGKLPPHMNHVSPPGYWKDREAGKRKQILVIRQDRYKVDAENHKLILKDFDMEIDFIGRLKWYGKQGRLEIIFDETRNAWYAHIPIEVGVEETKAGKKSKHVVKGERKSIQISKPKGNKVASIDLGINVIASVVVNDGTWLLYKGVRTKEDYFYFQKRIAEVQSLADRTRNIGEYDAYLELLREKRRLFKKLTRRLTHLYRNLASHLIETLYELGVSTIYLGYPFNIVQEKGNKFTVNMWSYRKLMESIELKAQEYGMKVFEVVEYNTSKYCAYHDVEVKRNPRGVINCPLGHKLHSDLNGALNILKKALGVIVNAVKKPLSFIVDHNRVAPIKGCNP

SEQ ID NO: 17522 - protein, 287 aa, Sulfolobus sp.
MPTLGFRFRAYADEQTLRALKAQLKLACKIYNTLRWADIYFYQRDGKGLTQTELRQLALDLRKQDDEYKQLYSQVVQQIADRYYEAKKRFFEGLARFPKEKKPHKHYSLVYTQSGWKILHVREIRKGKKKLITLKLSNLGTFKVIIHRDFPLDKVKRVIVKLTRSERIYITFVVDHEFPKLPNTGKEVAIDVGVEKLLVTSDGEYFPNLRPLEKALWKVKHLHRELSRKKFLSHNWFKAKVKLARAYEHLKNLRTDLYMKLGKWFAEHYDVVVMEGIHAKQLVWVSP

SEQ ID NO: 17523 - protein, 376 aa, unknown
  TnpB Polypeptide
MSSIVNKGLKVDIFPDKSMEQVLKQNMGNARFIWNNILNRYNELYQLFKSHGYPLNPNIRNLNAILKMLKQEYSFLREGESTSQQQVFRDLNKSFTNFFKGTHNYPNFKSKKNPKQSFRIQKNGNNIRITNKRIRLAKLGYIHYRTSKEYKKLLKKSKINNVTVKKENGKYYAIINITTTVKYLDKTGKEVGIDLGLKNLATLSNGQEIANLDLTHEDKIIQKYQRKLSRQKYMSQNYQKTLKKYYKWLNRKNNKIQNAYHQFSKFLVEKYDLIAMETLNIKGIFQNPKWSPKLQKIALYKLIQMIKYKAEWYGKKFIQIDPFYPSSQKCSNCEYQYTDLTLEMRNWICPKCKTTHHRDINAAKNILNEGKRIIKK

SEQ ID NO: 17524 - protein, 404 aa, unknown
  TnpB Polypeptide
MLVKGVVFRLGDELPSEARFLLEDFRLAVNNAIRAGVQARVSSRNALTKLAYKGFRQEHPRMYAQHLVSAFEVAGSVLKNHRRRVRNGIASHLPYVRRLFMKAENQAYKLDRASGVVDLPIRAGCHVRLELVLSDYHRRYLEDHSYRLGSLTVFQDRVIIAFRKDSPQPYAPEAALSLDTNERSLDGVFAKGDDIKTVKVEFPDIAMIQQRHHDRRKRLQKKKAHDRRTSRRLCRREGQREHHRIEYRLHQVANAVLSFAENRKSAVVLEDLKGIRPKWSKELNRRLSLWPRRKLHQILEYKAQWRGIPVVKVDPRNSSRTCPICGRIQDSRMGAEFVCGCGWRLDRHINASLNLLQTAISKGMAGGLRFNPGAFQHDVMMILYDPVTGARSEPNGTSCMGAVT

SEQ ID NO: 17525 - protein, 395 aa, unknown
  TnpB Polypeptide
MTDTADKSILAYRYRLYPTKAQASALAETLETCRQVYNSLLNWRKHDYEMLGKSPSKFEQQAAFPRWKKDHAELLGVFSQVLQNVAVRVDLAFDAFFRRVREGETPGFPRVKGKGQYDSITYPQAGFEFHQGKLRLSKIGDINIRLHRPIEGIIKTCTIRRINGKWFVCLSCTVGPELLPPSEEEIGIDVGIRVFAALSNGEFIENPRFFRKDEKALAKAQRKLCKQKRGSKARKKARKVVSRIHERVRNRRHDFVHQTARRLVNRYGVIAVEGLNVKNMTRRPKAKPDPENVGQYLPNGASAKAGLNKSIADASWSMFRNVLTMKAERAARLVVAINPAYTSQMCSGCGNIVKKTLNEREHRCLVCDLVMDRDTNASVNILAAVGQHSLAALAA

SEQ ID NO: 17526 - protein, 386 aa, Streptomyces sp.
VKLVVQVKLMPDAVQASAFERTLPSLNEAANWVSAVSFEAFALRGGVRELRKQCYGSLRERGLGAQAAQHLIKRVADAYTTLRANIQAGNLGPVTSKSRRKAESKPVVFRRHSAHTFDDRCLSWNYDAQTVSIWTLDGRVRNVRFACSPDALKQLVAYRRGESDLVFRDGKWFLYATIDLPDREDFEPVDWVGVDRGIVNLVTTSDGTNYQGRRVGRYRRWQARKRAELQAKRTRSAKQRLKKRAKKEARHATHLNHKISKTVVAVAQRTRRGVALEELRGIRHRVTVPRDQRARLSSWPFHQLGAFIAYKCRRNGVPFVEVDPAYTSQRCPRCGHTERANRQTRDHFHCRRCGLAGSSDHVAGVNVRNRARSAWAFVSMPGPAPA

SEQ ID NO: 17527 - protein, 151 aa, unknown
  TnpB Polypeptide
VRRLLHLYRNFAKHLIEKLHELGVSTIYLGYPFNIAQEKGNKFTSNMWSYRKLMEAIELKAQEYGIRVFEVVEYNTSKYCAYHNIEVKRKPRGVVHCPFGHKLHSDLNGALNIMRKATGKTPITIKKPLSFIVDHNKVAPTKRARKRSEIY

SEQ ID NO: 17528 - protein, 372 aa, Herpetosiphonaceae sp.
MEMIRTICCKLTLDATADAHLRATQVAFNMAATWCAAVGWQLGIANKITLHDHVYYPIRAQFALGAQLTCCARDKAVEAIKTVRQHGDTSCPPFGPTSSIRYDARSYSLLASDQVSLNTLHGRVRATLILGDFQRQALADSAWAIGGAELIRRDATWYLHVTQNQPVPVHRPIRSSIGCDLGIVNLCTTDDGTQFSGATVKRIREKRFRHRQRLQKRGTRNAKRRLKKNSRKEQRFQKDINHCMSKTLVKKAVVEQKALRLEDLTHIRQRTEATVRRSQRRQHSSWAFRQLRDYITYKAQQVGIPVILVNPRDTSRRCFVCGHIDNANRKTQAAFHCQNPSCGHIAAADVNAAKNIAFWAEVSQPIASPLRR

SEQ ID NO: 17529 - protein, 286 aa, Moorea sp.
MIVIEFKAYGKQKQYDAIDEAIKTAKFIRNKCIRYWMDNKGVKKTDLSALCAVLAKELPFANELNSMARQASAERAWSSIARFYDNCKNKIPGKKGFPRFKKHCHSVEYKTTGWKLCPDKKSIIFSDKKGIGKLKLKGTWDLWRFDKKLIKRVRIVRRADGYYVQFCIQIDINESVPATGTTIGLDVGLKDFYTDSNGNTVPNPRFYRKGEKRLKFYQRRVSRKKKGSANRKKAINRLGKAHLKISRQREEHAKRLVRSYRKKSAAFIVDRLCIKGGRFCCKAALF

SEQ ID NO: 17530 - protein, 280 aa, Moorea sp.
VIVLEFKAKGKPSQYSAIDEAIRTVKFIRNSCIRLWMDNKGTSKNDLSKYSKILAKEFPFANQLNSTARQAASERAWSSIARFYDNCKKKVPGKKGFPKFHKRGHSVEYKKSGWKLSPNKKSITFTDKKGIGKLKLKGTWDLWRFDKKQINRVRIVRRADGYYVQFCVAVKVTEELDTTGKTIGLDVGLKEFYTDSEGYSEPNPRFYRNGEKRLKFYQRRVSRKKKGSSNRRKAVNKLGRQHLKISRQREEHAKRLVRSYRKKSAAFIVGRLCTKYRTKS

SEQ ID NO: 17531 - protein, 330 aa, Moorea sp.
MRIADQYRLKPTKQQKAKIDHWLSMLCAQYNYLLADRFRWYDHNRCSINACPLVCHLPELRDNPNYYSQKKTLPNLKKTHPWYKDIHSQVLQDVVKRVKLAFDRFVKGDKNGNRSGRPRFKKQHRYRTFTYPQIKEGSLQGDLIDLPKIGKVRIVLHRPVPDGFKIKTASITIKCDGYYLVLSLEDKTVPEVKPNINPDSIVGIDVGLKEFLTTSEGETIGIPQYYRKSQKRLRVIQKRVSRRKKGSKNRLKAIKQLGRQQKKVADKRKDFHFKTANYLLSKYDLIAHEKLNVKGLAKSRLAKSVLDAGWSSFLTILASKALNAGLLAVV

SEQ ID NO: 17532 - protein, 456 aa, Moorea sp.
VKTPTKVIRTDKWKLNPSPSQKELFAETVKVYRQACKYLVGIIYTHWSELGGLTADQLTPAVERLMHQTAKRPNIKYPQFNQAFYKFPSYYRRAAISFAAGQVSSYVTRYRDWQSGNRKRKDSKPPKLNAGTGCYPALYKGQCYKLHGFDQVEIKVFDGKNWDWTKVQITGLRNRHTCGTNKIMSPSLIFNDRYCHLSVPFACKPEKRKPEGNVTAVDLGINTTATIAVVTHTGTVIHRDFVHPGRDIDRRDKRLRSVSVRASKTMGKGGKLHKGFCCLTYQKCQRINNQISHIVSKRIVEIAEKFNSVRVAWPTALAIVFENLKGWKPKGGKKRSNLRQKFHGWLKAKIRDFTEMKWTELGGKVVEVVAAYTSKLAYDGSGTVKRNSRNYSLATFLSGKCFNADLNGAYNIGARGVLKLVRRNGNEGRSSKRSRRPPRSWACLCDLWTSGSSRLA

SEQ ID NO: 17533 - protein, 397 aa, Moorea sp.
MIVLEFKVKGNKTQYTAIDDAIRTGQFVRNKCLRYWMDNKGVGQKDLYRYNTWLRAEFSFVKDLNSHACQASVERAYNSISRFYSNCNKQIPGKKGYPKFKKFSRSVEYKTSGWKLSPDAKSISFIDKKGIGKLKLKGTWDLWRYDQKLIKRVRLVRRADGYYVQFCVKVNVEEPLEPSHSNIGLDVGLKEFYTDSRGGTEPNPRFYRKGEKRLKFYQRRVSRKKKGSSNRKKAINRLGRTHLKISRQREEHAKRLAGCVIHSNDVVAYEDLRVKNLVKNHCLAKSINDAGWYQFRKWLEHFGQKFGRQTVAVNPAYTSQKCSNCGEVVKKSLSTRTHVCECGCELDRDHNAAINILKRALGTVGHTGTWVIDPNAHGESTSTLPDSGLVEQVGSLK

SEQ ID NO: 17534 - protein, 406 aa, Moorea sp.
MRTAYQYRLRLTKLQVMEIERWLDMLRHQYNYLLADRFSWYEQNRCSINSCPLICHLPELRNNPNYFSQKKTLPQLKKDRHWYKAIHANVLQDCVKKVDLAFKRFIKGDSNGKRSGKPRFKSKNRYKSLTFSAFSKNPIQGNRLNLPKFGWVKMVYHRPIPDGFRIQTATVTRKADGYYVTLSLQDDTVPEVIPIEQVSNPVGIDMGLKSFLTKSDGTEVQIPQYYRKAQKRLKKIQKAVSRSKKGSNNRKKAVVKLGKAHKKVADTRKDFHFKTAKGLLDDHDLIAHEKLNIKGLAKTKMAKSVLDAGWGQFLSILSTKAENAGLVTIAVNPRNTSQNCSNCGQKVPKELKDRIHSCPHCGYIEDRDVNAARNILNLAVGHPVTSKAYRVTEPLGGFGKKPTLNL

SEQ ID NO: 17535 - protein, 420 aa, Moorea sp.
MLTMTYEYKLEPNTEQIATIEQTLDICRSVWNFALRQRKDWCASRKSSINACSIHYEYIIPANEPFPNYHLQAKQLTEAKKVYPQLKLVHSQVLQQTLRTLDRAWDDMKARGFGFPRFKNKYRMRSFVFPQLGKNPIRNDAIKIPKLGWVKWRQSRPIPFGFEVKQARVVKKASGYFVMLSLKLNVDVPNPMPHGHPRGVDLGFDKFVATSDGEEIKRPRFLKTLQRKLKLLQRRLKNKQKGSNNRHKLNQKIARLHQQISETRKDWHFKLAHHLCDGAGMIFLEDINFVSWQRGMLSKHSVDAGFGQFVNILKWVCFRRGVYFAKVNKDGTSQICPNCGAHTGKKTLDIRFQHCFDCGYTTTRDVAASQEIRNRGVSALGHSVLENVCGLEATGSIGHDTLVGTRRSRKPNSRELGIPH

SEQ ID NO: 17536 - protein, 311 aa, Moorea sp.
MIKRWFGVSRYVFNKTVKIIQSGEVKANWKAIKTGILNDLPDWCKTVPYQIKSIAIKDACTSVREAKKKYKKTSQINRVKFRSRKNPTQSCYIPKSAVSSKGVYHTKLGALTFAEALPEKICDCRLVSNNGNYYLVVPYTTTQEKTENQGRVVALDPGVRTFLTFFSETYVGKIGQGDFSRIQRLCHHLDSLISKISKAKGKQKRRMRKAARRMVIKIQNLVNELHHKAARFFVNNFDVILLPTFETSQMSKKSKRKIRSKTVRNMLSFAHYRFKEFLKHKAIENGKIVVDVCEAYTSKTVSWTGGAARSY

SEQ ID NO: 17537 - protein, 294 aa, Moorea sp.
MIIMEFKVKVKKSQYSAIDEAIRTVKFIRNSCIRLWMDNKGTNKFDLSKYSKVLAHQFPFANELNSTARQAASERAWSSIARFYDNCKKKVPGKKGFPRFQKHCRSVEYKQSGWKLYPDKKSITFSDNKGIGKLKLKGTWDLWRFDKKQIKRVRIVKRADGYYVQFCVSVDNNEEIEPSKKTIGLDVGLKEFYTNSDGKTEPNPRFYRTGEKRLKFYQRRVSRKNKGKAVGHASRTANRKKAINRLARHHLSISRRREEHAKRLVRSYRKKSAAFIVGRLCIKGGRFCCKAALF

SEQ ID NO: 17538 - protein, 156 aa, Moorea sp.
IGKIGCGDFYRIQRLCSHLDSLLSKISKAKRKQKRRMRKAARRIIIIIQNLINELHHKAARFLVNNFDVILLPTFETSEMAKKGSRKIRSKTVRNLLSFAHYRFKEFLKHKALETGKTMVDVCEAYTSKTVSWTGELINIGGSKKIKSKIDGRSMD

SEQ ID NO: 17539 - protein, 285 aa, Moorea sp.
MIILEFKAYGKKGQYQSIDEAIRTVKFVRNSCLRLWMDNQGLNKYDLNKYCKTLAKNFSFANELNSTARQAAAERAWSSIARFFDNCKKKVPGKKGFPKFQKHCRSVEYKQSGWKISPDKKSITFTDKKGIGRLRLKGTWDLWRFEKKQIKRVRIVKRADGYYVQFGVSVDCTETLRPTGNTVGLDVGLKEFYTDSNSYAEPNPRFYRKGEKNLKFYQRRVSRKKKGSANRKKAINRLGRAHLKISRQRQEHAKRLARCVVQSNDLVAYVRAACRKARFESQEFG

SEQ ID NO: 17540 - protein, 456 aa, Moorea sp.
VKTPTKVIRTDKWQLSPTPDQKLLLGETVKVYRRACRYLVGIIYTHWSELGNLTADQLTPAVERLMHQTAKRPDIKYPQFNKTFYKFPSYYRRAAIAFAAGQVSSYVTRYREWQSGSRKRRDSKPPRLNADTGCYPALYKGQCYKLHGFDQVEIKVFDGQNWVWTMVQITGLRERHQVTTNKMMSPSLIFNDRCCHLSVPFTCKPEKRKPEANVTAVDLGINTTATVAVVTHDGTVIHRDFLHLGRDIDRRDKRLKSVSKRASKTMGRGGKLHKGFCSKTYQKCQRINNQISHVVSKRIVEIAEKFNSVRVAWPTALAIVFENLLGWKPRGGKKRSNLRQRFHGWLKAKIRSFTEMKWAELGGRVIEVVAAYTSKLAFDGSGTVKRNSQQYSKATFPSGKRFNADLNGAYNIGARGVLKLVRRNSNEGRSSKSSGRPPRSWACLCDLWTRGSSRLA

SEQ ID NO: 17541 - protein, 459 aa, Moorea sp.
MYGCQQHLITTTPDNRAIIEFICSEANKLTNCGIYYCRQLLFKAGRYLTNADLDKIMKTNHHFKAMRSACAQQTLHGVIESFKSYKALNKLYKKGQLANKPRVPNYRKKGGLAVVSYPARWVKLIKGQLKFTLGKQIKAWFGIDHFLLPMPSNIDYKAIKEYRFVPRNGCLYLEFVYERTAPEAVTQTGEVLGIDPGLNNWLTCVSTTGKSFILDGRKVKSQNQWYNKRVGAIKKGKSRDYWDEHLAFLIEKRNRQMRDNVNKAARFIVNWCLRNNVSTVVFGWNKRNKDSINIGKKNNQQFVQIPTAKLKSRIEQLCIEYGIKFVETEESYTSKASFLDRDFLPTLGGKPVREACPSGLGWKESGRRVRRGLYKSGKGELINADCNGAANILRKVSTQLEFSLAEVGRAVLNLPQRYKLDSLSRSYREALRRGATHGEFNSPMESAPSVVLTREATSA

SEQ ID NO: 17542 - protein, 518 aa, Moorea sp.
MPKEIGATKKISTQIVPVVGMTKSIELELFSIMKKLKVVRAESYNKLGSINHWGMDWKKAIPEIKSFRTPDTLGLPAKLMDWTINDCAKAITAQQAACSAAVIKKIYNRFSGKENQKTRKELCKKLKTLEFLNVPLLHRLVRKEFQRGHSWVDHQIVYQQAGYKCQRLSRNTYQLELAGLTKGKRNKVIVRSNRKIKGQIRLVYNRLLPRFEVHFLVNHGKVKAIVERRHVGVDKGYTEAFYDSDGQVHGKGLGKAITKKSDRICAKSRNRGKLWALHRKLEKIDPAKSARILENNLSRKTENRRYRKNQSELTARVGAASKSLFDGKPLKVFAVREAWPTALDLTQPFKNKRQSKAMSRQLNSWIKGVIRDSLQKWANWTGSVVIEVQPSYTSQLDSVTGTLLGKRNGDIFTRFDGVVLQADHNAAKNILDRGTDKEISRYSSRAEVQSVLLRRTARFLGGMGLSLADAVELGWLDSKHTTTQAFKKLLVEMPGTSRKTGGRLNSNCRTYHLSLGQQ

SEQ ID NO: 17543 - protein, 184 aa, Moorea sp.
SSISRFYDNCQKKVPGKKGFPKFQKHCRSVEYKQSGWKLSPDKKSITFRDNKGIGKLKLKGTWDLWRFDKKQIKRVRIVRRADGYYVQFCVSVDINEKLKPTGNTVGLDLGLKDFYTDSDANTQPNPRFYRTGEKRLKFYQRRVYRKNKGSANRRKAINKLGRAHLRISRQREEHCASNPSHVA

SEQ ID NO: 17544 - protein, 274 aa, Clostridioides sp.
  misc_feature (168)..(266): Xaa can be any naturally occurring amino acid
MYPNKKQQELIKKTFGCCRFVYNKYLAKRIDFYKNDKETFTYKQCSSDLTNLKKELKWLKEPDKFSLQNALKDLENAYDKFFKKDAGFPKFKSKKTNRFSYKTNFTNGNIMYCGQHIKLPKLGMVKIRDKQVPKGRILNATISKEPSGRYYVSLCCTDVDIEAFENTXXXXXXXXXXXXXXXXXXXXXXXXXXXXXXXXXXXXXXXXXXXXXXXXXXXXXXXXXXXXXXXXXXXXXXXXXXXXXXXXXXXXXXXXXXXXXXXXXXXSDRFRFRN

SEQ ID NO: 17545 - protein, 354 aa, Thermoplasmata sp.
MKNAREGTRWYRKLKQREPGVPDPKKRNKKISTFFDYRTGKIQRTENLDLTDWLMHISTLRKRETIDVLLNPSDWHEEQLEMADEIKSFEIVHHPERDCKYMVHITCEYEVQTVRTTHVCGVDLGIKRDLSAVLIDEAGIERFNILRTCKSERLKELDDRISHLRREEKYSVLKKLRNKRKNITEDYDRKLAKEFARSVPDSTIVFFGNPTNIRYSKYRGNGDKVGRKLLQHWSFSRIIDQCILKLKETGKVGERTNEWNSSMLHYKCGKQVERPYGNSFQRIKCSMCDDELDAEFNASINIAAKGISRHSDKSIEPDSFWQNMAGAMDELARTTDDSRLEPWMSMEAHSLGCG

SEQ ID NO: 17546 - protein, 384 aa, unknown
  TnpB Polypeptide
MLQAYEYRMYPTQTQIPLLMRHVHACRFVYNYSLEQKIRAYEQDGKRISCFDLNNRLPTLKAEYPWLADVNSQSLQYANRNLDNAFTRFFREKKGFPKFKSKKNPVQSFQVPQHYHIDFERCRVRLPKIGDIKTIVHRTFSGKMKYATVSVTSTGKWFVSILVDDELPEPGPVPFSSETTIGIDVGLTDFATVSTGEKVANPRYLKNSLQRLKVLQRRVSRKVKGSQNRQKAIRKLATCHEKIANQRNDFLHKLSFRVVCENQAIAVESLNIAGMQKNHTLARSISDVSWSTFFTMLEYKCRKYGKTLLMIGRFDPSSKICNCCGYMNRDLKLSDREWTCPDCGTVHDRDSNAAINIKKFALQEQNLVGVAGAERAEEPVDSPQ

SEQ ID NO: 17547 - protein, 417 aa, Microcoleus sp.
VLTLTYEYKANPTKEQVQLIEHTLTLCRKVWNFALRERKDWLNSRKCSVNACSIVSEYITPVDAPYPNYYEQAGALTRAKEQFPELKTVNAQALQQVLKKLETAFTDMKRKGMGFPRFKNKYRLRSFVYPQLGKGKILEGNRIKLPQLGPMEYVKSRPIPDGFKVKQVRVVRKASGYFLMLSLECNVSVPDAVASGHPRGIDLGLDKFAATSDGELVERPRFLKTLQRKLSLLQRRLKNKKKGSNNRHKLNRKIARLHQRIADTRKDWHFKLAHKLCDNAGMVFVEDIDFRVWAKGMLGKHTLDAGFGQFVSILQWVCWKRGVYFDKVNKDYTSQICPQCDTHTGKKDLSDRIHVCHNCGYTTHRDVAAAQVIRNRGLVHLSEGGRLLDVKENACGDGLAGTGNRLVKNRRSRKKKA

SEQ ID NO: 17548 - protein, 395 aa, Chlamydiae sp.
MIINRGFKFKLKPKPIDREKCYQSAGAKRYVFNRGLDQRITAFTTTGQSPSYFDQNKELTFLKEQPETSWMQDIHSQVLQQGLKDLERAFRNFFRNIKKGEKPGFPKFKKKGMRESFRYPQGVKVEGSKVFLPKIGWVDFHKSRDIQGEIKETTVTLEGEDWYVSFSCEWEIPDPQPAPINEDRAVGIDVGLSHFATCAATKENIQRKVENPRFLKKRLVRLRYLSRQLSKKVKRSKNSLKARLKLSKLHTRIKNLRNDFVQQLSAEMIKNHDILCVESLDISSLLQESSKGLSRSISDVGWRVFLHCLKYKAEECGKHIIEAGKYFPSSQLCASCWNQQEMPLSVREYHCHNCGKKSDRDYNSAIVLKAAGMSALKACGAALFRGSCEAGISRL

SEQ ID NO: 17549 - protein, 285 aa, unknown
  TnpB Polypeptide
MVDGIPHVKLPKIGYVRFILPKGKTLADIQPHGVSIKAATVSREPNGSYRISLRMESVIDKPVFPTVINAREIISVDLGLKEFGVFGNLEESIPVPNPRWIQVHAKRLRRFQQSLSRKQYDHKTHAGSKNWEKARTKVAKEQRKIADQRRDFHHKLSRAITDNCVSFICEDLAVKNMMQNRHLSKSIASVGWSQFLTMVQYKMERDGKHFRKISRWYPSSQTCGCCGYKNTDVKDLSIRKWICPKCGTWHDRDVNAQQNIYKLGVKMLQDEGIKIIDGRENRVQF

SEQ ID NO: 17550 - protein, 368 aa, unknown
  TnpB Polypeptide
MAEKAYKYRIYPNKKQKELIQKTFGCVRFVYNYYLDRRIKAYEQDKINLTYNICSKDLTQLKKELAWLKEPDKDALQKSLKDLDMAYQKFFKEHTGYPKFKSKKNRYKSYRTSFTNNNIRFENKHIKLPKLGFVKVRDKQIPQGRILNATISQEPNGHYYCSICCTDVEFIQYSKTNKNVGIDLGIVDFAIFSDGIKIENPRFYEKSEKKLAKLQRELSRKTIGSNRWNRARIKIANLQKHISNQRTDFLQKLTTKIVKDFDIICIEDLDVKSMKETDFLTRNKHVGDVSWSEFRRMLTYKTQWYGKELSVIDRYYPSSQICHCCGRKDGKKSEDIRIWMCPKCHSELDRDINAALNILNEGLRILTV

SEQ ID NO: 17551 - protein, 462 aa, Acidobacteria sp.
MLRVKKNHLRGLTKEQYRFLRLLCRRSRAIYNMAMYTTKQHYASCGEFIGNVEVWNKIKHTQCYKNIPTDLSNQTMKVVERAYRSFFGLLHKRRDGHYNRPVNEPWYQPKKGMFMLIFPIRAGRGNKALNINVPKQYQKDFSFKRLSIPRPDYTQGKELKEIRILPRLKGGYFEIEWVYEEDPQPQQLDSTRSLGIDPGVNNFATCVDSKSGRSFILDGRQLKSYNRYVNKQSAHKQSVHDKIGLKTSKNKKRLWMKRNNILNNALNQYVNVIVQYCLLNKVGNIVMGQGYMAQEGVNHGAKSNQNFVNLPFGKFCLKLKSKCEMYGITYESVEESYTSKCDHLANEPMKHHEEYLGRRVKRGLFKSSTGVVLNADVNGALGILLKSKRDVDLGQLTVSGCLTQPSRIRLADVQVGSAKSVANRLSSSRLWCAKPQPAGSSGVKEASVSERPSTTTGLPCGT

SEQ ID NO: 17552 - protein, 349 aa, Microbacterium sp.
LAQSAAHHRPARSAERRSPGVRELLLERDRNPTGRSVGRPVFQRRRARQTARFYEAGFRIRGGWQNTKRGGGRLYLSKVGTVSVNWHRPLPSHPSSVTIIKAADGTWWASFVVTVPVPAPIAPTHPDRVAGIDLGLTDLATIAYSDGTREKIAAPKHYRAAERKLARAQKKLSRAQRGSKNREKLRVEVARIHARTANLRRDHARQLISRLIRENQTISLETLRVSAMVRGRYGKSITDAGWSQFVTELEAKAATHGRTVVRADRFFPSTRLCAICNTKSGPSSTDVRQWTCTCGIHLDRDYNAATNLLVLALAPGKVERLNACGRDIRLRLAGAVSNEAGTRRNEVTS

SEQ ID NO: 17553 - protein, 413 aa, unknown
  TnpB Polypeptide
MPSFYRTQTLKIEEQPIFSEANAASGAVWNGCCYQMDMYQWQRGYPHAHRDFYFGKDCEGWIDKKLSNPLLHSQSRQAVRERYFKSWKSYAALKKSGGIQKPKPPKKRKNSMTTRWKKAAIRFVEGNRLFGKRVELSMAAGQPKIEIPLPKNFDMSKAAHIATLDLCYNYGQWTLHFSYKYETETTKTGKEVVGVDIGEIHPIVSHDGQETHIYNGRYIRSLYRYRNKVLAEFSQIISRCKRHSKRWWKLTRRKWKRIRKIDNQIKDALHKQTTKFVKYCQAKGIGTLVLGDLTGIRNTIDYGKRANQKLHQWAFGKIAELITYKAKALGIKVKVIDESYTSQTCPKCGNRKKPKNRNYTCKCGFKYHRDGVGAINIREKYLGHFGVPVVAEMGFARMTPPLGFRLQVPVASS

SEQ ID NO: 17554 - protein, 231 aa, unknown
  TnpB Polypeptide
METIEISRTIKSRIVFQNSRDVSKMVDSQEAFKQGCNFVSECMFDNNFPMNTTTLVKLLYNDLRSKFGLKSQMAQSCVRTVIARYRSIQTQLRKERVWDGYKKDNHGNEVKNYVNKDLDFLWKPIEFKRPQLDLVRNRDYSHKDDNVMSLNTIHGRVVVKPVFNGWERYFDGSWELGTAKVLKSGKHWYLHIAVTKEVEEPEFKPSHVVGIDRGLRQLLTIYDEKGKNYIC

SEQ ID NO: 17555 - protein, 188 aa, unknown
  TnpB Polypeptide
MTKREKTTFVNGKAILQKRRHYKRLRSRLQSKNTRSAKRRLEAIGQRESRWMNDVNHCLSKTLVNYYGSGTIFTLEDLTNVTFATVKKRAKRSRYEHHSWAFYDFEQKLIYKAFDKGSQVVSCDAHYTSQRCPKCGYIDAKNRNKDKHEFCCKACSYRTNDDRVAAMNIQFLGALPNSGNLRPALVKN

SEQ ID NO: 17556 - protein, 399 aa, unknown
  TnpB Polypeptide
MHLKAYKYRIYPTKEQEVLLLKTFGCCRFVWNKLVENFNDSDDSIVTEKTLKDTPEFEFLKEVSAATLQQKHRDFIEFKKQYFNKKRKIKLGRPKFKKKSGRQSFRLGDKTRFKLNQEECTIRLEKIGLMKIVLDRKIPNDVILKSATVSKTSAGKYFVSILVQQELNPMPSTGKIVGIDLGLKDLMVLSNKQVINNPKWFRENQSKLKKAQKHLSRKQKGSNRYNRQRIKVAKVHEDITNSRTYFLHNISTAIVREFDIIALEDLNVSGMLKNHKLAKSISDASWSTFVSMLEYKCDWYGKMLVKIDRFFPSSKTCSNCGHKEDKMPLNIREWTCPSCGSKHDRDLNASINILKEGWKQLTGKEITSAEYVDYGCGAEVRLNGAQHHLASALKRLENQ

SEQ ID NO: 17557 - protein, 146 aa, Enterococcus sp.
LFEAKNYQKQKRKVARLHEKVMNQRTDFLNKLSTEIIKNHDIICIEDLNVKGMLRNHKLARSISDVSWSSFVAKLQYKADWYGREIIKVDTWFPSSQICSECGHKDGKKSLDIREWTCPICHTHHDRDINASINILTEGLRIQTLA

SEQ ID NO: 17558 - protein, 472 aa, Enterococcus sp.
  misc_feature (174)..(260): Xaa can be any naturally occurring amino acid
VERLKAYKFRIYPTEEQEIFFAKTFGCVRKVYNLMLNDRKKAYEEVKNDNSKKMTFPTPAKYKKEFPFLKEVDSLALANAQLHLDKAYKNFFRDKSVGFPRFKSKKNPVQSYTTNNQNGTVALIDSKFIKVPKLKSLIRIKLHRQPKGMIKSATVSRHSSGKYYISLLCKEEIXXXXXXXXXXXXXXXXXXXXXXXXXXXXXXXXXXXXXXXXXXXXXXXXXXXXXXXXXXXXXXXXXXXXXXXXXXXXXXXXXXXXXXXCKEEISELPKTNSAIGIDLGITDFAILSDGQKIDNHKFTSKMEKKLKREQRKLSKRALLAKNKGIPLSEAKNYQKQKRKVARLHEKVMNQRTDFLNKLSTEIIKNHDIICIEDLNVKGMLRNHKLARSISDVSWSSFVAKLQYKADWYGREIIKVDTWFPSSQICSECGHKDGKKSLDIREWTCPICHTHHDRDINASINILTEGLRIQTLA

SEQ ID NO: 17559 - protein, 246 aa, Enterococcus sp.
KSLIRIKLHRQPKGMIKSATISRHSSGKYYISLLCKEEINELPKTNSAIGIDLGITDFAILSDGQKIDNNRFTSKMEKKLKREQRKLSKRALLAKNKGIPLSEAKNYQKQKRKVARLHEKVMNQRTDFLNKLSTEIIKNHDIICIEDLNVKGMLRNHKLARSISDVSWSSFVAKLQYKADWYGREIIKVDQWFPSSQICSECGHKDGKKSLDIREWTCPICHTHHDRDINASINILTEGLRIQSLA

SEQ ID NO: 17560 - protein, 365 aa, unknown
  TnpB Polypeptide
LRPHESTGRKRRRGHKARLYPSTSQEAALNDQAHAARAVWNLLHEWYTCRDGGIAKRPPIAEVDRQLRDARTNPLPNWEWLNDLPAQAMQQLLKHYLRAWDRYFRGVAGTPRFKRRKCNMSVDVPQAGKLKVKRLNRRWGRVQIPFLGQVRFRWTRPLPGASRDCPGRITGARLVHSSLGWHVCFRIEEPAVEVTPNPGPPVGIDRGVVHTLTLSDGRALDMPSLLSSGERRRMIGLERKAARQQLVRSGGSSPERLKRPMSSRHRRTTAQIAALRAREARRREDWLHKTTTELAKSHGLIAVEDLQIVNMTRSAHGTIQQPGKNVRAKAGLNRSILGMAWGNAERMLTYKCPLFGGMLVKVDPP

SEQ ID NO: 17561 - protein, 328 aa, Escherichia sp.
  misc_feature (149)..(157): Xaa can be any naturally occurring amino acid
VKRLQAFKFQLRPGGQQEREMRRFAGACRFVFNRALARQNENHEVGNKYIPYGKMASWLVEWKNATETQWLKDAPSQPLQQSLKDLERAYKNFFQNRAAFPRFKKRGQNDVFRYPQGVKLDQENSRIFLPKLGWMRYRNSRQVTGVVKXXXXXXXXXKRKIQRLHSCIANIRRDYLHKVTTAVSKNHAMIVIEDLKVSNMSKSAAGTVSQPGRNVRAKSGLNRSILDQGWYEMRRQLEYKQLWRGGQVLAVPPAYTSQRCAYCGHTAKENRLSQSKFRCQVCGYTANADVNGARNILAAGHAVLACGEMVQSGRPLKQEPTEMIQATA

SEQ ID NO: 17562 - protein, 378 aa, unknown
  TnpB Polypeptide
MANKAIKYRIYPTTEQRILFAKTFGCCRKVYNLMLSDKIDGYKATGKFPTVTPTKYKKDYPYLKEVDSLALANKQLDLQAAFRNRFSKSRKKKNGFPKFKSAKHSRKSYTTNNQKGTVAIIGNGIKLPKVGIVRAVIHREPNIGWIIKSATVSQESDGKYYISILFEYDTTVINYTVDTANSIGLDYASDGLYVDSNGNKGTNHKYYRESHDKLTKEQRRLSRKVGNKKGSTKSNNYLKQLRKVNKIHKHIANQRLDNLHKISTEIANQYDVVCVESLNMRAMSNKGFGNGKATLDNGYGMFLNMLEYKLTDRGKYLVKVDKWFPSSQICHNCGCLHPEMKDLKIRIMDCDCGYRIGRDQNAALNILQEGLRLLKQYA

SEQ ID NO: 17563 - protein, 181 aa, unknown
  TnpB Polypeptide
VNITIQKEVEIKSSYSSILSIDLGEKVIATSVVLVNQKPQFYGREVRGIRRKYAYIRKNLGKRKMLREIKRFKNKEKRIVNDILHNISKQIVEQAEQTNSIIVLGDLKGIRKSSRGKRFNRIISNMPYFKLTQYIEYKANWKGIKVIKINEKGTSHTCSRCGSKGTGHIKDYSSVKNVVTK

SEQ ID NO: 17564 - protein, 467 aa, Vulcanisaeta sp.
VPGVVPFSSGEPVGRYPTVFTIPGTESSKSSNVRTVRLRLLPNGAQERKLRRIADATAKLWNELNYARLVQYRESGRVDFKGTEHEFYHRYKCVLGVNAGQVIRLNNSAWKSYFELLKLYKQGKLPKFMGKPSPPGFWKDKVLGKRELRILVRNDRYYLEPINNGEGYLVLKDWGLKIKYAGRIKWSGRQGTLVIKLEDNRWFAYVPIEVGAKPAKSNPKGYVKGIHEKIQIDKPRGDNKAFIDVGLNNLFAVVFNHGDTAILIKGSTIKSEYYYWKREIRTYQSVRDWLRNHGFESWRKYHTFYLHAIYKQRERLRHYYRTAIRFLAETLWQMGIDEVFIGYPYMVSQNNGNEYNTNIWWFNKIINWLKDVLEEYGIKLNVVNEYGTSKQCSICNMEHEKGRVKRGLYVCELTGIKINADLNAARNIAKKVGYKTPTPKKILSFIVTTNGVKPITPKKGQQSRPQD

SEQ ID NO: 17565 - protein, 508 aa, Oscillatoriales sp.
MPPPERYSVWWREEYERIDDSGCNQNRLFVALGREEPDVVARKFLVNTLPPLSSAVIINSEFVEEMTQVITAKLKLNLDAEQKTLVSRTALAYRDALNHASVVAFDNGKISNGAKLQKVVYGDLRSLFGLGAQMACSVTRQVTATYKGLWTKVKQNVAAIKAEQTKKRYKGLDKAPSYASRTVTLNYPRDYSFKPERTVSINTLDGRIKVSYDGYDKHLLLIANCKKIGEAEIVYQRSSKTYYLMVSIELETPDIDPLTITRVSGVDVGMRYLAVETDLNNESAFYSGKQARHKANRYFKARKTLQRKGTRSAKRRLIALSGRERRFIADVNHQISKEIAKPNSLIGLENLTGIRDRTKSKSGKMASKKQRRANRNKAKWSFAELHGYIDYKANLNGSLATKVPAHYTSQSCPKCGHTSKANRPNKGLLFRCECCNHELHSDLVGARNIAMRTLLVRQDWTSTGTLSMCPDVSGNEAKAEILQRFSELRWSLDTSPHALRYSASVVGN

SEQ ID NO: 17566 - protein, 564 aa, Streptomyces sp.
MGDLMGGCSLCWVTGWVGGGAMVGAVREVAASFVVPGPSGVAVRDRLKCLTEQDERVLRAVGAYQGGMASRDLKARCADGLDHSAESWASRKRGLTGLSSSRIAGAITKASHDQWALARRCLAAHIRSLEAGIRTLRHRLSLPVGTKGTKRAAGGYRSRGEWFQKSRRLKALENRLAAAVADWRSGRVRVVRGGKRLLNTRHHLAEAGLSEGEWRQRWEAERWFLAADGESGKRYGNETIRVTPEGQVSIKLPAPLVHLANGAHGRYTLASTVGFAHREAEWADRIEANRAVAYRIHYDTGRGRWYLTASWQKPVVQTVPLDAARAGGVIGVDTNADHFAAYCLDTHGNPVGEPHRFPYDLAGTAAHRDAQVRHALTRLLHWARRTGVTAIAIEDLDFSAEKTREKHGRRKRFRQLISGMPTGKLKARLVSMAAEHGLAIIAVDPAYTSMWGGQHWQKPLTTPHRTMSRHDAAGIAIGRRALGHPIRRRTTPPSHDRSDRVRHRTVQAAPGAPGREETRPRIPGPRTRSVPPDAARTRATRAPNTVRDVRSARVWVQDSLLLTE

SEQ ID NO: 17567 - protein, 384 aa, Oscillochloris sp.
MKLRTRHMEEPTMIRAHTIRLNPTPEQESLFRQAAGTARFCYNWGLRAIKDALDQGVAVPTHRSLRDAFKQIRAAEYPWIFVVGKSAIDDAFVNLGRAIKNFVDSRTGRRKGKKVGFPSFKTRRRGYGSFYVANDRLTVDGHTLTVQKVGALNMTESLRFVGKILGATIRYRAGWWWISIQVEVDHTPPTHTGPAIGVDLGIKSLAVTSDGEVVENQKHLTSALRTVKRLQRSVSRKVKGSANRRKAVLKLAKAHFKVACQRNDVLHKLTTTLVRQASLIGIEDLNVAGIVKNHKLAQAISDVGFAEFRRQLEYKAPAVGSRVVAIGRFFASSKTCNCCGQVNANLTLAMREWDCPNPDCRAHLDRDLNAAWNIRDEAVRLAGA

SEQ ID NO: 17568 - protein, 396 aa, Escherichia sp.
VKRLQAFKFQLRPGGQQEREMRRFAGACRFVFNRALALQNENHEAGNKYIPYGKMASWLVEWKNATETQWLKDAPSQPLQQSLKELERAYKNFFRKRAAFPRFKKRGQNDAFRYPQGVKLDQENSRGWMRYLNSRQVTGVVKNVTVSQSCGKWYISIQTESEVSTPVHPSASMVGLDAGVAKLATLSDGTVFEPVNSFQKNQKKLARLQRQLSRKVKFSNNWQKQKRKIQRLHSCTANIRRDYLHKVTTTVSKNHAMIVIEDLKVSNMSKSAAGTVSQPGRNVRAKSGLNRSILDQGWYEMRRQLEYKQLWRGGQVLAVPPAYTSQRCACCGHTAKENRLSQSKFRCQVCGYTANADVNGARNILAAGHAVLACGEMVQSGRSLKQEPTEMIQATA

SEQ ID NO: 17569 - protein, 511 aa, unknown
  TnpB Polypeptide
VNSQTTSWKLLQSLQQDTTEVESIKKARVPKKIKIDELLTSEVKDNKQILRARKFRIKFLDKRTISFLRLCFEAYDCFYNLTVKEINKRYNDRKQEFINSLTCINNSCKNNKSENSWHCKEHLNNIIHWKLNISTIELRNVIPIDKDTMLKIDCLKKFINIPYDLKNEAIEHAVIAYKTNVSSVINGSKKHFELKEKEIKQAFENKQFELPFDFLDIKDSYINICKNGILAEYRESIEFERKEHKRKKELITNNWCQLSLTKKSMKVINEQYTKDKCFIKIYKSKDNKYYLIMTKNNKKETYENKRHIVSLDPGVRTFQTCYDPSGLIVEAGTIIKTKLETIIKQIDKHEVIINDKLNKSKRRKNYKKKKIKKYKKIINIVDNMHNQLSSYLTKNYNNILVPQLPVKKLVRKWDKKNDEPTLVKRVINSITSRIMNYLSFDKFLTKLKSLCSLRNTKLFIVDEIYTSKTCGCCGYIKSDLGSSKTYKCNDCKIEIDRDYNGSRNILLKHLI

SEQ ID NO: 17570 - protein, 388 aa, unknown
  TnpB Polypeptide
MLVRTIKLRLRPDAHQETLLMEARQAVTDSFNQVCSLGWKQQMFNGVTLHKATYQTHRQLFNLPSQLAISARMKATEALLSARDRQRKGKKVSCPHSECCPVRYDQRSYSVWFERSEVSLLTLQGRVRLSFRVAPYYAQYTVWSTDSAELMRDRKGRWWLHVVVSTPPKEVTAQQEPEQLVGVDLGIVSPAVDSRGWSYGAEHWKDVQARNFKLRRELQSKGTRSAKRKLKRIAGRERRFRRDCDHVLSKRLVQSMAAGETLVFEDLTHIRGRVKACRAQRRRLHSWSFAQLQDFVKYKAEAVGIQVALVDPRYTSQTCSQCQYVSRSNRPEQAVFKCRQCGFKCHADYNAALNIRANHLKSKGLPVNQPIVAIQEITPFELVTSSGL

SEQ ID NO: 17571 - protein, 380 aa, unknown
  TnpB Polypeptide
MTFACVDYINKFLLDFLMQRTISLELPKHKELCETIHSYNYIANLHICESLCTKTVSKVKLHHSLYSKIRNDFPEFPSALIQCARDNAVEMLKGNDSNSFTRKRLDSSIRFDLRTCKVFLASGELQLTTIAGRKKYKIKVPDYFNKYFSWKVKAVTLGIENKNLKLKVIVEGKTTKQCIYHEVLGIDLGLKEFAVLSDGHFASSTEINRVKRKYAHNRKILQSKGTRSTKKKLKSLSGRERRFMLGYNHLLTKKIASLPYGAFALEDLKGIRNGKKGKVFNRKRNSWAYFQFRKMLKYKAENQGKQVILVDPKFTSQECNFCGHIDKENRKGSFFHCKECGFQCHADLNASKNISLRGYKIFYGQAVVNQPYISNYEIKR

SEQ ID NO: 17572 - protein, 289 aa, Actinocorallia sp.
VGGRLEEVEHALGHGPVDAGRLEQQQARDAGVRTVSIWTVCSRLRGIAFQCSPAQLKMLTEHRRGESDLVLRGGNWYLYATCDVPEPEQFDPAAFLGVDLGIVNIATTSDGDRHAGRHLNQVRHKNRRLRARLQKKGTKSAKRLLRKLSGREARFAADTNHRITKQLVTEAQRTCRGIALEDLGGIRDRVRLRKPQRVTLHSWSFAQLGGFVPYKATLAGVPVVFVDPRHTSQECSRCHHISRSNRPDQSTFLCTSCGFAEHADANAGRTIAQRGGVVWAVSHAADDAA

SEQ ID NO: 17573 - protein, 351 aa, unknown
  TnpB Polypeptide
MPTITLKLELYKPTKVKQEMYERMTRMNTEFANWLLHHPELNQATSKIFKEFSSQRFPSAVAGQTIREVKFQKKKQKAKKFRTFWCCFNNQNLKVEKKGAFYTVSFPTLERRIGVPVVARPYQEAWLNRLLDGTVKQGAAKLYKKRKKWYLAIAITFEVGPRHETKVMGVDLGLRYIAVASVGTKSLFFKGNQCAFVRRRYAALRRKLGKAKKLNAIRKIGDKESRWMKEMNHKISRQIVNFALTNGVGIIRMEDLTDIRNRAKSKKEAGRNLHSWAFYQLQQMIKYKAEMAGIRFELVRPDYTSQTCRCGHRDRANRNGIHFKCKKCGYAIHADLNGAINIAKAISGLAS

SEQ ID NO: 17574 - protein, 184 aa, Acinetobacter sp.
VKFSNNWQKAKARIQRIHSRIGNARRDFLHKTSTAISQNHAMVCIEDLQVRNMSKSAAGTPEQPGRNVRAKSGLNKSILDQGWFEFRRQLDYKLAWNGGWLVAVPPKNTSRTCPCCAHVSADNRQTQERFECIECGFEGNADVVGAINVLRAGHARLACEVSDAVGSPAAGTHRSDSDQAHCRV

SEQ ID NO: 17575 - protein, 457 aa, unknown
  TnpB Polypeptide
MARKIKKGVIRIIMSKQKEYLWDILKVNKDFKCSDIDSAYNKIENKTSEVTLAWKILRDEYYSEVYKKYLDIDIVVKAGFIIDKLQDMDYYNLNLLTTPVSKLIDKEKQKNVVLLSTGGFDPIHDGHIYMMEFAKEALENEIAYCRIVRKPFKNGYEYFVQIVLRGVPPLKPNHMPNFNGGNTAFDMGTSVVNAIGQEDGLMEPLAPKTVKECNKAIILLSRQLDRIRRLNNPNNYNEDGTCKKGHHKWVKTKNYYKTLFALKNMYRLKSIYIREHQARLQNKILSYGGNFATEDINFTSWMRRSKKPTEQTDKEIEVTNKKGEKKKVKKCKKKKRFGKTLNNNSPGKFVRDFAKKLEYFGLELEIINTKEFKASQINHDTGEYEKIPLSQRTKIVAGHKVQRDLYSAFAMANRKDLETIDRQKCIDNFEKFLEIQERIINNLKARGDDLPACMGIK

SEQ ID NO: 17576 - protein, 411 aa, unknown
  TnpB Polypeptide
MKNEILKAYKFRIYPTDDQQEKLNQTFGCVRVVWNQLVENFNSYGSSSFNPKMSEKTIKEDSRFPWLKDVSAAALQQKRMDFSETKRQFFNKRRKVRLGRMSFKKKQGRQSYRLPNQKFKLDQNSSTIRLEKIGHVHAAIDRDIPEDADYRSVTISKTPTGKFFVSILVKINVDLLPMTGKSVGIDLGLKDLFTLSNGDVVSNPRWYRKSQAKLAREQKHLSRKQKGSKRYEKQRIKVARVHERISNQRKHFLHCMTTTLVRGFDVIATEDLNVTGLKKGNLAKSVSDVGWSEFVRQLEYKSKWYGKSFVKIDRFYPSSQICSSCGHRDGKKDLSVREWSCSSCEVHHDRDLNAAKNILFKGYSDLTGQPLNEVSAELVDYKRGEDIRLGEKIDAHLATSVKRLDKSTNLS

SEQ ID NO: 17577 - protein, 257 aa, unknown
  TnpB Polypeptide
MVKAIKVMLIPNNVQKTKMFQYAGASRFAYNWALAREKENYEKGGRFIPDAELRKEFTKLRHSDEYAWLLSISNNVTKQAIKDACTAYKNFFKGLQKFPRFKSRKRSMPKFYQDNVKIRFSNTHVKFEGFSSGRKANKQKMNWVRLAEHGRIPTDAKYMNPRISFDGLNWWISVCVELPDCRETLNGDGVGIDLGIKDLAVCSDAVKYKNINKSQKVKKLEKQKRRLQRSISRSYEKNKRGESYCKTNNVIKKKNFY

SEQ ID NO: 17578 - protein, 438 aa, Bacterium sp.
MRVRQAFRFELDPNRGQRQALARHVGAARWAYNWGLALCLKALEEGRKIPSAMELHKAWNRWKRENAPWWQEVSKCAPQEALRDLERAFRGWRAGRAGLPRFKRKKAAADNKARLTGVIRVEDERHVRLPRIGRVRTKERTTKLRRLLEEGRARVLSATVSREADRWYVSLTCEVERPDPAPVEGDVVGVDVGLKDFAVLSDGERIPAPRPLERALRLLRRRARQLARKRRETRVVKDEAAGRERVITVCSRNYEKAALRLARLYRRIRNIRMDFLHQVTTRLAKTKSVVVVEDLAVGAFMQNGRVSRSVADVGWGTFRRLLGYKTRWYGSRLVEAPRRFPSTRMCSRCGWVRREPLPLHERTFRCGACGMTADRDLNAALNLQSYGLAVLNGPTGSSPGSHACGDRLCGGTGPTPVYEHPVGEAGSGRSSMEPARVK

SEQ ID NO: 17579 - protein, 379 aa, unknown
  TnpB Polypeptide
MIKTYKIRLYPTNEQEASMWKHIGACRYIWNWMLAKQQESYEAGGKYLSAFSMINLLKPLKNDGEHEWLYEISNASCQIICRDLDKAYKEFFAKRHGFPKFKSRKRAKTVFPTRADAVRFKDASHIKLEKFKFVKCRIDNRLDPDGLYKFSNPRISYINGKWILTVGIESENQAPELTDKSMGIDLGVKDSAIVAYGDEKLVFPNINKSRKVRLLKQKMKHLQRTISRKYEANKVGNKFVKTNNIERCEEQLRRLYARLSNIRTNYIHQSTHKLVSLLPYRVVMENLNVSGMMKNKHLSRAIQEQCFYEWIRQMKYKCEWNGIEFAQADRFYPSSKTCSRCGCIKHDLKLSDRIFICSECGLEIDRDYQAALNLSRYAA

SEQ ID NO: 17580 - protein, 646 aa, unknown
  TnpB Polypeptide
LWETNRWTTSAGPPGPSATSTPSGSGPSRSSQSGCPFSTSSRVPGLISSFLASGLSAIRPLPRACSADDGFGRHAAPISSNVLLTPPRAPTQLRSSRTLVPWPGGSQLPVDPCVEVRNHAHPCHVEPAMACADRLDALCELVFDKADSRLPFQQDVEDTMAGRRRFVVPAGWVARGFRFEVEPTNPEQRSRIAQQFGGRRFAHNWALAQVKANLDARQADPGVPLLAWNAFQLRKQWNQAKDQVAPWWRACSKEAYASGIADLVQGLHNRSDAKHGRRTGRQVGFPRFKGRHRDRGRVRFTTGAMRLEPDRRHLVLPVVGLLRCKENTRRLQRLVVKGRARILSMTLSEQGRHGGRLVVSVQAIICQPSATPSEPDACCGIDLGIGREWAVIAHSDDTIQPIAHPAPWAAVHQQRRRVARQRSRRIVGSRAYRQANAKLAALDRRAVNLRAHQLHTLTTQLARRYGIIVVEDLDVAAMARGMGRRSFRRGVAQAGIGKVRPLLTYKCPQEGGRLVVADRWFASSKTHHGCGGYRADLRLGERVWHCPRCGGLVDRNANAALNLRDWTGPVADVGDRDVQRGGVAAPVPLVGDHGGQAHAAAWACEALEDHREVAGATDTRTKPRRWQPGGGTPSRGTSQEALKNAP

SEQ ID NO: 17581 - protein, 441 aa, unknown
  TnpB Polypeptide
MQITSSYGVEIKKQNIPIRHTLRIYRSAVSYLIQVYAESWEELSQIDNIQKRFNAAEHLVHETKKNRAKYDFDLRFPRLPSYLRRSAIQHALGSVSSYETRLGLWERGKLTGKPKLVCENHAMPVFYRDVMYKAADEQEDAAYLKLYDGRDWKWFRVNLFHTDMEYLRKNWAGKKASAPTLEKRHHRYFLRFSYTEEISLSKTDVKEQTICSVDLGINTDAVCTILRADGTVLGRKFINFSSDKDRLYHVLGRIRRFQREHGSRQVQSRWAYAKRLNTELARRIAAAVTAYALENRADVIVFEYLEMSGRISGNKKQKLHLWRKRDIQKLCEHQAHRKGIRISRVSARNTSRLAYDGSGAVVRDPENHSLCTFQTGKRYHCDLSAAYNIGARYFIRELLKPFSETERSSLEAKVPSVKRRTSCVYADLRLLHAELEKCRIA

SEQ ID NO: 17582 - protein, 366 aa, Methanosphaera sp.
MMGVVYRLYPSDSQEVLINQTFGCCRKVWNYFLDGRIFMYDQLGIDYGYVECCRVLSEYKTHYTYLRDVDSTALQREVKYLDEAFKAFFDKRGGFPHYKSKKDDKKSYTSVNNGNTIRFYGDEIRLPKVGWVKAKNKLHPEGRILSATITREHTGNYYVSVVYTDVTVERLPASENVIGLDVGIKNTVVMSDNTVFNQSPRIIKLQNHIIFLQKKLSRQKKDSNNYKKTKIKISKTYKRIHNIINDEYDKLSTRLIRENQVIVIESLNIEGMMKNHNLARQIQTKSWNSLFNKLQYKADRYGRTLIRIDAWYPSSKLCHNCHYENKELTLNDRTWTCPKCKTVHDRDYNAALNIKEEGLRIYNENF

SEQ ID NO: 17583 - protein, 370 aa, Methanosphaera sp.
MYKSFVVRIYPDEVQESFFINQFGCCRFVFNTFLDAKKTLYSDSGKYLSFYDCSAMLTELKKSKTWLKRVDSQALIESLKNLENAFDRFFKHLSKYPRYKSKYNPVQSYKTNNINNNIRIMDKWIRLPKVGWIRFRTHQKISGKIQSVTVKQKASGKYFVSILCKDVTRNVFKSNDRSCGIDLGISRFVTINTGEIIHFPQQNKIIQLDKKIRRFQRKLSKKEIGSKNCNKIKKKIALAYEKRHNILDYHFYKIAQRLTEKYHVISMETLNINGMLKNSRLSRSIQEKSWHMFIRILEQKAYEHGRKLIHIDQWYPSSKTCNNCKYHKEDLTLNNRTWTCPHCGNRHDRDINAAKNIHQEGLKIINQIQY

SEQ ID NO: 17584 - protein, 460 aa, Methanosphaera sp.
MSDDCVLLTQSVLIRGLTMKQYNVLVDISLKLNYLRNCAVEKTPFVKSTDKKHFKKINFKSIISKVKEEFKMEYSFIQAQLANAAIKKHVESFNSYVELKNKKIDGEYDQKVNPPKKHKNYRLHNIIIPKESITSSKKKLREGFIELPLSRNYKKLLESKNCRPRIKIPENIRDKKIIQVEIIPINNGKMFKANFTYEAEKEPLDLDKDKIMGIDPGVNNFATIVTTEGPPCIVDGRKLKNQIYFKCKKTAHYQSILNKQGRKTSNRIRKINQKFKNIQDNFLNQTVNFIIKKCKEQDVGTIVLGYNNNFQHKTNMGKKQNQIFSHIAFKQFKQKLETRCQIHEIDLIIQEESYTSLSSFLDEDILPEYQEKKDAKNKGDKKKKDKKKKDKKKEDKKKEDKVKYEFKGNRTKRGLYETQNGKIINADVNAAANIIRKCKHRFNFELLCKWVQTTPSKIKL

SEQ ID NO: 17585 - protein, 405 aa, unknown
  TnpB Polypeptide
MQNIWCPLNCFLDLTCVEKSFIIPIMIRAHKIRLVPTVRQRIMLARTAGTTRYVYNWGLAEWNKQYEAHKADSTLARPNHLILSRQWTVERPEWSREVNRGSQTQSLKNLGTAFGNFFKGHAKHPVFKKKGGKQTFYVDNTKASIKGNHISLPKIGKVKMREPLRFEGVVRSYTVSHIAGQWSASVQVEMPEQVCTLNHSVVGVDVGINRIAVASDGSECLNPRALRKAQKKLRRKQRRLARQCKGSTRRKKTKLAISKTHLKISNVRSDIIHKFTSGLSKNHGKAVIETLSIEDMKGDKYMNRLLQDTAMREVHRQLEYKMETIKAPKYFPSSKRCSCCGHVKIVLPCSVRMYKCHKCNSLIDRDLNASYNLRNMPWVTGFMHGKGAPAPMHREVEPATCSHTI

SEQ ID NO: 17586 - protein, 448 aa, Moorea sp.
MAIFRQTFRIYPNKTATSKMFYARKLHQLLYNAGIADRRYEWKVNKKSIGYFDQQNCLPDFKKCWPEYKELYSTSLQATLKRVDLAYNRFFQGLAGIPKYKPIRKYSGWTYPSKAGWKVNTDGKHGTLTLNDLGLTIKMRGQAKFWGTPTTLTITYKPSLNAWYASITVKAETPLTKYGSESDLTYKKIIAYDLGTETAITAFNGSEFEEIANQRFTKTLEPKVKAAGKEKRRKQAPNFKKGILASKRWKKANKKESQLKRKVGLARKDWQHKVTSDLSSRYDIGVTEKLNTKGMTRKAKKGSKRKKQKAGLNKAILDVGFGTINKMLTYKIELKGGIVLQLPTRQLKPSQRCPKCGKVHKEWAELSNRYHSCDACGFELDRDKTSAMVMFKAANGNQPGYGTDLEKRGFSSSTSKTSKHTGSMKQLGKMKRQKSRSSDGSADTPSWP

SEQ ID NO: 17587 - protein, 655 aa, Nocardia sp.
VSSKPVLAEGETTRTATARVPIRLGVDDTTGEIIDRAVLTDRIGWCVDLVSDMAIRLVVEHWNADDLGLLGSGQDSAGDKLPSNAWMALRRLGWTVNPAVKVNDRIVRMAQEQAGRTLRSACWRAALTSAILSSWPDDPHHRTGAEWDAVRAAAPGGKYLPSNVVKGRTRQIARFAAGHGRRPVDVFELEPAPRTARMLLLSAVDQQQASIERSAIEPDKAGLRLQLPLRPDPRTYKDWAWVALPIILPATVPAHAILHLPTLRLVNGTVRADLSFTQTVPIAHRSGHTVALGVDWGLNTLLSAGAVRLDDKGVITALGAGGQYRAAGILAKQHRLRRLGETLHTKHDHYTRLIAGRADHPLAVKQATLAAEIGHVANRRSNLNGALAASAARWTVDQAIATSATVIYLEDLRSLEATGMGRTLNTLLSQQVRGAIGNHIRHLAAEVGIAVVTVPARGTSKHCPLCLTPLRHSKAPDRPTVAGWKWALCPNPDCRWQGDRDQGAWRRIAARGLAHQSKTVTDRATGAMTIRAIDAAMEATAILTTPTTAVDRSKTGPTVSRSSCPAPRRRGAPSPARPHGRTGQRPEGHAPTGRTLPRAAHRNQDVSTISTPTDRHTPRGAALGAGFHLHTHATPPRWEPIPPIPHPRDHTGSLN

SEQ ID NO: 17588 - protein, 353 aa, Nocardia sp.
VSEYLLSDEVSGVPQGSPVIQAYRFALDPTPAQERALRSHCGAQRVAYNWGLATVKANWEQREAELTYGIPEAARTQPLNWSAYALRKLWNPRKDEVAPWWSENSKESYASGLANLAVALANWSASKRGTRSGATVCFPRFKSKRSPLSCRFTTGGFGLAGARRRHVRLPSIGVVRTHESTRKLVRRIQRGVARLRSVTVVFRGGRWFASFSVENLRSDAPARWPDLAVGVDLGISHLAVLSRSVRGISDADGAVSNGRRLERELRTLRRLERQAGRRIGADRRTRHPGSARWRRTRARIDRLHRRAANARRNDAHKLTSALAARFGVIVIEDLNIVGMLRNRRLARVISDAG

SEQ ID NO: 17589 - protein, 103 aa, Lachnospiraceae sp.
MSELYVDSNGTHADYPHFFRKSQEKLAREQRRLSHCEKGSNRYMKQKKKIARLHAHIARQRKDYLHKESRKITNFYDLLCIESLNMKEMSQDSRFRKSVHDNG

SEQ ID NO: 17590 - protein, 353 aa, unknown
  TnpB Polypeptide
MKYTKTLKVRVRDKHRPLLNQMARSVNFVWNYVNELSRRSIKERGVFLSTYDIQKYTQGAHKELGPHSHTVQKVGAEYVTRRKQFKKNRLNWRKSGGTRRSLGWIPINTGMAKWKNGQIYYNGHYFKVWDSYDLALYTFKSASFNEDARGRWYFNVVVEVEVDVPAGQDKIGIDLGLKETATCSDGTKLEAGRFYRDLESKLAVAQRARKKKRTKNIHAKIANQRKDALHKFSRTLVNRAGAIYVGSVKSSSLAKTKMAKSVLDAGWAMLKTMLEYKCDSAGIVFKEVNESYTTQACSCCGCISDSSPKGRSGLRIREWTCSECGVTHDRDMNAAKNILAVGHGRPVEGIPVL

SEQ ID NO: 17591 - protein, 366 aa, unknown
  TnpB Polypeptide
MRAYKFRIYPTKLQDTEMRGHLWIAKELWNDLLEHTKNMYRDYGMFPTRNTLQLMVKNAGLFSQTQQEIAHRINDATKRFVKLRKEGKNAGFPRFKTFDRMKSLHYPQAGFSLDDKLKVAPFGEIKIVRHRPMEGTIKTLTLKRESSGKWYAIFTAEEPTMPPRTNDGPEVGIDLGLKCFVRLSNDERVTNPRHFKKYQDKLASAQRKMSSKKKGSKNWNETKKTVAIIHEKIQNARNDFLHKTSTKLVNEYSLIAIEKLNVQDMMGDGLGKSIGDAGWARFATLLSYKAENAGSKIVFVDAAGTTATCHRCGHVQDMPLEKRFYDCPDCGLTMDRDLNAAKNILARATLGYGGSNAPGDGADVPS

SEQ ID NO: 17592 - protein, 423 aa, Lachnospiraceae sp.
VEILNLKKLLDRTLKLSRSAVGWLYPVIDGEWEILSGIRAEKYRFNTAEKLIHTTKKNCAKYAFDVVYPKMPSYLRRAVLQHVIGAVSSAHTQSGKSGKPSVPSRNHYMPVFYKDNMYRKEEERVFLKLYDGKDWTWHEARLKKTDLDYIRKHWTGVKAKSPVLVKKHRKYFLQFAFEQGVELTGKEAQGQRICSADLGINTDAVCSIMTADGTVAARKFISFPAEKDRLYHVLNRVRKKQRKHGPQSVGSFWAYARRLNEESARKTAGAIMEFARENKADVIVFEHLDMKGRKIRGKNRQKLHMWKKQEVQKIVEHQAHRLGMRISRVCAWKTSALAYDGSGKVTRDPENHSLAVFRNGKQYNCDLSASYNIGARYFIRELLKPVPATERSVLEAKVPAVQRRASCVYADLLKLREQMAEVV

SEQ ID NO: 17593 - protein, 320 aa, Okeania sp.
MVEKAYKFRFYPTSEQENLLRRTLGCVRLIYNKALAARTQAWYERQERVGYAQTSAMLTNWKKQEELKFLTEVSCVPLQQGLRHLQTAFTNFFSKRARYPNFKKKRNGGSAEFTKSAFKWKDGQVYLAKCADPLAIRWSRQLPPGCVPSTITVKLDPSSRWSLCLRINDTRDLKLKPTKKQVGIDLGITNLLTTSDGETFANPKNINKLHKKLRLAGKSLKRKTKGSNNYQKARLKLARIHAKIKDSRLDYTHKLTTQLIRENQTIVVEDLAVKSMVKKRCDPATTPVASGRTPRRRQSQGNADQERERRPREGTRTKRP

SEQ ID NO: 17594 - protein, 213 aa, Okeania sp.
MKSFKTKLKLNNQQKTILAKHAGVARHAYNWGLATCIKEYEETKKRPSAITLHKRLVAEVKSINPWYYEVSKCAPQQALRDLERAFKNFLTIPERGFPVFKKKGRKDSFYLEGSINILQGNYIQLPRIGIVKTYEILPSVQVKNVRIASFRGASLTKKADSWYISFKYDIETAPTEKIGETIGVDIGINTLATCSDGSKFANVKAYRKAKKKD

SEQ ID NO: 17595 - protein, 280 aa, unknown
  TnpB Polypeptide
MKATALPLPALTLRNVPFDCFGSPGEKQATVDLGEIHLAAVTTNTEQALIVTGRGIRSLKRQRNKQLGQLAKKQSRCKKYSHRWKKLQRAKNKACKRSERRVRDQRHKATRQVINFCVSNEVGTLFIGNPHGVRSRDTGRHHNQRMALWEYGKDIDYLTHKAKQAHISCFTGSERGTSSQCPCCGQKQKPKGRVWRCKACGFTGHRDLVGSVNMHRLAYGTQVMFPRSFTYLRPGLSRSSRRADTPQCCLSKSRVQPRIADTVSSDIGHPSDLTQKPVRL

SEQ ID NO: 17596 - protein, 387 aa, unknown
  TnpB Polypeptide
MRTFEYRLRPTKTQEQALMSVLIASRKMYNACLEELINHYKETGKYLHLYEQDKRHGKESHPDLPAVVVDTTLKRLHRSFTNFFRGLKEGRSIGFPRFKKAHAWNTIQFRDATNCLDNGRFKAPGQCGGRIRVIVHRPLEGTFKFARLVLRPSGWYLQCVCETEPAPLSQKVNSVGLDMGLHYLVADSSGHIIENPKHAKKSAKKLARAQRKLARCKKGSHRRKKAQHHVARHHERMANQRKDTLHKAARHYVDGYQVIAIEDLQVANMVRNHGLAFAITDASWGMFRHYLEAKAESAGRQVIAVRPHYTSQKCSSCGKSVEKSLSVRTHVCSFCGYIADRDENAARNILQRGLQVMARTGPSSSRREGPEPSGESPSALKREAAGL

SEQ ID NO: 17597 - protein, 336 aa, unknown
  TnpB Polypeptide
MLAKKTIKAKILKLREGKKKLLEEEFQNYQKYLRGYKNVKLYSATRQQAERFLWRLRKQNGGEIDKTKEYPLILRNDVYDIHKGDTKLTPYWIRIPVAGKRGGINCPIASSPIPEGSKIREAKITRRGEDWYVYITIQKNVEERQKNSVLAVDMGIRNIATTVNSSNPRPKFYGKDLRETRGHFYNLRKVLQKKNAYGAIKKIGNHERRTVDSILHTISKRIVEEADRNNSMIVLGDLKGIRSNHKGRPFNRRLNSFPFYRLVQFITYKASWLGIPVIKIKEAYTSQLCHNCGERGLRVGGRFFCSNCKHEYNADYNGAYNIMKRAWAISPWQGLL

SEQ ID NO: 17598 - protein, 402 aa, Halomonas sp.
MQRLQAFKYELMPNGEQVRKMRQFAGMARFVFNLGLALQKERYEAGEKKLGYAALCKKLTGWRNSADTPWLKDGPTHPLQQSLKDLERAYTNFFAKRADFPRFKKKGQRDSFRYPDPKQIRLDQGNGRLFLPKLGWLRFRQSREVLGAVKNVTVSQSGGRWFISIQTEREVEVPAPSGGAVGIDMGVARFATLSDGSYLAPLNSFKTHQVALHKAQRALSRKTKFSNNGKKAKARIQRIQARIANARRDYLHKASATISQNHALVVLEDLQVGNMSRSAKGSVEQPGRNIRAKSGLNRAILDQGWFEFRRQLDYKLAWRGAHLVVVPPRNTSRTCTECGHVAAENRGSQARFACVECGFKANADLVGAINVLRAGHARLACEVSGAVRPPAAGTHRSDSGKP

SEQ ID NO: 17599 - protein, 450 aa, unknown
  TnpB Polypeptide
MKIYKKISTFSTILGTKHNESVISYFEKTVFKYSAMKRHALHVIRNNPEIKENFLNRYLQDKYGVTTRTANSCLKEVKGIVNSAVALLSLNIEKIENRIKDKRKNLETKRKQMAKIHSGRKTDTKKLRKLKFQIYNICNSINRLEQKKETFKNRIDKKKPNICLGTKKLFKRNKDKFIAQRDSQISYVGRKEEKSRNQMFQFSYDRKYNYYTFKIRKDFGKWKSDRSSERYVEGRCHFKYMSKELRKVIEDKSSPVTVSIIRKNGRYYLHVSITSQYTSETICTRKEYGTIGIDFNKGMLAIAETDQSGNLKNIFQRKFYFGKGGKTKAQLSKILSDICKYAIDKGKDIIIEDLKSFKKKKAKTNKAKTEHGREYNDMLHKLPYSTYSQLIEDMCFKRRISLIKINPYNTSKIARQKFCKRMSLNIHSGAAYVIARRGMKIKDTYVKKVS

SEQ ID NO: 17600 - protein, 404 aa, unknown
  TnpB Polypeptide
MKKCIVLNNLELTPKKQSILNNFFKEYRRVLNLTWLQLPIACCSTELHHFTYSNIRKTSFLPSDIIEEARKDIWSTKTVSKSFSIRLNKRWFRFVKSKRGNPIFKITYSPRKSFNIPVKLDNQWQRLDSFISDDWSFKHISLLKDGRIAVLLEKEFSKQEINQRYALGIDIGSSTLAAVSIFDIKTSKVVRQLYFGRDIAMRQRRFEIRRAKLKSLADKGSSRAKKSLINFRHKQFNFVKTRSGQIAKEIVNLAKSYNAYISIEKLKNLRAIKGKINKAGRKKINRIPYNKFIDFLKSNSKMFQIPLYEVDAYHTSKWCSNCGAINNGHQSKNYALYRCNKCGLIVNSDRKASLAVAIKSVLERSTHSLTLSSVQISKTRVSVNALLRSNDVVLVDAVHFKSSN

SEQ ID NO: 17601 - protein, 557 aa, Geobacillus sp.
MKKAYFSRRLYKSKMDILPVAETSYALELFNCAKRFAFQTLVREKRWGRKLHQESLHIAVKKKYGLNDYFANSAVREANALFSSLMELNKIHVQQTEEKIKDVKKKLKTERTKLTTLRKIKESCIKGNLRFPKNTNFVLHKSGIISLALKNRSLIWMNSYLFEHRYLDVKMKRTRAKIGRLTHRLDRLEQKKMKLKEHIPSAVFGGKKLFKQQFTKEELIKDHEAWRKLFLTARNKEMIISGRKDAGSGNFVFHYNPATNELHMTSIGGRVVIFPRVVFPYGQEIVNKAVTDQIRCKNKKEYGKPISWSIEDHGEYYIIKCLVDVESNPYIHFSTSDGVIGVDCNYNHIAWTNVSKDGNFLESEKLTFSIEGKTSGQITKILEAEAIALVDIAVRKKKPIVLEKLDTTLSKVGNKYGNKKVNRMKSMFAYRKMIQAIKSRADKMGVAVIEVNPAFTSVSGKLKYMRKFGISIHQAAAFTIGRRGLGYKEKTPKVLKKYVPKDASHHWKHWSILGKKFSVRTHTLYYIFNVNQPYQGIDVFHPSLLEEEKRQLIKTLA

SEQ ID NO: 17602 - protein, 365 aa, unknown
  TnpB Polypeptide
MQKGIKFRAYPNKAQKNLINQTFGCCRLVYNKGLAMRSDSYKNGIKVGYYQTCDMLTALKQQDEFSFLKKTDSIALQQSLRDLDKGYKNFFAKRAKYPKFKSKHDNRQSYRTINQHNNIRIVGKYIKLPKLGYMKIKQSMEIGHINNVTIKRTSTDKYFVILNVDFDPQPIANAGGSIGIDVGIKEFYTDSNNRKVPNPKFLEKSMEKLIRAHRSLSRKQLGSNNRNKQRIKLARIYEKITNQRNDFLQKQSTILIRENQTICIEDLNITDMIHNHKLARSIASVSWSHFFVMLKYKGEWYGNKIISVPTIYPSSQTCSCCGYKNPLVKNLNVRIWECPECHTKHDRDINASVNILRKGLEIIYA

SEQ ID NO: 17603 - protein, 542 aa, unknown
  TnpB Polypeptide
MPGRLRATAAPFVVASPAGARIRTRLRVSAVDQAVLRQVGEYLGRLAGRDLAARCRLGRGDDERARRKRTLTAACSSRWAGAITRTSQDQWWRAYHNLLDQRAGLQRGIRRIRMRLAAPVGGRAGRVRGYASRAERLEKQRRLHQLTARLESVEVHIAQGRVSVVRGGRRLLRTRQHLGEAGLTEPQWRRCWEAARWFVTADGEADKPLGNETIRVHPEEGWLELKLPLPLAHLANRPHGRYRLSCPVRFSYRAEAWAAQTASGAVRYDVLYRPERDRWYLDASWTHPRRPVPSLAELASIPRVAVDLNARHLDCTVLDPSGNPVGHPRTIPLELDDRCSTTRDGRLRATISQLIALAKTHGCQVIAVENLDFAEARAEGREMLGRGQRGKRLRRTVAGIPTGRFRDRLTQMCANQGLWVVAVDPAYTSRWGRQHWQVPLQHSTPTTSVTVHHAAAVVIGRRSLGHRARRRSGVPPTHRRMGVGESYRPGRPRSRVGAGPDPPGRRPGSPTWGARPAAATGAGLGSRWPRTVRGHPSAADGG

SEQ ID NO: 17604 - protein, 430 aa, unknown
  TnpB Polypeptide
MKLTKTLKFKLEDLTSHEEYVLNQTQRQFRKSVNFYLHQVGRKKSTNVTDYKKEYKKARDTFQLNSALIQQSKRFAINQFKSYKENEKNDRFPHFTSFVDVRYDNRTISFIDEKEGTSELEVSLATTQNRVEATLQGGEYCFEEFQAGKFQDARLFRQDGEYYLNVHIQREPEIQNASESEHYIGVDLGVNNLATIAVQNRNGEIVETKFFDGSYVSEKKRRFNAKRREYMRKGLWSKLQETKGKEKRFIKDINHKISKYIKDLCEKYEDSTVVMEKLGGIRENMNFGSKQNRRLHNWSFAQLQEFIIYKAHEAGSSYRRVPPYDTSQVCGSCFGDISRNTRNYSIGACETCKKEVMNVDLNAAVNIVQRFWYYIIQDRFEDTVSETELREFSSEGSKIELYQGSFDGKADTAAIDLENQLVSSLSLSLP

SEQ ID NO: 17605 - protein, 411 aa, unknown
  TnpB Polypeptide
VSKCKNNQTKKPKPEGTDILVEKFPVYLTPEQIALARTLQREAAKVWNATCTVHRMVYSRHHCWLSEGAIKAFVKGKYGIHSQSAQAVVETYFEACERTRQLHEKGHTDWRYPHRRKRFFTVTWKSLGITHEGQILTLKNGRGREPLIIINLPKRLSNAVIKQVQLVWHRNQYWLHVTVEKPALKKVQGNVNAAIDPGEVHAVTITDGKEALVISGRLLRSLHRLRNKALRKFQKAISRTKKGSSRRRKLLAAKYRFLNNIERKIEHTMHTISAIIANWCLDRNVKTVYIGSPEGVRKNNCGRKHNQRMSQWAFGKLRELLEYKLKRHGIKLIPVDERGTSGTCPACGEYSRQVGRIYRCSKCGFTGPHRDVVGASGILDKSVNGKFTKGRKLPEKVEYMRPKVVTPKKAA

SEQ ID NO: 17606 - protein, 383 aa, Aphanothece sp.
MGNKAYKFRIYPNPEQQAFLAKCFGCSRFVYNHFLRVTTDVYAESKKHFRYKEWANLLVQLKKEFDWLSEVNSQSLQQILKDLESAFTRFFKKLGKFPRFKRRSNKQSFRVPQHFSITEDNKLKIPKMAPIKMVIHRKVEGTTKSVTISKTPSGKYFASILTEQNIPKAPLNGEKIGLDLGLKYFAITSKPEKFPNTRYLQKSLRRLKIRQRRLSRKVKGSNNRNKARLTVAKVHEKVALQRLDYQHKISLKLTCENQAISCEDLNIKGMVKNRKLAKQISDVAWGQFLSLLEYKGELYGCEIRRVDRFFPSSKRCFSCGYIKEDLTLKDREWDCPECSTHHDRDINACHNLLAFSESKILSEGQKSTPKNAVEMQCISSVTN

SEQ ID NO: 17607 - protein, 460 aa, unknown
  TnpB Polypeptide
MKITCAFQYELYVDETRRAALSRNAGCRRFVFNKALGIQNERKSKGEKLLTYKELAHELVLWKKQPETAFLREAMSQPLQQALLDLDRAISDSFRPKSDPAHKGWPKFKAKDIGDGFRIPQFAPEHIDDANGRVKLPKIGWIRYRRTRPIAFECADGMLVPGVVKQIHVRKDCGHWFVIFTVEFEVKVPDMKALDVGIDVGVVHAVATSDGRFYDLDTAKIRSIEKRIAGLKRKLSLNQESRKKLAKLGLAEPFDKKQPSCKRRRLKEKLQKLYRKIRCIRQDFNRKTAHALAQEYGCVYVEDLKVKNMTASVKGTVENPGKNVKQKSGLNRAILRTGFYSLRQAIEWQLLKVGGVVIPVDPRGTSITCPHCQTRDKRNRPTQAIFKCVNESCGFKANADVVGALNVLRKGRTGPSAHNKKHIAHVVSIGEQGFRPEDSMPSMGTALEPRDRVVQGIPAL

SEQ ID NO: 17608 - protein, 373 aa, Lactobacillus sp.
MKKVLDDLCDYRRYCWNQGLALWNDMYDESVIMNDKKLRPNARKVRDELVANKEDWQYQLSSRCLQLAIFDLGVAWKNYLNQTLPDWGKPQFKYKKSNKQGFKTDNARLVGRALFLDKPRSINADNWFPIRIKGLKRIEGKLKLTSVTRKGNKYWASLTFEVKSIRQKRKTKSSTAIDLNVGHINYTDGKINTLPKKLQRLYGRIKHYQQCLSKKRIVNGKLATQSNNYVKTKAKLQRDYDKVANIQHDIVQKFTTKLVTDYDKIVIEDLDVKKMQMSHVASKGMHRSMFGYFREVLKYKCDWYGKEIILADQYYPSTQRCSSCGYIKTGEEKVCLNGNKKHRTKHNEYICYECGAIKDRDENAVMNLLALAE

SEQ ID NO: 17609 - protein, 335 aa, Enterococcus sp.
MLKAFKFRIYPTPAQKQWLIQTFGCVRFTYNHLLKARQAHYAETKEIDYTLTPAVLKKQFPFLKETDSLALANAQLNLDRAFRNYFKGRTSLPKLKNKKSIWQSYTTNNQKGTIYLEDKYLKLPKLKEKIRIHVHRPLEGTIRSATISSRYNEVFYVSLLCDVSPKPLVASNRWIGVAYDPHALIETSTPIDLVVPKFNRINQKIFQAKRKLAVKGKAAQKRKIHVEKAKNYQKQKRKIKDLYLKQKYQREDYLEQISGALVRNFDYLFIESRPKSCEESDFSTQLWDKLITKIRYKAQWYNKNLLLIDMNEQKQQVTNKKSHHLEKIGVEVVFK

SEQ ID NO: 17610 - protein, 324 aa, unknown
  TnpB Polypeptide
VNSQSLQFSLRCLDTAYVNFFRGTVKFPRFKSRKKKNTFTVPQFAKLENKTLYIPKFKEGIKINVHREVKGEIGKCTFSKTPTGKYFVSILSEEQYIPKEKTGKVCGIDLGLKDFAITSDGIKFKNNKYTKQYERKLAKAQKHLSRKTKGSGSFEKQRRKTALIHEKITNSRMDNLHKVSHQLVSDYDIIALEDLDVKGMVKNHKLAKHISDASWGTFVRLLEYKADWNDKEVVKINRWYPSSKTCCECGWINQDLNLSIREWTCKNGHKLDRDLNAAKNILNEGLKIYRQELAITKVERKLDVSNNAHSMKPEAHPIASGVGG

SEQ ID NO: 17611 - protein, 279 aa, Oscillatoriales sp.
VLAKPLWKGLILPLLGSTTTARKLFPERKVIRLSRKTVAQLSIKSAAGNSQKLGSKSSADNNVDTTPAGKTVGLDVGLKEFYTDSDGHVEPNPKFYRKSEKQLKFRQRRVSRKKKGSANRKKAINRLGRVHLKISRQREEHAKKLARCVIQSNDLVAYENLRIKNLVKNHCLAKSINDAGWYQFRKWLEYFGVKFGRVTVAVNPAYTSQKCSNCGAIVKKSLSVRTHACECGFVMDRDWNAAINILKLALSTVGHTGTWVLNPNALGDSTSTLTLRNPV

SEQ ID NO: 17612 - protein, 386 aa, unknown
  TnpB Polypeptide
MNIDVLIKTVVCKLKCSKEEYNKLMDTLRAFRDACNYISEIAWEKKCFNPVALHHFTYYDVKEKFKLTANLTVRARDRVAKSYKTDRKKLHKFQKLSMDLDKRVFRLLRNGDFRASISTIYGRVKVKLDIGDYQRELLKNPVRDAKLVFRRDDKKLYLHISVLINAPEPKGNKPVGVDIGINNIIYASNGFKVNGKPIEYRRQHFRELRRSLQKRGTSSAKRKLKQLSGRERRWITTILHQISRAFVNTLKEGDYVVMEKLDGIRDSTKHRKGYNATFHSWAFNRLQQMIEYKCLERGIPVVYIDPANTSRKCPRCGTIDRRNRNGNRFRCVNCGFQHNADYVASVNLSRVELARSGWAAVNQPYAGVDDFLHETTCKPPISMGGS

SEQ ID NO: 17613 - protein, 285 aa, unknown
  TnpB Polypeptide
MTAVGRAFRIPQRVKIDGERVYCPKVGWIRLRLSQPVTVPTKSATFKRDACGDWFVTLIAERGVDVQIALPVNAVGVDLGLKTFATFSGDVPGIPVPQFFRKAERALRKVQRVFSRRKKGSTRRAKAKLRVSRVHRKTARQRSDFLHKTTTALVAQHDLICIEDLSVKGLAKTKLGKSILDAAFGEFRRQLEYKATWSGKIVSVIGRFFPSSKLHRPCGTIKANLTLADREWTCEGCGAHIDRDKNAAENILAEGLNLVAAGQTDTQNAHGASVRLAKREQLVMK

SEQ ID NO: 17614 - protein, 285 aa, unknown; identical to SEQ ID NO: 17613
  TnpB Polypeptide

SEQ ID NO: 17615 - protein, 442 aa, Blautia sp.
MKIISSYGVELRKQNIPIRQTLEIYRSTVRYLVKVYESVWEELAQIEESKKRFNAAEHLVHTTKRNPARFDFDFCFPKIPSYFRRAAVQHALGSVSSYQTRLEQWKAEGQKTGNPYLKSEQYAMPVFYHDVMYRENTEEKDAAFLKLYDGHDWKWFAVRLKHTDMEYLRKHWSGKKASAPTLEKKHDKYFLRFTYAEEVSLSRTPVKEQTICSVDLGINTDAVCTIMRPDGTILGRKFINFPSDKDRMYRVLGRIRRFQREHGSRQAQGRWAYAKRLNTELGRKIAREIVLYASEKKADVIVFEYLEMKGKLSGKKKQKLQMWRKRDIQKRCGQQAHRKEIRISRICAWNTSRLAFDGSGEIARDIRDHRLCTFQTGKRYNCDLSASYNIGARYFIREILKPLPETERSLLEAKVPAVKRRTSCVYADLRELISEMELRKAA

SEQ ID NO: 17616 - protein, 251 aa, unknown
  TnpB Polypeptide
VQNVRAVWNGDEWELHFVCKVSLEMNDSAGDGVAGIDLGIKNIATIAFPDEYVLYPGNSLKQDKHYFKRAEYDTEGENGPSEKSRWARRKLTEREAHFYHVLSDTIITECVERGVGTLAVSWPENVRESDWGKTGNKKLHTWAFDRIYQYLKYKGEERGLEVLKENEWDTSKTCSKCGDDTKSNRVERGLYVCSSCELVANADCNGAENMRQKITPSPHGKDRSNGCVAQPSTYLFDRESGMFRTREQAVS

SEQ ID NO: 17617 - protein, 503 aa, unknown
  TnpB Polypeptide
MFITLRFKVIPQSKEDYEEISKLMRLYGSAVRYAYNRFLENRSKNEVYHLVRKTFKDLPSWYVESAIGEALEILESVKSRGENPRKVVFGSKELFVKLCIHHLQGWRLEEVKRKWNEKRKGRLVSIGHAENGGNPNIKLLLKDDETYLSITSTRRRKPIKAKVKRKVKSKRDKWSILIGMILEGKKFPYTIELRKENGEIYGYVTFQIPIPEVKITKDNGVIGIDINARPFHLAIAEIGKDGNLISYTRIKLEYLRNFSKNRKEYEEWLVAHKVVSIAKEKNKAIVIEDINNLPKGKRGDGRRKLRKILSKFSYNRILEKIERLCKLNGIEIIKVNPAWTSVQGKLKYSPQLNIDKDIAGAYVIARRGLGFKERVPKNYKKLLNDKKFMEYLKESLKQRQKQLEEKLKAETNIYKQNPIKEDLDKLKKHLALLKSLQSEPEGLPGAYGRNSGNHKNLWQVLEVALTTLLPERRCLSPLKPILIQGTWEKVVSGLGPLCLGGPG

SEQ ID NO: 17618 - protein, 310 aa, unknown
  TnpB Polypeptide
VIKKQAFKFLLEPNKSQLFDFLLFAGSCRFVYNKGLALLNENYRSGKKFMGYNQLASELVEWKNEDSLSWLKEAPSQCLQQSLRDLDRAFRNFFTGKSQYPKFKKKGRHDSFRIPCQRVRLDQEKKLVSLPKVGWVKYRKSREIIGDLKNVTISMKQGKWYISFNTEHTVPDPIHPSDVKTTIVLNNECDVHLSFVVGRDYTHQAEEKKKLIRLHKTLTRRNKYSKNWLKTKRKIDSIKSKSARSRLDNIHKATTAICKKHAVVEVVSLMDSVSDKNDITLKMRYEFVRQLIYKQEWLGGEVIRREIKPL

SEQ ID NO: 17619 - protein, 367 aa, Lyngbya sp.
VAFADACNWINGNVNSNLTNRNSIQAICYSDVKSQFGLTANHVVRACARVAANRLTAKRKRRKVREFKPTSFDCDARTFRIIEEGYLVSLSTTEKRIKVPMRVSNYHIGKLQGRPSTSAQVCKHRDGNFYIHIQLKSDAPKLKKSKNVIGVDFGRRDIAVTSTGNSWSGKDISSIRDKYFRTRTSLQKKASQGTRSTRRRAREILKRLSGGEKRYQSWLNHNISSSIIREAIATDSIVAVEDLTGIRERTNQKPRNKTERRRSNSWAFYQLRAFLEYKGIKEGVKVIAIPPSYTSQTCQKCLHIGTRNNKSFKCENCGNNCDADYNGAKMIELWGCSVNQPRGSELLSCDINSRATESLHLPYRKCR

SEQ ID NO: 17620 - protein, 381 aa, unknown
  TnpB Polypeptide
MKAHRTLLIRLPRDKCDVDYIRRLIALANLAYRGYEVWVPDLPKSIQYQLYNFKDFKTSLIFGTAPKRWFARTWVPLKTLRVYADGSMKGDKSAPVVLDFRSSVIRLRQVCRSEPGFVVEVPMPRWVVERVGEGGDVRFAMIGLKDNEPYLALVAERVVEPYVPSGYRLIVDVNAWKYGIAWGLIKNGKLITWRTEGPGTFLINTLYHQAVDRERKAGKLRRLGYGDTAVVNRVRKQAFTRRSRIYRVTRDKAYFLASKLVRKALRYRALLVIDDVTEESRRELLEEKLPPDVVKLLMSNLKRFVHQLETLAQWYGVPHEFKRLPSTICPICQHELTQEEGRTMVCKNCGFKAPRDKVPMHWAIRIEGMRIQSYYELKTSP

SEQ ID NO: 17621 - protein, 375 aa, unknown
  TnpB Polypeptide
VAEYAYKFALYPSMEQEIKLNKNFGCVRWVYNACLDKRKSYYEETGKTFNRFDCQKLVTQLRHDPDYFWLKEADSTALQQAVHHLDDAYQRFFAHLSNYPKFKKKCNRQSYTTINNKGAIKIFDDGIKLPKIGKVKCKVTRTIEGRILSATISKETTGKYFVSVLCTEVDIEPLEKTNQVCGIDMGQHTYCTFDNGNKIDNPKFLTQSLLKTKRTNKNLSRKKKGSANYEKARKKKAKIEAKITAQRLDFQYKLSKQIVSDYDIICIENLNANEMTDRKSKKHRRKANNRSKADRAYSQFQRMIEYKSELYGKELIKVDRYYPSSQLCSNCGYQNPLLKDLSVRKWECPECGQIHDRDINAAINILNEGLRLRSL

SEQ ID NO: 17622 - protein, 401 aa, unknown
  TnpB Polypeptide
MIGMKLVLKIKLLVDEQTEQALKQTLAAYHSACCYLSDYAFHNHVFSRHNLQKACYYEVKHRFSLPAQLVIRAIAEVSSAYKAHRVLVQEHNRNNPSEDRRDLAHIVFRPDLAVVYDERVLSYTRNEQNLSLTTVCGRIKLAFQVGEKRKALLPYIKGQADLKRYGKKWFLLQTLEVPEGHEQEPQNCLGVDLGIRTLASWHDGKKNHRHYGNHARAVRKHYSSVRRSLQHRNTKSSRRRVKAIGQKEARTIRNINHQLSRRIVEHAQRTNSQIVLEDLSSLKDRAKDRVFKSLRYEQMSWTYGQLQAFILYKSRLAGVKVIFVPSAYTSKTCSQCFYCSDQNRYGTWFTCQGCGSCCHADENAAINIRFLGAESTRQKRVVGMQDFLHTDGREPLALALR

SEQ ID NO: 17623 - protein, 359 aa, unknown
  TnpB Polypeptide
MLLTLKIKLLADSEQHSQLLETMRVFNEACSFISQLGFEKKIFNKVKLQKECYYEVRDKFKLSAQFVIRAISKVTESYKSNKKSLHTFKPTGAIIYDQRLLSYKGLEHASILTMDGRILVPMVFGEYQKGVIDGRRIRGQADLVSLDGVFYILVVVELPDNSPTDTKDFLGIDLGIKNIAVDSDGEEFSGAKVNSLRNRHAKLRTKLQKKGTKSAKRLLKKRSKKERRFATDTNHCISKKLVAKAQDTGRGIALEDLKGIRERVTVRRAQRRQHNSWSFYQLRQFIQYKAALASVLVVAVDPRNTSRTCPCCGHISKSNRPTRDKFCCQSCGYAGPADSIAAVNIGRRAVVMQPDVGTA

SEQ ID NO: 17624 - protein, 402 aa, Shigella sp.
VKRLQAFKFQLRPGGQQEREMRRFAGACRFVFNRAQALQNENHEAGNKYIPYGKMASWLVEWKNATETQWLKDSPSQPLQQSLKDLERAYKNFFQKRAAFPRFKKRGQNAAFRYPQDVKLDQENSRIFLPKLGWMRYRNSRQVTGVVKNVTVSQSCGTWYISIQTESEVSTPVHPSASMIGLDAGVAKLATLSDGTVFEPVNSFQKNQKTLARLQRQLSRKVKFSNNWQKQKRKIQRLHSCIANIRRDYLHKVTTTVSKNHAMIVIEDLKVSNMSKSAAGTVSQPGRNVRAKSGLNRSILDQGWYEMRRQLEYKQLWSGGQVLAVPPAYTSQRCACCGHTAKENRLSQSKFRCQVCGYTANADVNGARNILAAGHAVLACGEMVQSGRSLKQEPTEMIQATA

SEQ ID NO: 17625 - protein, 367 aa, unknown
  TnpB Polypeptide
LIRTFRYPLHPTSAQEVVLTSWLSSCCMLYNGALEERREAWRKQQVSITYYVQQKELTELRTTYPEWTIVPVWVARSALVRLDRAMKSFFRRVKQGQTPGFPRFRSCDRYDTFDLGSNPARVDGEYVRLPKIGLVKLHKYREMRGEVRHVSVSRTVRGWSISFVCDLGAAPKKIPVSNSVGVDVGLEAFATLSNGERIINPKFFRTSEDTLARRQASLARKKRGSNGRLAAKRLVARIHERVRNQRLDFARKLAVALFDRFDLIVHEDLTISCMAHGNLAKSIYDASWGVFLRCLALKAEEAGRHVIAVDPRGTSQTCPVCGTVAAKPLEQREHRCACGFVAHRDHAAALCVLGRGLRLGLLTEAEK

SEQ ID NO: 17626 - protein, 505 aa, Bacillus sp.
  misc_feature (341)..(374): Xaa can be any naturally occurring amino acid
MSVGVSLRFLYNEGIIQESEVQPMLVNKSYKFRIYPNKRQEILIAKTIGCSRFVFNRFLALWNDTYKETGKGLTYHSCSAELTQLKKQEDTLWLQEVDSIALQSTLKNLSDAFARFFKKQNDLPRFKSKQNKIQSYTTKQTNGNIAVIDNRIKLPKLGLVKFAKSREVKGRMLSATVRRNPSGKYIVSLLVETDVQELPKTGSSVGIDVGLKDFAILSNGNTYKNPKFFRTLEKKLAEAQRILSRRIKGSSNWNKQRVKVVRIHEHITNARKDYLDKISTELIKNHDVIGIEDLQVSNMLKNGKLAKTISEVSWSQFRNMLEYKARWYGKQVVVVSKTFAXXXXXXXXXXXXXXXXXXXXXXXXXXXXXXXXXXEKVEELITAAVTIKKDYERLQNTDLVKENKELNNQVDSLYDSLKESQKINLVLREENRKLNTEIGSLKTHIRDLQINIKVLYQQTKKVFKEQFKALRELVKNELVGKGVDNQFEREHKREMRRHQNFDRER

SEQ ID NO: 17627 - protein, 512 aa, Sulfobacillus sp.
LRVIPTQEDTLQTRFEAARQLYNALLGEALKRLRLLQQSRAYQTARRLARTQPKQRAAAFARARQAVGFTEFALSQYATAIHQSWIGDHVDAVIGQTLTKRAFQAVNRMALAQAKKVRFKGQRGLHQISSLEGKSNAAGLRWRNDALHWGDLILPMVPHADRDPVIAYGLAHRIKYVRLVRRTINGRFRWFAQLVCEGLPMRKIDPKTGQFRHPYGSDIVGLDIGPSTIAIVGETRADLRQFAEEVVHDHAEIRRLQRHLDRQRRANNPDCYDAQGRVIKGKRPTNTSRQQQFTENRLQELSRRETAHRKTLHGQLANQVMAQGTTIKTEKLSYKAFQKRFGRSISVRAPKLFLSILTRKAESAGGQVIEFNTRTTALSQTCLCGQKHKKRLSERIHTCGCGVTMQRDLFSAYLARFVEDDALQVARATEPWPGAEPLLRTAWQRATTNQPASGRPLPSSFGRYPSGPSQSGSSEKENLPEHKAADVVTSARPLGVPEEGQVEARAAESVKV

SEQ ID NO: 17628 - protein, 402 aa, unknown
  TnpB Polypeptide
MRAYKFRIYPSKKQEEQMRQHLWLAKNLWNEMLEHSKQTYRDFGYFPTRNTLQLIVKDYGLYSQTQQEVAHRVYNAVMRVFKLRKKGVECGFPRFKSIERMKSLHYPQYETGFWLDKKLKVTPFGEIAIKRHREIKGKIKTLTLKREASGKWFAVFCVDTPKEIPKQNKGEAVGIDLGLKTFATLSNSLKIGNPRHLMKHEDRLAFIQRKFSKKKKGSKSRKRAKVRIARLHEKVADTRKDFLHKTSTHLVNDYSFIASERLASQKMSEQDYGKQINDAGWSMFANMLAYKAEGAGCTVVFVDPKNTTQECSSCHQIVRKDLTERMHNCPFCGLSMDRDINAARNILIRATEGHSGSNACNSLMERDVAVATSMKQEARTLQGWEHVTSGCSSAPARQSSCL

SEQ ID NO: 17629 - protein, 384 aa, unknown
  TnpB Polypeptide
MRAYKFRIHPSKKQEKEMQSHLWLSKELWNEMLAFTKEIYNNYQKFPTKKTLRELVKNSGLFSQVGQELVDRLVDSLHRKIEMKKNGEKGGFPRFKSIDRMKSLHYPQYECGFWLDKKLKVTPFGEIAIKRHREIKGRIKTLIVKRESSGKWFAVFTAEEERLLPKENKGGVVGIDLGLKTFATLSNNLKIGNPRHLMKHEDRLAFIQRKFSRKKKGSKSRKRAKIRIARLHERVADTRKDFLHKTSTQLLNDYSLIALEKLASKEMAEQNYGKQINDAGWNMFANFLAYKAEGAGCRVVFVDPRNTSKMCSRCGNIRNDLTLWDRAYNCPECGLSTDRDLNAARNILTKATPGQGGSNACNSLLHEERDVAVATSMKQEAHTL

SEQ ID NO: 17630 - protein, 429 aa, Pleurocapsa sp.
MIVIEYKIKAKQHQYLAIDEAILTGQFVRNKALRYWLDNKEVNKYDLNKYCRVIAKKYGFANELNSTARQSSAERAWSAISRFFDNCKKQIKGKKGFPKFKKHSRSVEYKQSGWKLDETTKKHITFTDKKGISRLKLVGSRDIYFYQPEEIKRVRLIRRADGYYCQFCISIEVKENVEPTGKAIGLDVGLKYFYADSTGHTEANPRFYRQGEKRLNKLNRRKSRKFRKGQKQSKNYHKARNRYARLHLRISRKREEHAKRLARTVCTSNDCIVYEDLQVKNLVRNSRLSKSISDAGWTQFRRWVEYFGWKMGKITIAVPPQYTSQDCPACGKRVKKSLSTRTHVCSCGYTEDRDVAASLNILKKGLCTVGHTGIYGSPADGFPSAGNCRYATGDLPSWSVGVNLLANGESVNVESPTKMKDETIVESII

SEQ ID NO: 17631 - protein, 422 aa, Fervidicola sp.
LTIVWAKGGGGRLPLITLKAQIHADPQTEAILKDAMFCATKVYNGLLWHLRKEYEETGKVNISQKNLNRILKELPRAKGYYSMSVQLTRDEVREAYKSFFALKKKGLAQYKAPGFRRKSYLSPLKYVQSGFKVEGDKVTLSLGTRREDGVRQVSFCISHRPDVEYERVRELSIAYDKVSGRIEARLVVEVKARENNGTGKAAVDLGETILMACTFDDGTVMLYSGRLIKAVRRYWQKVRAKLKQNSRRWKQIAHREKKQVEHLLHMATSHFIAECVQRGVKEIAIGDLNGIRGSIDYGDRLNQRLHAWPYRKLINMLKYKGTLVGILVRDDIDEKSTSITCHACGKVMPSNRRHRGLYVCSCGWKAQADVNSALNIYERVYQVSPVKGSSGRVARPAVVSFLLEWHGVVEPKRKHKFLRASA

SEQ ID NO: 17632 - protein, 458 aa, unknown
  TnpB Polypeptide
MYREVKTIRLESRRLTRSKLASISSVLDAFNASVNFLIQQAVRNPAFQKISRGGMRYFAYPFPKVRKTFYCAWKARFRPLHTHYCHSAARIASEIRTSWSTWQRKARAVVDCPVYKKRRARLEAVLCRFDGRNIILVTGPRQHIFVPMAMYQHALKIITMFGIENCGEITISLDERARKLVAYLPFSRDVEATEPCSFVPIDINERSIDHAVVTENALGLGSIDTSEVSTVHYTYSLKRRRIQESIDTSTPYRVKKRKELLAKYGRRERNKTKELLHGVTTRMVAAIEPERPVVVMENLGDIRKASSRQKNLRPWQPLKTRGARRRLNRWNFGMFQQLVTCKVNATGNAVVKVSARNTSRKCIKCGKNTTCRSATFTCQQCGFSMNRHLLAAINILDKYLVDIDKIKSKHQDVASAVPAESDRMKSVAGAFRERVESIGGDRKNVITRVDMLLKVMAF

SEQ ID NO: 17633 - protein, 241 aa, Microcoleus sp.
LPIRWSRELPKGATPTTITVKLSRAGRWTVSLLVDVEIEPLPKCSQEIGVDLGVTSLVALSDGEKIANPKGFNAKRRKLKKAQKALSRKQKGSNNRHKARLKVAKVHQEIADARKDFIHKLTIRLVRENQTIAVEDLAVKNMVKNRKLALSITDASWGELVRQLEYKCDWYGRTLVKIDRWFPSSKRCGKCGHIVEKLPLNIREWDCPNCGAHHDRDINAAQNILAAFSCGESLWSERKTG

SEQ ID NO: 17634 - protein, 460 aa, Escherichia sp.
  misc_feature (382)..(411): Xaa can be any naturally occurring amino acid
VKRLQAFKFQLRPGGQQEHEMRRFAGACRFVFNRALALQNENHEAGNKYIPYGKMASWLVEWKNATGTQWLKDSPSQPLQQSLKDLERAYKNFFQKRAAFPRFKKRGQNDAFRYPQGVKLYQENSRIFLPKLGWMRYRNSRQVTGVVKNVTVSQSCGKWYISIQTESEVSTPVHPSASMVGLDAGVAKLATLSDGTVFEPVNSFQKNQKTLARLQRQLSRKVEFSNNWQKQKRKIQRLHSRIANIRRDYLHKVTTTVSKKHAMIVIEDLKVSNMSKSAAGTVSQPGRNVRAKSGLNRSVLDQGWYEMRRQLEYKQLWRGGQVLAVPPAYTSQRCACCGHTAKENRLSQSQFRCQVCGYTANADVNGARNILAAGHAVLACGXXXXXXXXXXXXXXXXXXXXXXXXXXXXXXQVCGYTANADVNGARNILAAGHAVLACGGMVQSGRPLKQEPTEMIQATA

SEQ ID NO: 17635 - protein, 208 aa, unknown
  TnpB Polypeptide
LLTLTNNIGLKPIVVNGKIIKSINQYYNKKKAKLQSVLKKVNNKNWSNSLDKLTRKRNNKINFLMHCMSKFTINYCLKNNIATIVVGNNKKWKQEVKMGRKNNQNFVDIPYEKYINQLTYKGQMVGINVIITEESYTSKASFLDEDDIMYNNIFSGDRIRRGLYQSKNGILINADCNGSYNIIRKVFSNAFSNGIEGVHLHPVRINVY

SEQ ID NO: 17636 - protein, 357 aa, unknown
  TnpB Polypeptide
MILTYKYRIKDGTVGKHLDRHSRACNFVWNYCCQIQREVQSRWVAGRTVRWPTAFDLIKLCTGAAGDLGLHSDTVQTICRQFAASRDAKHKCPRFRASGGPKRALGWIPFIPRAVKVDGAHVVYLKRKFHFWKSRDLGGKVKAGCFTQDARGRWYVAFQCEVTDELSTGNSAIGIDLGLKTLATCSDGVKVRALQHYRQYQAALAIAQRAGNKRRVAAIHAKIANARRHHLHEQSTRIARDNELIVVGNVSAAKLAKTRMAKSVLDAGWTTFRNQLRYKASRHGARYIETDERWTSQTCSCCRVIPDSSPKGMGALGVRRWECSDCGATHDRDVNAALNILRVGRERPPPAVEIPAV

SEQ ID NO: 17637 - protein, 376 aa, unknown
  TnpB Polypeptide
LHANLVQKAIKDVTSAMSTLATNWRQGFHVSQPEWNADGSEWTMTYDKRAATFHKYKVSLATVDGRVELRYKLPEELNGTPYEKYVLNPDWSTTTSKLVYRNDRYWLHLGVKRNYSEELWASRSNREVSHTPDEDTIRVLGVDLNVDGATAVTSTAGFYGNADYLNHRRKQYEQLRAELQQTATRSAYQRFHEHAHDHANWLEEYEWQVINGIVDDALEVRATHVVFEKLDGIRARISNLPKFQQWMFKRIQDEVEAQLEPYGVTVERVNARNTSKGCSHSACGHVSDANRADKELECVACGLALNADYNAARNIGLRFLQEEVPASQTCSSGRVTSQLALVSGVLSVRDDAGNSVRFTSMDWMSTGKPTTSVVGS

SEQ ID NO: 17638 - protein, 346 aa, Gemmatimonadetes sp.
  misc_feature (231)..(234): Xaa can be any naturally occurring amino acid
VLTGEAAPYPNYIKVWHIIKTCDIPERFLSVPYQIKRNAVKEACVSCKAVINHNKQLKEGELPAKLHFRSRKHPIQSCYITKSALNEKGVYYTILGVLKLSESLPVECFDSRLVKMRDNYYLCVPQKVHRNATETQGRVVALDPGIRSFQTFFSPTSCGKMGENDFGHIVRMCHHLDNLISRTKRETLSYRKKRMRHAQRRMRTRIRNLVDELHHQCARWFVDNFDLILVXXXXLLPPFNVSDMIQRSKRKIRSKSVRSMLTWAHYRFKIFLQWKAWQNNKRVLIVNEAYTSKTVSWTGEVIENLGGRKTVVSKDGQKMDRDINGARGIFLRALRDHSMLQQACIV

SEQ ID NO: 17639 - protein, 370 aa, Anaerotruncus sp.
VKTIKTYQNKLYRNKRNRHLDEAIDTAASIWNYCIAFHRRYYKLYGKHLSANKLKKHITKVKRTPHPEWQVLGSQAIQDVVERVDRSYKAFFEHHKQERRGRKSPPSFKKRRKYSSFTLKQAGYRFYDDSNIVTIMGRDYKYCKSRPIEGTIKTVTVKRNALGEFFLNVVCEIAKNEVLPRAGKAAGYDFGLKHFLTADDGSTIDSPEWYKILLEELCQSHRAVSRCQKGSNNRRRAVLHLNRVYQKIVNRRRDWFFKLANQLVGENATICIEDLNLDGMKCLWGRKVSDYAFAEFIGILEYVASEAGTTAVKIDRWASSSKVCHVCGGRNDALALKDREWICPQCGAHLDRDVNAAINIKNIGAAMLSA

SEQ ID NO: 17640 - protein, 582 aa, unknown
  TnpB Polypeptide
MKIISSYGVELRKQNIPIRQTLEIYRSAVRYLVEVYESVWEELAQIEESKKRFNAAEHLVHTTKRNPARFDFDFCFPKMPSYFRRAAVQHALGSVSSYRTRLEQWKAEGQKTGKPYLKSEQYAMPVFYHDVMYRENTEEKDAAFLKLYDGHDWKWFAVRLKHTDMEYLRKHWSGKKASAPTLEKKHDKYFLRFTYAEEVSLNQTPVKEQTICSVDLGINTDAVCTIMRPDGTILGRKFINFPSDKDRMYRVLGRIRRFQREHGSRQAQGRWAYAKRLNTELGRKIAREIVLYASEKKADVIVFEYLEMKGKLSGKKKQKLQMWRKRDIQKRCGQQAHRKGIRISRICAWNTSRLAFDGSGEIARDIRDHRLCTFQTGKRYNCDLSASYNIGARYFTTKCFNFYPDGNAGGAASIEFGFALDGPNYNTAIRFVMAMTVFDKSFIIQDITIPAGDYNAYSLTFESVAENINYVFGMSSAELVAAVSDGAVKPYIMNLETNAYVWDGTSTANNGGYWCNANNEICTWGADGFSFFIEPWLEDDPACMAIGRAPGIASGTTMMVKFGLATPDKQKAMSFLLNATFE

SEQ ID NO: 17641 - protein, 346 aa, unknown
  TnpB Polypeptide
LEVCKTCYEQTNHLTPENKRFTDLVPLKDEYEFLREADACALQQAVRDFNSALDNFFKNRNHFGFPQFKSKHRSKQSYRTPYNRGNASVIDYKHLKLPKLGKVRVKKFVMPEVYKIFNITVERTSTGKYYASICIETETQSLPKTGKQIGFDLGLKDLLIGSDGTRYARPKYAYAFKDKLAKEQRRLSKMRTKLERVNANLDECKNYQKQKHKVAKLHEHISNCAKDFNHKLSRKLVEEYDLIAMEDLNVEGMKKNHKLAYSISDVRWSQLLNFIEYKCQWYEKEFRQVDRFYASSKICSCCGTYHTDIVNSLSVRAWVCPDCGTHHDRDVNAAKNILNQALSVGV

SEQ ID NO: 17642 - protein, 504 aa, unknown
  TnpB Polypeptide
MAAKSTTTIRQVLSFQPHQAAWFAATQALFNQVVAFYFEVIQAHEKLLDLNNQDALTALEMLTHTTQKNPTPVMPLEEIREDLPAVFRRAAINAALGSARSFFSHLQKWRKRKEKAVAKGKTFTERPPVPPRTWNKSVPFYGGQWKERTPSSILLKVWTGTCWSWLKVRLTGRDLPTDAELGSPSLIRRGKQWWFHTPIEKHFARPATIERQITTNRETTICAVDLNLDDHLAVCTIQTVEGTILATKFIGGGQEINGFRKQQLGRIARNRRKTGIIAEGEQDNVDLWHKIKHIDESLAHLVSARIVQFAHHHGATILVFEHLGNLKPERGKYSRRGNSKRAFWMKGRIFKYAKYKAWDQRIITSRVNPRNTSRECARCHSLVARYQEGQPAEGYTEGAPLVLCHQCGMQGHADRNASLVIGQRLVARSQKPLQEKPSTPLPRVERVEKSTGVLLSQEVKRKEEPSSLRARHGGRNEHGTAQGRRRRMGTPPPFIPRQLRLPLE

SEQ ID NO: 17643 - protein, 372 aa, Clostridioides sp.
VIAVEKAYKFRMYPNKKQQELINKTFGCCRFVYNKYLAKRIDVYKNNKETFTYKQCSSDLTNLKKELKWLKEPDKFSLQNALRDLDNAYKKFFKEKAGFPKFKSKKINRFSYKTNFTNGNIMYCGQHIKLPKLGMVKIRDKQVPKGRILNATISKEPSGRYYVSLCCTDVDIEVFENTNNHIGLDLGIKEFCISSCGEFIENPKYLKKSLNKLAKLQRELSRKTIGSLNRNKARLKVARLQEHIANQRKDFLQKLSTKLIKENDIICIEDLQVKNMIRNRKLSRLISDVSWSEFIRQLEYKANWHGRQIVKVVKFFASSQICNKCGYKNEEVKNLNIREWICPSCNETHDRDINASINILKEGLRLITIQNK

SEQ ID NO: 17644 - protein, 289 aa, unknown
  TnpB Polypeptide
MLLPGSCLRYFVTNRNRDYSLTNHCFSVNTLDGRVKLPYFDKGMSKYFDHSIYSFGTAKLVNKHGKYFLHIPITYEVEECEDAEICNVVGIDRGINFVIATYDSKHKSGFFSGKTIKQKRAHYSKLRKELQMRRTPSARRRIKAIGSRENRWMQDVNHQVSKALVESNPKYTLFVLEDLSGVRSVTERVRTKDRYVSVSWPFYDLEQKLIYKAKQNRSLVLKVDPRYTSQCCPVCGHIEKANRNKKIHLFACKNCGYKSNDDRIGAMNLYRMGINYLTDSQVPSIVTAE

SEQ ID NO: 17645 - protein, 352 aa, unknown
  TnpB Polypeptide
MVKATKVIKAKIVYLIGIKEKLLSEEYENLQKFLHGEENVKLYSANKQQARRYYKKIKPNKEYPLSIRKDLIKVEKRDTKIAKYWVRIPVAGRRGGIWVAIKPHEDILPEYKIGESKVFRRNGEWYIHITISKEVELKESYTHVLAVDIGERVMACVCGIWNSLKPIFYGREIRGIRRHYAWLRSRLQEKKLLKRVKHIGNKEHRIVNDLLHKISREIVNLAKEQNAVIVMGKLNGIRKSAQNKGKRMRRLVNSWAYYRLQKYIEYKALWEGIRVIYIDEKGTSITCHRCGAKGKRRTQGCFECSNCGLKDFNADLNGARNILKRFLAYIVRNGAVVNQPLTVPMSTEAISL

SEQ ID NO: 17646 - protein, 305 aa, Bacillus sp.
INAQVPKQASKDFDTARKNSFKKYKNGYHTSYKSKKDLIQRFYVNYERLIIGKKVVHIQSIGEVKTSQQLPKNKKPSNPRVTFDGRHWWISVGFEESFEAQELTNESIGVDVGLKELFVASNGMKERNINKDAKVKNLLKRKKSAQRDMSRRFKKGAKIQSAGYEKAKAEHLRLSRKIMNIRNNHIHQATAKLVKTKPRRIVVEDLSISNLLKNKKLSKAFSFQKLNFFFQCLSYKCEKYGIEYVKADKWFASSKICSCCGVKYDHSVQSEGQWSLKIREWDCVPCNSHHDRDVNAAINLSRWVK

SEQ ID NO: 17647 - protein, 527 aa, unknown
  TnpB Polypeptide
MAYGNKPTPTYVVKIPLDLKTNDYRTIEKSMNVANSIYNDMLSEGKKRINKLHANKIYWKLINDLNDAEEHNKKRSKIKDKTKKAKVPVINTKPINDSINNLVKSYSLTDHDFKIFLKNRRHSLSFYKILSASEVQVIASHVFKTIENVLKFKSKIENLKFKSIYKDSSFRNKQNKGGLRLVNNKNNKYAYKLILGNKHEINIKRNAFTTYQQNCMLRAEKIKYVQIQKSKIKGKFRYYLVIYLQGTPPIKHKVGTGVVGCDNGVSTLAYVSDSKLELVDLVPEKCLRIEEGIKKLNKKINHKLKLLNPNCYDENKQMIKGQKMTNRSNNLTKLMNRVQKKHRKMRIYRNELQNKICNELLSQGNVIQLEKMNVKALQKRSKNIRINPKTNRPYSKKRFGKSILKASPSSLVTLLKTKAASRGAKVIEINPKDTKPSQYNHILDDDVKKTLNIRIYDLSDEYPNIQRDLYSAILNKYTIQHTNKNGKIIYTIDKTRLTNEFETYYKLMQQEITKIRNENKRLSWYVS

SEQ ID NO: 17648 - protein, 423 aa, unknown
  TnpB Polypeptide
MTEIMLVTNCLLYEDKNEQLYKYFDDITPLFSFLVRRTIHHLNHDLNGEDLTKYRTRLKKEYGLTNRFAKAVVTTAKNTLKLSTAAGDYLHSTYAIKIKKVNAKIIKTKAILNNPKTKKHRIKPQKTKLFWLEMKRNKLIQLQNNGPKPMLTFGTKKLLNNNKELFLKKRDNQIVYIGDKYDFCGNQQFQLFYNKSRNKFTYKIRLEDQYIQDSKYIYGEFIIKDNNAKKEILKTLKSPKSNPLSFRIIKRNEILQLQIMYRITSEPETKHSNGVLGVDFNKGFVTISEIDQNGKLLNLDRIDYIHKGKSGVTKNSMHHLVKDLVDFAIKSGKDIVIEDLKSLNKNKKEKTEQKHYNRMINTLKFSKFRKFLETRCDKLGVGLSLVKPYNTSKIANNKYCYGMKLNIHSGASYVIARRFYNLD

SEQ ID NO: 17649 - protein, 375 aa, unknown
  TnpB Polypeptide
MKTLRLKVKPNSYPWLNKAAYEVNQVWNWANETSEKAVRRYVGPPRWLSAYDLDALSSGSSRLFERISSDTINRVNAEYVTKRRAAQKARLSWRRSGGSRRSLGWIPFKGASVKRKGNAVRYHGKSFRVFQPELLDNIKLHAGCFAQDACGDWWFCVAVDAACTESTAPKESVGIDLGLKDVATTSDGDRLVAGQFYRNAEKAISTAQRRGHKRQAKRLHRKAANRRKDALHKFTRSIVDQYQKIVVGDVSSPKLAKTRMAKSVLDAGWGILKTQLHYKGQQAGRSVKIVNESYTSRTCSGCGCLSGPTGLDMLAVRHWTCADCGESHDRDVNAARNILRRAEASVSVSGNEPRKHRVGMNADRPRGVRQMREAG

SEQ ID NO: 17650 - protein, 369 aa, unknown
  TnpB Polypeptide
MKTEKYEFYHQSNLIQIGNLIDDLHSVHVHLLKLQRRYYRLSGKYASFARICNHIRKLKARTKPHWNQLPSQVIQQVAKRIHLGYEAFFDNIKDRKAGKTKRKVGRPKIKPNHKYNSLTFTQAGFKIKENRLTINCLKKSFTFWKHRDWTGCIKTVTIKRDTVGDYYLYLSCEDCEPSEKLPLTGNVAGADFGMKTFLTLSDGTKIASPEFYKQGLKAVRSANKALSRKQYLSNGWFSAKRHLARVHKKIANQRRDWFFKLALRLVRKYDTIAIEMLNLEGMKRLWGRKISDIAFGEFSLILQWTCAKYGKTLLKAGRWTATTKPCHRCGHHNENLTLSDRQWTCLECGFLHDRDRNAAINILQAGVPA

SEQ ID NO: 17651 - protein, 261 aa, Frankia sp.
LQGVGHVRVNRHRPVRGTVKTVSVKREGRRWYVLLSCDGVPAEPLPTTGAVVGVDLGIASLATTSDGRHYGNPRLLERAAGRLAAAQRDLSRKKRRSKRRGKAVARVAGLHREVTRQRADLAHKTALGLVRDHDLIAVEALTIKGMVRRARARPDPDSPGVFLPNGQAAKSGLNRSIHDAGWGVFLGILHAKAESAGRTVIPVPAPHTSRTCAKCGHCAAENRPTQAAFACVACGHTAHADVNAAVNILRAGLARQGAQAA

SEQ ID NO: 17652 - protein, 422 aa, Megamonas sp.
MKSKPMFLTQSNFIRHLPKSEYNMLREMCRYSNNLYNCAVYEVRQHFFKTNKYFPYKKYYPICKLNENYSLLQAGVAQQTLKVVERSFKSFFALLKLKREGRYAEKVRLPKYRKKGDMFNLVLSTNAITIHNGILTVPMSRTFSKQHDKAKIKIVVPDRLRDKEIKEVRIIPLYKGTHFKIQYSYKAEPETKNLNKDNNISIDIGVDNLASCVTNTGTSFIMDGRKIKSINQYWNKRKAKLQSIAVRQGFYMTKQIYSLTRKRNNRIDDYMKKTARYIINYCITNNIGTVVCGYNKDFKRNINLGTKNNQQFTQISFNKLFSVIKNLCERYDMSYIEQEESYTSKASFWDLDEIPVFDEKKKTDYKFSGKRIHRGLYRTKNGRMINADINGACNILRKSKQNFKYEELCRGLLASPLRIKIN

SEQ ID NO: 17653 - protein, 365 aa, unknown
  TnpB Polypeptide
MLEFGITNRMANAIIRTAKNQLKLLKESSYYQYGRLYKRKRSLQKKIDKLKLSLNSNRIKRRKLAKVRLFWTQMKLNKVNQLISNGLKLSLTFGTKHLFKTNKTKFLAKRDNQVIYSGSKYETCGNQQLQIEFDSKHNHFNYKLRLDNKWVFGPSKYIFGSFVLKNKEAKVNILNTLSKKGSNPLTYRIIKRDKSLYLQIMYRREAPNITQSANGVLGVDFNKGFISVSEINQNGKLQSLTRYNYLHKGKATRTKISMLELVSKLVAQATSVGKDIVIEDLVSLDSSKKQNKTTSKTYNHMINSLKFGLFKRCLLSKTAKEGISVHTVNPYNTSNIAKASYTNRMKLNVHDAASYVIARRFYQYD

SEQ ID NO: 17654 - protein, 432 aa, Bifidobacterium sp.
MLEAVKVALDPTSAQKRLLLSHAGTARFAFNAGLAHVREMLEAKEKPAWSLYALRRWWNANKDILAVDADGIPWWRENSKEAYSSGLEALSDALSNWSKSRKGQRKGRKVGFPRFKSKDKATPRFAYTTGSFGLIDGDPKALRLPRIGRVHCMENVMKRVGDARVLRMTVRRHAGRWYASLTVERPDMTSGRMPTGGTVGIDLGVKTLAALSNGVVIPNPHTLVAGERRLKRVQKELSRKTSGSNRRRKARERVARIHAHVADQRRDLLHKLTTMLASTYSGICIEDLNVAGMVKNHRLAKAIEDASFAEFRRQLEYKTVRTGTRLHVIDRWYPSSKLCSNCGSVKTKLSLNERTYHCESCGLTIDRDLNAAINIQVAGSAPETLNARGGDIRPATRQDGRRTPMKREPSSHANGVRLGADGRKTVLQAKTN

SEQ ID NO: 17655 - protein, 295 aa, Streptomyces sp.
MSGTRFPWREKAYRPLMLSARSGWRITPGGDLALSLGRGRERIVIPVPEFTDRAGQSVEPDRWGEMKLCWDSAERRWSLHITHRVPDDRLVQALSRHDQAAGMRVVTVAVDEGVINSMTLASRAPDGAYEIAVINGRSARSIKRERNKRYAHLQSKLSRCRTGSRRHRRLTRARKKLTARTRRQLKNFNHQVTARANRFVREQVEAHRQAAPEGTRVVAHLVVGDVRGIERDTAKKRRASPSTRQQLSQWERGVQERQLAYKTGLRIKHISEAYSSQSCPFCLTRRKVRGRTTPA

SEQ ID NO: 17656 - protein, 406 aa, Euryarchaeota sp.
MPIKGVVFRLESDLPSEAKSLLEDFRLAVNHAVRAGLQARVTSRNALNRLAYKDFRQDHPRMYSQHLVSAFEVTASVIKLHRRRTRTNAEPRTPYVKRLMMKAENQAYKLDRGTGVIDLAIRAGCHVKLKLVVSQYHRRYLDDATLSLGSLTVLPDRVIVAFRKEASKPYIPESIVSLDTNESSLDGICLQGNDAGVVRANFRDVAIIQQRHHDRRRRLQKKKAHDRRMARSLCRREGRREHHRIDYRLHQVANSVLEFAERKKSTIVLEDLKGMKFKKNKELNRRLSMWPRRKLHQIIEYKAQWRGIPLVKVDPRCSSKKCPICGRIQDSRMGTLFECECGWRLDRHINASINLLQTAISKGLEVAGGLRFDPGAFQHDVMMTLYDPGRGARSEPNGTSCVQVVT

SEQ ID NO: 17657 - protein, 533 aa, Moorea sp.
MAPSNVSEPQAGIDCSIQLVLPLWENDKPLSQSPSVTVESAAVNNLTTSPGKSRTCTRFFRKRKSSLTLAEDSTTKGKDLEPYWNDLCRDVSSQLLLPVETDLPDSVLNCLNTWQNSTVEKSWFSTNLKAVEDPNSQQIFSESFTSSLAGFTDSENTAKKSKKIRVFLSAEQRRMVRQWFGVSRYVFNKTIKLLQSGEIKANWKAIKTGILNDLPEWCKAVPYQIKSIGIKDACTAVREAKKKYKKTFQINRVRFRSRKNPVQSCYIPKSAVSDQGIYHTKLGKVCFAEPLPASICDCRLVSTNGKIYLSVPHTTAKKETENQGRVVAIDPGVRTFATFFGENSIGKIGTGDFSRIQRLGQHLDNLISKISKAKGRQKRRMKKAARRMVIKIQNLVNELHHKTAKFLTDNFDVILLPTFETSQMSKKASRKIRSKTARNMLTFAHYRFQEFLKHKAIEKNKVVVDVCEAYTSKTVSWTGELVNIGASKLIRSNIDGRVMDRDINGARGIFAYSLGRYPLDAKASCIGGLRSTW

SEQ ID NO: 17658 - protein, 562 aa, Streptomyces sp.
MALRRLGWTVTVPQGVYVPDRVVRIAQEQAGRVLRSAWWRAEVTAALLATWPADPARRTEAEWQALRAALPEGGVVATSVLLARTRQIAAFQARHGRLPADVTECESAPGAGGQVVLAAVDKQLATLERCPEDPARYAVLTLRLPVRPDPASRADWHPVRVRFRLPPHVPATAVLCAPTLRIRQGRLLLDVPYVQAVAKPERAGHRTAVAFDWGLNTLLTGGTLHLTGEAQPRVLTDGPPVVFRAAGVLAKADRLRTLGEHIAARIGQLRTLITSRQERGMPPDPWLVAKLAVLEAERDRVARRRTRLNAALARAAARFIVDHAIAAGASVIHLEDLRDMQARGKGRTLNTRLSQTVRGAIVTHVRHQAATLGIAVVIVPPRGTSKYCPRCLTAFRHHKAPNDRAAGWAWASCPNPACGYSTGRDHAAWQRIGARGLTHQHKTSVDRSNGTFVIRTVVEALDRASAVQQQTRDRTKSGPTAKRPVPGKRRRVPAPPGNRAPTARPGDKRPAGRPPTHPTHSSQERRRQQGPNTIGTPVRPHRPDGARLGAGFHRHAHTTPVR

SEQ ID NO: 17659 - protein, 492 aa, unknown
  TnpB Polypeptide
MFRAVKIKISDQQLIEELEFLHQLFKREYDFVRHKVSLTSFDEKEYSHSHRGRFTEKLAALTNKRYLAWNVNQKAKYFRMFAQQLRQDFCSLKYRYDISVILAKYGFNPSNPAVRDELKALNLYPTAQEIKNICRQGTIVCLPETLSLPLDFSLGQDKQTITQPDKKEAVFFIKFRGKWTRLSFDMPKYFKRKTRQENFECYCKPKFVKDENQDWYVVLAIMLSTDKPSAKNDIYAGIDIGLKHPYTAIAVKDTGKEQVFFQSQPFSCKRETQVVNHKLAVIKEKLSHLYHKIDVYQRIIARNKNPQFTVVIQEKLEVLIQEKNDLRRKRRELNKRLCYLAARDLRKQLKFFNVGTVKLERLNWVENSGGSWAFSQMQQVITEKLQEDGIAVKKVSPAYTSSQNPFTTKKENGVKQSDRNVRFAKYIVDRDVLAAINIALRDFKTVKHLVLTRRQFGVIACRMAESETHTKRENKSNKSYNPFNHGDLLQTC

SEQ ID NO: 17660 - protein, 377 aa, unknown
  TnpB Polypeptide
MLLTVKVKLLTSQAQHDDLLKTMERFNEACNYISDVAWLNQAFGKIGLQKILYYEVREKFGLSAQMVVRAVGKVSESYKIDKSMQHTFKPHGAVVYDQRNLTIKGADRVSILTLGGRTLVPIVYGEYRTLDQTRIKGQADLIYIDGIFYLMLVIDIPEEKQIENPDGTLGVDLGIVNLATTNDGIRFSGEKCELVRRHYSVLKARLQSTGTWDAKKHLKRISRKERRFKKDTNHCISKQIVETAQGTNRAIALEDLRGIRSGSTVSKSLRSALGKWAFYELASFIQYKAQLLGIPVIFVDPKYTSQQCSVCGFISKENRKSQAEFVCLKCGHSENADINAAKNIALRAAVNQPIALRSSNQVEERWKGKPTPLEVGS

SEQ ID NO: 17661 - protein, 410 aa, unknown
  TnpB Polypeptide
MPTTDYTEFLHNVKQEYITNSYELDGVFIFDIELPATSHICPKCGETTKHIKDYRIRTVKFGKVQRGPLIGKYRQRRYICPHCGHSFAESNPFVRKHMQLSVTNIRMLFDKLTESVTYTAIANECDTSITTVLRYCSMITIPKPKTLPTVIGIDEFKGNAEGYQYQVNLTNPDTHEILDILPKRDTQALIHYFASFKHKDRLQVKFIVMDMSIQFKRIMEALFPHAHIICDRYHVCRLVDWAVERVRKREQHKLAAYSRMLKQNRRVLMKHPDHLTEAEHIKLCEILRISDDLRKAYALKLSFRKIFSIYGKQRIAAHLTHWLKLVKASGLNEFNNFFTSFPAWMTQLTNAFLLPYSNGYTEGTNNKIKVLKRISYGLRHFGRFRVRILLLSKKNGTNHKYDWCQRRLVG

SEQ ID NO: 17662 - protein, 392 aa, unknown
  TnpB Polypeptide
MEQKRAYRYRCYPNATQKHMLARTFGATRYVYNWALRLRTDAYYEQQERVYYKETSARLTQLKRQEETAWLNEVSSVPPQQALRHLDTAFRNFFDGRTAYPSFKRRHGHQSAEYTVSGFRFVDGTLTLAKMGSPLKIRWSRPLPRDAKPSTVTVSRDSAGRYFVSLLVTEEMHSLPKTDAVVGIDRGITSLVTLSTGEKIGNPRHLTTDARRRRLAKRLLSRKQKGSKGREKARLRLARVEARIGDRRKDFTHKLTTRLVRENQTICCESLRVKNMVRNHSLAKQISDAGWGELVRQLEYKAGWYGRTFVAIDRWYPSSKRCSHCGHVVSSLPLDRRHWHCPECGTRHDRDVNAAINIAAAGLAVFAGGEAVRPGRRKSNRHASGKPEPHAL

SEQ ID NO: 17663 - protein, 374 aa, unknown
  TnpB Polypeptide
MEYSYKFRFYPNNEQKVLISRTFGCSRFVYNHFLALRKDAYESNGETINYVKSSALLTQLKKELTWLKEVDSIPLQEALRDLDFAYQNFFRRVTRGEKPGYPCFKSKRDGRKSYKTKQHIVGGKPTIWVDAGHVRLPKLGLVKCRVSKEVKGRILSATVSQNASGKYFVALCCTDVEMEALPSTCAAVGLDMGIKSFAVTSDGVEHPNHKYLAKSEKKLARLQRQLSRKTKGSNRRENARLQVARLHEHIANQRQDMLHKLSTDLVRQNDVICIEELVSKNMVKNHRMAKSISDASWGEFRRQLTYKAEWYGKQVVTIDRFYPSSQLCSVCGVKWPGTKDLAVREWTCPECGEIHDRDINAAKNILNEGLRLLA

SEQ ID NO: 17664 - protein, 367 aa, Lachnospiraceae sp.
MLKAYKYRIYPNNEQKVQIAKTFGCCRFVYNQTLAYWKETYGKEKKSVSKTDCNNYCNRELKKEYEWLKEVDKFALTNAIYNMDAAFQKFFREHAGYPKFKSKHDNHKSYTTNFTNGNIAADFGDGKIKLPKLKQVKAKLHREFEGQIKSATVSQVPSGNYYVSILVETEQEELPHTDKNTGLDLGVKDLCVTSDGAKYRNPKTIRKYEKKLAKLQRQLSHKEKRSRNYDKQKKKIAICHEKIRNTRKDYLHKVSHEIISENQVIVSENLQIKSMVKNHYLAKSISDVSWHELTRQLEYKAAWNGRQYIKIDTFYASSQLCSACGYKNIATKDLSVREWVCPICRTKHDRDVNAAKNILAEGLRQIA

SEQ ID NO: 17665 - protein, 363 aa, unknown
  TnpB Polypeptide
MKRTHKIALNPNNKQRRWFAQQCGYARFAYNQALAKYKKEKFKGNFMSANDLNNWFNKIKKDIDWTAAMDQRAAMVAIYHNLNRAFVNWWDGRARFPKFKKRGERDSFGTNNQSVEVNGKSVKLPKMGWIKMFEDLRFEGEISKVTISRTAHRWFISITVETENTIAVDKTSTHPVIGIDVGINTLATCSDGSKYENPRPLKRYEKKLARFQRRLSKRVRGSNNWYKQKDKVARLHYRIACMREDAHQKATTDIVNRVSGIGIETLKVSNMLKNKKIAKALSDSALGGFLSMLKTKAEARGVKPKEADQFFASSKTCSSCGNKKDDLKLSERTYHCGVCGISINRDVNAAINLRNVAVGHTET

SEQ ID NO: 17666 - protein, 335 aa, unknown
  TnpB Polypeptide
MLKLKREGRLPSFIMKINPPGYKKKNNKRTLWAVLRKDQYRVEGDKIILKGVGAIGRIELRYKGLTHLKGEQGRLEIHYDQDRKRWYAHISFEVSEKAVRGVWASVSKRPRGGLVAGIDIGINNLMAVYVENGLAKLVNGRPLKTVSHYWRMRIDGYQSTLNKHGLKTSRRLRSMYSKWRRQVKAYIDSKVRQAIEWLYSVGVSVIKVGYPKNIAQENGGFNSVHVWTYGYLLRRIYEVSEEHGITVVYVDEAHTSSKCPVHGPGCGSRVRRGLFKCTRLNKVFNADLVGAYNILITPSPLWDRGNGLETQPGIEPSRRGDIIPNLPALAGTLAL

SEQ ID NO: 17667 - protein, 371 aa, unknown
  TnpB Polypeptide
MITLEFKAYGKKQQYLAIDEAIRTTRFIRNSCIRYWMDNKKINRYDLSKYSKVLSDRFPFVKELNSTARQASSERAWSSISRFFDNCKKKIPGKKGFPKFQKRGRSVEYKQSGWKLSPDKKSISMTDRKGIGSLKLKGSWDLWRFDNSQIKRVRIIRRADGYYVQFCVAVDIKEELEPTGNKVGLDVGLKDFYTDSDGNTEPNPRFYRRSSKRLKFYQRRVSRKKKGSSNRIRAVKKLGKTHLKISRQRQEHAKRLARCVIRSNDLVAYEDLKVRNLVKNHCLAKSINDAGWYQFRKWMEHFGRKFGRLTIAVNPAYTSQNCSECGEIVKKSLSARTHTCKCGCQLDRDHNAAINILKKALGTVGHTGTLV

SEQ ID NO: 17668 - protein, 476 aa, unknown
  TnpB Polypeptide
MQQTVKQKSLPLNRAKWAEIVQVTEAYARQKDAFLVAYGHIKYLPYLGQKRKLRDELVAAGFASPFGLQARQWKLALDDALFTLERQWEAAIVKVQERLYRHEGLTGEEKHYAFWFLYKHEKYGRDWKRLKAVFTGEDVINEEINLDAKGRSKGRKYLQRTFSRVLGSRPRVKKARSFAVDQQMYRVFATGRRQYISVATLIPGKRVVIPLTGMHAMEGNLRVVLLPDKQAVEIHLTREPQIYPAGKGETGIDLGITEVFTDDTGKKYRPEYGEALQEMSDRILAKSQKRGRLWALYRKFLKQDPNKARRILRHNLGLVKQTKRNKKYRTRCENEINRAFNELYRERRPQTIAYEDLAHLRGKARSKGLSRKVANWQRNIIKKRLEYKNYIYSVTDPGPVNAAYTSQQCPQCGWVDARNRSGDTFKCRKCGFTADADLVGAVNLKTRLLDTEITRYTPYRKVKEILLQRYQQRQAS

SEQ ID NO: 17669 - protein, 709 aa, Streptomyces sp.
MDMHAHDRRRCLAIGAATAASATPLLTACGAGFGGDKARNDGSAADDVTGPFDWKRAKGRTVKALLNKHPYTDALIADLKAFTEKTGVRVEYDVFPEDNYFDKLTVDLSSGRASYDVFMLGAYMVWQYGPPGWLEDLGPWMRNSSATGAEWDQEDFFPNLLSADQWSLKAGAPLGRGGQYALPWGWETNVVAYNTEVFRKLGLKPAETFDELREVAGAITRRAPGAGFDGMYGVAVRGSRSWATIHPGFMTMYARNGLKDFTVEGSRVKYAITVARTGGYITTACSHGIHAPWIAKDQCLPVLILSHGLASGGRTVVCVQLRYAFRIEPGPGQRIALGRAFGCARVVFNDCLRARKRAHEQGAPYPTSAELSKRYITEAKKTPERSWLGEVSSVVLQQSLRDLDTAYRNFFASIKGTRKGPKIAEPRFKSKRDSRQCVRFTANAKWSITPDGKLNLPKIGPVRVRWSRALPSVPSTVTVIKDAADRYWASFVVETYPAGEALPALDREQGIDLGLTHFAVMADGSRVRSPRFLRRAEKKLKREQRSLSRKKKGSKNRGKQRVKVARAHAKVADARRDFHHKLSTKLIRENQAVSVESLSVKGLARTRLAKSVHDAGWSSFVTMLEYKASRYGRTLTKVDRAFPSSQVCSSCGHRDGPKPLDIRTWICPRCGARQDRDHNAGTNIRDEGRRIRAAHQAVPPTPGPGASRR

SEQ ID NO: 17670 - protein, 381 aa, unknown
  TnpB Polypeptide
MTYKTYNIELIMSDTTRSHWMSLLAQTRDAFNTCAQLVTSNDIRLQLVPVHQTCYDTLRKQFPIIPSQGIIRVQKNVLAMLRAIKANKRDSVPLKKSLSLQLDKRLYSNLTKEGISLSNGKRGHREKCTFRLYDKVRELFDNCTTADPTIFARDGRLFLATPFEIPSLPCNDDNSIGVDLGMKRLFVTSEGKSFIDKAYLKRRRKLRYLKRCLQSKGTRSAKRHLHKVRRKERNLSKDMVERATDALLGSTKASVLVLEDLTKIKDRTSRTSDGFKRTRHNNVMSQVPFYEFKERLTMKATLVGRRVESVSPAYTSQTDSRTGKRDGKRQGCRYYCSDGIVFDADWNAAVNIAKRGKHPFSSSELPLSGRVSSITQSSVVH

SEQ ID NO: 17671 - protein, 370 aa, Peptoclostridium sp.
MNMGHKIRIYPTPEQEELCNKSFGCARFVYNHFLGMASESRFESYNKYNKQLTALKNELPWLKEPDKYALQSALEDLRDAFNRFFSRQNRYPKFKRKHGPKQSYRTYIVANQGKDKINYNIELSKEAIKLPKLGWVKANVHKPIDGQIKSVTVSKTGSGEFYASVCVEADSVSQIPSGNGEIGLDLGIKDFVVTSSGEKIANPKTLAKHEKRIALLQRNLSRKNKGSKNYAKNKAKLAKLHQKVANIRKDFQHKLSHRIVRDNQIIIIETLRVKNMLKNRRLSKAISDVSWSRFATMLEYKSKWHKREFHKVGAFFASSQLCHVCEHKNPDVKDLDIRVWECPKCKTVHDRDFNAAKNILKQGLKELKTA

SEQ ID NO: 17672 - protein, 373 aa, Peptoclostridium sp.
MIMGVKVRLHPTKEQEQTLWKSVGTARFVYNWTLARQEENYASGGKFISDNDLRKEITKLKQDELPWLKEVSNNVAKQAVKDACDAYKKFFKGLSGKPRFKSRKKSKLSFYNDNEKLKIKESSVLIEKVGWVSIRKNSIPIGIKYSNPRVSFDGKYWFISVGIEKEQPKEKLTGESIGIDVGIKDLAICSNGMKFKNINKAKAVKKLEKRLCRLQRRVSRKYLKNKKGVKFVKTCNIIKIEREIRLLHRRLANIRSNHNHQTTNAIVKTKPSRVVMETLNIKGMMKNKHLSKAIAQQSLHEFKRQIQYKCAFGGIGLVEADKWYPSSKTCSECGHIKSKLSLSERTYNCEGCGSVIDRDLNASINLSRYELVV

SEQ ID NO: 17673 - protein, 356 aa, Peptoclostridium sp.
MLILKAYKFRIYPNRYQQELIAKTMGCSRFVFNHFLNAWNDAYKHSGKGLSYNACSAQLTQLKKELTWLREVDSVALQSSLKNLDDSFKRFFKKQNDVPRFKSKRNKEQSYTTKKTKGNIAIIDSKIKLPKLGLVKFAKSREADGRIISATVRRNPSGKYFVSLLVETDVKELPKTSSSCGMDVTREDFAMLFDGSARWNSKLFSTLEDRLAKEQRVLSRRKEQALKKNKLMCEAKNYQKQIIKVARISERIANIRADYLHKISTEIVKNHEIIGIENLQANNMIKNGSRAKSVYDASWRQFKSMLEYKAKWYGRKVATAAIDFDSSPTGSNCSCKYNEFIINLLGVAVQRVKSSQ

SEQ ID NO: 17674 - protein, 516 aa, Peptoclostridium sp.
MKTARILKIKKTPDTPIVALDALMREFCASRRYAFNRLLEGFTPNELNKAIPAMFKLNKRYAEDATMLAKAIISSQKELLPYQLEGVQGKISKTEQKLSDYESGRKTPQKVDLETCLKGLGRRLEKLRAREAYLTDCMEKGTIPKVIFGGRKNFYARMNGKLNSSEWKDIRSNELYSRGDKSKSGNLNIRIFYEDGRFFLEIADTIGKDAKAKHSPRIREELVIPDKFFEEIVDFVVPDKGYDMKAKKHVDVYKPYTVQILRKNGEYFVTLIMDEDVPGSEMEYGAQITSDLVAGIDVNIDRIAVSILSKNGNFRKSKVFYCHEMEYVSSNRRDNVAGETAKAVIDYLLSENVGAVVLEDIKIKQDHDTDNKFNRLTHSFAKTKIQNCLIRRALRNGFRVKKVNPAYTSVIGRFKYSKLYGLSVHEAASFAIGRRGLGFAEKVPRELIFALKGGVKKHLLKLIRSKEETKLSKERVRYIRKLIKTIDAFKEQHSWSVWNVVHKTLRYMDYEYTINF

SEQ ID NO: 17675 - protein, 390 aa, Peptoclostridium sp.
MKKLKRAYKIEIKPTAEQKVKIHQTIGVCRFIYNFYIAHNKEVYELEKRFVSGMDFSKWINNEFIPSNPDHAWIKDVSSKAVKQAIMNGDKAFTKFFKGEAGFPKFKKKNKQLVKAYFPKNNKTDWTLERHRVKIPTLGWMRLKEFGYIPADSIVTSGTVSQKADRYYVSILVEEDTPINCSKPHTEGIGVDLGLKDFAVYSNGVVKKNINKTARVKKLEKKLRREQRRLSRKYESLKKLKKSEKGDATRRNIQKQITKVQKLHQRLGSIRTDYINKTVYEIVKQKPSFITIEDLNVSGMMKNRHLAKAVQKQKFYEFKMKLVSKASIYGIEARVVDRWYPSSKTCSACGAHKKDLKLSERTYKCACGLVIDRDLNASINLANAKEYKIA

SEQ ID NO: 17676 - protein, 399 aa, Peptoclostridium sp.
MFVKGAFPMIRCHKTNFYATKTDTDRLFACNRLSAEIWNACLLSAKDYSLANDGKWIGTSQLQAEMKGRFLLHSQSVQAVCHKYLFARDSARAARLKGYKTKYPYKTKKNYNTKWVDKAFKVFPNGKVELSMGIFDGKRQKPITIWCKYVPNGDIKEIELVYDSGLMVSISYDDYAAEAKASGTSRVAVDLGEIHSIAAFCENGESLIVTGRKLRSIHRLRNKKLAELQRLMSRCKKGSRQWRRYNQAKQYILSKSEKQLKDALHKSSRKFADWCLANAVGEVAVGKVEGVQRNTKGKLRKKEAQKLSNWAFSRLQKYMEYKLKAFGVAMSKIDESYTTQTCPVCGKRKKTSGRTYKCKCSYSCHRDIHGARNILSKHINGGRITYVADIENTTYLRIA

SEQ ID NO: 17677 - protein, 329 aa, Peptoclostridium sp.
MIKGLKIRLYPTSEQERLMWQHIGSMRFVYNWALARRSDEYKVSGKNLSAVDLGKELTQLKQTEELSWMYEISNATLKEAIRDLDKAYNNFFNGKGFPRFKSRKRSKIKFYSRYDKLYFKENMVNLEKIGKVRCRHDYDIDLMQVQKFSNPRVSWNGRCWVLSVGVEALQEKQKLTNVSLGIDLGIKQLAITNVDELDANNINKTARVRNLEKRLKRHQRQCSRKYENNKKGGSYRKTKNIAKIEKKIKKLHSRLANIRLNHIHHTTSAMVKTKPCRIVMEDLNVSDMMKNRHLSKAIMQQGFAIFIAQMEYKCKALGIEFVQVPRFYP

SEQ ID NO: 17678 - protein, 390 aa, Peptoclostridium sp.
LRRLKRAYKIEIKPTIKQKAKIHQTIGVCRFIYNFYIAHNKEIYETKQRFVSGMDFSKWLNNEFVPSNPDYVWIKEVSSKAVKQAIMNGEKSFKKFFKGEAGFPKFKKKNRQLVKAYFPKNNNTDWTVERHRVKVPTLGWVRLKEFGYIPTSSKVTSGTVSQKADRYYVSILVEEDAKAGCLKPYTEGIGVDLGLKDFAVCSNGAVNKNINKTSRVRKLEKKLRREQRRLSRKYEGLKKLKKSEKGEATRQNIQKQITKVQKLHQRLGNIRADYISKTVSELVKQKPSFITIEDLNVSGMMKNRHLAKAVQQQKFYEFRTKLAYKASIHGIEVRIVDRWYPSSKTCSECGAHKKDLKLSERTYKCSCGLVIDRDLNASINLANAKEYKTA

SEQ ID NO: 17679 - protein, 373 aa, Peptoclostridium sp.
MLISKAYKFRIYPNSKQRELIAKTIGCSRFVFNHFLNAWNNEYRQTGKGLTYNYCSAQMTQLKKELVWLKEVDSIALQSSLKNLGDAFDRFFKKQNDAPRFKSKRNKVQSYTTKCTNSNIAIVDNKIKLPKLGLIKFAKSKEINGRILSATIRRNPSGKYFVSVLVESEVQELPKSNSSCGIDVGLKDFAILSDGTAYENPKFFRTLEAKLAREQRILSKRTKFSNNWHKQRVKVARIHEHIANARADYLHKISTEIVKNHDIIGIEDLQVSNMLKNGKLAKAISEVSWAQFRTMLEYKANWYGKQVVAVAKNFASSQLCSDCGYKNKDVKNLSVREWTCLECGANHDRDINASINLKNEALRLLTVGTTGLA

SEQ ID NO: 17680 - protein, 391 aa, unknown
  TnpB Polypeptide
MLTHKFRLYPSKTIEQKLLETLEICRRGYNTFLGELNEQKEIDKSQIQGIIPDMKICDEQFSKVHSKTLQYECYKLFSNLQGLSKSKGKRKIGQLRFKGKGVFKTFTYNQSGFKLINTDKRCQTLWLSKIGNIPVRCHRQITGKVKQITIKHFPSGKWFAFVIEDGNRENQYPNTNKVVGIDFGLIDTVYDSDGKSVTNPKHLKQKEKRLKQLQRMMSNKIKRSNNRDRFRIMLARQYEKLTNSRDDFLHKISNHYVKCYDVIAMEKLAISNMAKGCYSKSILDACWGKLRQFISYKAESADKIMMLVNPTGTSQRCSQCGKTVQKGLGERMHCCPKCGFTVPRDYNSALEIRRLCLQRIRQELPEYKHLEMEALPIGQLLSVKNEAPCES

SEQ ID NO: 17681 - protein, 393 aa, unknown
  TnpB Polypeptide
MFDISMDARTYKYRLYPSGEQKVRIINSLKTCKAIYNELLALSIDAYKFGGVSISSFDFNKYLTGKYPKVHSQSKQNVSDRVHKAFANFFRRVKDPKVHKKGFPRFKSRVNSITFPQSGFKFISNKVSCSKIGNIPVILHRVPKGKIKTLTIKENKIGQWFAIFACELPDVAVKHPSTDKVGIDVGLENFATLSNGEIVANPRYLLKTEKRLNLLQRRLSRKVKGSANRRKAKFRLAKQHLRVANQRSDFLHKLSRKLASRYNIIAVEDLNVKSMLQTHWLAKSITDASWNSFINMLSYKEVALGGQCLKNPRTRGSTHRCSRCGQWVDMPLSERKFSCPKCFNVLHRDLNASINHLNDTVGTDCSKPNACGHNVRPSLRAVVVEAGTTFGNT

SEQ ID NO: 17682 - protein, 413 aa, Streptomyces sp.
VKLVVRVKLLPEADQAAALQDTLRTVNEAACWVSAVAFEHGVPREYELRQHTYAELKARGLGAQVAQHTIKKVRDAYTALKANIRAGNLGRPGSKRRVRAESKPITFRPQAAQPYDERCLSWQYDAGTVSIWTTAGRLKSVRFTGSQSALKRLREHRRGESDLVERDGAFYLIATCEVPENPVNENPVGFVGVDLGIVNIATTSTGYRAAGRGLNRHRKRQIDLRRKLQAKGTKSAKRLLKKRSRTEARHTANVNHVIAKTIVTTAERTGHGIALEDLTGIRDRVRLRKGQRTQLHSWGFHQLGQYIAYKAKRAGVPLVHVDPAYTSQECSQCHHVDRKNHVDQATFACRSCGTMLHADTNVSHNIARKGEAVWTTGRESRVPAPAQGAQTEEATRQPAAPYLQARPFTARSS

SEQ ID NO: 17683 - protein, 365 aa, Nocardia sp.
VVKRAYKFRCYPTLEQAAELNRTFGCVRLVWNKALDERTKAYITEQRKTTYVQVSAALTAWKKADDLAFLREVSSVPLQQTLRHQQAAFSNFFAKRARYPKFKSRKKSRASAEYTRSGFSWRDGRPTLAKMSEPLDIRWSRPLPDGAEPSTVTVSRDAAGRWFVSLLVEETIPPVTETEAVVGVDVGLSALATLSTGEKVTNPRHERRDRRKLAKAQRVLSRKQKGSNNRAKARLRVARVYARITDLRTDFLHKLSTRLIRENQAIAIEDLTVGNMVTNHSFARAISDASWRQLRTMLEYKADWYGRELLVVDRWFPSSKMCSACGTLHEALSLGVRQWQCRCGTVHDRDVNAAENILAAGLAER

SEQ ID NO: 17684 - protein, 396 aa, unknown
  TnpB Polypeptide
MIINRVEQIQINKTHYLWEYCDTICFKAKNLYNYANYIIRQEFINNGKWIRYNALDKLLKNHETYKELPAQTAQQILKLLDRSWKSFFKAIKDWSKNKSKYLGRPKLPKYKKKDGRSVTIFTNQQCRIKSGYLTFPKTKLKLKTRVEGSLREVRIIPKRTVYIIEIVYQKEINTISKQPKRIAGIDLGLDNFVTLINNIGIKPIVVNGRAIKSINQYYNKKKAELMSYVGSRGTSKRIEKLTLKRNNKVKDYLHKVSRFVVNWCKEHDIDTIVIGYNQNWKQEIELGKVINQNFVNIPYYQFLQMLKYKCEEESINLIVIKESYTSGCSFLDNEEICKDNYNKRRRIARGLFKSNNGILINADVNGAYNIVKKVFPDAFAEGIEGVGLHPVRLNVA

SEQ ID NO: 17685 - protein, 379 aa, unknown
  TnpB Polypeptide
MKTVIKGFKYRIYPNADQQIQLAKTFGCVKFVYNQLLAKRIELYKNDEKSISKTDCNNYCNRTLKQEYIWLKDVDKFALTNSIYDLDSAYQNFFREIKKGNKNQGFPKFKSKRDHHYSYKTNFTNNNIKVLFGENLVQLPKLGKITAKLHREFQGKILFATISKTPSNKYFVSFNVEVEHEVLPESKNMIAFDLGIKEFIIDTNNAHVDNPRILKQYEGKLAKLQRKQAKMIKGSNNFKKQSIKIARIHAKITNTRKDFQHKLSSEIVYNNQVIISEDLMIANMLKNHKLAKAIQDVSWGEFTRQLKYKSEWNYKIYHKISPWFASSQICSECGHKNKEVKCLSIREWVCTECGSIHQRDENASKNILKEGLRELGMVS

SEQ ID NO: 17686 - protein, 423 aa, Saliphagus sp.
MAKRTVTRTHVASIRNYQQVRDGLDSLGFAASKLWNVARWTIGRIWDETGTIPGEGALKSYLKSHERYADLNAQSSQAVLEELSEAFTSWYGHRQNGNQNANPPGYRKHGDDHPRSTVTFKEDGFTHDATNGRLRLSKGRNLKAHWSDFLLCEYETRPDVEIENVQLVRAVYERGEWCLHIVCRHEIETESPGNRTAGIDLGICNFATVSYGNEATLYPGGALKEDSYYFTKERAKCDDSSSREARRLDRKQTERRSHFLHALSKHIVSECVERGVGTIVIGDLGGIRDDENGDARNWGDHGNLDLHGWAFDRFTSMLEYKGEGAGIEVVREPERATSQTCSACEMKDGNQRVGRGLYVCDSCGTVANADVNGAENIRRKVLPNLATDGGDRDNGWMAQPAVRLFDRSEGRFAPREQVADREP

SEQ ID NO: 17687 - protein, 350 aa, unknown
  TnpB Polypeptide
MMSVNAEWTSFFEAIKAYNLEPDKFKGRPKPPKYKPRDGRYLVNFPSTRVYKKPLKAGIIHLSTTVIKIQSKHSHDFNCVRIVPACGCYIIEVVYEVGLPELEKSSYVAGLDLGVNNLATVTSNKPGFPPILVNGRPLKSINQGFNKFKAALTSAVKRKSGIDFSRRLENLTRRRNHIVNSYLHRATAMISDVLKSENISSLVIGLNPDWKNEVKLGNINNQNFVGIPYAKFISMLEYKLRLLGIEVIVREESYTSKASFLDLDEIPTYGEKPEGWKSSGRRIHRGLFKSSLGRIINADVNGSYNILRKEFPNAFSKGIESVVVAPWKVNVVGFVRFCRLASKLPYPSQT

SEQ ID NO: 17688 - protein, 305 aa, unknown
  TnpB Polypeptide
MIKGVKLRLYPNQKQKAALVQMFENSNFVWNTMLSMVLERYKNNPELKILNNFALNNLLPCLKQEYPQLKKSDSSSLQIDNENLAKAWRSFFTNPKFFRKPRFKSPKYPKQSYTGKSRLTILKRRYLRIPKIGIIKCSDTNQIEGEIKRYTVSLNCGKYYLSLQVEVPDRLPLPKTGENIGIALSGSKLAVLSDGTVIENFKNKQQKKSRNDNRHKDFLHKLTTKIVRSYDIIVLEDFKTIKENPKLTNPSWQLFKSMLSYKCSWFGKELILIDPLHSNQARLEGGYDLNELAGRILKRGLYKAG

SEQ ID NO: 17689 - protein, 383 aa, unknown
  TnpB Polypeptide
MLVYEYKIDGNQKQCAAIEEAIRVVQFIRNKCIRLWMDGERVSKKDLQTYCAVLAKAYPFARRLNSQARQASADRAYFAISRFYENCKSKKSGKKGYPQFQHTNRSVEYKKTGWKLDDDGRHITFTDGCGIGRLRLVGNKKQQIETFPVKDIKRVRIVRRADGYYCQFTVSTERNIEHIPSGKELGIDVGLKSFLTDSQGNTVDNPRHYRKAEKQLGRLQRRLSRKQKKSANRKKARKALAKQHLKVQRQREDFARKQANALVSSCDLIAYENLQIRNMVRNRKLAKSIHDAGWGIFLQWLARYGFLHDIPIIAVPPHYTSQKCCECGTIVQKSLSIRTHICHGCGVVLDRDHNAALNILHKALSPDQNGTEGHSGTDELQSA

SEQ ID NO: 17690 - protein, 193 aa, Streptomyces sp.
VIGVDLGIKHLAVFSDGRPTAENPEHYDTARRKLGRLSRTVARRLGPDRRTGQQPSKRWQRADAARNRVHYRTANLRRDALHKLTTPLAREYGTVVVEDLNVSGMLRNRRLARVVADAGFGEIRRQLAYKTRWNGGTLEVADRWFPSSKTCSGCQAVTPKLPLRIRMYVCEHCGLVLDRDENAALNLAALVKR

SEQ ID NO: 17691 - protein, 377 aa, Nanoarchaeota sp.
MKSTIKIKLPYRKELIETMQQYSYSANRVIDFGWNIQTNNKRELHDLTYYKIREETNLPAQLVCSSRDKAVEVLKTSKFKHSKPIMKKYLTIRYDARSFALENTKECYYVSLSTIYRRIKIPIEIPEYYWKYLDWKVCSADLIYNRGLFLYIVFSRDIISPKISDGFLGVDVGINNIAVTSDKRFFNSKQIKRKKLMFKRLRAKLQSKGTRSSKRLLKKLSGRENRWMTWVNHNISKEIIKCKEGTIVMENIRGIRSNKGKRFNFWLHSWSYYQLQSFIEYKGFINGKRIIKVNPYHTSKSCSRCGELGSRSKGFFVCSHCGYSLNADLNASFNLAKHHSISDGVSVPVTVPDIQAYEHKGSSSAIACEPMDKIHPL

SEQ ID NO: 17692 - protein, 511 aa, Planktothrix sp.
MIKVTRTIKLKFAKLNRCQAQMFEQMTEENTQIANKLLSLPIKERRKMTTAKIMSELKSALVNQVIRHTTSPTGRKTKQYKVLPVEVNNQNWKLTQKGSTYSISFPTLKGEKRIPIEVASPHWQPVLDGLLEETIQGGSFKLIKHRNKWYAYLSITEDVPEVETEKTLGCDRGQNNLAVVAPKEGFGKFFNGQSVKHRRRYFQQRRQQLQEAKKFRALKKWNKKEQRWMEAINHTVSRRIVRFAQYHNADIVIEDLEGCRKTMKQSQKSRYVMTKINIVLVEDHDLTRVGLRTALQQDSNIKIVGEAANGKKGLEILKQTQPDIAIIDIGLPDMDGIELTQKFKQHIASSGARETKVLILTMHDNEDAVMGAFAAGADSYSVKDVSLDKLKDAIHTTYEGNAWIDPVIARTVLKQVKNKQPDITTPGDQKTVMINAVEPEYQEFLKSCPLTERELEVLELIVAGRSNAEIAEKLYITVGTVKTHVRSILNKLCADDRTQAAVRALRSGWID

SEQ ID NO: 17693 - protein, 557 aa, unknown
  TnpB Polypeptide
MSKEWHMVENITTMSGYTEPLTPKHCTDLTELYDSAKQVQDILNNAYIAIVEKYDDKIYELIKQGYKQGKFRDEVTRLVGKPYETWNLKGAKSRYWRMLISHIYQQYSSRCQRKQIIQTIKNGNYTQTCTELREDLRTQKLYPKDTELINIFKFLEKDKEQEFTITQVPLDYTTGDDHNVYQEINSDKVIVRFSLNRKQWFEIIYQIPPSIDQVITKITKPSFYFNDDGELMLKYAVETVIPVSQGENILGVDLGKIKKFSAASLSHNGVYSQELLPGKELEHNSLKESNLLRNKESNYTKKERIAALLKNQKTPDNTLVSKYEVLDKEYHSIRGKLSCLKDHSSWLTARDTTSHAVSEDCSRIHLEKLSWVSSDDNQGKWDYAVTQERIKHKSGKFGIFTETVNAAYTSWEYPEPYDENPVPLAVYDEKTRELVSVDGDRVDKDYAGAIAVAARYPLSKCKGKKSKGKSRKRAIQPVRCRDKHTPTPKRAKKKVLREFLEEEKRIMKEALEKNASEVNGFLLSLSRSVVASGSVVRDEQLSSNGDCVLGGLSAHVT

SEQ ID NO: 17694 - protein, 392 aa, unknown
  TnpB Polypeptide
MKRMQAYKFQLRPKAKQANLMLSFAGCCRFVWNKALALEKETYQTEGKRLGFYNLCKALRDWKKEEETSFLAGAHSQILQFVLKDLDQAYKNFFEKRANFPQFKKKGVYNTFRYPQGFKLDEGNSRVYLPKIGWVRYRKSRAIKGTFKQVAVSLSAGEWYVSILTEREVVEPIHPSKSSIGIDMGVAHFATLSDGSTIEPLNSFRKYEKKLAKLQRKQARCKKFSSNWQKIKSRIQRLHLHIANARKDFLHKTSTMISKNHAVVVIEDLKVRNMSSSKAGGKRKSGLNKSILDQGWFEFRRQLTYKLAWLGGSLVAISPQYTSQTCSRCGCVDKQNRQTQAKFKCTACGFEFNADHNAALNILAAGLAVTACGAGKAQAPAMNQEPAYSLVQ

SEQ ID NO: 17695 - protein, 408 aa, unknown
  TnpB Polypeptide
VEFRVIVTRVLTIDITRKLSREQRIIIDHLSHSAAKLWNVANYAFKNDQSDLYRLKHNLKDNFWYKNLHSQSAQAVIEKLQVAWKNHFKKHTDKPPGFQPKDGHFPVRWKKSGIRIVDGKLRLSLSKQTREYLKDKHGIESRYQWLELSKIPALGAVQEVEIVPKKIYGHWRYFLHIIYRKEKPDQTPGDKVMSIDLGVSNLATVVVEGEKQPYIFDGRALISKLRWFAKKRAHIQSVLAKQGHKHSKKLHKLVVKEHAYVKDYLHKVSRWIVELAKKHGVGRIDIGAMHKGITNMDLGHQNNEKLHRIPFGKLVKMITYKAQERGIKVESVDEAYTSQTCSICGTRDKTSRKHRGLYACKHCGVVLNADVNGARNILFRVVPSPSGDRDSGLGHPRRIRVLQAPNVV

SEQ ID NO: 17696 - protein, 395 aa, unknown
  TnpB Polypeptide
MLKAYQFKMYPTEQQIILINKTFGCARFIYNTILADTIQQYQETGKHQIKTPAHYKGIFEWLKEVDSLALCNAQLHVQSAFQRFFKKQNKFPTFHKKGVKDSFTTNAVNGNIKIVDNSLKLPKLGLVKTVFHQWVTGTIKSVTISKTKSEKYFASILTEQEVKVKAGIINEDNRVGIDASMEHLAVLSDGTKAKYPHYYRQYERKLAFLQRKLSKKTIGSQNYKKLKRRIARLHETIAQCRRDFQHKLSRQIVDQYDVIVMEDINFKTMSGALHLGKSVHDIGFGSFRAMLEYKARWALKRFLRADKWFPSSKLCSHCGFVNKDLKLSDREWRCPECGNVHDRDINAATNLKRYSTDAMSGRKACGEERGGQRTRTTLDEAGKVDVRVGTYEVSA

SEQ ID NO: 17697 - protein, 505 aa, Richelia sp.
MARGKTPSFVTELPLKVDSRQEKELLGRFQAARQLYNASLNEALVRMNLVRNSDLYHQAKKLRGGNKKERQDLFNKAREQYRFTDYALKTFATQTANRSKWMSVKLGAHEKQTIGTRAFKAVERILFAQAKKVRFKATTRFKSVQGQSNATGIRFINNQVLWKKLSINPIIDWTNPVLTHGLNSPVKYCRILWRNLNGKKRWYVQLINEGLPYQKPQNYVKEGTIGLDLNISNVAFVGDNYAGLLPFAEKVPTYEREIKALQRKMQRSQRLHNPSNFEPDFDRKVGNRIVSKKGKVRTGKKQWIKTRNYRRIQAKKAEIERKKAAYGKSQNRRIVNEILRHGNRIKTENVSVKGWQKRYGKAISAKSPGFFQSELARKAESAGGKLIKFSTQTTALSQTHLDGSRIKKSLSERVHRDVTGIKPMHRDLFSAYLARCVYGDVLSLRDAQWEYPDTEPYLLEAWQRYRTNCEQVTACESKGNHSPSEQFSNEVLNPSQIANKGEKLG

SEQ ID NO: 17698 - protein, 344 aa, Asgard sp.
MKGKEEYLKLKALAGAQTPQQLLLMVSNAWKGYTAAIKDWFINPDKYFARPRIPGYQPKNGKYVVVWASQQVRIKTGTVRITERLMKLGFPAVPIEKLPITEANHAIVRLKSFYDKYLLELVYEKEAKLIMEREVEKVLGLDLGINNLVATSDGLLIKGGVVKSINQFFNKRMAKFQAQLNKQELRNSNRKQALMRWRYNQLHDLLHKASRTIIRHCITNNITTLVIGRNKNWKQNIRMNRRNNQKFSSVPFYKLIRMIQYKAEEQGIKVLLISEEYTSQTCSICTSCSRSNRKHRGLFVCKNCFLVINADVNAARNIAKKAFPEFERIGDSGCVAQPTKIVTL

SEQ ID NO: 17699 - protein, 321 aa, Bacillus sp.
  misc_feature (318)..(319): Xaa can be any naturally occurring amino acid
MIINKAYKFRIYPNKAQATLINKTIGCSRFVFNHFLSLWDNAYKETGKGLTYGTCSAKLPAMKKEFVWLKEVDSIAIQSSVRNLADAYTRFFKKQNSAPRFKSKKNNVQSYTTKQTNENIAVVGNKMKLPKLGLVRFAKSREVKGRIVNATVRRNPSGRYFVSLLVKTEVQELPKTHSHIGIDVGLKDFAILSDGKPYENPKFFRSLEEKLAKAQRVLSRRMKGSSRWYKQRGKVARIHEYMANARKDYLDKISTEIIKNHDVIGIEDLQVSNMLKNRKLAKAISEVSWSQFRTMLEYKAKWYGKQVIVVSKTFASSXXPT

SEQ ID NO: 17700 - protein, 441 aa, Streptomyces sp.
VIVKLAVQVKLLPTPVQASALEATQRACNEAATWASRVAFEQEAKSNFALRKLTYSEVKMRWRLGAQAAQHVIKKTCDAYTTLKANLKAGNLGRADSKRYRRAVEKPIVFRPDGAQPFDDRMLSWQIAERRVSIWTVEGRVKGVAFAASSEQLTVLALYRMGESDLVRRDGMWFLLATCEVPEAPLNAEPVDFLGIDLGIVNIATTSDGAIMAGRDLNRIRGRERKLRTKLQKKNTPSAKRRLKKRRRKEARRARDINHKIAKHVVAEAERTGRGIALEDLTGIRERVRLRKPQRATHSSWSFAQLGQFITYKARRAGVPVVYVDPAYTSRTCAECGHVDKANRVSQAWFACRNCGFVDHADRNSSRNIRARAQELWRRGAESTAPAPPSHQRNGAGRRRSITATDARCASLSFQRQAVDQQPGHGESGGVHLQALRSTDP

SEQ ID NO: 17701 - protein, 162 aa, unknown
  TnpB Polypeptide
LAKAQRILSRRAKDSKNREKQRKRVAVLHEKVANQRRDFLHKKSRFLVSRYDAIGIEDISIKEMAKHKKGRKFSFGKSVADNGWSLFVQMLSYKLAWQGKHLVKIDKWYPSSQICHSCGNQNAKTKNLSIREWTCPKCGTHHHRDKNAAINIREETKRIALA

SEQ ID NO: 17702 - protein, 383 aa, unknown
  TnpB Polypeptide
MIRSYRYRLQMDNRSGAAFEAAMSVTNQIYNAALEERISAWSKAGKSITKYDQQKSLTQIRTEDPAIASYSVTMLRRPLEQVDEAFKGFFSRVRAGRTPGFPRYRNITRVRSFGFIEAVGWTLNGSCLRMKGLPQVRLKMHRPLDGRPLKLTVKRDARGRWFAIIVVKLPDVFGPTAQGAIGLDVGIENLVTDSEGRQYNRLDPDRRNSTRRSRVERNLARQRRGSKRRKKTQRRLSALRQREADARRTRHFQVASAILRAGPQIIVVEKLRIANMTRSAKGTLTEPGTNVSAKSGLNRSILDSGLAQFIQILTDKAESAGRLVVAVDPKGTSQECSGCGAVVQKSLAQRRHRCACGLDLHRDHNAARNVLRRGVVVPGRQVA

SEQ ID NO: 17703 - protein, 372 aa, Coprothermobacter sp.
MLKTFKYRIYPTKKQVRIMSQWLEECRWLHNYFLEERRKAWEERKESLSYHKQANELPELKKKRPSLTIVYSQVLQNVAVRVDLAFKHFFRRVKNGEKPGYPRFKSANRYKSFTYPQFGFKVSGDRLHLSGIGEVKIVLHRPLEGRVKTCTIKQTATGKWFAIFACEVETKHLPENQEAVGIDIGLHSFATFSTGECVEAPRFFRQEEKALAKAQRKLSRLEKGTWEYERQCKVVARIHERIAWKRHNFTHQLSRKIVNRFSIIAVEDIHANRMVHNHCLAKSILDAAWSEFFSKLAYKAEEAGRKLVKVNPAYTSQDCSRCGHRQHMPLSERVFKCPCCGLELDRDYNAALNILRLGLQSLGIQPLEALSL

SEQ ID NO: 17704 - protein, 457 aa, Coprothermobacter sp.
MAVFLFPLNWTTILEYNRNSKKFFGSIRRAKMTKAEKIKQTLHETKERRKNQIPVVYQLKINLDSISKTTKDKLFKLFLEAKWMYNYIVADIENRLNDTADKLKEVEIKDGENFEKRKIEVLSSQMKQGLVERIKQNLYALHRQKQNGYKTGKLQFKHYVNSIPLKQYGNTFKFVNQQKTRVKIQGFKKPFRVLGGHQIPEDSEIAKAELIRKPSGIYLFVTCYIDRDKYTKIWEQRKNKKGVVKPRVWQTFDASAGVDFKPAGFVLSSGLKFEWQIKETERLKKLQKELARKQKGSKRWYKTKEKIAREYERLTNIKYDAINKVCSFLCRYRKVCFQEDNIKGWKEGYFSKSVHHSAVGTVKRRLSDSLRADAVTIGHNVPTTKTCSNCGNQREVLLSDRIFKCPVCGQEIDRDLNAAINMLKVVGLDRSEITPAERETAARIFGSNPYILVSFLQ

SEQ ID NO: 17705 - protein, 411 aa, Candidate division WPS-2 bacterium
MKRIERVRLYPTAGQRRRLNFALDVTRQLFNALLQQRRDAWRMRRYSVSTKEQYRELTALRAEDARVAAVYRECQDAVLHRLDLAFAAFFRRIKQGETPGYPRFRGHLRWGQLEFPHGDRALKFNAEQTKVKIPGIGLVSLRKGRRVPTFGRAWLVRRGTHWFACFECERDVAPLPRTGKSIGIDRGVHVLAATSEGRLIGNPRFLARARLLIERFQRAVSRKRRGGKNRRKAVRLLARAYERIKEARRDFLHKAARKIVNASDAIVLEALNLRSMTRSAKGTMETPGRNVRAKAGLNRALLDSSFGLLRQMIVEKAVEAARTVVEVDPRYSSQECARCANVAAESRRERRYVCIGCGFRVHADVNAALVIRGRAELRPAARGASLEDLTDPRSVPDAGAELARCDQEVAA

SEQ ID NO: 17706 - protein, 362 aa, unknown
  TnpB Polypeptide
MDCTKTLKLRIKDKHANVLRQMAREVNQVWNHINAISAKAARPFHGKPQFLSGYDLQKFTAGFSKCDDVSVGSGTVQLVCVEYATRRKQFKKTRLNWRVSNPKSAKYSLGWIPFKGGHAKYKAGQIHFAGQKLSLWDSYGLADYELRAGSFSEDSRGRWYLNVVVKVQAKASAATASVGIDLGLKEAAVASDAQRIQGRFYRKLEARLGIAQRAGKKCRVKAIHAKIKNQRKDMLHKFSTAMVKDYGAIFVGDVASVKLVKTKMAKSTLDAGWASLKTMLEYKSHQAGIVFEVVNENYTTQTCSCCGVIPASSPKGRAGLRIREWTCSGCGAVHDRDVNAARNILAAGHRRLAAGITVSSGR

SEQ ID NO: 17707 - protein, 385 aa, unknown
  TnpB Polypeptide
MKPKRIGKKEGESRICYRFRIYPNKEQREKLDYVLEICRQAYNILLGELQDQVVIDKNMIQAILPDLKICEPRFKEVYAKTLQYECYRLFSNLSTLSAIKKKGRKVGRLKFKGKDWFKTINYNQSGFKLDRKNKRLKLSKIGDIKIKLHREVEGKIKHITIKKSINKWYASIITDYNLKRKKGKGWIGLDVGIKNYLTDSNGNKINFSKDKYLKEQRKQCESLSRKKEKSNNWNKQKLILQKFYEKISENRKDFLHKLSDKYVEEYKYIVVENLNINEMVNKDKQEKKDLTTKVIRGLNRNIHNAAWNMFFQMLEYKLKQSGGQLIKVDPKNTTQMCSKCGEIKKGEDKLKLKDRIYKCNKCGFELDRDYNAALNILERGKKQKV

SEQ ID NO: 17708 - protein, 384 aa, unknown
  TnpB Polypeptide
MNMIIQRTIKLRLRPAPEQSSILTQAIQAYTDSFNQVSAYGWTHKVFNSIELHKATYLAQRDQFALPSQLAISARIKATEALVSVKALLRKGKKAHQPQSLRCPIRYDQRSYGLWFDRSEVSLLTLQGRLRITFTIAKHYQQYKTWKCCCADLIQDRKGRWWLHVVMSKDIQEIPPNDTDNSFVGVDLGIVNPAADSRGKFYGSEHWEEVERRHAVLRSELQSKGTRSAKRKLKRTSGRQRRFRRDCDHVLSKRLVQSMESGQTLVFENLTDIRGKTKLKKAQRKRLHKWSFAQLQTFVEYKAQAAGVSVVFVDPRYTSQKCSQCKHVSRSNRPEQSVFKCRVCKFTCHADHNAAINIRANYLQFKGLYVNQPIVATQGNISFG

SEQ ID NO: 17709 - protein, 401 aa, Kamptonema sp.
MYQAHKYRIYPNTEQQIALAKSFGCCRWYWNYSLNLCQETYKATGKGLSRLAIQKLLPELKKEYPWLTDAYSQCLQVVALNLSTAYKNFFDKRAKFPRFKSKHGRQSISYPAHVKFEGDYLKLPKIGLVYCVCHKKFEGTIKTVTVSKNPDGKYYASVLVDNGKEKPESTTDGKAIGIDLGLTHFAITSDGSKYNNPKHFTKHHLNLKRKQQKLARQQKGSNNRQKAKKLVAKVHSKISRCREDFLHKLSRKIVNENQVIAVENLNVKSMVRNHNLAKAISDCGWGRFCTMLKYKAENEGKTYLEVDRFFPSSKTCHVCLNQVGSLPLDLRNWTCEHCQTTHDRDVNAAICIRDEALRILSLGTSDTANGGNVRRTGKTSVLSDAIPDEVRSPNFSDSKLG

SEQ ID NO: 17710 - protein, 424 aa, unknown
  TnpB Polypeptide
MARKKKQKEEIPMQRLTAVAKVVNLNDQDALLLGLLGFSGTKLWNVTNHYRRIAWNETGKIPGFSDQCREMKSNRWHKLLPSQSSQEILGEQDDSYRSWFSHRKNGNKLAKPPGFRKKSILSTITFKQNAFEILSDNQVKLNLPKTYDRRKITLEYHLPPDVALGKVQQVKLIYKPRSGEWYLHINYKVPVKYREAGNVMALDLGMINIVAGLLTNGFSFIVPGGELLAIDRYFQKEKAKCTKSTSRHCMELNIKWGLQRRHYLHVLTKWLVNLAVDRNVSTIVVGELKGIRIDKDWGDKSNQKLHAWPFNKIIELLTYKAALVGIRVVKVSERNTSTTCPICGKRVKKARIHRGLFVHCGKAFNADLVGAYNILLRYLRETGSRSCPDWSGIVGALARPAVNLFVWRKTTPLGREQGTFRQVS

SEQ ID NO: 17711 - protein, 665 aa, unknown
  TnpB Polypeptide
MSKKKKEDTSKDEFEKFDYMKTIKNNINNVIKDKAVLPIINDLVIRTNKIVIHSCNFIKLYCIYLYENDLEFPSIDKNFICDVFKVITKRKDNRGATPEKDYSDLLKNLYKFYNEHYITTIYDNEIIYYDKLSYILAYEAIDIEKNINNNIQEHFITHLNQFVNHSFNFQEQKDEIKKIKGKEVRKEKYKSLTNEFKKVKDDLVSLTNDLKADEKYHNWIKEHKKHIVPNKPSFDKNSIYYDLHSNTKDYLKSFIYINIQLEKLNDILLGDSTDSDKVKQIKLFNILPLRSNIIPKNICIDTCALISNFLGDESTTTHFKNYKKENNQFKLWNRVLKLDSKIFKKNNYEFNYMIRTDGISVGILFIRLGSNGLPLKHYNPINKPEENTKYIEKEIITDELRSKKIVCVDPGCSDLIYCGSKDNDGNLETFRYTQNQRRLETRTKKYNKIIEEVNNTTFINGKNIKEIESVLSSHNKKTCNYEKFKNYLIEKNKLNLLLFSHYEKTFFRKFKLNRYINTQKSESKMIKNFTKKFGEPNDVVFIMGDYDKGSSNIEGLEPTICKKFRKIFKNAGFRTYLVNEFRTSKLCNCCNREISPFMIRQSHKPNDIKVNKKITINGLLSHQEDKQKCEIIHNRDKNAVQNMLNIVKSIFTIGRRPDIFTRIHT

SEQ ID NO: 17712 - protein, 249 aa, Planktothrix sp.
MIVLEYKVKGKPNQYQAIDQAIRTTQFVRNKAIRYWMDNSRELKIDRFALNKYSTTLRNEFPFVADLNSMAVQSASERGWSAISRFYDNCQKKISGKKGYPKFQKDCRSVEYKTSGWALHPTKRQITFTDKNGIGKLKLLGKWDIQSYNVKDIIRQWIEYFAAKFDKLAIPVAPHYTSQKCSNCGVIVKKSLSTRTHVCNCGCELHRDTNAAINILNLGKQARGGHPRSNANGLETSTLLGETLVAARI

SEQ ID NO: 17713 - protein, 434 aa, unknown
  TnpB Polypeptide
MIVKRVVKFNIKKNHVDYNYIKQQLIESKEIYNYANYIIRQIFFKKSKNHLYNLDFITEYPELKDLFTQYIEEDKQFTSLFRNIICKFAKLKEFSINSKIVQDIVRKLNSDWNSYWALFNLVKNKEYEKDVNIPKYKKQYNLVEYNNQVLSKKKLKLGFIGTDKMKQGIKIADFHKDLNCKCFRIFYKNNNFVCELIYEKEINDQTVSTGKAASIDLGLENLFTVAFNYNKKGISFKGTKLKSINQYFNKEKSKLQSLLPKNKYSSKRILHLFYKREEQLRNVIGFYSNRLMELLVNEGISTLVIGHNKNWKDKINIGKVNNQNFVSIPFNKVIDIIKYKLEDHGIKCIEQEESYTSKASFLDNDNIPTFNEDNNQKHTFSGKRITRNLYQTKNNQIIDADLNGALNIMKKANIKMLTSLDYLKFDNIFTRKVI

SEQ ID NO: 17714 - protein, 575 aa, unknown
  TnpB Polypeptide
MQLTEQFHIPDEHHEACDRLTTLVETHTRRLLEAEYWSDDHLNAISTHSGQSYTYIRDDDYDAFEDVKEYVYNRFKRCVYHRVTQILDAHTDEYHAFQFVLDTVEERKVRRIGWHRLRNRLFDQDSLYIEWRVLESVVEQLNTFYDRHGRFPDTYTELVGVPEPNGALPYAPDKGDYHIHDLAIEEGDVVVVLNAPDSLSPDSYHDWVDHEIRFPVHSRFIEMLDTGNVKAPTLHASEHGYTLDVPVGVPEQDIDTVDDRVLSVDLGVKKQATAVVLDAGKKTQEQVLPPEFIDHPAKDKLFRVKSDAEGIDDRLGMLRRQGKAHTERFAHLLGEYRQTRRKERRLREQIQHDVANRLVWLSIEYGCGTIVFESLGQIDSPDTSGAVAWSISSWARGKLLDLVEYKTGLVGIDFKTVNPWGTSRHCPRCGEKGRTVKAPDDHTELLHGGHFHCPECGYECDRDVVGAVNIGRRYLSDSQIEEANPAAYTEAGNHASFPSPQPGARSAGVQFTTDQQDMASGRQTRLSRFRATPLTVTRGETDTGGLHQNHGSNTGLRRPRCSVTRHVLASASDNG

SEQ ID NO: 17715 - protein, 235 aa, unknown
  TnpB Polypeptide
MVKIRDKQVPKGRILNATISKEPSGKYYVSLCCTDVEIKKLENANSNIGLDLGIKEFCIISNGQTIENPKYLKKSLNKLVKLQRELSRKSKGSSNRNKARLKVARLQEYISNQRNDFLQKLSTKLIKENDIICIEDLQVKNMVKNHKLAQSISDVSWSEFIKQLEYKASWYGRKVIKVDKFFASSRLCNKCEYKNEEVKDLNIREWICPKCGTNHNRDINAAINILNEGLRRITI

SEQ ID NO: 17716 - protein, 413 aa, unknown
  TnpB Polypeptide
VTKAERIKNSLQETKGRRKSQKAAVFQLKLQNLSKKKTELLNRTFAEAKWLYNWLVSDITRLSLPVNRINKVDVKVRETFEKRKLTLLGSQVKQSIGDRLKDNLRALAKLKKNGFKVGALKYKKFVNSIPLKQYGITYKLDFDRNRVRIQKLGYFRILGLHQIPNHENVEIANAILVRKPSGFYLHVTCYLPKEYFKRELVGESIGIDFGIDSKLTLSNGLKIDFELHETDRLKSLQRKIARAKKGSSNRQRLRNLLRREYEKISNRRKDIQNKIIGYLKLYGKVIFQDDFIKGWETLFGKQVNSSGIGGIKSRLRNSLETPIVLDRFEPTTKECFACGKSLELSLSDRWLECNCGWCCDRDVNSALVIQKKGASQCNDNNVGLDRSEVKPPERETAVRILGSNPHVRISFSL

SEQ ID NO: 17717 - protein, 413 aa, unknown; identical to SEQ ID NO: 17716
  TnpB Polypeptide

SEQ ID NO: 17718 - protein, 557 aa, Bacillus sp.
MKKAYFSKRIWKEDINVLTVAEMATLSKLFNCAKRFAFQTLVRQKRWERELYKESIHLVVKRKFGINDYIANSIVRESQALLKAQTELNKLYIKQTDEKVKKIKKKLKKERSFLTTLRKIKDSCVEGNLRFPKNTNYALHSSGLISLECKSCSLIWMNTYLFEHQYLDLTIKRLKAKIGRLEHRLFRLEEKKEKLATHISSVVFGSKKLFKHQFTKKEFVQDHQSWKELFLAARNKQVLISGRKDAAAGNFVFTYQPDTNELRMTSLSGKVVTFSNVVFPYGQEQVNQTVLRQWKCKDKKANGKPISWCVEDHGDYYIIKCLLDVEEEVLVNFSTSGGVIGVDCNVDHFAWTDVSKDGNFLESGTFSFTLNKKTNGQSTKILEAEAITLVDVAIQKNKPIVMEDIDTTLSKTGDAYGNKKANRFKSIFAYRKMAQAIESRAQKMGVAVMVVNPAYTSIIGKLKYMRKFGISIHQAASYTIGRKGLGYKEKAPQVLRRHIVRHQLPYCKQWWALNKKLNVRTEMFYQLFDVNKPSGNINFTHKELTEKESKHLKKAFA

SEQ ID NO: 17719 - protein, 400 aa, Cupriavidus sp.
MQRFQAFKFELKPNGEQQCNMQRFAGSCRFVYNKALALQKENYEAGGKFIGYVAMAKRLTEWRNGPVTPWLKDSPVHPLQHALKDLERAYKNFFAKRTAFPCFKKKGLRDSFRYPDPKQIKLDQGNSRIFLPKLGWIRYRNSRNVLGEVRNATVSQSMGKWFVSIQTEREVEQPMPQATSAIGIDVGIARFATFSNGSFLEPLNSFKRHEAQLRRAQRSMSRKTKFSNNWKKAKARLQRIHARIGNTRRDFLHKATTTISQNHAMVCIEDLQVGNMSRSAAGTAEAPGKNVRAKSGLNKAILDQGWYEFRRQLEYKIAWNGGWLIAVPSQHTSRICPRCGHAAAENRQTQERFACVTCGFEGHADLVGAINILARGQRVAACGEPAQSCRSAKQEPTEAI

SEQ ID NO: 17720 - protein, 304 aa, unknown
  TnpB Polypeptide
LGKLSKYPKFKSIRSFRSFTYPQNTGFSLDPIGKRIYLGKFGKVKAVFSREIHGTPKRCTIKKFPCGHYYACIAVDLGDSLNQQPILVRQRTKVGIDLGVSRFYTTHDGEYLESPRFLRKKLSKLRAAQRKLSRKQKGSNNWRKQALKVARIYENVKNTRRDHHFKVAHYLVNKFDQIVCEDLQVNTMFRKKHESKQRRALLDVGLYGFLVILEWMCQKYSCILTKVPPQYTSQVCSRCGSVVKKDLSVRIHNCPHCGLVVDRDINAAVNILNKSNSPVGTTGGVMTEVITPTLVEMSLIRGIN

SEQ ID NO: 17721 - protein, 384 aa, unknown
  TnpB Polypeptide
MTKEKKTRKEIVSDIKEQILLSKDSKNNVEFEHQSLFEQIEDFVIDMKSQGLIYKDIREFIELFVETPKVTTVSHNIQYPTLTIPDLDVTEKTVVQEGKAGKYNIVITELYKEEISRTKVIEESTITEIVKVPMVSESIETKGNSSSGTGIGSGGISYVGESYDFTKTKNNKGLSAGIDINSSYKDDNIITVVFSDQRRPVNFVCEKYKNYLASLKGSLGFDPTDKNFNSTTTGAASNFYRKTLNFTISVVQKLKEFGVTRLYIGRSGCMNLNAGNHFMMSIYAQLITACSIHSLEVVVVDEYRTSLADSIANDDFEKSKFSGERSKSNVHNYKSGIGVVVDADVNAAYNILRKGTKGDFRVSPESIKVSFNKKTVQLPEVNYM

SEQ ID NO: 17722 - protein, 396 aa, unknown
  TnpB Polypeptide
MIVLEFKLAGAARQYAALDEAIRTTQFIRNKCVRKWMDERGVTPSDLNRYCAVLAKEFEFAGKLNSQARQAAAERAGAAILRFYKNCREKKPGTKAYPRFQKDGRSVEYKLTGWKLDDGRTRLTLTDGFTAGTFKLRGTQNLLGYALDQIKRVRIVKRADGYYGQFGIDAERRAAVEASGKAVGIDLGLSHFYTDSDGATVENPRHLRRSEKALKRLQRRVSAKVKGSNNRAKARDKLARKHLKVGRQRKDFAVKAARALVMSHDVIAYEDWRVRNMVQNRRLSKSISDAGWRSFVTWLDYLAHVYGKVVVAVPPAYTSQNCSGCGARVTKALSERTHVCPRCRTVLDRDHNAARNILAIGLRALGETTAGHAERNAWGQSALYPPDASPLDTAAG

SEQ ID NO: 17723 - protein, 251 aa, unknown
  TnpB Polypeptide
VRVVRRADGYYTQFCIDVERTENHELTGKNIGIDVGLNHFLTDSEGQQIENPRFLRKDESSLKKAQGRVSRKKKGSSNRAKARNRLGRKHLKVSRRRKDFVVKTARCVVQSSDLVALEDLKVRNMVKNHHLAKSISDAAWSQFREWLEYFGRVFGVPVIAVPPQYTSQDCSKCGVEVKKTLSTRTHSCPHCGHVQDRDWNAAINILKKALQYWAKNTVGHTEINASGEHDLCAVRETKQGKPTRRKRKPKK

SEQ ID NO: 17724 - protein, 386 aa, Actinomadura sp.
VKLVVQVKLLPTPEQAAALADTLHQVNTAANHVAVVAFEEFGQRGRELPLRRLCYGDLKAAGLGAQAAQHVIKRVVDAYTTLRATIRNGRLGSPASARRRKAESKPIVFRPDAAHTFDDRCLSWQLDAGTVSIWTVAGRCKNLRFACSPDQAKMLAAHRKGESDLVHRDGKWFLLATCEVPEPDVYEPADWIGVDRGIVNLATTSDGDNHQGRRLSRYRRWQARKRAELQAKRTRAAARLLKKRARRESRHARHVNHTIAKQVVAVAARTGRGIALEELSGIRARVTVPRDQRARLSSWPFHQLGEFIAYKARRHGVPFIAVDPAYTSQRCPRCGHTDRGNRRSRDHFTCRRCGLAGPADIVAGINVRDRARSAWVFVNMPQPAPA

SEQ ID NO: 17725 - protein, 383 aa, unknown
  TnpB Polypeptide
MPLSFTRTLRLKVRTEAYAWLNAAAIEVNEVFNYCNETSLKAATRTDTKRKWLSGFDLCYLTAGATQYFDKIGADTIQSICNHYAQKRQAAKRLKLRWRVSGGARRSLGWIPFKALSLKRQGVCLRFAGKCVRVFERERLQGVKWQGGCFAQDAVGDWWLCLPVKVEAEPSIAPREAVGIDLGLKDIAVTSEGERLAAGRWTLRLADKISSAQRRGHQRQAKRIHRKASRCRADALHKFSRKMVDRYQRIIVGDVSSLKLARTRMAKSVLDSGWGMLKSFLDYKSQQAARTFEVVSERNTSVTCSTCGALSGPRGVNGLIVRSWVCSDCGESHDRDQNAARNILIGSRCRTSVRGNESSASLVPPSSASRAREAGTDTARAAA

SEQ ID NO: 17726 - protein, 488 aa, unknown
  TnpB Polypeptide
VSALNITSSYQVRIVNCSVNLNDTVRIYQEALSYLIGIVNENWDAVKSITVGALEQQRYIEKLVHGNKNREAKYPEFDKKFYKYPSYLRRATITAAIGAVSSYQSNLANWENTDKQTAVPTLQVDRKSFPTFFRDDMFEVEGAPEKVKVPKNPKAKDKLTPEEKKIEKKKRQAAQLKNSQNEITALNDKHTVYLKVYHKNDWVWATVTLRKTDIAYLRKYWMHACASAPVLEKRFGKYSLRFSFEENIFLSKTPIKKQRICAVDLGLNTDATCCIMTADGTILARKFINFASDKDHLYHVLNRIKKFQRLHGSREAHNFWAYAKRINDELSKKIASVIVEFAVLYSADVIVFEHLNFKGKKASSKKQKIQMWRKNGIQHIVEHKAHRCGIRISHICAWGTSKLAFDGSGKVTRAQNNHSLATFESGKQYNADLNACFDTLPRLKSWDSTSTRSLADPVLHLSATEWCPIRAGVITQGSPFELIPYDIC

SEQ ID NO: 17727 - protein, 404 aa, unknown
  TnpB Polypeptide
MFNLTYEFKLKPTKQQSQIFDEWLEVTRRVYNYALAERKDWYKSRSCQINSCSLLRCYIIPADATRPTYASQCKSLTAAKKQNPELKKVQSQVLQQTLKRVETAFTNMWERNMGFPRFKKKGRMRSFVFPQMKGDRFKPGMVQFPVIGWVKFRQSRDIADDGVVKQARIVKRVSGWYVMLTIQWDIDLPSPMPHGEAVGIDVGLTSFVAASNGLLVKRPRFFGDAERKLKLLQKRVSRKPIGSKNWQKAQNKVAKLHEYIANCRKDWHRKLAHQICDNAGMVFVENLNLVGLSRGMLGKHCLDAGFGQFFTILEQTCCKRGVYFQKVDPRKTSQICPNCGIETGKKELSERTHVCLNCGYTTDRDVAAAQVVAMRGLAAVGHTVKMLAEGKFIGILMKQESSSL

SEQ ID NO: 17728 - protein, 390 aa, unknown
  TnpB Polypeptide
MTTKFVYRFKLEPTPEQERGLRRLAGARRFVWNWGLARRRTHYAEHGKTLRYPAMNLELTTLKQDEATKWLCEIDSQALQESLRDLDRSFVNFFEKRARFPKFKKKRKQRDAFRIPQRVKIDGERVYCPKVGWIRLRLSQPVTVPTKSATFKRDVCGDWFVTLIAEREVDAQIALPINPVGIDLGLKTFATFSGDAPDIPIPKFFRKAERVLRKVQRVFSRRKKGSTRRAKAKLRVSRAHRKTARQRSDFLHKTTTALVAQHDLICIEDLSVKGLAKTKLGKSILDAAFGEFRRQVEYKATWNGKLVSVIGRFFPSSKSHRTCGTIKADLTLSDRTWTCDGCGSSIDRDKNAAENILAEGLNLVAAGQADTQNAHGASVRLAKREQLVLK

SEQ ID NO: 17729 - protein, 390 aa, unknown; identical to SEQ ID NO: 17728
  TnpB Polypeptide

SEQ ID NO: 17730 - protein, 417 aa, Euryarchaeote sp.
MEVKRTEQIYIGENETISKLCHISKNLYNQTNYVLKHQFLKKEKLSSYNDLVKLFQNPSKNDGENNYQKLLAQTAQWTIRKVREAWNSFFKAMKAWKKHPENFIEMPKPPKYKNKNGEFLLIFTNQQCKIEDGILKFPKRMNLEVKTRLDDVNLREVRVIPQGVGYIIEIVYMKEIADIAKRETHRIMGIDIGLMNIVTIGDSISNEGIAVKGGVLKSINQFFNKEYARLKSISDRQTGNKQLTKREKRLFMKRNRKIKDIMHKLSKAIVQYAKTRNIDTVIIGHNNGWKQSANMGRINNQNFVQIPFNTLINQIKYKAEEAGIQVIIQDEEHTSKCSFLDNESIEHHDKYMGKRIKRGIFRSKDGILMHADLNAVYNIIKKAVPEAFANGIEGIGLYPRSLSIPEFTGMITSKGGC

SEQ ID NO: 17731 - protein, 317 aa, unknown
  TnpB Polypeptide
MRRGDRKRRRPVARRLFARVKQTLVKLEGDKLRLTLKPGEYVYLDLSHRYFKLPSKVSSTGLGEPVITAEKVHLPVHFEGGAQIEGKPQVAWDFNLLSLDGYSPETGWVRIDTSRLASVHISSFEKRRSVQRRASRSKKARRILAKYSGRERNRARKHQVEVARVITSVSGAVGLEELSKDGMYTRSRIWNRRITRSDWRSIARILEEKLGEDKVAELDPYNSSTFCSRCGWFNRDLNGAEVFECGGCGLRIDRQLNAAINLYMRLRFGYTVTWKDGKKQINLKMGGRFPEGVVGRRRLTIASGWVRPDGGGAEGEQ

SEQ ID NO: 17732 - protein, 674 aa, Desulfurococcaceae sp.
VGCFLQASLALTDGEDASIVTRTVIVRSERIPKKLFRIFIELEDTYRNVVEQLVICAAKEGITSFIKLKALKYREMRNLYPHLPSHYVHTACQDASTRVKSFLKLKKEGSTNKEYPSVRRISIWLDDHLWRLEGLTRIAISTHRGLIKVDLVPHKQFYKYINSGWRLASEARIKLDRKERRLIIYLIFRKDVRLYKPSGYIAVDVNENNVAVLINRKVYLFETNIEKITLGYYYRRKRVQEKYDKIYDARCRAKRKILRKLREEEKKDNTRWKVANIIVREALKHGYGVVLEDLGDKPAENMISRIRDEQLRHRIFQAAFKGIQRAIEEKAKEHSVPVIYVNPRNTSKQCPIHRSEIKYNGSRIGICSLGREKWHRDVVACYNLLLKALGGDGSSAPSHPGFNLDGSHMPFGSTAAHEPMGIKRSLWARLKSLDIPSYPGTNGLVRFSDEMLKRVHITGLSKLPIPEDEETRRRLRGWLLPVKFDVGLSFFMVFIVTMPAVILTIEVLRPMHTAPSGLALVAAQVAWLTQTLGPWAGVIWWLGAFFALWGTFYSLHEVYMWTIYDMLRGTFRKAVDITPNKVRLYLWPYLVIVGSILFITGFSLPMLAAFATAATHLFALALWGIALLYLNMRYLPKPYRPHIVVVILATIGIAVYLPYGIIQLIQVFIPTFRI

SEQ ID NO: 17733 - protein, 388 aa, unknown
  TnpB Polypeptide
MAKNVKRAYKYRFYPLPDQASELSRTFGCVRKVYNLGLEARTVAWHQRQERISYAQTSALLTQWKREQDLSYLSDVSSVPLQQALRHLQSAFAAFWEKRARYPQFKSRKRSRATAEYTRSGFRWRDGNLWLAKMDAPLDIRWSRPLPAGAEPSTVTVSCDKAGRWFVSLVYECRTTPLPGRDNVVGVDAGITSLVTLSTGEKIPNPRHEARDRVRLARAQRALSRKKNGSANRDRARVKVAKINARIADRRKDYLHKLTTRLVRENQAVVIEQLSVRNMVRNHSLARAISDAAWYEMRAMLEYKCDWYGRDLVVIDRWYPSSKTCSVCGHLATVMSLSVRVWVCESCGTQHDRDINAAMNVRAAGLAVLACGAGVRPQREASREGGRP

SEQ ID NO: 17734 - protein, 519 aa, Opitutaceae sp.
MIVYRSTRYRIYPTPEQEARIRRWQDALRWLWNLAHEQRLMGLARPKDERIFVTYLDQQAELPALRAAAPWLADVPNAACARVLRELDRAWERCFKKVAGQPRWKRRAGNSWLFAPDATRFTVDDGAVRFQKLGSILAVTHRRPPGEPRTCFIANDVGQWFAVVLSRLEIVAPAPSVLPAVGIDRGVVNIIADSNGRVVENPRYDDRMQGRIAKAQRDVARKFEAAKADGRRPDGANIRKGRERVAKLYRKVRRQRDHLLQVQSTHYAEQYGTIVLEKLAIVSMSASAKGTAEKPGRNVRQKSGLNRGIRSAAWGRLAVLTMRKAEERGGRVLEVPAAYSSQTCSACGHVAAENRRSQTAFLCVVCGHAEHADINAAKVILARGLAGNLAAPKAPKKTLRVLRRKPKATATAAVPAVEACGGDLPVTGPGEAGEPRREARIRSSERRGSLDCVPTAVPLSARLSCQYHAIVCDRRDADGAFVGDANRRIGHSLLDDPRPILQEDPSDRERERERFQRRI

SEQ ID NO: 17735 - protein, 390 aa, Clostridium sp.
  misc_feature (302)..(302): Xaa can be any naturally occurring amino acid
  misc_feature (311)..(311): Xaa can be any naturally occurring amino acid
MKKLKRAYKIEINPTDEQKSKIHQTIGVSRFIYNFYIARNKEIYEKEGKFVSGMDFSKWLNNEYIPNNQDKKWIKEVSSKATKQAIMNGDKAFRDFFKKAKGFPRFKKKKNQDVKAYFPKNNKTDWTLERHRVKIPTLGWVRLKEFGYIPKNSVVKSGTVSQKADRYYVSILVEETYIKISNPNNEGLGIDLGIKEFAICSNGNKFKNINKTSTVKKIEKKLKREQRKLSRKYESLKIRNKNIKEGRATRQNIQKQVVKVQRLHQRLANIRTDYINKTVFSIVKQKPSYITIEDLAVSNMMXNKHLSKAIXSQKFFEFKTKLMSKCKQNNIELRIVDRFYPSSKTCSNCGGIKKDLKLSDRIYKCDCGFNIDRDLNASINLKNAKKYKIA

SEQ ID NO: 17736 - protein, 553 aa, Streptomyces sp.
VKPPRHPGGGPPRPPGPPRGRTRRQVFSWPCFLPCGCSCTSSCGWGERKLSVGSSFSKMSKELPTRVLTRPLGRAHSRIAVNLTPQNPSCPRSRTSVPRKELLSCAGSDHGRHPWPQMDDQAHAARTLRNLLHDWWTMLPRERRSLAAADAAIRQARKEIDWLGALPAQAAQAVLKTYFQAWKNCWDGRADEPNFKARFRAVMSVDIPQGPDLNIVRVHRRWGMVDIPKVGRVRFRWTKDLPVGKRAGTVDRITGARLVKDALGWHIAFRVQTLEGAPEPHQGPEVGIDVGVSVPLALSDGDTKPHGGWLTEKDRENASIRLDLQGLQSECRGAAELGRLRHRHQRVRRRLHPLPRLLEHRRRDPAVLGVVPVLGQAGHRAQVDIVRVQVRQEGLLRKRDVGVRSQPRLQHRLGNGLQRQRHLALKVLARSFKTLAVKLAWAIPSRRSPGIEAVSRSSRSRTSRFEPYSLGVHACGPDTEMAGARGAPPHPAPAKNRGRRRGRPRGSVPSADRGAGADPARAALGREARRRTGPARRHARAVLLRHAGSFRQW

SEQ ID NO: 17737 - protein, 895 aa, Streptomyces sp.
VVGGLREVAQPFVASGPTGAAIRTRLKHLTPEDEQVLRLVGARLGALASKDLAARCRDGLEHSADTWAARKRELTAVSSSRWAGSITKASHDQWALARRCQLAHVQSLEAGIKTVVHRLSLPLGQKGSKKAPGGYRSRQEWHAKARRLHVLEDRLAVERADREAGLVHVARGGKRLARTRHHLDAAQLTEAEWRELWEAERWFLAADGESGKRYGNETIRVSPGGEVSIKLPAPLAHLANARRGRYVLAFRITFPHRGTEWADRIEANRAVAYRVHLDVGRDCWYLTASWQIPPTPAIPIRAALADGVIGVDMNADHLAAWRLDVHGNPIGAPRRFVYDLTGSREHRDAQVRHALTRLLHWAQACGVKAIAIEDLDFTADKTREKHGRKKRFRQVISGMPTGRLRTRLTSMADQTGIAIIAVDPAYTSRWGAQHWQKPLTSSNRKTTRHDAAAVAIGRRAQGHPIRRRTAPPPHDQSDRAGHRTVQARPEVSGREGTRPRIPGPRTRSVPPGRGANAGDQNAQHRSGRSAEHRSWQQDSPAQSLGSVTGWLPSPHHHLTEAPPHPATSHIDSAQLLVRKTPRRTLVSMTSDDTAPHALTRSIETHTALSPAQAEDVLRLLAEAARADGQQAVSEQGRLQLKGGAREGVRHLLLTLGDELIGYAQLEDTDPVEAPAAELVVHPAHRGHGHGRALGSALLAESGKRLRVWAHGGHSAARHLAQVLGLTLFRELRQLRRPLTDLDLPEPKLADGMHVRTFVPGQDDAAWLALNAEAFAHHPEQGSLTQRDLDDRKAEVWFDPSGFFLAFRGDELVGFHWTKVHAEEGLGEVYVLGVRPGAQGGGLGKALTTIGLRHLARQGLPTAMLYVDADNKAAVTVYERLGFRTHETDLMYRSES

SEQ ID NO: 17738 - protein, 311 aa, Streptomyces sp.
VRVTRLNRRWACVRIPKFGDVKFRLTRPLGGRIKNASIRTDSSGRWYVGFGLHIGRTATPPNGHPPVGVDFGVKQTAYLSDETESRLMPQALTEGEKQRLTGLERRKERQIAQAKKHRGGGYGNRLRRTLRAIAELKARQARRRLDFIHMLTTDLAKNHGLVAIEDLRVKQMTRSATGTRAAPGVHVSQKAALNRAILDNLPGERRRQLVYRCPAYDPTSLWCTLRGPRRHAVSATFGALRRASAATGSSVPGAGTPTTRITMPRSSFSVVSFVVRRAPPVPQDIAVNGTHPQAMPGLRCPAPVPGARVNP

SEQ ID NO: 17739 - protein, 223 aa, Streptomyces sp.
VSIWTTSGRVKNVAFTASPEQLATPALYRKGESDLLERDGMWFLDATCEVPEAPLNTGPVDFLGVDLGLVNIATTSDGEIMAGRELNRTRLRERGLRTKLQKKNTPSAKRRLKKRRRKEARRARDINHKIAKHVVTEAGGTSHALYAVGEHRSRNRPGRPGRPPITGTSGTPHTTVVPLGTQWSGLGDESDRKRRTGSEPQRAAEGDRSPGIPKGEKKGEEWP

SEQ ID NO: 17740 - protein, 307 aa, Enterococcus sp.
MGVLKAYRFKIYPDAEQKQFFIRTFGCVRFTYNHLLMHRKQNGDSKLTPASLKRDYPFLKETDSLALANAQRNLDKAFRRYYSGQSGFPNLKNKSNMWQSYTTNNQKHTIYFVEDKLKLPKLKSLIEVNLHREMKGEIKSATISAKNTEEFYVSILCIEEVEKLEKTHRNIEIRYCPKQLVHFTEGSCPISFNQEKLLGRIKQAKRTLRLRAKVAKKRKVLLADAKNYQKQKKKMNQLLVQRKDKKDDFINQLSYFLVVNFDCILVQEKIPKTFETMQQEFTSNDWQQFLSKLRYKSEWYGKKLIIR

SEQ ID NO: 17741 - protein, 479 aa, Oceanobacillus sp.
MAVYRTLQIWVKKGHRMHPYFQNMCQNAKNMYNITNFYIRQIFTGLKQEKELQPLQKEVLESLQTHLPAINANQLQAYQKRSAKEQKKAKSEQKEIKCHLFEMPSKDKPSIHYPLLDALFKSMKQIDYQSLPIQSSQGIMRTVFQNWKAFYGSLREYKKNPIKFSARPNIPSYCRLKEKEVIFSNQNCVVKDNKFLKFPKTKLCLNIGKLGYSEGKLKQVRVIPKYSHYVVELVFQVPIEVEKKESKNRLLAVDLGIDNLATIVTNTGKRAVLVKGKNVKSVNQRFNQLKAYYTGILRQGKQGNEGTFTSKRLEQISHKRFLQIKDLFHKASFQIVKIALEEDIDTIIIGQNKDWKQYATMGKRNNQSFTSLPHTLLIQMITYKAEKQGITVLLTEESYTSKASFLDNDDIPVYGQKNKNAVFSGKRIKRGLYLSKKCERINADVNGAANIMRKVFKDAFHHSFSSIEALQRPLSLTIK

SEQ ID NO: 17742 - protein, 238 aa, unknown
  TnpB Polypeptide
VEAAQRNLNPTHALAIDFGIDNLMTAVSNRGESFLIDGKRLKSINQWFNKRNTCLQSVKDKQHYGKKTTRRQAVLQRKRNNQVRDYMGKAAKQVVTYCIRNDIGTLIVGYNTTFQRSSDLGRQMNQVFVGIPFGILRRKLKYLCEMNGIRYVEQEESYTSMASFWDLDEMPVYGEAGLVPPVFSGRRICRGLYQDRSGRRINADVNGALNIMRKCNIVSLRALYDRGDVDTPVRIRIA

SEQ ID NO: 17743 - protein, 382 aa, unknown
  TnpB Polypeptide
MIRGYRIKIFPNEEQKKMIHKSFGCSRFIYNWCIDRISENYNETKKTLSSIELQKEIVILKKQIEYSWLNEVSANMLKQVTIDCSNAYKRWFKLIKQNNNIKGKPRYKSRKSKQNCPTRTDRMTFNGRYVHLEKIGVVKLSKVKIDLDGKLMNARLNFDGIDYWLSFSVEYKDVQLEEKPKAEPIGIDLGLKTLVYCSNGNIYKKPHTKMIDKKIKHLQRRISKIYQPMIDYCKETRTKFSTLKKSNNLTKLEKELRKYQIRKTNILDSNIHRITSDLIKINPEKIVIEDLNVKGMMSNHKLARSIQSSKFYEIRRQLMYKCKNNNIELIVADRFYPSSKTCSSCGKIKDDLKLKDRVYRCPQCGAVIDRDLNAAINLSRIS

SEQ ID NO: 17744 - protein, 420 aa, unknown
  TnpB Polypeptide
MPQQILTIVCQLNPTAEQIVKLDQVLQGFAEACRYINSTICPSITNKNRIQKEVYRAVRQQFGLTANLAVRACARVAANRKVGKVKEFRATSVDYDARIFNYREKEQCVSLSALDGRERIPLVVGNYQIEKLKGKKPTSATLCKRKDGKFYIHIQVKEEVPEPQTGHGVLGVDFGRTDIAHTSEGDNWHGQQLQSFQRFWGMGELSIHRWKGFELYPVINKKTVTKVRDHYSKLRAVLQHKARKGTRSSRRRCRELVKRLSGRERRFQAWVNHCISKTIVARAKATGSVIALEDLTGIRERTNQVPRSKTERRRANSWAFYQLRSFISYKALQAGVGIVLVNPRYSSQTCHRCLHIHPDPAQSYRSGKSFKCEHCGWEGDADLNGASVIALLGAVVNQPRGPGLFCSLVEHNRLRATESP

SEQ ID NO: 17745 - protein, 392 aa, unknown
  TnpB Polypeptide
MTFAIKSVKQTFKPNQELESMMEQFKNMVNHCIRIGLENNTSTLRKLSLLSYHTLEDYPIQSKYKLTAISQACGRLAQMKRSIKKGLRVKSPFVQKPYLVSCYGYKINGMLLSIPVRNRKYVNIVLNRHTTDKLSENIEPRSFTITPSSLSISVRKDVEEIIPENAIGIDRNLRNVTISTLTQTIMYKTNKLLSIKENTMHVRASFRRNDVRMKNKFFTQRRNRQSRRIQQYLHKISKDIIQRAVQSKSMIVFEEIKGIRKLYKKGNGQGNRYRRKLNSWSFYELQRQVEYKAKWEGIRVCFVDPKRTSQLCPICGCKIQEDRFQHRKVWCSNCGKSMDRDVIASMNIAHKGWARLIHPRGLSGETMKGNVDNLIPLILRVDGSKLILGSRL

SEQ ID NO: 17746 - protein, 408 aa, Haloarcula sp.
MKYSHRYFALPTQEIAERLENHIDIHRQAYNYTRYEYTHIEAENIGSAYKHHDRLTDWKHEFPVFREVHSKALQRTVKRFYQNLSNLKSRKEKGIQVGKLNWKSPREFQSMTYSQSGFELKNTSGRNATLWLSKLGNIQIRYHRKIPDMALIKEVTVKKETTGDWFVSFGLEIDDSEFPEKQDLDSLSTSNSVGIDLGILNYIHTSDGKAVGWLNLENEYSRLRREQQKLSRKRKGSYNYEKQRQKVAKIKRKIRRKVIDYQHKLTTWLVREYDAVFVEDLDVSGMLQSDGNAKNKQDVAWRQFITLLEYKGELYGTYIVQVEARGTTKECASCSVETKKPLWVREHSCPACGFQCDRDANASLNILQRGFTELGLGWPESTPVETALPTDTHSVSAKRVVETGSFKC

SEQ ID NO: 17747 - protein, 413 aa, Haloarcula sp.
MEYSHRYRAYPTPKVAERLEHHLDVHRQLYNHVRWDYENSLSANKPSEYDQNNKLPEWKQRWPLFSDMHSKAAQATVARFHRNLSNLRRKKEKGHKVGRLKRQAPSDYQSVTYNQSGFDLDEKRGCDRFAYVRFSKIGWVKIRYHRPIPDHTIVKEVTFKKERSGEWFVSFALENDDADSPDKPALDSLDASNSVGIDLGILNYIHTSDGKTVDWLALEDDYERLRREQRKLSRKEKGSNNYEKQRVKVAKIQRRIRRKVLDYQHKITTWLVREYDAIFVEDLNVAKMLQSDGNARNKQDAAWRQFISLLEYKGDLYSTHVVQVEASGTTKECASCGVETEKPIWIREHSCPSCGFEADRDANASMNVLQRGFCELGLGWPESTPVETVTATDTADIQRVSASHVVETGSLGA

SEQ ID NO: 17748 - protein, 418 aa, Haloarcula sp.
MRRTNTFDVVPLSEADEELLFRLLDASAALWNEINFERQESYTDSDGDVWDISDYRNRYAGVLGAATVQQIERKNRQAWRSFFALKRKGERPGFPGYWGNREDGRELRTYLRNNTYSIQWGEYSRLEILVGKDLKREYGLGHNDRPRFEVRGSPNWSEYEKQGRLTLYFDEGSNRYRAHQPVTICEDKLASPLAEEAAALDIGVNSLVACTTTTGQQYLYDGQALFERFEETTQEIARLQSMLDDRQYSSHRIRRLYRRRTRRRDHAQEALCRDLIIKLYDEGISTIFVGDLTDILETHWSARVNDKLHSYWAYRKFTDRLTSTAEEYGVSVVICSEAWTSQTCPNCDSTTETTRHKDTLTCRCGFEGHADLTASETFLRGQTTIARPMARPVCLTWDDHQWSESPHSLRPSEVHTNP

SEQ ID NO: 17749 - protein, 525 aa, unknown
  TnpB Polypeptide
MYTVRFQLELSGSEKRFLSKSFFYANQMHNQLVRYATNRLNALFHDKEYVGARKAYGEAEFSKKKGSELSASEKKKKKELSNIMCMKQKEYNLTKTSLCKFVSKEQKKYKNYINSHQAQAEAEACLLYTSDAADAVYKGVEKVLFEDGRHLHYRRYNSFDCIKQKCAATGVRLLRWDTICFMKHYYKVRVPKNEYIQNIISSVDLKEDVVYSFLKRIEFNSGFKYYVVITLRGDAPKRIKLSEDGGHRTGVDFGTSTIATVSNNEVHLEELAPESAKYEKEIRHKQNLVDASMRKHNPENYNKNGTVKKGKHKWKTTKRCRRLKRQVRVLYRKQSAYIKTSHHAFINRVVQNTSEFILEPMNFKALQKKSKKTERKDEATAVKQKDGSLKMVCKYKRKKRFGKSIKNRCPGYFQAQAKAKFERTGGVYIEVPVTYRASQYDHTCNKYIKKALSQRMYELADGTRVQRDWYSSFLMYCIGTDLQNISRYKCKRYFDELYAKYLELEQYIINNKITVMNSGIKFKAA

SEQ ID NO: 17750 - protein, 400 aa, unknown
  TnpB Polypeptide
MNVKRTERIWLKHSVELSRLCHLSKNLYNEAMYIIRQEFLKTGRWVRYTDLAFQLKSSKNYKELPSQTAQRILKVVDRNWRSFFKAIKIWKEHPDRFYEMPRIPRYKKKDGEFMLIFTNQQAKIKDGMLILPKKGSVIGKIKTRIKTLREVRIIPKALGYILEIVYEKVINAPGRDKTRIAGIDLGVRNLVTIANNIGIHPIVVKGGVAKSMNQYFNKQKAKIQSIYDKQGLKTGLRAKKLFVKRDKKIHDYLHKVSRATISYLVDNNIGRLIIGRNENWKQRVNIGRRNNQNFATIPFYKLIHMLQYKAEEEGIEVFLQDESHTSKCSFFDGESVEHHDKYVGKRKSGLFRTRFGYIINSDVNGALNIMKKAVPDAFERLDADGIEGAVGHPLRLTISR

SEQ ID NO: 17751 - protein, 484 aa, Streptomyces sp.
  misc_feature (360)..(368): Xaa can be any naturally occurring amino acid
VTRSYHFREVRRAGGRSGSPAADPGVHRRFPRRTPPAPSGLRGSLQKAPTFTPGMNTSRDCFDVRLGVLADEHRRCTSTSSQAVHGSLIPGQPDTENRTNYRSISIFGARCVICVCRALASAFGCARVVWNDCLRDRKEAHAAGLPYVKSAELSRLRITQAKHTEERAWLAEVSAVVLQQSLRDLDTAYKNFFDSVKGKRQGRKVGPPRFKSKKDTRQSVRLNTNAFCLQANGTVYVAKVGNLKVTWSRRLPAAPTSLTVTKDSCGRYFLSFVVDTEPDILPGVGTDTGIDLGLSAFAVLSDGTKIAGPRFLRRAEKKLRRLQRELSRKAKGSKNRAKARIKVARQHAKVADQRRDFHHXXXXXXXXXVGMLEYKAARHGRTFAKVDRAFPSSQVCSACGYRDGPKPLHVREWTCSECGTVHDRDHNAGRNVLFEGRRIVAAGRAETRNACGAPVRRAHVPAQRREAGSHRKGRQTAQAGLPGL

SEQ ID NO: 17752 - protein, 232 aa, Streptomyces sp.
VVWNDCLRDRKEAHAAGLPYVKSAELSRLRITQAKHTEERAWLAEVSAVVLQQSLRDLDTAYKNFFDSVKGKRQGRKVGPPRFKSKKDTRQSVRLNTNAFCLQANGTVYVAKVGNLKVTWSRRLPAAPTSLTVTKDSCGRYFLSFVVDTEPDILPGVGTDTGIDLGLSAFAVLSDGTKIAGPRFLRRAEKKLRRLQRELSRKAKGSKNRAKARIKVARQHAKVADQRRDFHH

SEQ ID NO: 17753 - protein, 167 aa, Chlamydiae sp.
IENPKYLRKALKKLQFLSKELSKKSKGGKNRYKARKKLSNLHCHLKNLRLDFFHKLALMIVKSHDIIGVEKMNIKAMMQGLKTLSRAISDAAWGMFLNCLKNKALEYGKNLYEVSSFLASTRKCSKCGEKNNIKLGQSRYFCECGQNIDRDLNAAINIKNLAVGASV

SEQ ID NO: 17754 - protein, 379 aa, unknown
  TnpB Polypeptide
MEQMTVTAKIQISVSDTDKVLLDNTLSVYRDACNYVSDYVFHTHDLKQFSLNKILYSDIRENFGLKSQMVQSVFKTVIARYKTILENQSEWIKPSFKKPQYDLVWNRDYSLTQNRFSVNTLNGRVKLPYFSKGMSKYFDHTVYKFGTAKLVNKHGKYFLHIPVTYDVEEVSLSDICNVVGIDRGINFVVATYNSKHKSGFVNGKAIKQKRAAYSKLRKELQMRQTPSSRRRIKAIGQRENRWMQDINHQVSKALVENNPKHTLFVLEDLSGVRNATERVCTKDRYVSVSWPFYDLEQKLIYKAKRNQSAVIKVNPRYTSQCCPVCGHIEKSNRNKKLHLFTCKNCSYKSNDDRIGAMNLYRMGINYLEDSQVPNTVTAE

SEQ ID NO: 17755 - protein, 250 aa, unknown
  TnpB Polypeptide
MAHTYDIRAAYLYLKNPVFSNMDIIKQIKIYPPANDGTSRILVIYEVEDVLPEEDNGHYLSIDLGLHNLMTCYDNVGKTFIIGREYLSLSYFYNKEIARVQSQWGRIQAAREMEDLKTSKHLQKLYRKKNDCIKDYTHKMTRYITNYCVKNDIHTVVIGDIKGICKERNLGRKTNQKLHSLPYARIYMQLEYKLKMKGICLIRQEESYSSQCPPQSEEVSHIYAEKRNRKKAWHLHCRYRDLQCRCSRSL

SEQ ID NO: 17756 - protein, 420 aa, Aliterella sp.
MLSLTYSYRIYPDLAQEARMLTWMEQCRRVYNYALAERRDWIASRKCAVNACNIKQEYIISADTLYPDYYKQQNALSLAKKNLSDLQDVQSQVLQDALKRLDKAFKFRQERGFGFPRFKKVGQYRSFVFPQFKSHPVVGSDVANLVTGWQIKLPKIGAVRINLHRPLPDGFEVKQVRVVCKASGWYTQLILSCDISVPVLQPHGESIGIDLGLLNFLATSSGKLIARPKFFIQLQSKLKWLQRQLKDKVKGSNNYKKAQKQIAKLHEHIHNTRREFHFLTAHQLCDGVGMIFAEDLNLTNLCRGMLAKHCLDAGWGRFLEILGWVCKKRGVYFAKVDPKGTSQTCPNCGTHTGKKELLERVHNCSFCGYITDRDVAAAIVVEQRGLTAVGQTVMLPVEVDRLGVPVKQEVRKSNLGKPTL

SEQ ID NO: 17757 - protein, 422 aa, unknown
  TnpB Polypeptide
MLLGFRTRLELNNRQKTLAAQHAGVARHAYNWGLAVCKQAIEAKQKLPTAIDLHKRLVAEVKKANPWYYEVSKCAPQQALRNLEQALKRWRSGQGRFPRFKRKGVRESFYLEGNIRIAGNCIKVPIFGWLRCAEILPTATPKNVVMSLRAGRWYISFKYEAPPPQVEKTGDVVGVDLGVNRLATCSSGEMFALRAASANDNPKPYRKAQKRLARLQRRVSRRQKGSANRKKAVVQLARAQKRVADIRLDNLHKLTSYLAKKYRVVVIEDLQVQNLLKNYRLAGSLAVRVSGTESFCGFMSSGDQLEYKARLYGCQLVVVDRFYPSSQLCSRCGHRQKMLLHQRVFRCERCGLELDRDLNAALNLVQWYLATCSSRGSDACGDPSGGVVGVNSATSHGSQKQEESRDATNTALSQIGVFVSVS

SEQ ID NO: 17758 - protein, 562 aa, unknown
  TnpB Polypeptide
MKKYVRYKPSEIKLINIVKVKRKFIDKLNYMHTQKKLFINLNVGATESSPFAIKLRCMTTLKYFFRDYNEKIKSDYLYAKEFLTFMKNSKCVPFWTDSIKLLSDNLFLPIEESLTKTKNIFKNLWFTSEFYKAKENNNLQKLEVNSSIQNEIKITKTRQITLFLSEDQKIVFKNFLSAYRYVYNRTICCFSNYNKLTRSSFFFIDCKDVNSKVEIQFTEDQSVYNFYNLREILKDTIYPEWFKKINLYSHVMDSAIHEAVTNITTNFKQGRPLKMQMKTKKDQCQTLLIEKCYIKKNGIFPLYKYNDKYIFRNIRMKENIDKFNYTSSSITYHKILGTFTLNLGYTEEIKQTTQMNKKKKICAIDQGVREFVVTYSDTSVCKIGINPMSRIFTHCKEIDIIQSRMNKKEYYEIQNGNKVIYKVNSKRKRQLRRAMHRKIKKIKNLVKELHYQTANYLCKKYKRILLPSFETQEMARKLHSKTARAMMTLSFYKFKMIMNYKGKELNCEIIDCSEAYTSKTCTKCGNINYDLQMTDAIYKCSKCNLKIDRNFAGARNIALKNY

SEQ ID NO: 17759 - protein, 419 aa, Micromonospora sp.
VLLRYNFRVYPDAVQCTALARAFGCARVVFNDGLRLRQQAREVGEGYVSDAELSKRVITQAKVTPERAWLGEVSAVVLQQALADLNVAYRNFFSSITGKRKGRTVAPPRFRSRKDNRQAIRFTRNSRFKVLDNGRLRLPKIGDVSVRWSRSLPSEASSVTVIRDAAGRYFASFVVHTTDAPLPETDCEVGIDLGLTHFAVMSDGTKVTAPKFLRRAARKLKRLQQDLSRKQRGSRNRKKAVVKLARAHARVADTRRDWQHKLSTSIIRDNQAVYVEDLCVVGLGRTRLAKSVHDAGWSSFTNMLEYKAARYGRTFARVNRFFPSTRMCSDCGRVNDKMTLNVRTWDCPCGAAHDRDVNAAKNIKAAGQADFNDRGAQVRPASVPAPRGEAVTHPDAAYSTRSVEGISALQGGEDVNTAR

SEQ ID NO: 17760 - protein, 411 aa, unknown
  TnpB Polypeptide
MMGSGATRLKRRGRRWNVRINRAHRYELDPNVVQFTLLAKHAGVARFAYNWGLARRIALWEQEKKCTNAIEQHRELNRLKRTEFPWMYEVSKCAPQEALRDLDRAFRNFFRGLKTGRKVGFPKFKRKWRRDSFRLTGVIRVLERHVQLPRLGNVRVKETTAVRGRILSATVSREADRWFVSLTVEQEIADPEPVAGPAVGIDVGLTHFATVVGSDGEVVKVEPPKPLNRYLKLLRRRQRKHSRKQKGSHNRQKSALRLARLHRRIRNIRGDFLHKLSTELAKTKSVIAVEDLNVSGLLKNKSFARHIADVGWAEFRRQLGYKTGLYRSRLVVANRFFPSSKTCSACGAVQDRMAVDVREWICPECAKRHDRDVDAARNLLALVGQASLPGVPRKVTPVDIGGFSPLGGAGA

SEQ ID NO: 17761 - protein, 434 aa, unknown
  TnpB Polypeptide
VLGYSGIALYPTEAQKFQLNKIFGCVRYVYNSMINAREWEYRKGITHFLNKGETPIPGKKYRRGMYEWRKILTTKAKLQYSWLKEAPAVALQQAVSLADKNHWAMVKNRSQGKKASLPRKRKYGKQSFELTRTSFSIEITDSKRNRGYINVSKVGKIRFHAGKDISQASSIIVKLDKTGKYIASVKLPKVELQHNDFSSDATALDLGLFHYLVSATTDGEICFIDNPRFYRKGQKRIARANRELSRKKKGGSNRKKSRVKLARENKKVSNQRMDFLHKLSTLIADNNHAVIVEDLNVAGMSKNKKLSKSIYDAGRGKFISMISYKQKMRGGEVVVIDRFYPSSQICCVCGNKDGRKDLSTRMWTCPYCRSVLERDINAAMNLLDAGGYSESLNACGEDIRRTLVNPQTLTKQEKSSEKVEEEKGDNPFLMTRSN

SEQ ID NO: 17762 - protein, 390 aa, unknown
  TnpB Polypeptide
MIKSIKVRLHPNNKQLTKLFQYANCTRFAYNWAIKREQENYNCGNKFLSDNELRKEFTQLKHQKHNWLKQVSNNVTKQAIKDACNAYRLFFKGQCRYPKFKSKKRSKPSFYQDTSKIKFTDTHVKVEGFSMSRKRNKQQLNWIRLCEKGRIPTDCKYMNPRFTYDGLYWYVSVSIEVPDNSNTITTTDGVGIDLGIKDLAICSDGNKYPNINKTLRVKKVEKRKRKLQRSVSRKYNMNKRGERYKKTSNIIKREKELLKLSRRLTNIHRNHLHQTTSEIIKRKPNFICIEDLNVSGMMKNKHLSKAIQQQSFHEFRRQIEYKAKWNHIPVILVDRFFPSSKLCSCCGEIKRDLKLSDRIYKCDCGNIIDRDFQASLNLKQYGENVLKQNL

SEQ ID NO: 17763 - protein, 338 aa, unknown
  TnpB Polypeptide
VSSKQLETVKLTARFKLDECMDESLFETYRSIVNELLGYAHSKGITSFKKLRSEKYYELRQRYPKLPSHYIYTACQMACSIYKSFKKLRRKGKLGTDKPLFKKHVIMLDDHLFKLDLEKRIIKISTPNGRVALRFYPAKYHEKFREWRVGQAWLVETPKGIFVNVVFSREVEIREPRNFVGVDLNENNVTLAFPDGFVQIITHEREIRTGYFVKRRRIQRKLKIGGWRKELLEKYGKRERNRLNDLYHKLANKIVKLAEKYGGIALEDLTNIRDSIKHSAEINGRLHRWSFRKLQSIIEYKAKLKGIKVVFVNPNHTSSLCPICGRKLKPEWAQGFKV

SEQ ID NO: 17764 - protein, 491 aa, unknown
  TnpB Polypeptide
LEELNVVTEGRLSTRAAADLINYFDDYAGPYSCIYRYVWSVLVKGRSNEPELLNGEGQVSKSKLNTHVQGRFGVSKRTANSIISDAKGRLRALKELKYTERRQRGVKIRELEGQISKLNAKIRKLNPVVAANGATDKEIRQYRKWKETIYWKRQRLNRYKLRLDRLSELIGRGVYSICFGTGKLFAAQRRLSENGFRSRQGWYNAFVKNRDKNIFYLGSKDESCGNQMFQLEYDSKLDMFKAAVRTNNDGEKYINGYVNFKYQRDRLIDQLAKNTAGAWKVKEVLPDGKVKFKTVYSGDETALSYRAVRRGNKWYLQVILTLTRNGHDLATDMKNGVFGLDYNDGLIAAAETDAEGKLTGMHEYWLGFHGTGGKAETEIREIVAGIVYKAKRAGKHIVAEDLDFKDKKSKQQKGGKAGYNRMLHLFDYGRYRDTLYNSCFRNNVGLAKVNPRDTTKIGKERYCNPMKLSPHQAAAYVIARRGQGFEDKLAN

SEQ ID NO: 17765 - protein, 382 aa, Chloroflexi sp.
MAIRTFQYRLYPTQSQKKALQLQLDVSRYVYNMALEERKLAWELEGKSVGKREGYLLAKQYKKTFPQAKTVHSHVLQVAIEDLDKAYKSFFRRVKAGEDPGYPRFKSYKRWHSIGFKQYGNGFQVDGRRLKVSGVGRIKVRWHRPYQGEIKTCRIIRKAGRWYVSLMCEVADPVPLPKTGCVVGIDMGINALITTSEGEQIHNPRWYREAQSELRRKQRRLQRAQKDGNQRKKKLLDVQRQHEHVKNQRRDFFDKLVYDLVQTYDVIAIEDLKIKNMVKNRHLSKSILDAGWGYFKQRLIDKAADAGREVVLVDPAYTSKSCSNCGAIFEGLTLTHRWVECECGLSLDRDHNAALNILKRAGRVREPERSGLPQAWFRSPRL

SEQ ID NO: 17766 - protein, 308 aa, unknown
  TnpB Polypeptide
LWRSCERWGCNSLPLLSGQRPLPTLQGEAAPAKRDVHQARVLREGRRHARSAARDARQDERPAQSEPPAPERAVACDGDPGAGRQLLRLLVEVSPELLPKTKRSVGIDLGLTDVVVTSDGWHSGNPKPINRAQDRLAREQRRLAKKQKGSRNRDKQRRKVAKRHAKVRHRRADFLHQLSTRLVRRYDAICTESLNVKGMVKNHALAQAISDAGWSAFRSMDSIVGMLSYKAEWYGKSLVQIDRWYPSSKTCSNCGHTLETLPLGVRCWTCGECEAEHQRDVNAAKNILAVGHTVSTFSHLSSSKSRII

SEQ ID NO: 17767 - protein, 374 aa, unknown
  TnpB Polypeptide
MYALAETARQFTRAFNAVCAYGWREKERNGIVLHHATYRDSKTHAPGLVSDLHIQARVKATEAIKSAMALKKKGKMVSAPQANACPPRYNLHTYKLDWGTGIVNLSTTCGRQHIPFSVPSYAVKYAGYPVATADLVRKGRHWWLHVVVSVPTRDIVPTDEVIGVDFGVNRAAVTSDNHFLGERRWRDLEARDFRLRRALQKKGTRSAKRHLKRLSGKTRRRRLDHDHVVSKCIAQGMPEGATLAIENLTNIRSRVKARKANGGQRRLHAWSFASLRAMLVYKCEDRGIRVACVDPRYTSQTCSRCRYRHRGNRKTQADFWCRACGYRTNADRNGALNIAATFLAGRGMSVPGGVLSVTLSCPPTAVGEAQAVAL

SEQ ID NO: 17768 - protein, 338 aa, unknown
  TnpB Polypeptide
VYNQTLAYRKNLYETKKESMSKIDCNNYVNQTLKQDNAWLKEVDKFALTNAVYSMDNAYQRFFKLHAGYPKFRSKHNHRKSYTTCITGTNIKVLFDQDKIQLPKLKRIKARLSRPFYGQIKNATVSQTPSGKYFVSILVETKHEKLSSTGGMIGIDLGIKDLLITSDGEKYDNKRITKKYEDILAREQRRLSRKVKGSNNYSKQRIKVARVYEKIHNTRIDYLHKISHKLISENQVIVSEDLAVSNMVKNHNLAKAISDCGWSELMRQLTYKAEWNDRQYIKIGRFIPSSQMCHVCGYVNPETKNLSVREWTCSQCGTQHDRDINAAINILNEGIKQL

SEQ ID NO: 17769 - protein, 369 aa, unknown
  TnpB Polypeptide
VLELCRWVYNDTLAARKNAYEQAQRSLGLYDTNKLLTEWKAIKPALKEVHSQVLQNVQERVDLAFKAFFRRVKAGEEPGYPRFKGKGLYDSFTFKQSGFKLIGDKLTLSKIGDIAIKLHRPIGVAIKTLTIQRDAVGNWYACFSGECDTQPLPTNHNVVGIDLGLTTFAYFSNGEKIERQRWMKQDAADIARLQRKKEQFPKGSPERRKVIKALCHAYERAANRRNNFAHQESRKLVNEYQFIAFEKLDIKDMQSSGNKTITKWAQSAINRGIADVAWGQFVQFTVYKAANAGRGVALVNPRGTTQECSGCGVIVPKDLSMRIHDCPHCGLKISRDQNAALNILARGLARINAASADEVVEAPGFSPGE

SEQ ID NO: 17770 - protein, 369 aa, unknown; identical to SEQ ID NO: 17769
  TnpB Polypeptide

SEQ ID NO: 17771 - protein, 529 aa, Holophagaceae sp.
MPRAKTPSFVCEFEVRTTSKDRCVLRSRLEAGRQLYNAVLGEAIRRLARMRRDPAFEQAKALSKGPSRKAAFAELRAKHGFREFDLHAHPSLAKDCWLRGHLDVHAAQKAATRAFRAAERWSFGQSGKPRFKRYGELESLEGKSNEAGIRFRQDAVLWGGAFGKLSLPLAVDEANEVQAHGLRVAREGGVKYSRLLLRAIRGRERAFVQLVLEGESLRKAKHPVRQGRVGLDLGPSQVAVVTESHAEIMPFCPGLDRKEAARRRYLRKLDRQRRANNPANYRPDGSVKPRTQRKPWQSSGRQDATREALAEILRAMAAQRKALQGELVHKVLTLGNEVITEKVNKQAWAKLWGRSVGHKAPGMFEARLGIVAGAVGGSLEQVSTRSTYLSSRCLCGKRTKKLLSERKHTCGCEFIPEGMHADRDEFSAFLAFHCQGGTLDEGTARASWLSWGADCLLRLSSGNTETANGAALPTLRVREPRLSSSTDHEAGQRREAVPVLRTEADGERRDRKIPKPRKPNLKKEVPHVA

SEQ ID NO: 17772 - protein, 310 aa, Arthrospira sp.
LELGEVTSLSTITIVLEFKARVKPAQATAIEDAIRTAQFVRNKALRYWMDSQDVGKYDLSKLCKALAEEFPFAKKLNSMARQASAERAWSSISRFYDNCKKGIKPVGFPRFKKHSRSVEYKTSGWKLLGPKRITFTDGFGIGELRLLGTYDLARYDESLIKRVRLVRRADGYYVQFCIQVDVQVQSEPSQKAVGIDLGLRYFIAASDGSVVEAPQFYRKSERRLNKANREKSRKYRKGAKPQSGNYHRARNRYARKHLRVSRQRNEWAKSIAYCVIQSNDLVAYVDAKRRAEGRLECERVSTQSASSQVD

SEQ ID NO: 17773 - protein, 482 aa, unknown
  TnpB Polypeptide
MSQKVVLERVTLDGAKPFTGHADRHDPESERLYARSGGQAMDWLCDAWRYRFNQLRSNRCKYGKGKTLVPIGGEPDTRSVSRSRSECSWLAAVPSLILESPTRIERVEWFTAVQRRKTLLSKRLKPGRMPRFKSYKRDGQRFVCWYNNGRNAVYRRVNRNHGIITITGQNPKGMSLPGEPLRYRILLHVRVSQPIREYTAIQVDWTNRTVVFNNTPTPIKHEPTGRAVGIDRGCVHAAADSDGRFMDLPKDRLKAIDREIRKRQKAQARRAGNAGYSSEREYAKSGKTSRAYRRTRLEIGRLHAKSKRILDDTYQKYTTRLVRENDLIVLENLRLANMSRRNKPVPDPLHEGRYLPNGQDAKRGLNRSLRQASMGRLASMLAYKTKLAEGVGMILVNPAYTSQTCSRCGHVDKKNRESQAVFVCKKCSYTANADVNAARNILERGLDTLAVTSENLWGADGTPVEQGRKTNGNAARESVAVS

SEQ ID NO: 17774 - protein, 149 aa, unknown
  TnpB Polypeptide
MRKLRHYREDFQHQTSHRLIEENQFIGMETLMVRNMTRKAKKKLDANGRPMRNGQSRKRAMNRSILRDGWSGLVDKLAYKAEWYGRTLIRVDRFYPSSKLCHECGRKYKELRLSEREWVCEHCGRKHDRDVNAALNIRDEALRLNQTGQ

SEQ ID NO: 17775 - protein, 250 aa, Hydrogenibacillus sp.
MQTGRVRVPLAVTAKQEAILARLGRDVKQGATKLYEKRGRWYLALSVTLSAEEKAAKSARDKIAGIDMGLRYLAVVNAGGETLFFPGDQAASVRRRYHALRRRMGKAKAIKAIRQMKDKEARWMKDQDHKISRAIVDWCLARGVGIIRMEKLEGIRRRKTRKRDFGRSLHSWSFYRFQQFIAYKARLVGIRVEWVNPKDTSRTCPRCGHCASENRSGIRFRCRKCGFRGHADAVSAWNVSFAISGLAEAA

SEQ ID NO: 17776 - protein, 224 aa, Hydrogenibacillus sp.
VRQGAAKLYEKRGRWYLALSVTLPVEEKTAGTESGKIAGIDMGLRYLAVVNAGGETLFFPGDQAAYVRRRYHALRRRMGKAKALKAIRQMKDKEARWMKDQDPKISRAIVDWCLARGVSIIRMEKLEGIRRRKTRKRDFGRSLHSWSFYRLQPFIAYKAQLAGIRVEWVNPKETSRTCPRCGHCAKENRNGIRFRCRKCGFEAHADVVGAWNVSLAISGLAEAA

SEQ ID NO: 17777 - protein, 404 aa, unknown
  TnpB Polypeptide
VFACPGTGCIPRLPRRRRCGSAAPTPGTRENLAVEQHAHWRPGRAAAPGYLAQCRQLTGARKEHPWLAAGSQTVQQQALRDFAQAMTACFDPRNPARRPGWRKAGRDEGFRITGRRGKHWEVRRVSRHAGQVRVPKAGWVRFRWSRPVPPGVKSYRVTRDRAGRWHVAFAAIPGPVPAPGNRQLVGIDRGVAVAAALSTGELLCVPGLTAPEHQRLRILERKLARAKRGSNRRARVRHAIARLRARETDRRTDWAEKASTDIARRFDVIGVEDLRIGAMTRSAKGIPDNPGRNVRAKAGLNRGILRSGWGRLVRRLVEKAPGRVEKISPAFTSQRCSACGQVDGKSRESQAVFRCTACGYTCNADVNAARNIAAGHAVTARGGYREAGPVNREPQLLTSLTGRE

SEQ ID NO: 17778 - protein, 404 aa, unknown
  TnpB Polypeptide
MLNLTYTYRLKLTQLQSQTYEAWLETSRRVWNFALAERKDWYNSRSCRINACSLKSEYIISSDAPRPTFASQCKALTIARKINPDLNAAHSQMLQQVLRRLEKAFIGMWESGKGFPRFKKQGRMRSLLFPQLGVNPLLGSKVKLPGIGWVKMQLSRPIPDGFVAKQAQVIRKASGWYVMLTLQADVDVPSFAPHGQAVGIDIGLKSFLATSTGEQIARPRFFVDLQRKLKLLQRMVSHKKLGSNNWRKAQSRVARLYEYIHDTRKDFHFKLAHKLCNQAGTIFVEDLNFKPWAKGMFSKHTLDAGFGEFFSILEWVCWKRGVYLAKVNPNGTSQTCPNCNHHTGKKDLSERIHHCSECGFQTDRDVAAAMVVMQRGLAAVGHTVKMLGEGLNNSSPLTQESPLL

SEQ ID NO: 17779 - protein, 382 aa, unknown
  TnpB Polypeptide
LYDERQTYFNTGKFKFYNKINKDFVKNNQPDYRALPAKVSKLTQMRVDQAIKSFLALKKSSNTNAQHHFPKYLKKDGRFVVEYEKGALSFKKEEFIKLSKTNIYIPTKLEKTVIQQVRLVPKSGYYLIEILYRKSIPKKRKKKLTNQTRFASIDLGVNNLATVTSNVFRPLIINGRPIKSINQYYNKNRKKRQRLLPVNQYTSKKIGQLGYKREMKLNDYLHKSAKFLVNYLVSQTVDVLVIGTNKGWKQNINIGKRNNQNFFNIPFYKFKQILTYLCEENGIEIHEQEESYTSKASFLDQDFIPVFNENKNKKYTFSGRRTFRGLYKTKNKKIINADVNGSLNILRKFIDKNVTLNFQWDNLWNDLVEVCSTPHKVTVTIN

SEQ ID NO: 17780 - protein, 400 aa, unknown
  TnpB Polypeptide
MEILQAYKFQLRPKTGQESLMRRFAGCCRFVWNKALALEKETYENEGKRLGFSLLCKFLRDWKKENATSFLSEAHSQILQQVLKDLDRAYKNFFEKRAGFPRFKKKGLHDAFRYPQGFKLDESNSRIFLPKIGWIRYRNSRKIEGTPKQVTVSLSAGKWYVSIQTEREVPEPVHPSQSVVGVDMGVARFATLSDGSCIKPLHSFRKHEKKLAKLQRKLAKRVKFSANWRKLKARIQRLHRKIANVRNDFLHKTTTIISKNHALVVIEDLKVRNMSRSASGTLDHPGKNVRVKAGLNKSILDQGWFEFRRQLAYKLAWLGGKLLVVPPQYTSQTCSHCGCVDKSNRVSQAKFKCTACGFECNADHNAALNILAAGQAVSACGAGRAQAPAAKQEPACGAAR

SEQ ID NO: 17781 - protein, 380 aa, unknown
  TnpB Polypeptide
MLLRYRYRLYPTKDQETLIAQHLGCCRFVYNWALDRKNTAYHDESISLSKYDLMNQLPTLKEGFPWLKEVNAQSLQQSIHHLSRAFTNFFEGHAEEPAFKKKHDPEQSFTVPQSYTVDFKQGTVKLPKIGAIKTVFHRTFVGTTKSATVIRRSTGRYFISIVVEDGRKPLKPTDPIPDQTVGIDMGLSHYAVLSTGDVVENPKYLRNAQTRLAVLQRRLDRKQKGSQNRDKARLKVARCHQKIADQRQDFQHQLSSRLVRENQALAVESLNVDGMVKNHKLARAIGDAGWGTFLSMLRYKCQEAGKTLLKIGTFEPSSKTCSVCGYKNQNLTLKDREWTCPDCGTTHDRDLNAAINIKNFALAGAERAEEPVDSLPVGGG

SEQ ID NO: 17782 - protein, 456 aa, unknown
  TnpB Polypeptide
LVTLKIKYKSENHKRILEYIKNYNSVYNSIFNFLQKQNKKISTKDAFVFIRSLNNIFINFSFKDSALKDARHTLEIFGNKKLVFGGKKLFLDRIKNLISKEEFQLKRLRPLKVIGIAKTKGNCKFQILSESQILFKATKDEHFILNLESVGKNYQKKLKALILAQEKRELPITYKLGLGYVYISFDETKIEKINIRPKLKNRIFAIDMNPNYIGWSVVDWKSENKYSLIKSGVISIKKLNDYENSLGVSSDSPEKKYVTNKRKYEIIQIGHELSRLANHFRCEVFGLENLRIKSSNKGKGRNFNKLINSQWNRFLLVNLLNKLCNIYGIYFHKVLAEYSSFIGNLVYREEKLPDPCLASIEIGRRAQEFYHQYIIKDKNKEKNIIFDKLENVKDRITKSLEELGYSDTFESLSDLYYKIKKRKCNYRFSLEKALEAHRKSFSSLKHSKSYCTIVVF

SEQ ID NO: 17783 - protein, 448 aa, unknown
  TnpB Polypeptide
LLKSKEVCQILELVRSYSVPIRDDRVWGLITWYVKALQNAIDMIWDNIEWRYSFPELVRKGKKLVVIRGLKVRIPIIPRDRAFKKRLREELMKDNPYAAHWVDAVIRTAYSIMENWRRRYLRGRARKVKPRIRRRFARCKTTLMKIDYQAKSIRITLKQGEYLSISWRSTWFEHRVRGWAVGEVIIFDDRVVIPFKSSKEIEVRRVIGWDSNELSLDGYEPSIGFIHVDLKPLQSMKILYERKKAIAQRKGRRELYEKYVRRERDREKDFINKLSAGLRMLFPNTIHVFEDLDKEDLVSRKKRRKKRRKRNARTPWRRIHRRMSEVALTASVDPRNTSRECPRCGYVVETQEGHVFECPRCGLKMNRHKVASINIRRRYLEGKRRRKRRAGMRGFPHSNEPEETMMVELWVGVTPSGRSPVIWIPMKRDPEGDEAKGRGLDIKQYQAR

SEQ ID NO: 17784 - protein, 452 aa, unknown
  TnpB Polypeptide
MIVHQAYRFALDPTASQRRALHSHCGAARFAFNWGLRQVERSLQAQHWERRILGGALTEVPWSLPALRREWNQAKAEVAPWWQENSKEAYSSGLDGLARALQAWSESRAGKRAGPPIGFPGFRKRGWRDSCRFTTGAIRVDDARHVSLPRIGKLRTLEATDALTQAGARLLSATISSEADRWFVSFTCQVDRQAKEHNGQMGTLGVDLGVLSLATLSDGSVVAGPKALRSGLRRLRRLSRQHSRKRKRSANRRKSARRLARQHARIGHLRQDHLHKLSTRLAKNHGCLVIEDLHVKGLMASAKGTLLQAGRKVKAKSGLNRALADASFGELRRQLSYKCAWYGSKLIVADRFFASSQFCSGCGSRQKLALSERGYDCLHCGLCLDRDLNAARNLAGWGRLAVAGSTPETQNACRRDVSPHRAADPDEAGTGTVPESAGSTGGRILAGLTPAS

SEQ ID NO: 17785 - protein, 528 aa, unknown
  TnpB Polypeptide
MLTLQFLLEFKNEKDKEMVLDSMRKFSSAMRYAYKRLLESEKRKDLKKNISRLFNINTRYSDDAILLAQSMISSYKERGQNPKKIIFGSRKLFEELSRNHLTGKIKEKLKVKWKESRQGNLYSRGDKSKQGNLNLRLHWINDKLYLRINIGDRQYIYAKVIRTVSRKNDKWIGFMLMLLKAKESGSWFPYSVRLTLKNGKVYAFISVEEKLPPITIKKDSGVIGIDINAYPFHLALAFTSKDGNLEKYQSISLNELLEVNSEKRQYLEWQIAHQIIEIAKKENKAIAIENLDKLPKGKRGDGFAKLRQKLQKWIYKRLLNKIEITARRNGIEIRKVNPAYTSLIGKLKYAPQFNIDKDIAAAFVIARRGLGYKEKLPKNYKGLLNDKDFLLFSEASIEDKIAKLKKEIKEEKNQYKRNKLKSKLSKLRKELKALEKHLSFVIESEKSKSVSQQPVNRWKEQVRGSAYAGYKNWQVLFTAFAFSCLESYRDFSPLKRILLDGDWARMANRLVPPLGQGTTMQSCLSSFV

SEQ ID NO: 17786 - protein, 391 aa, Herpetosiphon sp.
MRGGKPHPFVGGEEAPPSKLAQPFGVLYNHIMKLIAQLKLLPTSDQHAALLRTVEQANVVCNAISQTVWQSQTFKQFDVHTLVYDHIRATSGLSAQMVVRQIAKVADAYKIDRTVQRTFAPHGAISYDDRILSWNMHAPSVSIWTVNGRQSIPFVCGKRQWELLQSRRGETDLAYVNGQFYLLATCDVEEPTPDDVDRTIGVDLGIVNTSTDSDGETYSGAQIERVRQRYQRRRSALQAVGTKNAKRRLKSISGKQRRFQTNTNHTIAKRLVAKAKCTKRQIALEDLTHIRSRVKASGRQQRARHSNWSFNQLRQFVTYKAAIAGVRVVLVNPAYTSRTCSACGHCDKRNRKNQAVFCCVVCQFATSADYNAAINIERAVVTLPMASTLRR

SEQ ID NO: 17787 - protein, 272 aa, unknown
  TnpB Polypeptide
MPHYKKKGSVSGLHFTNQDCVIRDNNGKIYLKFPHFHGDYLPIGYVSGSLKEVRVRPYYSDFLVICVYETESTEPLPENGNACGIDFGISNIVALVSNTQKCMLYKGGALKAQNQWYNKQRSYYQSIAMQGHEAKQPGVLNTRRMEQLNRKRNQFFHDALHKIASDVVKFCLENDIRAIVLGKNKNWKQNCNLGHHNNQIFVQMPIATLSYCIKYKAEANGLFVMEQEESYTPKASLVDGDKIPVVGDQEKPSFSGKHVSGRLILHERTDAH

SEQ ID NO: 17788 - protein, 395 aa, Archaeon sp.
MKRTNTFNLNPTKEQESRLFKLADNCSRMYNEINYKRRQSFFGGEIDWNTAQLYKKYIRVVGSATAQQIIIKNNEAWKSFFFLFKGKKQGKLPENIKKIGVPGYWKDRKTGERDLRILIRNNCYKLRGDILKLPFKLEIKWRGRNKWYGKQGRLEIAYDRLSRKWYAFQPVLVTPAHQPTKNKKAYVDLGVKVPIMAWIPGERIFGYRANSMLADWWYLNHRIAEHQSTLKEVNNRHTSKHLSKLYRKRQRRFRSHMNRIIKDFVKVCWHKGVSYIICGDLRNIRDSAKFNKKANSMIHNFWSIGYILKRLKEKSEGYGIKVTPVDERETSSVCPRCQSKHMVKRKRLFKCLDCKLEAHRDAVGSVNIGLAQGESFTSAGVINRVVTRPSLSNVA

SEQ ID NO: 17789 - protein, 610 aa, Streptomyces sp.
LPSGLCELEGPPAVACQVLLAAMDCQQTTLERLDPVWARLRVKLPLCAAPRSRRDWAWHVIDLRLPATVEADALLHAPTLRPTPSGRAAVDLPHSRPHPATQATGHTVAMGFDWGVNTLLTGAVGRLTGRGTGARVVTDGRPLIFDATAISAKLHRLRSHREHLAAKRDHYQALAASRGAPHRAWGPLLDRAAVLEREHARVCARIRHLNHALAWSAARWAVDQASALGASVIYLEDLATLEARGKRRGNARLSGQVRGTVTDAIRHLAAKAGITVVTVPARGTSALCPQCLGTLGHHPAPDRLGERGWSWAHCTRCGLSLDRDHAAARRIVSRGLLGQTHTTTERATGIRTIRTTAEGTVTLVRRSKKTTRHLRRARRTTTHPRPRGPKTTPGKTRPTPTRPTPTRRARTLEGPRPAAVRGALKPSRRMPDVRTVPATTPTGAVKRPAGHDTQTHAPFPGRGPGHGVPAPARPEPPSAWRGRLSRETCRRRTHAAERTGFHHAHATKVHPLTPRFGPHRDDARPRRARKPETHRHTQSFRDASDLSPLQRFIAQWAVYVHIQRQPNLAKEFRHWEDTAETGDATQARRAASAIRKILDDAHSALGLPPR

SEQ ID NO: 17790 - protein, 431 aa, Streptomyces sp.
MKLRYNFRVYPSPSQRGSLARAFGCARVVWNDALRLRRDAYAKGLPRPAAAELSKQVITEAKKTPGRAWLGEVSVVVLQQSLRDLERAYSNFFASQNGTRTGPAMGPPKTKKKTARQAIRFTVNARWSITDGGKLRLPKIGDLRVRWTRELPCEPSSVTIIKDPSGRYFASFVVEADDKPWPELDVEETDTGIDLGLSSYAVLRGRKIASPKFFRRLERRLRRAQRALSRKQKGSNNRRKARQAVARIHARIADQRRDFIEQETTRIVRQSQAVYVEDLNVKGMATRRSRLGKSVHDQSLGTFVRTLGAKCARHGRTFVTIDRWFPSTQLCSNPRCGSLTGPKGREQLHIRAWTCTGCGTHHDRDENAEVNIRAAGRKRAAAMRHEAERHNACGEHVRPRTPGQRSSKQEPTRSPTAHRGGAGGNHPRLRG

SEQ ID NO: 17791 - protein, 381 aa, unknown
  TnpB Polypeptide
MRTNATAKIRINPTRQVVSTIKTYTKALQFCVNQAWKRKIKNNIKLHPFVYPSLRKRGLPAQLAIACIKQACGIVKKAKTKPIIKQASVRYNFPRSANIKGDKLVLRLLKVRQEFKFDIPACYKDYFTWDVKESLLKIDKKGRCFFLFTFSKEVIATEQNISSQNIVLGIDLGVNNLAVCSDSRFYNSAKVKQVKRKFKYLRSKLQAKGTHSSKRLLKKLSGRETRYMAWINHNISKDIVSKFNGNKIIMENLKGIRKQHRGRIMNYWISNWSFFQLQTFIQYKAERKGITVERVKPNYTSQICHRCGQLGSRSKGCFSCSHCGLSLFNSDLNASRNLAHPMLVERQGAITHPYSLCNEHKGTSHSAIACEHKAKIPHTLV

SEQ ID NO: 17792 - protein, 437 aa, unknown
  TnpB Polypeptide
VITVVQSIKEDWWMTRSSKTSLKFANPSKQIALQSIISEYSKLTQSIIDTIWTQAGPIPALLPANITNELKQQTWLSARMIQCAAKQASAIVRGTQAKQKKRLFLIAKLKTQGKLKQARKLERLCNAAVTSKPTLDGSLVPMELDRRFIRFDFTPETVAFDSWITITSVGDKKKLVLPFKKTKHIQKLIDKGGIMAPGARITAKNITLMFEFKDKEPQEPHPQEVPKEMIAGLDIGVKSCISVSYSDGSFHQVSEDAHGWSLDKISDKLSRKTKDSGAFHRAQTHRTNFINWSINQVDFHGIRELRIEGIRNLRLRKRVSRKLSHFVYREIFDRLGMKAEEADVLLSEVSPAYTSQRCSVCGWTRRSNRKGKQFKCGKCGFTADADLNASVNIRLDLKPIGKKERLKRLNRTGFYWPVELDRFGAGVYSPCCPGSLE

SEQ ID NO: 17793 - protein, 464 aa, unknown
  TnpB Polypeptide
MVPSATPRLVHRTALIRLRVTRRQANRCYGLLRSAGDVWAWLLDTNRQRHQQGEPAISNYQALCRELAKSDGFGELSTVAARSVLKRYSDAWFQAANRRRAGQQDAGFPRRKRALVPVRFYHGTFTIQGQRVRLPVAKGQPELWVRLARPLPYPAEQVRAVTLLADGGRLWLAVTAAVPVQQHDLDPKRVAGVDLGIIHPYAVVTQDAGLLVSGRALRAESYLHRADQQARHARAAHRAPKPGQRGSRRWRRHRVRLRRVEARHRRRVHHAQHQAAKEVITFAVQQRVGTLVVGDPKGITEHDAGRVQNWRLRQWRRTHLLQALKDKAEQAGIVVRLVDERGTSSTCPACHQRVAKPSGRRFRCPHCRFHGHRDLVGARNIAAKVGGGPTSVGLPTLVEHRRAGIVPARRDRRRHLHDQRRRRSCLASGHPPDEPASGGCRSPRVPDLAPGEDHAASPNRANVA

SEQ ID NO: 17794 - protein, 359 aa, unknown
  TnpB Polypeptide
MRMHLTMQLKLLPDPAQSASLLATMVRFNAACDALAAVAFVNQCANKVELQKLGYHSIRAEFGLSAQMTVRAIAKVVEVYKRDKAIQPTFRPHGAIVYDERILSWKGSDRVSIWTLDGRALMPWVCGAYQTAFLDRARGQADLIHRDGMFFLYVTIDVGDVPTGDPTEYLGVDLGIKFIAVDSDGQAFSGAHTRRLRERHANLRRRLQRKGTKSAKRLLKRRRLKEHRFATDVNHCISKAIVRKAKDTGRGIGIEDLTHIRGRVTVRKAQRRTLHSWAFGQQRQFMAYKAERDGVPVQPVCPRNSSRECPDCGCVDKRNRPTRDRFECISCGRAGPADEIAAVVIRGRAECHAAERRAA

SEQ ID NO: 17795 - protein, 402 aa, Streptomyces sp.
VVRAVSWLKSVVMKLVVRVKLLPTPAQAAALEATLTACNEAANWVSAEAFAKKPTSKRALRDRTYRVVKERWGLGAQAAQHSIKKTADAYTTLRANLKAGNYGRPGTKRYEKAAGEPIAFRAESAQPFDDRMLSWQHQERTVSIWTTGGRMKEVAFTGQAEQLAVVARCRQGESDLIRTGGQWYLLATCEIAEAEPNTHPVAFLGVDLGIVNIATTTDGTRHSGRRMNRRRENDRKLRTKLQKKGTKSARRRARKHAGKEARRARDINHKISKSIVAAAQRTGRGIALEELTGIRERVRLRKPQRATLHSWSFHQLGTFIAYKAKRSGVPVVYVNPAYTSQECSQCHHTHRHNRPSQAVFTCRVCGFVEHADLNSSHNIAARGWMTWVRGAESTAPALTLIA

SEQ ID NO: 17796 - protein, 389 aa, Photorhabdus sp.
MLRATKVRIYPTPEQADHLNAQFGAVRFAYNKALHIKKHAYQRHGVNLSPRKDLKPLLSVAKKSRRYAWLKAYDAIALQQAVINLDMAFSNFFNPKLKVRFPAFKRKHGRQSSYHCVGVKVLDGAIKIPKLSPIEARLHREMTGEVKSMTLSRSATGKYYASILCDDGMAAPEKPALITQMTGLDMGLSHYAVKSSGDKMANPRHLINAGRNLRRKQKALSRKQKGSANRRKARQRLAAVHERVANARADFQHKLSRTMVDENQAIIVETLKSANMMKNPRLARAIGDAGWHGFIKKLEYKAAEKGVHLVKLDQWFASSKTCHCCGYKMPELPLHKRSWPCPCCGVEHDRDINAALNIERKGIQELQAAGLVVSAHGGQRKSVASTVAA

SEQ ID NO: 17797 - protein, 477 aa, Georgenia sp.
MSRHTTFRFCLDVTVEQEEVLARHVGAARFAFNQCLRLHLQARKGDAPSADDADVTVPWSGFDLINAFNAWKRSEAAGRRFRVDVRGVAELEVTGLVWRGEVVAQVFEEAAVDLGRALKAWTTARAHGNRRAGHPRFKKKGATGSFRIRNRTTRGPTIQVGGDRPRSVTLPKIGTLRVREDTRRLRRMIATGRARVLFATVSRNAAGRWSIALTAEAADLHPKAQHPPRAPGDASGWVGVDRGLTALVVAGTADGAQTLRVERAPWSARSEAARTRRLARSLARKQKGSRNRARAAARLARHHAHLRARRRHLLHQVSGQLVKTHDRLVLEDLHVAGMLANHRLAAAISDAAWAELARQIRYKQAWHGGQVLLADRWFASSKTCSACGKCKDALSLSERTYRCAACGLVIDRDLNAAFNLAAWATRHTSDTAQGAGDRQADGPVTNAHRRDGSGPRASASETSPDDVGTGPQAGHPA

SEQ ID NO: 17798 - protein, 391 aa, unknown
  TnpB Polypeptide
MLKATKIRIYPTTEQADFLNRQFGAVRFCYNTGLRIMSHRYKRHGQSLSAKHDLKKLLPVAKKSRKYGWLKEADSMALQQSCINLDQAFQRFFDPKQKAGYPRFKSKRGKQSSYHCVGIKTGNDWIKVPKLGPIKAKVHRPVGGTLKSITLSRTVSGKHYASLLYETEQAAPALLKDVDAAGVIGLDMGLSHLVIDSNGNKIANPRFLKQAQRNLKRKQQALSRTKKGSANRSKARLLVAKAHERVANARNDLQHKLSRQIVDDNQAVIVETLKVKNMMKNDKLAKHIGDASWHALTTKLGYKTKEQGKHLVKIDQWFASSKTCHVCQHKMDAMPLNIRAWECPACHTLHDRDINAALNIKHQGILKLKAEGLSVSAHRGSRKSGMSPVAA

SEQ ID NO: 17799 - protein, 376 aa, unknown
  TnpB Polypeptide
MIHIAHKYRFYPDADQTVLLAKTFGCVRVVWNIILDWRSKEYTMNATKINYAGSTKHLTEIKQLEEYQWLYEVSNVALQQSLRSQDVAFSNFFSKRAKYPKFKSKHGKQSFRLTSSGFRVKDGELYIAKSATPLKMVMTRPMPDKLNSITISKDTDGRYFVSVQGEHEKQALPVIEKSIGIDLGLTHFLITSDGDKVDAPRVYRKAESKLAMLQRRLARKQKGSKNRNKARIKVARHHAVIADTRKDFLHKISTKLIRENQTIAVEDLNVAGMVKNHCLAKSISDASWSEFTRMLEYKAGWYGRTVVKVNRWYPSSQICSSCGDRGEKKALNIREWTCKECGTVHDRDINAAININIAGLAELNTVGFTEINDCQI

SEQ ID NO: 17800 - protein, 487 aa, Microcoleus sp.
MQRSKIGSLEMQLTYKYRLKPTKAQLTTIVTHLELCRRQYNYRLGERFRWWEATRTPINACPLIVSIVPIEEIYKNIPLTRVQTRDGRKKDKSGNPLTRKGDVFSNIEGGFVQWQTIQLADLKNTKKLFPDYKVLDSQVLQDVVNRVETSFSNFTTPDKNGNRRGKPKFKGLHYYKSFTYPQLDNLHIVKDEQNRICIDLAKIGQVPMVFHRSIPTGFKVKTGSVIREADGWYISLTLEDKTVPVTVAEIQPTVENTVGIDLGITNYVYLSNGERVENPRFLRKSAEKLARLQAKLAGRIKGSKPWKIIKDKVSKLHQFVARSRLNFQFKTAHELFDKCNVLVVEDLSVKNLTRRAKPKTDIENGNLVYLPNGQSAKSGLNKSMLDAAHGQFASVLKYVAWKLGKSILFVSPRGTSQHCWNCLNKVPKELSERWHSCQCGESLDRDENSAKLIRKIGLSYESGGGTPSLKKAFEKKEKEACGLTVPS

SEQ ID NO: 17801 - protein, 190 aa, unknown
  TnpB Polypeptide
MVGIDLGIKDLLITSDGEKFDNIHTTKKYEDKLAKEQRKLEHKEIGSKNWNKQRIKVARTHEKIHNIRIDNLHKISHKLISENQVIVSEDLAISNMVKNHNLAKAIFDCGWYELIRQLSYKAEWNNRQYIKIDRFFASSQTCSCCGCINSKTKDLSIREWICPKCGTVHDRDINAAINILNEGLRISQVA

SEQ ID NO: 17802 - protein, 395 aa, Thermoanaerobacterium sp.
MMICQHFFIEPTKEQEEKLFHTLYLCRKLYNYSLDQRIKHYKEHDKGLTYRKQQNMLPKYKKEHTEYKTAQSQILQDVLRRLDRAYKNFFEGRAKYPKFKDKYHYTSITLPQCEAKRNFGKEGYVYIKNIGHIKIKAHKDFDPTKVKTINIKYHAGKWYVNLSVEVEEEKEKSVTGEKAIGIDKGINSIAATSDGELYLNPRWLQKTEKKLKRLQRQLSRKKKGSNNREKQKKRLAKLHEKVANQRRDYLHKISYNIVKNNDIICVEDLQVKNMMKNHKLAKSIANVGWGMLDKYLQYKAEKEGKIFIKVNPAYTSQRCSRCGKIVEKDLSVRVHKCECGLEIDRDVNAAINILHEGLRQLSIIAIFCREGSSRSYAYGDYVRPVVNNSRQLSMK

SEQ ID NO: 17803 - protein, 293 aa, Methanosarcina sp.
  misc_feature (18)..(22): Xaa can be any naturally occurring amino acid
MESTKTIQLKILNPDFDXXXXXLTTFSHGRKTYQIQNYEYALPFFKDPWKFEASKVVKHKDGDYYFHLTVSQELPDKKIEDASTFMGVDVGINYLAVASTTDKKCKFFAGGEIKNRRNVYKNMRARLQSKGTLSAKRVLERLAGKEKRLMTDVNHCISKAIVKFAVENSVSVIGLEDLAGIRGRTNNKLRKKQKYLHNSWAFYQLQRFIEYKAKNAGIITEYINPEYTSQTCCRCNHISINNRNGLKFRCKACGFELNADLNGARNIEHRTRDYRYILESQGCLSTIHTDNMI

SEQ ID NO: 17804 - protein, 150 aa, Methanosarcina sp.
MPPTSVHLAFKVSLSLIRENQAVTIETLNIKGMIKNHKLAQAVADSAWNSFVTKLEYKAQWSGKTILKIGMFEPSSKNCHVCGYHNSELTLKDREWLCPSCNTNHDRDINAAINIKQFAINNLITSGTEGRACGVILKRESHEVGCPSFQ

SEQ ID NO: 17805 - protein, 427 aa, unknown
  TnpB Polypeptide
VALAKHVGAARFAYNWGLARCLEAIERREPIPCAAQLHKAWNIWKRENAPWWVEVSKCALQEALRDLERAFRNWRQGRAGKPRFKRKKGMGDNAARLTGAIRMFPRHVQLPRIGRVRTKERTDRLLELLQAKRARILSATISREADRWFVSLTCEVERPDPVPRVLRDDDVVGVDLGLMSFLVLSDGTRIEAPKPLDGKLRLLRRRSRRLSRKQKGSNNHRKASLCLARLHWRIRNIRRDFLHKVTTALAKTKSVIVVENLSVKALARGRLSRSVADAGWGMFRRMLEYKSSWYGARLIIAPRDFPSTRSCSRCGALGPKLSLSRRVFRCLACGFEADRDFNAALNLRLYGLAVLNGPTGSSPGSDACGDLSGGGTAFGSVYESWVGEAGSGRSFVSPGMGEINDYAPQNGAHSPGQCSPHAGGKRS

SEQ ID NO: 17806 - protein, 465 aa, Micromonospora sp.
MGQPNRLSVVQAYRFALDLSPAQERAVLGHAGAARVAYNWGLARVKAVLDQRAAERSYGIGDDQLTPAPGWTLPALRQAWNTAKEDAAPWWRDYSKEAYNTGLDALARGLKNWADSRSGKRSGRPVGFPRFKSRRRSTPAVRFTTGAIRVEPDRKHVVLPRLGRLKLHESARKLARRLQAGTARILSATVRRDGRRWYVSFTCEVQRARRTPARPCATVGVDLGVMHVAVLSTGVLVPNPRHLDAALRKLRRISRALSRKVGPDRRAHRDASKRWCRTRTALGRAHARVANLRRDGLHKLTTRLATGYGTIVVEDLNVAGMLRGRRLARRITDAGFAEIRRQLVYKTDWYGGRLVVADRWCPSSNTCSACGAVRTKLTLSERTFTCTTCGLVLDRDVNAARNLAALAATVAGSGPETLNGRRADRKTPPAGLVAVKRLPGTATADKTGTVPPQGRTSDHAPTAAS

SEQ ID NO: 17807 - protein, 342 aa, Megasphaera sp.
MVDNRGGGFQMYLTQSNVIRGLSKQEYTMLREMCQYSNNLYNVAVYTIRQHYFDTQQSLRYEKNCHVCKENENYRLLQAGVSQQILKVADRSFRSFFRLLQKVKSGDYGSKAVRLPYYREKGGLFNLILSTNAITIKNGFLTVPMSREYMKRHNGHRIRIPVPDRLKEKKIKEVRICPMYGGRYFKIQYCYLENPELVKTSLDRVLAIDLGLDNLAACVTNTGTSFLMDGRKHKSINQYWNKRKARLQSIAAKQGQKTTNQLCQLAKKRNCRMQDILRKTARYILDFCISHQIGTIVCGYNRDFKRGLKLGKVTNQHFTQINLSYLRNTLKHLCERYGITYL

SEQ ID NO: 17808 - protein, 184 aa, Amycolatopsis sp.
VLSNGKTISSPKFLRRAERKLRKVQQNLSRKAKGSNNRAKARLRVAKVHAKVRDARTDWAHKQSTTIIRDNQAVYVEDLCIVGLARTRLARSVRDAGWGLFLRMLEDKATRYGRTFHRMDRFFPSSQTCSACGAVDGPKPLSVREWTCACGAVHDRDLNAAKNILAAGRAERLNACGGTISPAA

SEQ ID NO: 17809 - protein, 397 aa, unknown
  TnpB Polypeptide
MYHVQKQTIKPTDNRYARLDELCFLSKNLYNATLYHIRQQYFKDKIYLNYNYMDKFFNSTDNTDYRALPAKVSKFTLQLVNQSFKSFFELIKLKKAKKYEKPIRMPKYLPKNGRQVVHYTKQALSFKKEGYVRLSKEDIEIFVGELPVEFIKIVPRGRHIDICVGYKIDEKEYIDNNRYASIDLGVNNLATITSNVFSPFIINGKPLKSINEKYSNNIADKKSKLQDKKYSSKTINNMYGKRQRKINDYLHKSSRYIVNYLVSNQVNTLIIGYNKEWKQNINLSTKTNRIFASLPFNKFIEILTYKCKIAGIKLILQEESYTSKCSFLDNEDINKHKTYKGKRITRGLFKTGERIINADVNGSYNILKKGLIKLTAWNENIFSDCVRVNSTPKVYNF

SEQ ID NO: 17810 - protein, 418 aa, Halobacteriales sp.
VADDYVHRTAITRLEVTDEQRDLLEKTISEWKRGCQIATDIAWGTCNAKSDVQPLAYDNVREHTDLGSQHAVLATHQAAQAIIGCIERRSNGKEVSKPAFTAPTVTYDARTMTLFDDDTVSLSTTESRVRCSLALPDADDGYQRQYLDPDEWSVTESTLTARDGNYFLHIGFRRLKTDTERNTAEDGTVLGVDLGIENLAVTSTARFINGRELTHTLREFEKVRAGLQQTGTRSAHRTLEQSSGRERRYVRDVLHRASNAIVNEALRYDCDIIAFEDLTHIRERTGASWGHRWAFRTLYEQVEYKAEAVGIAVKQVGSAYTSKRCAECGFTADENRPTRTDFRCQKCGVEANTDYNAAKNIGLRYVRRGQQSSRRTGNSQLALKSGTVTPSGGFTAHPDGFEAEFMDKPHPPRANPSG

SEQ ID NO: 17811 - protein, 417 aa, unknown
  TnpB Polypeptide
MHILMLRMLVKGVVFRLDDELPPEARFLLQDFRLAVNNAVRAGLQARATSRNALVRLAYKDFRKEHPKMYSQHLVSAFGVAGSLLKNHRRRVRGGNAGRVPYVRRLFMKAENQAYKLDRENGAIDLPIRAGCHVTLKLVLSDYHRAYLGDQSYSLGSLTLFPDRTIVAFRREAPKPYVPESVLSLDTNERSLDGAIVKGDEIKVVKAEFPEVSVIQQRHHDRRKRLQKKKAHDWRTSRRLCMREGAREHHRIEYRLHKVANAVLSFAEDQRSMVVLEDLKGIRPTRIKHLNRRLSLWPRRKLHQIIEYKAQWRGIPVVKVDPRYSSRTCPICGRIQDSRMGAEFECECGWHLDRHINASLNLLQTAISKGMAGGLRFSPGAFQHDVMMILYDPATGARSEPNGTSCMGGVTSGAITR

SEQ ID NO: 17812 - protein, 348 aa, Shigella sp.
MASWLVEWKNATETQWLKDAPSQPLQQSLKDLERAYKNFFQNRAAFPRFKKRGQNDVFRYPQGVKLDQENSRIFLPKLGWMRYRNSRQVTGVVKNVTVSQSCGKWYISIQTESEVSTPVHPSASMVGLDAGVAKLATLSDGTVFEPVNSFQKNQKKLARLQRQLSRKVKFSNNWQKQKRKIQRLHSCIANIRRDYLHKVTTTVSKNHAMIVIEDLKVSNMSKSAAGTVSLPGRNVRAKSGLNRSILDQGWYEMRRQLAYKQLWRGGQVLAVPPAYTSQRCVCCGHTAKENRLSQSKFRCQVCGYTANADVNGARNILAAGHAVLACGEMVQSGRSLKQEPTEMIQATA

SEQ ID NO: 17813 - protein, 390 aa, Actinomadura sp.
MVTDVKIVVQVKLIPDATQTVALERTLHTVNQCANQVSAASFTAYGLNGSIKDLRSMAYGQLKAEGLGAQAAQHVIKRVVDTYTTLRATIRAGNLGGQGAKRRRKAMSRPVTFRLDAAHTYDDRCLSWNYDAQTVSIWTMDGRLKNVRFACSEAALKQLTECRKGESDLVRRDGKWFLVATCEVPEAERYEPRDWIGVDRGISNLATTSDGDDHSGRRLDRYRRRQARKKAEIQAKKTRSAKQLLKKRARRESRHAAHINHKISKTVVAVAQRTERGIALEQLQGIRERVTVRRDQRARQSSWPFHQLGAFIAYKARRAGVPVIEVDPAYTSQRCPRCGHTAKANRPSRDTFRCRRCGLAGPADVVAGVNVRDRARSAWVFVNMPKPAPA

SEQ ID NO: 17814 - protein, 214 aa, unknown
  TnpB Polypeptide
LNWKISSRCVLSPTASKVDWSYMSSVRPKSPQSRPARTRQVLTLGSVIQRLSRSLTTPCCIRVTHSVRTSTTSSARNTRQRGPSQKAQWAREKLSGRKDHFLHALSKDIAERCVAHDVGTVVVGDPSGVDDDDWGRHGNKRLDSWAYKRLMNLIEYKARERGIEVEQRDERGTSSSCSVCGHEDEDSRIERGLWKCDRCGVVAHGDVNGADSIR

SEQ ID NO: 17815 - protein, 412 aa, unknown
  TnpB Polypeptide
MKHTLRFRTYLSDDVASEAWRHIDILRQIRNHAIRDYYNSDYNDRPSAYDQHDKLTEWTGRWPTFAEPSQHAAQQAIRQIHSDLKTLQERRNEGYDVGRLQWQGKGEFRSVSYNQSRRWNVDHNTGDDRFVRLRLEKIGWFNIRAERDVPPADGIDEVILKQETTGEWYVSLVTTVEDTPEKPQLSEIEPENCVGVDLGITSYIHTTENLSVDTLDLSEEYDRYAREQRKLDRKEHGSANWEKQRRKVAQAKRTIKRKVRDFQHKLTTWLVTEYDVVAVEDLDVKPMLETSQNAKNKQDAAWGRFLDLLEYKAGLHGTHLKKVNPEGTTKECAVCGVETAKPIWVREHSCPACGHTEDRDLNATKNILNRGLRQLGAGRSESTPVQTALPTFTPQREAVDAKRVIEAGSPRA

SEQ ID NO: 17816 - protein, 360 aa, unknown
  TnpB Polypeptide
  misc_feature (330)..(346): Xaa can be any naturally occurring amino acid
VVTTTITTTFHNPSRERRREWQRAIHLYRDTKQFCIDGWEDGDFEMSVTTASIDNNLYSAIQNQAIREAKSDYKKDGIVEYHASQPFAVNNQNWEIDRTDNGSVVVGFPCISGWWYTPIDVYDDIADDVARFVNGEADKSRLQVYRRGEGWYCTFTVEYDSEVGDETAIGVDIGHNHLLAADAETGESMLASGREAKYVRRKYHSLRDSLSEAGALRARNRVGDKEKRRIRDLNHKASRRLIDWAEQFENPVLKIEDLEGIREGSEWRGVHSWHFHQLQEFITYKAEQAGIRVEKVDPFETSQRCSVCGAEGTRDGDYFLCSECDRGRHXXXXXXXXXXXXXXXXXSASSTVESLLIQAL

SEQ ID NO: 17817 - protein, 577 aa, unknown
  TnpB Polypeptide
MTQLTEQFHLPDDSHDACDRLTTLVKKHSRRLLAEEYWSDGHLDAISDHTGQSYTYIRDNDREDFADVTEYVYDRFKRCVYHRVTHVLDAHTDEFHAFQFVTDTVDERKIRRIGWKRLRTRLYDEDTPYIEWRVLESVVDQFNDYYDRHGRFPEAYTELVKTPEPNGTLPYAPDKGDYHIHELTIEDSDLRFVLNAPNSLSPGSHYDWTKHELRLPIHPRFQRMIDAGDAKAPILHASEHGYTLDVPVAVPKQDTETVADRVLAVDLGVKKQATAVVLDSGDGGTHDQLMPPQFLDHPAKNKLFRLKADAEGINDRLAELRRQGKDHTDRFDHLVGEFRQTRQKERRLREQIQHHIANQLVWLAAENNCETIIFESLGQIDSSETDGAIAWSISSWARGELLDHVEYKTGLLGIEVTTVNPWGTSRYCPRCGERGRTVNAPNDHEQNRHGGHFHCRTCGYECDRDVVGAVNVGRKHLSESKMEEANPAEYISTGNHASFPSSTRDARSAGVQSATDQQEPASGRQTHLSQYCSASLTAKRRETDTGGLHQNRGSNKTQQWVSGSVTRYILASTTECG

SEQ ID NO: 17818 - protein, 500 aa, unknown
  TnpB Polypeptide
MSDYLSLPIHLPDEDEPQFERLALLTHRVANHVLENTWTQLHLNGIADASHQAWQYFGEHEPFEDLDLYLPSRFRRCILQKVGETLRSHADRRDAFQSIQSVLPDHKIRRIHRRRIKTQLWDDGDYLSSGYVDILIDQLNSYYDCHGMYPDTYFELQDCPEYNNGVLPYSADDGPTSGQAVKYQYDIENETLTIQLKTPDTASPETRGDWSWTEYERGGYEAFHDLLAHGGLSAPEFQPSRRKTGDAYYELSFPVEVEQTGTSDDTDCVLALDAGMRKDMTAVVVTDDGEQLSTPQFIRFTDREKMRRLHRERTRLNTRLAELRRDGRSHTDEFGHIHSEYERVNTKIKHKREQLTHDVANQVLALAVAHDVDAIVHEDLRSLSPPRNESTLSWELSSWARRDIIENIKYRAEYVGLAVDRVYPKGTSRSCPRCGSTGHTCKSPDHHHEQWWGGHFRCDIPGGGVRGRPGLHRGAERGSRVLQRDGRARPRFQVLLHGGF

SEQ ID NO: 17819 - protein, 440 aa, Halorubrum sp.
MCFDVVGVCVTATATKTLEATLAPPTAHKEQRLQRTVATYRRALSESFESGADTQTAVNDVVTGYSLTSYAKDALKNYVPQLRRTYDAEEVDDDHPVRFTNRGWNIDHSEDRTHEFCWRVPQAGRGNAFWIPLRINPAQRELWDDLLDGDVSVGEFRLQEHRTNWVLHVTVEYDVAEPDEPDDPTPVGFDIGESKLLTGCALTENDTPTQPYIYDGGRARYLRKEMHTTLQRLQERDAAEWRVDERFDHYQNALTDIVEKASRQAVEYARQFENPVMVLEDLSYIREHLDYGKWMNRRLHNWAFARLTGRIEDKALEAGIPVRAVNPAYTSQTCHACGHLGSRSSQAAFRCTNAECWVTEYQADINAAANIAGRLNPWRESLPWKSAGDDSPRDGSGCDTTTGHREASRESRQTTLSAYSSETPSRSEPSLGGSPAVHGG

SEQ ID NO: 17820 - protein, 407 aa, unknown
  TnpB Polypeptide
VIAVPGFVEGVNDDVEQLVRKFGNCRRRAYVMKQKGVDRLEILKQLHRETGLPTRYVCTAYDTIKALPSHVTFGGLKLQRLRETGQISREEYHARRNGMLACRGDRSREGNVCLRIEDNGNMLRINTGTHQWATMPLSIPAKYRERYRLLLDGSKPYTIILRRRLDKRGYDAKIIIPTDPLATPEPKRVMALDINSGHVDFAVAEKATLKPIVFGKVNCSEMVNAGHGKKGILTHKLVNKVGNIAKHYGTEVVAGKLRTLHCKGRRHLNRKTQGMNQFRIRQVLRYKLPLRGVRYRDMSEAYTTQIGRKLSRPLGVDVHKAAAYAFSVKVIDYPSFTFLRSVHANEEDGILSMRLNGGSELTAPHETTGLVCDDLHAGACEEATPNFLGKGGLESNQFQTRILQVKV

SEQ ID NO: 17821 - protein, 406 aa, Nocardia sp.
VAHKQGVRFELAPTPEQAIVMGRHCGLSRVVENFCLETVRKKWAQRKAEETYGITGGELTEVPWSAPALEKHWRAAHPTLFPWFVENKMSSRVPKEACRMRAAGFANYLKSKNSEHKGTRTGFPTWRKRKFGGRFRYDADRARPVGVRAVRLPAIGEVATREDLCWLTGRLADGRARILGSTVREQGGRWWISLQLEVNRDDINTRRHVATDAPKCGIDLGLKTFAVIKNDDGSIDEIHAPKPLRAAQRALKRANRKLARAGDNSNNRVKARKRLARLHLRIAARRRDFLHKATTRLTRTKSAIAVETLNLKGMIANRRLAHAISDAGFGEFVRQLVYKAGWYGATVWKADRWFPSSKTCGDCGHVNRGLVLADRMWECAGCGVVHDRDRNAAGNPLSAMLADLGG

SEQ ID NO: 17822 - protein, 396 aa, Lechevalieria sp.
VRAYPTPERAAVFNRTFGCVRLVWNKTLSERSDRYRDSGARTSCKQTSATLTVWKRTEELSFLSEVSPVPLQQTLRHQHAAFQNFFARRARYPKVKTRNGRQTAHCTRSAFGMRHGMLTLARTGLPLRFVWSFADVDVTTLDPTTVVITREPDGRWYVTFAVDAEEPAPTEPVGHAIGVDLGLTDLLVTSDGLRIANPRQFARRARNLARYQRRTARCQRGSNNRRKAKTRGAQVHRKIRNARRDFLHRTTTNLVRSADLIAVEDLNVAGMRRNHHVAHAISDVSWGEFKRQLACKCARAGRTLVVIDRWYPSGKTCSACGHRLTELALPARHWPCPSCRTLHDRDLNAAKNILAAGRVVARSTSGDASGADVSRQGSSLPRSAMNQESCAVRRSP

SEQ ID NO: 17823 - protein, 405 aa, Longimycelium sp.
MIFVLARYRYRIDPTPGQREMLARTFGCVRVVFNDAIRAREAAYSAAEKITPTEVQRRVITQAKGTDERAWLGEVASVALVQSVRDAHKAYANFFVSITGKREGRCAGRPRMKSRKDARQSFRLTRNGFALRPNGRLYLAKIGEVQVRWSRELPSVPSSVTVIREPDDHYYASFVVEVDPTPLPEVNREAGVDLGLSRLATVATSDGSRTDVPNPRHLAGKLRKLARLEREKARRAKGSNRRAKTRLKVAKQHATVRRTRLDHHHKLALGLVRENQAVHVEDLNVVGLARNRQLARSISDAGWSILVRLLREKAERYGRTVHMVDRWLASSKTCADCGRRMTELSLQVRTWTCPGCAVVHDRDHNAARVILAAGRAERQNARGAHVRPRRGAAEGVEAGSTPDAA

SEQ ID NO: 17824 - protein, 353 aa, Rhodococcus sp.
MRVTTARTSPEPRQEHTAFQSFFTGTAKYPRFKNRHSRQSAHYTRSAFRIKTDGLWLAKTTAPLKVAWSWPGIDLATLDPTMVVVSREADGRWFVTFAVDTSDPAPLPDTGESVGVDLGIKDFAVLSTGEKIANPKHMARHERGLRRHQRRLARMQKGSNNRAKQRRRVTRKHSRVRDARRDFLHKTSTDLVARFDTIAVEDLAPRNMVRNRSLAKSISECGWGEFRSMLEYKAEQAGRRFVVIDRWFPELADVQRVRVSARCAIPRDTPLVVSRLRYPARSGRQCREEHPRRRRAGGDTKRLWRRCQTARVFPSALAGETGTLGCESENPRLSGRGVVKAGSVTGGGETSRR

SEQ ID NO: 17825 - protein, 199 aa, Kribbella sp.
MSDRERERLKRWQRRLALCKRGSARHQRAKAAIAKLHARAADRRQDWVEKTSTDLARRFDIIRVEDLHIIAMVKRPKPKPDPGQSGRLLPNRRRTKAGLNRGILTNGWGELVRRLEHKAPGRVEKINPAYTSQTCSVCGHCAPANRESQAVFRCVACGHRANADLNAAINIAAGRVVSAGREMPVRISPKREPQLTTSV

SEQ ID NO: 17826 - protein, 188 aa, Kribbella sp.
MSRFRMYPTRAQQTALLEHCRHARYVWNVALEQWLMWTRDKGPTPGFAEQCRQLTDARTEFGWLRAGSQTVQQQALRDFNQAVNNMCAGTHRRPTWRKAGLHEGFRIVGSQASRIVKLNRKWAQALVPKVGWVRFRLSRAVPAAKSYRITCDRSGRWHIGFAVIPAPTSAPGTGEVVGVDRGIRSRRH

SEQ ID NO: 17827 - protein, 405 aa, Symploca sp.
MRTAYQYRLRPTRQQTAEIDRWLSMLCAQYNYLLADRFNWYEQNRSPVNACLLVCQLPELRVNPNYYSQKKTLPQLKKDRPWYKDIYSQVLQDVVKRVKLTFDRFLKGDSNGKRSGRPRFKSLNRYRTFTYPQIKQDCLQGNKINLPKLGKIKVIVHRPIPEGFKVKTVSISKKADGFYVTLSLEDKTIPEIKPDINTHSITGIDVGLKDFLTTSNGETVAIPQHYRKAQKRLRLIHQKVSRRQKGGRRRLKTIKLLAKQHQKVVNKRKDFHFKTVNQLLSKYDVIAHEDLNIKGLARTNLAKSVLDAGWSNFLSILTNKAENAGLLVIGVNAHNTTQECSSCGEKVPKKLHIRWHNCPNCGCNLGRDHNAAINIKNRAVGHPVLKAQLMSEAIAGVAEKPTLTR

SEQ ID NO: 17828 - protein, 403 aa, unknown
  TnpB Polypeptide
MPMPSNSELSLTIKAKILNPILDFETTSEQYRFACNFISDWIFNNNLEINQLKIQKEIYSEIRERFGLKAQMAISAIRNTSARYQSVKSYMRNNPVIIKDKLCGNKKHKYYKTLEHLRKPISFSRPQADLVRNRDYEINFETKKVKITTMSGRHEFDFVCKGYDRFLCNDWKLGTAKLLKANGEWYLHIAVTRNIPENEGVFKNIIGIDRGLNFLAVSYDSSGKVDFKKGRSLMAIRKKFADKRKELQLVGTASAKRKIRKIGQRENRWMHDVNHCASKTLVKPNSLIVIEDLSTIKDELADSGSYIKASWAYAELASMLAYKARQVNSLVVEVDAHYTSQRCPKCGHIHKDNRDKDTHLFKCLSCGYSSNDDRVAAMNLQELGRLYLLGETPSFKKAHIEYT

SEQ ID NO: 17829 - protein, 503 aa, unknown
  TnpB Polypeptide
VYRAYCLKHDINLSKQKKINDVLCEYRKTAKLISDNLWNNFYTTSKLERFIDTKSIASTLSERYKQTCLAQVRGMISSFIENRKNDFKEYVYRSSISSEDLRIKLLYINKYNLWFSREPIKMKDIVIDDKAMILARTIARHCFKTNRKPNMRNIGLALDAKVAEISKSTDGYFDYWVKLATMEKGKPVYLPLKSNDYFENIDGRLANFVQINSGRNGALSLSLIKDLPKSTSYTPIIDKIGIDIGLSCLIATSKGDTFGKEYFFDYLKKQDERIVELVKRLRKAGLTPNKSKKYRNLVSNIRAFIKNNVNRAFNRIIELYAPNEIVVERLNFQNQNLGKRMNRIIGNFGKGVIRQKLDSLNELYGIKITEVNPAYTSKICSTCGYVSQKSRKNQATFICAFCGKNINADINASRNILARSSSISKGIYKTKAFILQNTVDSFLERPLSHNSLARAVNNSKYFELAITDESRLSIGLSRYRDKPMKEITMLRIHSVTNNGKEAR

SEQ ID NO: 17830 - protein, 448 aa, Lachnospiraceae sp.
MKITTTYKVKIKHYNHIFKDTVRIYRSAVDYIIKVCLNEWDAIQNLGSKEKYNYCEKLIHKTDDNPNPKYEFDTCFYKMPSYIRRAATAEAIGKVSSYKSSLSNWEDTDPYERGQIPSYPKAGFIYPSLYRGNMYQFTDIYKGRIKVYIRNTWDWISIDLKKSDIDYIKNHCSHREMKSPTLRKRGKEWFLEFPFEEEVKLNKTDIHEQRIVAVDLGINSPAAVSIMHSDGTILGRHFLKLPKEYDSLTHSVNRIKKAQQHGSRKAPKLWAKAKGINDNIAVKTAQFIMDIAVLYNADVIVFEHLDLIGRKRGSKKQKLNLWKARYVQSMVSDKAHRLGIRISRINAWGTSRFAYDGSGRISRGREADLSSYSVCRFVSGKIYNCDLNASYNIGARYFIREILKSLPAKERLALEAKVPQAARRSTCTLATLISLSGELYPMRYGIAA

SEQ ID NO: 17831 - protein, 398 aa, unknown
  TnpB Polypeptide
VLIKKSFRYRIYPNEEQKRALAIQFGHSRFVFNFFLGKRIEFYQDHKNDPEKKGLTFYDTCEMLTELKKDPDHEWLKDADSQVLQQSMKNLDRAYKNFFKGDSKFPKFKKKSAKQSIRYPQRFRLIENKIYAPKVGWIKAIIHRPTEGEIENLSISKTPTGKYFASFQCEVEIDPPQNRTGQVGIDLGIKDFAVTSDGEVIPNPRFLVKAEKKIKRAQRILSRRVKGSSGWYKAKHRVALAYEKVANQRADFLHKTSRMFVAQYGYIAIEHLNVSGMIKNHKLAKHISDVGWREFGRQLDYKGLWYGSQIVRIGRFEPSSKTCSNCGYKLEKLDLSVREWVCPQCNTHHNRDGNAAVNILAFSMAGAAKRINAGGECVRPACQAMLFEAGSPIPSGVG

SEQ ID NO: 17832 - protein, 413 aa, Anabaena sp.
MLVFEAKLEGLDEQYQSLDEAIRTARFVRNSCLRYWMDNKDIGRYELSAYCAVLAQQFEFAKNLNSMARQASAERAWSAIARFFDNCKKKKPGKKGFPKFKKEQTHGSVEYKTCGWRLSDDRRYITFSDGFKAGTFKLWGTRDLHFYQLKQFKRVRVVRRADGYYCRFCIDHERVEKRKPTGKTIGIDVGLNHFYTDSNGETVANPRHLRKSEKSLRRLQRRMSKTKKGSQNRIKFRNKLARKHLKVSRQRKDFAVKTARCVVKSNDLVAYEDLQVRNMVKNHRLAKSISDVSWSLFREWVEYFGKVFGVVTVAVLPHYTSQNCSNCGEIVKKTLSTRTHVCPRCGHTQDRDWNAARNILEKALSTAGHVGTNASGETDQYLSEKTPSSKSTRGKRKPKERSLESPAISGTPD

SEQ ID NO: 17833 - protein, 491 aa, unknown
  TnpB Polypeptide
MGKTYRTLVLKYDVSKLPPEEAGKIPALLKVQEEFRNWATEWAKSGGSLHPPERRLKYFAERFIHAAKALDWLKEIKKSGIEVKKLRPPLFFDIQLRLNDEKDIGRGVLVDLSKREVKIRRLGIIVLRLNNKVIEWILNRIKEGGKLVMAAVWVGRNRRSHAVKLYIALVFRREIAPMEAKRLLVIDVNALHNGLAWAVVEGERLVERGILRPNISKILHLQKVMAKLESICAKEDRSCDEAMAVKSRIWRLLRSWEDEAVKKIVRLALQYKAAIVIDVPDDNSVKELKEGGYKAEKKVFLNFGRIRRRLQGLAEWYGIPFREERLYSTICPICGAKMEELPNRRVRCQCGFSAHRDEVPIYWAQRRFRELITPSFSSSSAVLLRWAVEKGVRKKGGWSFAEPHREERLHDAAPRVLLHELFRFFLRPPLPPAFCYASHLHGHPVLQQKRPGYGDVELAEPRGGPRQERRRIGRGVDGAAALSLLLVDLPT

SEQ ID NO: 17834 - protein, 808 aa, unknown
  TnpB Polypeptide
LPKILRKRKKFEQEEEEEEEVEEKVEEKVEEGSKKIESNFTIKSRLHAQSDQIHDWILHGVDTVTSCAIHVTRFANMYLLHCVDNHLQLPIIDKPFFDRIICLITVDAEENRKKFADPQMRASFEQIYKPLLPKDFAIDRNSRDRTFLQRLGLDLQTNSRVYLRTQFLRRFRDWCKQCLYEIIPIDMSGKKSDERSEKMKQRWKLVTFLFQETACSASVVVDVALIKEDVLKLQETCSMVMSDEVALKLAEKIAETRQILSGTVDYTKTKTKIVNGETVIETVENKVLCRPITHRKLLNVDFSPFYLIWLVKRLKQIEKYNEEIGENGKQKKVYSILPISSLDRRYVSIENTALIAFIHSNRHDEEAVGKEIFAKMKENDCSNLKKTTNLFSENELWFWQQCFKFKANIGENRHFKCYMSTDGVGCSALYKKSAKKLEKEVEKEDDEKGSNELITIGDETETNKRIRVFSKEELAESDIIAFDPGQAQLFTSVIDGPENEKNHVESYSPAKWLQLCGGAKAKKKREKWVKSVQGYEKWLLEMPSCKVGTVAAMQKHVTHLFAFLEKHLVENGRERVRRLRFTRYVTNQKALSSIVNDVVNKPKKAIQSTKKKTIVVYGDGKFQTRGPMRKVYRELRRKENVTVVDMDEFRTSKLTTCCAFPKQRICEGKNKVEAKAVEREGPVGEYYDKKGEFQRKSLYSVTFCQNCSCIWNRDVNAALNMMRLFHYAQENRGARHLFFKRENAGVDASADASVDAKESKVIPEKKKKRNDAKEKTVKSKADLGERQALPVCKSSSNPEVGKKKGVQN

SEQ ID NO: 17835 - protein, 230 aa, unknown
  TnpB Polypeptide
VVETDPAADAGRFPPDGTDVGIDLGLTAFAVLSDGTVIRFPGFLRRAERKLRRAQRAHGRKQKGSSNKDKSRVRLARTHARVADKRADFHHKVSTAIVRDNQAVYVEDLCVAGLARIRLAKSIPDAGWSAFTRMLEYKATRYGRLFRKVGRFEPTSQVCSACGVKDGPKPLSVRQWTCVACGTVHDRDLNAARNIVALGRRETQNACGGDVRRGTAPAVAGEAGTLRGAA

SEQ ID NO: 17836 - protein, 422 aa, Gloeocapsopsis sp.
LQKAFKVTIMPSRNQQVLINKTIGCVRFVYNRFLARRKELYELEKKTLNYSGCSKELTQLKKEIEWLAEVDKFALQNSLKNLETAYKNFFTNLKKPEKQRRSGFPKFKKKHGFKQSYKTYFTNGNIQLGDNYLKLPKLGWVKFHRRGAFRRKATSCSHSPHKSQEITGTIINVTVTRTTTGKYVASILCETEIEKHPQADKNVGLDLGIKSYLVTSDSEEIKNPKHYRQSLRKLRRANKKLSRSVKGSSNRAKAEIKPARIHKRVVNLRDDFLHKLSTRLIRENSVICIEDLRVANMVKKHKLALSIADASWSKFVAMLSYKALWHDWIVQKVSPFFPSSQTCSCCGFVNPEVKDLSIREWTCPTYKTHHFRDCTAAVNILREGLRLLTVAVGAPDTQNACGESVRPGDTRRDSLKQESRDF

SEQ ID NO: 17837 - protein, 357 aa, Thermaerobacter sp.
MIGPMQATFQTKIQDPSVYPVLDAIAALYGRLLRRLFVDVYVRKRSLVECKREYIARYGITARHFNALATELQAKVKAAEESLRHHQANLRGQIQATERAIAKLHKQEKALAAGKGRWAALSPEDRAERRRRIRFRLHQKKRRLAMLRARLETAKARTGLPPICFGSRRLFHRQFHLAENGLASHDEWRKAWRDARSQGFFCIGSKDEMSGNQTCSLFGDSLRLRVPNALAGRFGRHVWLHGIRFPHGQDVILAALASGQAISYRFVRQNGAWYVFATTERPAAPITTSRRAGALGADLNPDRLAVAEVDRFGNPVAARDIRFQIQGKRREAGEGHPGRGGGGPGGMGKGRRQAHRR

SEQ ID NO: 17838 - protein, 367 aa, Thermaerobacter sp.
VDASGIAAGVEPAKARRRPLVAGELEGSLLLRPGGLARALQNWSKSRKGERKGRRVGFPRFRKKGRGRESVRFTTGAIRVDDKSHVVLPRIGRVKTHEPTTALLRRIEVGAARILSATVAREGGRWFVSFTCEVERQPGRPRFPWRVVGVDAGVKYLAVLSTGEKWPNPRSLEKALRKIARSNRALARRQRGSRRWQEALCRLQRAYARAAHIRRDAIHKLTHDLATTYGVVVVENLHVAGMLKNRRLARALADAALAEIRRQLEYKCFWHGAVLVEAPLFYPSSKRCSRCSAVKASLPLSQRIFCCEECGLVLDRDENAARNLAALVAAVAGSGPETLNARGRDGRPATRQAIPEEAGSRLPLIAG

SEQ ID NO: 17839 - protein, 597 aa, Thermaerobacter sp.
VERPPGRPWFPWKVVGVDAGVKHLAVLSTGEKGPNPRPLEKALRKIARSSRALARRQKGSRGWQQARRRLARLHARARDVRQDVAWWSSNSCTWRPPQRPSPMAIPNGHPQRPSSDRQAARPPSVPLHLPVPDLPQHPQRIAADHLLDLVVGVVVLDEPADDVGPCLGDVLQAPHIGHMGMVLARRLAGADGQVGGKGLVQGHVVAEEQIGPEGHVVDAHQLDAVLEVLHHRLDAVLGVVAGQGGVGRRLDADHAAPLGAGLDHLVGLEAPAGPQGAGPGVGDEDRLLAEPDRIQGRLVARVGHVDGDAQLVHPLHGLPAEDRQPAVPRLPQAAPQGIALAVGDAHHPDPQAVQHIEPVQLVLDGRRRLQAGDQGDPALGVGAQDVVDPLRPDDEVLVGQVGEAHADVVDDVGPLPPHLGGDGGGAVEEVLAHGIEPRSRQALVAREDPALADVVEDLSHVLGDHHQVLVEGDHHVLRQEPLDPLLLGVGHLHHVGGDPADLPGQLEGPVVDPRLKELEGTVAVVLLPLGGRTRRGGTRRGFGHAVAHGQLPFSRRCQAFQAPRVRSARRACARRGCSAAGWDPPPAAATLRPRKPG

SEQ ID NO: 17840 - protein, 342 aa, Thermaerobacter sp.
LYGATLRRGLSPLSTRPCRAHSGGPGFRRRAHRLLVDPDPYFLGRSHPCPSSRSRRRSGSRRLRRPRRRPPRTCHRRPRHQRKHQCHQHRHGDDIQGGGVSARQLPHPGDHQRARDGTEPPGQQHDPVDAPRIAGPKVVGAPGRHGPEPAAVTQGDQGRALARRQKGSRGWQKARRRLAQIHARARNLRQDALHKLTHHLASTYGVVVVEQLHVAGMGKNRRLARALADAALAEIRRQLSYKCPWHGAVLVEAPPFDPSSKRCSRCGAVKPSLPLSQRVFRCEECGLVLDRDENAARNLAALAAAVAGSGPETESARGRDGRPAARQAIPEEAGSRHRRTAG

SEQ ID NO: 17841 - protein, 205 aa, Thermaerobacter sp.
VERPPGRPRFPWKVVGVDAGVKHLAVLSTGEVLPNARALEMNLKRLARSSRALARRQKGSRGWQKARRRLAQIHARARNLRQDALHKLTHHLASTYGVVVVEQLNAAGMMKNRRLARVLADAALAEIRRQLRYKCPWHGAVLVEAPPFYPSSKRCSRCGVVKASLPLSERTFRCEECGLVLDRDENAARNLAALVAAVAGSGPET

SEQ ID NO: 17842 - protein, 384 aa, Micromonospora sp.
VDVKIVVQVRLFPDASQEAALRDTLILCNEAASVVAGEAYRARVFRKQALQRLTYGRLKGMGLSAQPAIHVARKVAGAYATLAANIRAGNLGKAGSKRRRKAEGKPIVFRRDAAQPFDDRCLSWQMRSRTVSIWTTAGRQSGIRFGCSEQQFAVLSAHRRGESDLVCRDGKWFLYATCDIPDVEVKEPDGFLGVDLGIANIAATNDGTRHSGKGLNRVRHRNQRLRAKLQRIGTKSAKRLLKARRRKEARFAADTNHRIAKQIVTEAERTGRGIALENLTGIRDRVRLRRPQRVTLHSWAFHQLGQFISYKAARAGLALVHVDPAYTSQGCSICGYIAKANRPNQSTFRCTSCGFAEHADVNAARNIAIRGAADWAAVSLPNAA

SEQ ID NO: 17843 - protein, 379 aa, Micromonospora sp.
VTWLSILSARLSTAELKRTFTTLKADLWASDPFLARQLRKHWKRGRNHTHDQIVVRADKHNIIVDGRGRLWLVVPGLQRRKMVKIPLSTTVAPTSTLNLILRRGRVEVHYQIDASQMWSSQRPCGDATVNVDKCYTEALTDSDSGRHGRRLGALLTAEADRLKERNRRWAKLPSIANTAALRGDHAKAQRIKTNNLGTVKRDRQAAHHRARVRTENFTAVHEVVDKAPTVIAEDLTKRFTSRKKLPKNINRHLAAGTKGVTTEALKSVSERRGSAHVPVNAAHTSQTCHHCGDFGRRSGDWFHCTRCPVVWQADVNAAINILQRAGAPDIALHTPHQRVKQILQDRTDRHRTRLPVQDSSPAPAERRANHPNSSTTSNQ

SEQ ID NO: 17844 - protein, 215 aa, Enterococcus sp.
MESDGTVLDRLFIKQSKEKDHLFHLTNQLKKAQRQTKGAKCPRYWNAIKGLQTQMTNDTAHQIIEFATKYNVNTIVFEYLGQMRVPKGFYGARRLRFKLHYWRKTGIQNKVEEMAHYLGMRISRVLARGTSMYAYDGTGKVSRSDRKDLCEFSEGKKYHADLNASYNIGARFFIRAAIKPLSEKRRLALGAKVPEVLVRTEQTLSTLYKLQTCEA

SEQ ID NO: 17845 - protein, 329 aa, unknown
  TnpB Polypeptide
  misc_feature (100)..(100): Xaa can be any naturally occurring amino acid
VVGLLAFKAVKQNYSRPIEVARLMEVFTRMTNDCIRIGLVNNLCSLGKLSLLCYNQLGQYDSPSYYKLCAISRAAGILAARKKSVKRGFQPKTPYAVKPXLVSCYGFKIRNSLLEIPVARGRRFGIPLTRHTLHMISQPGVKVRSFTLASNSLSLCISRDIPVIRCLSTVGVDRNLRNLTMGNDRETRRYDLSETVRIARVTTDIVGSFKRNDVRIRFALFSKHGARRSYRVSHLLHNVTKRIVGLAVEQRTAIVLENITGIRSLYRRGNGQGRKYRGRMNSWNFGEVQRQIEYKARWSGLPIIRLSKRDTRGSSVVRDAGRDSNRTSG

SEQ ID NO: 17846 - protein, 527 aa, Anaerostipes sp.
MKKCLASRYIKKTDLRPKENERILQDLFAFNSMKRTSFLWQRQDRKFYQDDGKERSHQLKLKDIHGCKDYFINSAIGNARALIKSGQELTKLYIDDAKDDMKAIQKVLRKKKKYRKKLLKIKESIIKHTKDPKKSLKGSANIKYEKDGSVTVQFFQRIWTYETLYLFEHQWLDRKLRQLKAQIANMEHKLKRLEIRQQRLKEHPLKVRFGGKKLTKNRMIPERHRALEKRRNRRMQISGRKDCKYGNWVFRYDTETKTLEYRSMTDWDGTRICFPDVTFPYGQTWIESWLQERKGAIAWEIIDCGNAWQIRCILTKEPENMNNYYGDGTIGIDINYDHIAMTETDQSGNLLYHKVFYYDIEGKRSGQIKHQISEALEKVFQYADQQHKPITAENIKSIQRKKFYDKHRKRHRHISMFASHCIRELLLSKAVKYHIGVKFVHPAYTSKAGKMRYLRRYGLSIHEAAALCIARRGQGYKESIPSYLKPYLKDEKVRALIPQQWGSLAKLINKVTTQELLSYQDPVLHRN

SEQ ID NO: 17847 - protein, 713 aa, unknown
  TnpB Polypeptide
MKRNYRRTKTTVSMINYHFVFCPRYRRRLFLVDGLETRFKELVAQICEQNGIVILAMECHIDHCHLFVNAPPTLSAAEIMKIIKGTTGRILKQEFFPDTVMQMWTRSYFVSTAGDVSNATIQRYVEEQKNERRVIMAFGSKNSTPSFVLTLPMAIGLNEQDYLNKEFKKCGIIYNQLVSATTKMWHQLRKTRKYRELMADIAKAAPDSDEQKALFKQREKMLKEYRFSEDAFHVMVVPYAKHYVLHSHVAQMVATAVWAAWSSFFFDNGKEVHYKKLEQVFSISGKNNTTGIMLRPANHTTSVINSAKKKIKGSIEEKYFAAYRKPDAKEGEEVVLPDEVKTQMEKEIAAATAKVKTSIGKGELRLVYGDYTFPLTLRNPDTQAGWYQQEALKCGVKYCRIIRKWVGTKWKYYAQIVLEGYPPIKCDSNGVAKHPVKQGRVGIDIGTQTIAFSCKDVCDLRVLAPSARAQAKSLVNEIASTLRAMDRSRRATNPKYYNPDGTIKRLKRQHGQKQKREWKYSKRYYRLRAKLRNLYRKLADIRKMEHNILANELLAHGNKFVVEDMNYKALQKRSKETKINPKTGRAHTKKRFGKSLSRCAPAMFISILSNKANRYGGSVIKVSTFETKASQFDHTDNSYTKKKLSERMARLRSGDIVQRDLYSAFLLEHIDTESLQYNMETLNSAFPAFLGMHENTKQRLQAVGSSLPASIGF

SEQ ID NO: 17848 - protein, 368 aa, unknown
  TnpB Polypeptide
MILQKTVKAKLFALTRVKEQKIKLEYWNFQKTLHGEDVSLYSATKQQAQRKRGWRGNGEYPLVIRRDCFKVKELGLKLARWWAKIPVFGGSIWCPIQLPYVQEPLLKEEVRETKIVRRKHEWFLHITVQQDLMLNTPSASVITVDFGERHIATSVECANGKIQNPRFYGTEVRGIRRHYAWLRKRLGNRKALKTIKKIGRKEHRKVNTVLHNISRAIVNRAEELNAVILLGSPNGTSMRRNAKGKRFRRIVYSMPYYRLTQFIEYKALQEGIYVVQANEEYTSKTCSKCGEISERPRQDLIVCPHGHRLNADINACHNLIKRFIDHWLVNGAVLTPPLTPPNMRGESSGFSHEECQLNLHQVKFYTSR

SEQ ID NO: 17849 - protein, 465 aa, unknown
  TnpB Polypeptide
MTILSGVKLKLYPNKVQRETIEQTFGNSRFVWNQFRNMQEKRYETMIDDYNQYKEHAKENKEKIINPIYIDAYGMQKMLTILKKDCPWLHLSDATVLQKTLATLEQAYKNFFKKPDQFEKPKFKSRKNRKQTFTGKSNKKKSGQTSVFVAGSRYVYIPKLGFIKVSKTTRINGQIKEYTITRESFGDYYISFQIEEPDRELLVKTKQLIGGDLGLTHLLTLSNGFKFPKFSPEQALAYSLKAQSKASKSMNRNSKILTTNELIYLIRKGIFDDDKYDVSDLFDFKNHEKRMKKSAKAQRKVANKRHDYLHKLTKKLVETYDVIVLEDLKVKNMLKNHKLAKAISNASWATFVRLLRYKCEWYGKLFILVPPHYTSRVCHQCGWDSGKKPLGIREWTCPHCHKTHDRDSNAAINILYRGLETYLQSQLMLLNEQAKNGCFSTIFFQIASQWIKQNINYFNQALEIA

SEQ ID NO: 17850 - protein, 384 aa, unknown
  TnpB Polypeptide
MIKTHKIALDPNRDQIAWFYQQCGYAKFAYNSALSDFKTELSADNFLSMYDLNTRFNEKKKAIDWTKAQDQRAAMYAVHHLGSAIDNWKAKRAKFPRLKKRGCKHSYTTDEQAVRMEGTRIKLPKIGWIKTFEALRFRGKIVSVTISRTAHRWFASVSVEVQPPIHRCPASSAYVEWFASQVDIGTPEQMERSIYPTIGIDVGISTLATLDDGTKYENPKPLKRYERKLAREQRKLSRKVFRSQNWYKQKRKVERIHYRIACIRRDTQHQATSDILKCASKIGIETLSVTNLLKNRKLAKALSDAALGGFLEKLKTKAKSLGIPILQVDRFFASSKTCSACGHKKDDLPLSDRQYHCNPCGTSIDRDVNAAINLRTLAAGYAES

SEQ ID NO: 17851 - protein, 382 aa, unknown
  TnpB Polypeptide
MRKRKKKKHRRTYSFQLREHPKNVRLGNMLDDLADVHNHFLALEKRYYRRYGKYAGRFRLQPHLTHLLKRTKKHWAWIPRDTLDEVIVRIHVAYERFFDGLGGLPQFKRKGRYRSAKFQSAYLLEAGRVWLSFKAWDAPTESLKFNKRWFSFHQHRDWDGKVCYIQILRDRVGTYWLYVVTDASTTESYSATGESVGIDFGMETYLTFSNGEKKQSPQFLKHALKELRTLNKNLSRKVKGSGNWWRCVRQLARLYRHITNQRKDWHYKVATDLCERFDTIVTETLNLDGMKRLWGRKVSDLAFYQFVEILKYKCIKHKREFIQIGQWTPTTKPCSGCGYHNEKLSLSDRQWTCPECGSHHDRDVNAAINILRAALGPSVEQT

SEQ ID NO: 17852 - protein, 383 aa, Euryarchaeota sp.
LQPKDGVLSTFVTDGVAATATFDVPIRRRTQVMFTNDTFRGISHIRRCGHSDCELCCAPSTSTYSPQCPAIAQSAPIIRQIKSHDGTLVPDPMGRVALSAEDVDAFRASPRLIGTDPGVNNIITTAELGRRRLPGCHRAPIHSFLSLNVYEKRTMRRSHQKWEARRRVDNPVYGQAILKLSRAGTWATKNAETLDQMCRAVAHGWRPVYQELVECKDHVSRKMVMYRKRRMLLDQTVRRMLNPTKDHVADKKTRAVVVGYGNASFKSRGPRVLLIKALVRGLKTQRAEGRPAAMVFIDEFRTTLLCHRCHRETHSPTKKKANYRGRVEDRRFRDCPHCGTQAAPKRWGRDSNAALNMLMKLMALMDGVDVPRPFKRPAAAAVA

SEQ ID NO: 17853 - protein, 701 aa, Nonomuraea sp.
MMMRRVRVSGEGRLRMAAFVATATCTGHRAVVEATGQVLGERVLGERVAWLTALMQAMTADIVAGRWNARDLGLLAAGVGVDGRVLPAKGWMAIRRLGWGCAAGATGEVSGGVSGGRVYVSDRVRRCAEEQAARMLRAVLHRRGIVTAILATWPADPRRRSEVEWKALRAALPEGVTAAEIRNRTRQVRAVLERDGVLPGDITEVEQPPRVAPQAVLAAADRQLVTLTRTGDIGALLRVQLPLKASPACRKDWAWHAIAITLPPTVSAQAALCTPTVRLSGGRVRIDLPFQTPIPVAPATGHTVALGLDWGVNTLLTGAIARLRDGRVVSDGRMLRYDATVISAKLHRLRGRREQLAVKRDHCAALLSGLDAADTPDTPDADAGDAGDDRRVALERRHRVLAVEHERVCARIRHLNKALAWSAARWAVDQALALGASVIYLEDLATLEARGVRRGNAALSGQVRGTVIEAIRHLAAKERIAVVTVPARGTSRFCPRCGDGTSVLRHVPAPDRLGERGWKWAYCPICGLSCDRDQAAAERIAARGLLGQKHTRTDRVSGVRSIAVAVEGNVARARRRRKPTRAARRARRTGTDLHPRPPARARDTAGPTPKRRPARRIKTFSRVPDRRTVPAPFPARSGQRPAGQAPQAARPPAGRTGLVRDPQQRTGFHRVAATSVLPLGGYGGGPARPRPPEMPEILRQT

SEQ ID NO: 17854 - protein, 442 aa, unknown
  TnpB Polypeptide
MITISHKIELVPNNKQKSYFRKAFGCARLAYNWGLAEWQRRHKEGEKVDAYGLKKAFNAIKKEEYPFVLEVTKYATQQPFINLGKAFKKLFEDLKRGAVSYPQFKKKKDNEGSFYIGGDQVSLSDTNRNSKALKKMPHNERQKRQYLKVPNLGWVKMTERLRFIGKVNGVVVSQQGDKYFASFSVQVTEEEYRRTHPKTCSCRENRNAGIDLGIKSALVLSDGVAVENPKPLKDNLRKIKRISRQLDKRTHARTKQERLEGKKKSKNYRRLSVRLSNAQRKVANMRRDFTQKVTTILATHYTHIALEDLNVEGMVRNHHLAQSVSDVAFGELCRQIEYKSLLNGVKVLKADRFYPSSKTCSMCGHIKHDLKLSDRTYHCDKCGAVIDRDYNASLNLLSLITKKQIGADYPESTPEDLTALLFRFARNGIATSKVETGRQRKS

SEQ ID NO: 17855 - protein, 383 aa, unknown
  TnpB Polypeptide
MKLTAQIKLLPSHDQAIALLQTLELANEACNVISEQAWETRSFKQFSLHRLMYKTIRSKFPLTAQIVVRCISKVADAYKTGQLSKRFFRSHGGFPFDNRILSWKLDSSEVSIWTIAGRQRIPFVCGKRQRELLLENRGESDLCIRDNNFFLDTSCEVEASQTKSVTDVLGLDLGLVNIAADSDGIMYSGEAIETKRRIYAHRRRNLQRKNTKAAKRKLKKISGKQARYQKDTNHLISKRIVQNAQDTGRAIALEDLGGIRDRVTVRGRKQRARHANWSFHQLRKFISYKADLAGVPIFLVDPRNTSRTCPNCGCVDKRNRVTQSLFSCVSCGHSAPADTNAAVNIAARAVVNQPKVSNLSDSGTNPFHYYGVIDGYRSTIPQC

SEQ ID NO: 17856 - protein, 383 aa, unknown; identical to SEQ ID NO: 17855
  TnpB Polypeptide

SEQ ID NO: 17857 - protein, 387 aa, unknown
  TnpB Polypeptide
MTELVLTIQCKLSPIDSQAEEIDDTLKAFADACNWINQSTPAKLNNKVRIQGLVYQDVRAKFGLSANLAIRAINRVAGNRKTAMKNRSAVKNFEPTSIDYDARIFAFREKDEEVSVTLLRSRQRIKLMLGDYQRSHLRGSKPTSAVLCKCGSKYYINVQVKSEAPDQIHIDTILGVDLGITDIVVTSEGQKFGGKTIKQIKIHYASMRAVLQQKAVKGTRSSRRRCRELLQRLSGNESRYQRQINHEISKAIVTRAQEIPAKIALEDLAGIREGVNQKAGKSQRRRVNGWAFYQLKEFLTYKAEQAGIPLVLVNPANTSQTCHVCGEHGIRNGKSFKCPSCSWSGDADFNGAKNIAFLGRYVDRPGGSEGLPSIKGVLSGLQKAHGL

SEQ ID NO: 17858 - protein, 435 aa, Halorubrum sp.
MAGIYICHNQNLRTVTMGELTKTLELKLVDPNLHKRQKLRETRDAYRRALQAAFDTGCDTQSATNDVVVEYDLSGYAKNALKKYVPQLCGNSYDANEIHDDHPVRFTNEGLQLDHQPQNAIEWYAKVPHHEDYHLWIPARANPDQRDWLEALYADDAEMGESRLFERDGTWYLHITATRDVEDESEASADKRTPVGVDIGEASLVTVCHRDGSGSPVRPRLWAADGKAVRRLRKTYFTATRRLQKRGSERIADSFGDALWDQIDDVFHRVTSEVVDYAESVDNPVLVLEDLRYIRENMDYGEYMNRRLHGWGFAKLHAQIRYKATEKGIPVETVNPRNTSKACHACGEHGYRPRQATFRCSNDGCWVGEYQADVNGAINIADRYRSGESHRQSDWASRQKAGADDSATDGASLTGPQDSQADAETQQTTLGTYAS

SEQ ID NO: 17859 - protein, 410 aa, unknown
  TnpB Polypeptide
VNGLAAFRYRLYPKPGQERLLKSRLSALCQLYNTLRDIKIEKWRRKHASLSEDDLRRIALDMRKRDEDLREIHSQVVQNVATRVSTAFRNYLEGRARFPKRKRERRYRSFTYPQSGFRAFGKVVERGSRTELKGRLYLSKVGHVRIFMHRPLNGRMKNLTIKYDAGGWYAVFICELPDQPKKPIESIPEDRIKGGDLGLERFLTLSEGSLPNYPRFLRRSEEKIKGLQRVLSRAVKGSKNFRRLSFRIARLHLHVSRQREDYQNQVIAALYMDSDVIVLEKLRVSNMLKNHCLAKSIQDAAFGGFYRRAIFKADMLGRWFVPVDPWGTSQLCHNCLEWVPKDLSERQHICPNCGVDLQRDKNSALLIKRLGLTWLGYAPGRGVKTPMEHGPLPSLKGMVSLSIEAGSHRF

SEQ ID NO: 17860 - protein, 420 aa, Caldivirga sp.
MRRASVVKLVVDKGSEENLKLLCSLSSKLWNEVSYARRRMFFEKKGVDLKATYKEYYEKYKALIGSATAQQILNKNNEAWNSFFKTLKLKKEGKLQPFIRKINPPGYRKKNNKRVLWTVLRKDQYRVEGDKIILKGLGVIGRIEVRYRGLIHLRGEQGRLEIHYDSDRGKWYAHISFEVGEKAVRGVWASVPRKPKGNLVAGIDIGINNLMAVYVENGLIKLVNGRPLKAMSHYWRMRIAEYQSTLSKHGLKTSRRLRSMYSKWRRQVKAYIDSRVRQAIEWLHSVGVSVIKVGYPKYIAQENGNFNNVHVWTYGYLLRRIHEVAEEYGITVVYIDEAHTSSKCPIHGEGCGKRIKRGLFKCTKLGKVFNADLVGAFNILITPSPTWDRGNGLKTQPGVEPSGRGDVTPNLPALAGTLTL

SEQ ID NO: 17861 - protein, 438 aa, Caldivirga sp.
MPGEGVYPVEYKNRRTNVVRLLPNGAQEGRLRRLADACARLWNELNYERRQQFFNHQRVDFKGTWDKYYEKYKKILGVNAQAVMQKSNEAWNSFFSLLNLKKKGKLPPHMGRVSPPGYWKDKEIGKRKLIIVIRQDRYVVDVERRIIILKDFNMEIRFVGRLKWFGKQGRLEIIYDETKDAWYAHIPVEVGVEETKTGKRSRHIVKGERRLIQITTPKGSKVASIDLGINNLASVVVDDGTWLLYKGVRAKEDYFYLQRLISRIQSLRDTLKDKLLDDAIDELNHEMRRLFGKLMRRLLHLYRNLASHLLKTLHELGVSTIYLGYPLNIAQERGNKFTVNMWSYSKLMEAIELKAQEYGIRVFEVVEYNTSKHCAYHGVEVKRQPRGVITCPKGHKLHSDLNGALNIMKRAIGKIPQTIKKPLSFIVGHNGVAPVKGV

SEQ ID NO: 17862 - protein, 455 aa, Firmicutes sp.
MPKLDLGLPSYDSLFSTEKERQESSAEKVMKIPIDKISDFKGHPFLKEVDSLALANVQLNQRKAFKEFFRSCKTKKHDRGFPKFKSAKTAKRSYTTNNQNGTIKVGDRYIRLPKIGKVKAVVHRRPNESWKLKSATVSQSSDGNFWCSILFEYEEEIVPVIWFGLLIAPYMDKGLLYALPNLNEAISHPFQIQWTNNTLKSIGLCLLTYGITVGIYLSSSKNYRRNEEYGSARWANPFRVCKKYADKNYLLNKVFSQNVRMGLNGKKHRRNLNTLVIGGSGAGKTRFYAKPNIMQCNTSFVVLDPKGEIIRSVGYLLEENGYEVKVIDLIDMSKSLGYNPFHYIQSDKDVLKLITNLIRNTTPKGSSTNDPFWEKSETALLEALMLYLYHYAPEDEQNFTMVMEMLNYAEVKEDEEDYESPLDELFKRLEMIDSNSLALKQYKIYKQAAGDICSK

SEQ ID NO: 17863 - protein, 264 aa, unknown
  TnpB Polypeptide
MPFIRGVERLRHLYITAIRFLADDLYRRGVRKLYIGYPYMLSQDNGNEYNTNIWWFRKIVLWIVDIFVEYGIEVEIVPEDYTSRECSICGIKHKNGRIYRGLYICRKTGKKINADVNAALNIARKLGHRIKIAKKIESYHVTHNGIKPLIPRWGLTPETQRFETLSFRVGRGSYILSPKIYTKSDRGSAEGSNAMSIQSQMGGEGLVCPKCGRRTELLIETYTTDGMRRVTYLHRCVCKWKKEIETLYISKRDGKIYVLKEKKT

SEQ ID NO: 17864 - protein, 381 aa, unknown
  TnpB Polypeptide
MTQRAYKYRFYPTPEQADLLVRTFGCVRFVYNSVLRWRTDAFHLRQQKIGYVQANARLSSLKKDPELAFLSEVSSVPLQQCLRHQQIALKNFFEGRTQYPAFKSKHHRQAAEFTRSAFKYRDGQLYLAKSKTPLNVRWSRALPGEPSTVTVSKDAAGRYFISCLCEFEPSKLPVTSNMTGIDLGLQDLFITDRGERVGNPRHTVKYAVRLARAQRRLSKKKLGSTNRAKARQKVAKLHAKISDCRQDNLHKLSRRLINENQVICVESLKVKNMIRNPSLSKAIADAGWGEFVRQLAYKAEWAGRSLVAIDQWLPSSKRCSGCGHTLSSLPLSVREWDCPECGKHHDRDQNAATNIKAAGLAVLALGENVSGMESVSVSCSR

SEQ ID NO: 17865 - protein, 421 aa, unknown
  TnpB Polypeptide
MKQLLAFKYRIYPTKDQEILLSKTFGCKRVIFNHYLEVQQTRYKNNEKNLSHFDINKDITKLKNEKEWLREVDSNALQYSAEDLTKAYDNFFKSVTGKRKGPKISPPKFKNKHSRQSYRTRNVRVNEDGSLQIPKLKAVKAVIHREIPKGSIIKSATISKNPDGRYYASILVETEVALRPMTGKEVGCDLGLKDLLITSSGIKFKRPDELSNIARTKQLLKLKQKQFARTKKSSKNHDTLRHQVARLYSKATRQRNEYYHLVSRYLVDNYDSIYVEDLSSKNMLQNRKLSRAIHEVAWSTLSGMISYKSSWAGRTYHRIDRWYPSSKTCSSCGHKLEKLDLGTREWTCPNCGVDHDRDLNAALNILQVGQSDCYGEAIKSHAIGDLGEIPAALQKMTSKIERSSTMLVGHGSGQATSFRAW

SEQ ID NO: 17866 - protein, 309 aa, Enterococcus sp.
MKELKGYRFRIYPDEIQKKFFVETFGCVRFTYNHLLMNKQEPGIDKMTPAQLKQAHPFLKEVDSLALANAQRNLERAFRNYHNGRAGYPKLKSKKNSWQSYTTNNQKGTIHLSEGYLKLPKLKERVALNQHREVKGEIKSATISAKNNQEFYVSLLCLEEIPPLKKTGEVVHLNFDEEHLVQLDRKLILPKFCQEKLEQKIEQAERRLSCRKKAARRKKIQLQSAQNYQKQKRIVEQLQQEKANQMKNHLEQVSFLLVNHFDKINIQSQSSNLEAPNAIPNFQLKDWKQFVSKLRYKTQWYQKELVKQK

SEQ ID NO: 17867 - protein, 388 aa, unknown
  TnpB Polypeptide
VKLVVRVKLLPTPEQAAALDATLRACNTAASDVAATARETGTYRNYDLRKHVYARIKDDYGLGAQAAQHVIKKVADAYTTMKANLKAGRYGKPGSKRRGNVETNPVRFRWNAAQPYDARMLSWQTDARTVSIWTTCGRLKGVAYTGSADQLKAVATSKVGESDLVHRDGMWFLYASIEVAEPELIDPAGFLGVDMGIANIAYDCDGTRYAGDRLNGYRRRQLRLRKRLQVKGSKSARRLLARRNKKEARHAANVNHRIAKTIVTEAVRTGRGIAVEQLTGIRERVRLRKPQRVTLHSWSFHQLGGFLAYKARRAGVPLVEVDPRYTSQTCHRCGHRDKRNRPDQETFHCRSCGVVAHADHNAALNIAQRGVEGWGAVNRPHAASPCIQ

SEQ ID NO: 17868 - protein, 412 aa, Candidate division WPS-2 bacterium
VASRFDGQLRWLHKVRLYPTCAQERALVTMLRVTRELYNALLQQRRDAWTTRRVSMPSREQYTQITELREVEPRFGGVYRECQDAVLHRLDLSFAAFFRRLKRGEEPGYPRFKPASRWNQLEFPHGDRALKFDDLQRGVRVPGVGSVRLRKGRMVPEFGRAFLVTKNGRWYAVFEAHRLPSPLPASGSSVGVDRGIRVLAALSDGTTIENLRPGSRRGAVVERHQRALDAVTVKDAIGRPLNTKDPGRIAAVRRLARAKEREANARHDWLHKVSRMIVQRFDRIALEALRLRSMTRSAKGTPEEPGVGVRAKAGLNRALLDAGFGKLATLIREKAAYAGRMVIEVDARYSSQTCAACGHVCKKSREGARFACVRCGHEADADVNAAQVILLRAESPPMSAPGIARGRQHDAA

SEQ ID NO: 17869 - protein, 413 aa, Thermoprotei sp.
MKPTRTVKVKCTVSKRNLAILKELLSMYKSMLEYTLNYALKNNIKSFTKLKAKVYRELRNTYPQLPSHYAYTVCQDVSTRIKSFLKLKRKGLTYTDKPEIKRITLWLDDHLWRLNEYMEVKIATHKGWITLGMRPHKLYWKYMNNPTWKLSGEAKLKMNSNGVELLLTFRKEEYKPYEPKAVIPVDINENNITFKVGNEVCMVKTNFKRIIVGYHNHRKRLQEKYQQRIPKLYKKLIRVLREKERKKNIRYQVANLIVKTARELKAIVVLEKLPKRTPNNMISRINSKILKHRIYQASFRGLLNVIIDKCMEYDVPYTLVNPRNTSSTCPICGSRLKPMTGYARRLICPNCNLSMGRDIIAVFNLEKKYLQMRGDMPFTPKLYEVGVKLMNPAQRVKPLPTIHSDTKLHKMKG

SEQ ID NO: 17870 - protein, 404 aa, unknown
  TnpB Polypeptide
MRIFRKEVKFVLTYQRYLKRDNPIFSEVIRMSKKANNLYNQAMWLMRHEKKVHRENLSYGDLDKITKQFPSSYNNYRLLPAQSAQQTLRQLDSNIKSYWAALKDYQKHPERYKAAPKKPRFRQKGGRSPVIFCNQQFRYDGKTIRIPYLNNFLIRFEIKNATPKQVMFLPYGEIFKILVSYETTEQSDYQGNGLIASIDPGLEILSAVAFSDMSQPVLFSGKKAKDYNVHFNEKMARVQSELKITTGRHHSKKTESLWRKRKGFFDNHMHQVSRKLVDLLAVKGVSTLIIGKNDQQKQKNKIKNFVQVPIFRLLKLIKEKAERIGIKVIVLHEPYTSGTSFLDNEAPSKANYNKARRVERGLFVSNEGRKIHADVNGAYQIMRRAVDVVWDGTTNIFNPQSITC

SEQ ID NO: 17871 - protein, 216 aa, Budvicia sp.
MKRRQAFKFQLRPNGQQEQDIRLFAGACRFVFNKSLALQHENYEAGNKFLSYVEMASWLITWKASSETQWLADAPSQPLQQSLKDLERAYKNFFQKRASLPRFKKRGQNDAFRYPQGVKLDQENSRISLPKLGWIRYRNSREVIGEVKNVTVSQSCGKWYVSIQTEYDVAEPVHCSSSMIGLDAGVAKLATLSDGTIFGSVNSFNTNQNKLAKLPA

SEQ ID NO: 17872 - protein, 474 aa, Bacillus sp.
MAKETKTRYIVELDLLLETLQFNTLEKRFEIARHISNACKRKMMDKIQLLRADEDYQYWLKQDKSEKRSERLKEIREKYDVSKTGAERIVKEMGKHFKQKKSKDKKHKQKVHLDSHIVQKIALQVWKSISDYLFGNGKKVHYKKYGQFDSIEGKNNESGLTYENGILFWNGLEIKIHIPIKDEYLQRAMHDEIAYCRLVRKTIRRKVKYYLQLVLKGIPPQKHKTVDGGVGIDMGISTVAAVSDKDVQIEEFCEGLDMLVKEKRLILRKMDRSRRATNPNKFNPDRTIKKRNTGKWIRSKRYWKLLFELKEICRKLAAVRRIMHNKSANQILKMGNVVYCEKMNYKGLQKTKFGKRIGYKAPSMFLSIIDRKLSYQGKKIDYVNTWTVKASQYCHISNVYTKKKLSQRFHVLPDGTKIQRDCYSAWLIKNVNKAKNKVNGEKCKENFDVFYDNYKKTEEHLRSLNKKFISSIGF

SEQ ID NO: 17873 - protein, 450 aa, Streptosporangium sp.
VRPAAATGEPPPAGRRGAGGRWERLPGGTGPRSSDLLERGDPGLQPRGGNAAQRRTEFSRTRVRPRPSCAMMCAMAQSVKRAFKYRFYPTPEQAEQLARTFGCARLVYNKALEERSRAYTREGRRVSYEESSAALTAWKRTEELGFLGEVSSVPLQQVLRHLQAAFTNFFAKRAKYPAFKSRKKSRASAEYTRSAFTWRDGRLSLAKLGGPLDIVWSRPLPEGVEPSTVTVSKDAAGRWFVSILCADTIRPLDPADGVVGIDAGISSLLTLSRPIAGVTDAAGKVANPCHERADRRRLARAQRALARKEKGSGNRVKARVRVARVHARIADRRRDHLHKVTTSIVRENQVVVIEDLTVRNLVRNHRLARAISDASWREVRIMLEYKAAWYGRELVVVDRWFPSSKLCSACGALQPSLPLDVREWVCACGAAHDRDVNAARNILAAGLAER

SEQ ID NO: 17874 - protein, 214 aa, unknown
  TnpB Polypeptide
MYVFPHQMIVLEFKAQGKTTQYAAIDEAIRTAQFVRNKCIRFWMDNRGVGQKPLYRHNTALRAEFPFVKALNSHACQVAVDRAYTSIPRFYSNCKKAVPGKKGYPKLKKNCRSIEYKTSGWKLSLNRKKIDFIDTKEIGKLKLKGTWDLNFYRLDQIKRVRLVRRTDGYYVQFLVNAQNKVALPPTNKTIGLDVGLKEFYSVYKNEKAHNSVKS

SEQ ID NO: 17875 - protein, 378 aa, Caldanaerobacter sp.
VRKEMLKAYKYRIYPTEEQKESFEKTFGCCRFVWNKMLEEKLEALKHGRKIPRITPARYKKEYPFLKEVDSLALANVQLQQEKAFRDYFKNPKYFRIPKFKKKKDKQSYTTNNQQPKNGRETIRVDFEKELLYLPKIKSGIKAVFHRRFEGKIKSATVVKTKAGRYYVSILVDVQDPKNDIKESKNFVCGIDLGLKSFVTIVNDTGTLKVEYPKYLIKAEKKLKRLQRQLSKKKKGSKNWEKARKRLAKEYEYVKNAREDFLHKLSKAIIDDNQVVVVESLNVKGLSKGNLAKYILDSSWSKFLGYLSYKAGWYGRTVVAVDRTFPSSKICSRCGYIYRELKLSERVWECPVCGTVHDRDENAAKNLRNYGVVYINNQ

SEQ ID NO: 17876 - protein, 396 aa, Microcoleus sp.
MLVFEFKAYGKSSQFTAVDEAIRTAQFVRNSCLRYWIDNKKVNKYDLNKYCAVLAASFPFADELNSQARQASAERAWSAISRFYDNCKKGTPGKKGYPKFQKDCRSVEYKSTGWKLADDRKSINFSDKKGIGKLKLKGTRDLHFYQINQIKRVRLVKRADGVYVQFCIDVDRKENTEPSGNTIGLDVGLKEYYTDSNGVTVENPRFLRKGEKVLKRCQRRVSRKTKGSKNRGKARQILGKQHLKISRQRKDHAIKLARCVVQSSDLIAYEDLRIKNMVQNHCLAKSINDASWYQFRIWLEYFGKVFERVTVAVNPQYTSQECSNCGEVVKKTLSTRTHVCKCGCTLERDFNAAKNILSRGLGTVGHTGTFALDASNALGESISTLAGEILSQQIDS

SEQ ID NO: 17877 - protein, 368 aa, unknown
  TnpB Polypeptide
MILSLKIRLKLTKEQEVLCRKSVGVARFVYNLMLSENTKIYKEYVLNGKTGVSPFISGYDFSKHITVLKKTEEYSWLSEVSAKVAEKSCIDCDNAFKRFFKGLSNYPKFKKKGFSNSFYVIYDSIKVTQRGFKCAKLGEIKTSEAIPKVDKYYNPHIIYDGKYWYITFGIDVPEKVNENNSGKILGVDLGIKTFATVSNGTVMPNINKSKRAKSIYKKIKYFQRKLARCKKGSKNRIKVVKKLKLLHRRLCNIRTNHIHQATSMLVKTKPIKIVIECLNVLGMLKNRNLSRAILEAGFYEFARQLEYKCKLYGIEFVKADRFFPSSKLCSKCGCKKDKLKLSQRTYYCEHCGNIMDRDLNAAINLSYL

SEQ ID NO: 17878 - protein, 432 aa, Halorubrum sp.
VADGDAALLHETISEFLWAANYVVDHAWRGEYKTTSKAQLQRETYDDVRAETRLQANLVQNARNKAADAVQSVVARWKQGDYAGKPRFSAPTLVYDMRCATFNDDHATLSTVEGRITARYVLPDEDRETPHSEYLFNDDYEVTGAELHYRDGEFYLHVRTKADAEFETADDGNDGHNTVLGVDLGIENVAVTSTGTFWNGAELNHWRREFEKRRGSLQQLGTRAAHETIQSVGRTETGRYDHFLHTVSKELVAEALEYDCDVIAFENLTGIRERMANAKKFHAWAFRRLFEYVEYKAEVVGISVEQVSPAYTSQRCSKCGTTLRENRETQARFCCQKCGYEVNADYNAAKNIGLKHLRSAQTSSGGGAPVNVRLNRVTLNVNGDYEPASDGQNRSPRESPTLNEVVRETRRVSRDDETAEPSRTTNGSAVSE

SEQ ID NO: 17879 - protein, 416 aa, unknown
  TnpB Polypeptide
MDIKRAYKYRFHPNPAQEVILARTFGCARFAYNYMLRLRTDALYQDQKRISYNDTSSELTKLKREPEYEWLSEVSSVPVQQSLRHLQSAFTNFFAKRAEYPKFHSKHGAQSASYVATAFSFNSEKRAITLAKMSEPLDIRWSRTIPKKAKVTTITISRDTAGRYFASLLCDDTVEALPPADKQIGIDMGLNHFLITSDGEKVDAPRFTRKYAKKLAKLQRMSSRKFETAKIKAGTPKGKAIPKGTRIERSQNFRKVQRKIARVHARITDSRRDFQHKLSTKLIRENQTISVETLAVKNMIKSAKGASEAPGRKVKQKSGLNKSILDASWSEFIRQLEYKALWYGRTLIGIDRWYPSSKRCSECGFTMNKMPLSVREWVCPECGVIHDRDINAARNILAAGLAVSALGESVSPGVTC

SEQ ID NO: 17880 - protein, 420 aa, unknown
  TnpB Polypeptide
MVLSYKYKLEPTNDQKLLLNNHFFIFNQAWNITISSHIKSRDEGLPYLDNTELDRMIKPILKDRNLSFNTKIVQRAIALANQAIQTNYKNQKNRKSKDSNSKFSDVSYRVSSEPKQVIETTKEQYSLLVKENIGDIGDGNLNVGNKIGILRLFREDFKYIKHRPIPENYEVKNVKISKDGDEYFIIFSCHAPISKPLEDRSRVGIDFNLHGLDIGNQGFHQVAKFSELKKVVKNYDVIKRLKRKQSRRVLKAIDKAKTDDKKVRDCLSKNFLKTQKRINKKYEKVRNYRSDYLHKFVNSLLDNLVDIGINHVVVENLDIKQMTSKENIVKLIGKARSKSMRKNILALAPGQLYNILEYKCTKRELYFQKVDPKNTSKTCSSCGAIKQALNLSDRVYNCDNCGTSIDRDYNACLNILKRAS

SEQ ID NO: 17881 - protein, 220 aa, unknown
  TnpB Polypeptide
MDQSSLNYTWYADDLAKLLKTEDYAFLKEVDCIALKQSLYHLDNDFQDFFRNPAIGFPKFKSKKANLKSCTTLWINGNVAIKDDVIRLAKVGLVKIELHCPIPSDKLKSVTISQSPSEEYYASILFEYENQAHQQTSQTSINLVHSMPELSKDPDGKEPKYPSYYYETEKKLKREKRKLSRMVKGSNNWNKQRINVDQIHEKMENQRKDFLYKQARTDSQ

SEQ ID NO: 17882 - protein, 390 aa, unknown
  TnpB Polypeptide
VEKAYKFRIHPNKTQEVLLRKTFGCVRKVHNHFLDRKEKAFETGEKGLGFSALSKELTQLKQKLPYLKEPDKDALQKAVKFLCESYDRFFKIQKTGPKYTEKKLKHLAEIGKEPTRFDMNGHPQFQSKKDNHKSYTTSCTNGNIKFLGNRIQLPKVGKVKIRDKMVPEGRILSATVSQEPSGKYYVSLCCTDIEVEELPKTGKQAGIDLGLKEFAITSDELKVENPKFLKKQLQKLKKLQRAMSRKSIGSNRWKKNKLKVARLHEHIRNMRQDFLQKLTTELVKVYDTICLETLKVKNMVKNHKLAQAISDVSWSEFVRMLSYKCQWYGKKLVQIDTFFASSQLCHCCGYKNEEVKDLSVREWTCPECGEIHDRDVNAAINILNEGLKTA

SEQ ID NO: 17883 - protein, 403 aa, unknown
  TnpB Polypeptide
MRSDRQVRLECSWLAAIPAMVLQSPNRIENTDWWSANKRRKTLKKKHRNPGMTPRFKKRRDDLYFVCWHNKGANANYRQLNRHHGEVVITGQNPGAYRLDGQPCRYSIHIRVRVSQPIRDYTSVGVNWTKRTLVFVNDPLPIQREASRSIVGLDRGCTHTLATSDGRFIDLPKHRLERIDREIRRRQKSQAHRINMSGKNVREYAKQPSRTYRKVQREISRLYAKAHRIIDDWQHKTTSMLVREYDVIVLEDLNLQGMSRKAKAKPDPDRPGAFLHNGQSAKRGLNRSLRAASLAGIVSKLEYKTQLTGRNRLILVNPAYTSQTCSKCGHCAKENRESQADFECGQCHARMNADLNATNNILERGLNHLLGLDEAGHAETEPDAQPAYRGKDASAMTCETSTR

SEQ ID NO: 17884 - protein, 430 aa, unknown
  TnpB Polypeptide
MPAGDRPLLDREVAFRFALDLTSEQEHLAWQLVGSRRFVYNRLLDGVHDRMTARVWEAELGAEPWTPWGWGKLDLIRQVRALRAAHPWLAAQPWDVAECAAVDLATALKNYSESRRGQRKGRPVGFPKRKSRKTLRQSFRLRHPGQLRIEGHAVTLPGLARTVLGLVKVYGPTRKLRRLIAGGRFRPVSVTVSYEHHRWWVAIAGEAAAFHPARRTHARRSDSGGQRPAKSAVPVGVDLGVRTLATAADADGVPVNVWEGVKSLRVAQRKLRRANKALARTKPGSQGRRRVVDKLRRVHARVYGLRSDLLHQVSAWLVDHHHTVVVEDLNVAGMLADRRLALGAADQAMATFRQLLTYKAAWYGTDLVTVDRFYPSSKTCSTPGCGHVHAALGRGETHWRCPACGIRHDRDHNAAVNLARWPARNQTKAA

SEQ ID NO: 17885 - protein, 384 aa, unknown
  TnpB Polypeptide
MNIVQRAYKYRFYPDTEQASILTRTFGCARYVYNWGLRTRTDAFYEHQQRIGYAGTCKLLTALKQEPDKLWLSECSNVVLQQSLSNLDTAFKNFFQGRAKYPTFKKRNGKQSVRYTTSGFRWKNGQIWLAKMETPLNIRWSRTFTGTPSSITVSKDTAGRYFVSFLVEESINPLPVNAKMVGIDLGLKEAAILSDGTKIPNPTFLRNAEPKLARAQRRLSRKQKGSKNRAKAKANVARIHAKIADQRRDWQHQLTTKMVHENQVISVESLKIKNMVKNPCLAKSISDVGWGEIVRQLDYKSRWYGRTFVQIDQWYPSSKRCSACGHILDTLSLDTREWHCPECAVHHDRDINAATNILSAGLAILAGADQLRLHEKTTAGHAER

SEQ ID NO: 17886 - protein, 513 aa, unknown
  TnpB Polypeptide
VPLRSSSASNKCAAAATISITSGIGPAGWRLCCPLPPRRSWPSASQLFPLLRPCQQSGMSRLSATTVRRPRRMVPGNPEEGCEGQAGVPVRPGPDAGPGACSAVACGGGSLRLELGTSAVQGPVRCRAQVVLRCGTAQGVDRSEEGRPSTFVVERQLKVLLPGGVPRPGPGAAGLHHSSSPGRASGRGANSGSRNSRRKAAAGIPSGSLAIACRAQAPQSPSRGSAPVRTQESTRKLARRLQVGTARILSATISRTAQRWFVSFTVEVERSVPAAHARPGSLIGIDLGVKTLLTGVDDQRSVVTVTGPKPLKASLRRLRRTSRARSRKRPGSMNRRKSAARLARIHARVANIRADALHKATSALTASYETIVCEDLNVAGMVQNRKLARALADQGFGIARRMLGYKTTWNGGRLVLADRFYPSSKTCSGCGAVKAKLPLSERTYRCDNCGLILDRDVNAAINLRDLAASGAESLNACGGCVRPGLAGRQPLNQEPGTAHAAKTGTAVGNRRLR

SEQ ID NO: 17887 - protein, 403 aa, unknown
  TnpB Polypeptide
MEICHLSKNLYNYVNYILRQNFFETKTIPGEYEIIASLTKENQADFRALPSNVSQHTVKLVFKAWKSFFKALKTYRKDKSKFTSNPKLPKYKSKNGLYICAFTYVCSRIKDNKIKFVKNILKPIKTKVSRLKQVRVIPNSSCFIVEIVYEKDVIETPKTSGSIASIDLGLNNFITCIDNLGNVPLIINGKGLKSYNQLFNKKKAKLQSLLPLNRHSSNKIRQLEFKRYKFISNFMHQATKMLVKILLDRKIETLIIGYNKEWKQNINLGKKVNQSFVQIPYTSFLQKILYKCEEYGINVILTEESYTSKIDHLANEPMEKRDSYLGKRIYRGLFKSSVGKILNADVNGALGIMRKVFPEKVLELIRDSGVVYTPIIINPIKINNYKFNSLNWVNKVHGYKKFK

SEQ ID NO: 17888 - protein, 375 aa, unknown
  TnpB Polypeptide
MLRAFKTEIKPTREQVIKIEKSIGVCRFLYNEYIRENIKSYEKDKKFITGNEFSKYVNNELSKSLPWIKECGSKARKQAITRGELAFRKFFSKKSGFPNFKKKRDNNMSLYFPKNSKTDWEVERHRIKIPTLKWVRLKEKGYIPTKLSVISGTITKQADRYYVSVIMDIEYTIKQNNNKGIGIDLGIKEFAVCSDNKVYPNINKTKQVKRLEKRLKRQQKRLSRKLIKHKKGESTRNIDKQQLKVQKLHQRLSNKRVDYINKVISSIIKREPSFITIEDLNVAGMIKNRHLSKAISKQGFYMFRQRLLSKCQINNIELRIANRFLPSSKTCCKCGLINKGFTLKDRVFTCECGNNIDRDLNASINLRNTLDYKLA

SEQ ID NO: 17889 - protein, 387 aa, unknown
  TnpB Polypeptide
MIVTEKTIYKHKDKEFKELDNLCFLSKNLYNATLYTIRQHYFQNKSYLNYNEVNKQFTKENNIDYRMLPAKVSKHTQMLVDKAFKSFFTLRKNGNNKAKIPKYLSKDGRQTVVYEKGAINHKNSALKLSKTNIEIKTKIPYEQIKQIRIVPKNKFRIDIEVLHEVEPKVNTNKTKYASIDLGVNNLIALFIDEDNPYLLNGRPLKSINQYYNKEISSLKSKLKKGVYTSNKIIKLHNRRNNKVQDFIHKASRKLMNQLVLSKVTHLVIGYNKEIKQDISLGKKNNQNFVSIPFLTLINMIKYKAELLGIEVILQEESYTSKASALDLDKIPTFPEKADKFSGTRIKRGLYKTRNGLLINADINGAINILRKYKPDYTPNFRWSIKKL

SEQ ID NO: 17890 - protein, 459 aa, unknown
  TnpB Polypeptide
VKIVRTAKLKLHCSPEQVARLRDVSAAYREAQNLCSGWAFTNNKTSSNHAIHRACYAEIRQRYGLSSQLACTAERSVATAYKTLWTTTKKAASRRKAALDRRAAGGTGRLPKLYKGLESPPVFKALTLEYQYGRDWSLKKDRRVSLMTLAGREIISFDGWNRHIEDLGNEKTEIGSAKLWYQKAKKQWYLLVAYTVERPGFKAADFKQVVGVDVGQRYHAVTKVINSDDAPPAIMYGSQAHRRKADQYQYLRTKLQAKGTRAAKRRLVSVSARERRFTAQRNHVLARHIVDSHPQSLIGMEELAHIRERTERRSFPKASVKQRGANRVRSTWSYAQLRSLVTYKAPLVGSLVIAVDPMYTSQTCPQCAHVSRENRVNGGEVFHCVSCHFEGHADVVGATNVGMRAWRMKEEGKIPGCLSATPNRSDSVEDVSSVEAEGRGNLTVEVEDRCKPVTSVMGG

SEQ ID NO: 17891 - protein, 228 aa, Vulcanisaeta sp.
VGISIKRGGWVRISLILPRIFWKYYNQGWAIASEARFKLLRGNIVELYIIFRRDEPKPYEPRGYVPVDLNENHVSVLVDGKPILLETNARKITLGYEYRRRAITTGRSTKERDVRRKLRRLREYNRKVDIRRKLANLIVKAALESRSAIVLEDLPKNAPEKMIKGIRDPQLRLRIYRSAFSSMKKAIIEKAREYGVPVILVNPARTSSICPIHNCRITYPPNVALPKV

SEQ ID NO: 17892 - protein, 537 aa, unknown
  TnpB Polypeptide
MLIQDSTYSKRFQSNSLTAQKYGELYDIALKIRNLKNEISQYICEHIEDYVDMNKFTFVTEMRSKYNAVPSSFDKQVYEDVIVAYANKFDTIKRNLTFESIRYVCCEVYKRDTKNRKNGDFKKTKLERKETRLSITLTYLARYGNENTVEWLKSQLPNDNESKRKFHQTILDVIEKFGFERLYRLALSKREQTFSRYASKPIEFKSLTFRGRSRKQQIVAYNKTYGSVINAFVSLSGFERKSFDVPVKFNKDYHGSMHDYEKESNDYEYTVTFNERKKQVSVILTKKDDRYIPDAGDNFVGVDVNVKHNMLTLSDGTTYDYDRELVKAFSEISKRVDELKANDKDYKIGKRRQWKFDVIRHKIREAEKLEIAKMCKELHDQGITHIVMEDLNGKFGKSYIKDKCNGDLNFNRIVGALRISTLKDEVEHIARKYGIAVSTVHASYTSKMCPVCGCIEDENRPTQEEFSCIECGHEDNADVNAAINIKNRVSEAVLRNRLLKQLDNGAFEPKKLKREKVKEVLESYRTNLMKGRESKFS

SEQ ID NO: 17893 - protein, 421 aa, unknown
  TnpB Polypeptide
VTRTYKYRIYPNDEQAQQLARFFGCVRKMYNLCLDWWTEAYKLWKDNGTPFGKTPDYGVFAAMEEYFYLAECDKVALQQARRHFEKAIKDYLKSKKGQRDGRRLGFPQHKKRRKCRDAYTTYNNSDCIRVIDDRYITLPKLGAVRIKLHRSFEGHVKSVCVSRTGSGQHYVSLTVDAPEEQPIVNRVANAANPKVVGLDMSLQSLVVSSEPSDDAIPKRVRLYRKGEKRLARLQRSVSRKVFKSKNRDKARKRLAREHERIAAKRRENTIQTALHYVRKYDVVVIEDLDMQSMSRSLRLGKSVHDIAFGEFRQWLECEAKRYDCYVCVADKWFASSKTCHECGHKNESLALSDRVWTCPSCGAELDRDSNAAINLRKWFEEMYNTAGTAGIHACGDFASTLRDCVGRALSMKQDARDFSRG

SEQ ID NO: 17894 - protein, 386 aa, unknown
  TnpB Polypeptide
MLKGIKLRLYPNRTQQAQLWQMFGNDRKVWNLMLDMAKKRYQNNPSSQFVGEYDMNYLLKLLKQEHPYLKASDATSLQVVNHDLAQAFKMLFKHKGGYPHFKSRHAYKQSYTGKQTSCCKVIAKQRMKLPKLGCIRTSKTTQAVNCKIKRYTVSYDSTGRYYLSLIVETDVPKALPKTGKAVGIDVGIANLAISSDGIKYGTFNAKWLEKQATKWQSKFDRQRHQASVVVCQWNHRHKIVKIGVDDYQNWQKAKKQKAHYQQRIANKRKDYLHKLTTQLVKKYDVIAIEDLKVKNLQKNHHLAKSIANASWRMFRQMLEYKCAWYGKRLIAVNPKYTSQICSMCGYPSGKKPLEIREWTCPQCGTHHDRDINAAVNILHRGLKAIG

SEQ ID NO: 17895 - protein, 417 aa, unknown
  TnpB Polypeptide
VKHLSLKVRIYPTQEQAVLINKTLGCCRQVYNTMLASRLDFYDENIKDKELTKQEKAALYKSYKAPTEKELKQRYEYMKEVSSVALQQSRRDQEGAFQRFFKGLAKFPRFHSKKQKNSYREININNNCKFFWNARRITLPKIGEVRFRNRELPKWLNVDDKVRNITVSRNPSGQYYASILFEVEEQPKSKSENQAIGLDFSPADLYVSSCGMTCRDFGYIPQKQAHLKQLRKLERRLERKRKGSKNREKARIKVARLEQHIASSRKDWIEKETLRLVRSFNVIGIEDLTTKGLLRASRNARNYVDTSWGTFTARLIDKSNRFECSVVKSDRFFPSSKLCHTCGYKKTDLTLSTRHWVCPVCHTEHNRDVNAAINLKLNAIKILSEGQEFRSAEGVEGMAELALVHFGASVETERRVS

SEQ ID NO: 17896 - protein, 401 aa, unknown
  TnpB Polypeptide
MLVLEYKLVAKKQQEQRITEAIRTVQFIRNKALRLWMDTGARQYDLNKYCAVLAKEYPFANALNSQARQAAAERAAYGIGRYLKADKSGKRLKQISKKPQFRKDNRSVEYKATGWKLSQDRKRITFTDGIGIGEVKLFGTRDLCTYDLALIKRVRIVRKADMFFVQFCLDVDRSEPTELTGKMLGLDMGLSSFYTDSDGQKVDCPKFLRKAEKRLKREQRRLSRKKKGSNNHRSKNYDKARVRVSRRHLKVQRQRKDFAVKLARCVVMSSDIVALEDLQVRNLVRNRHLAKSIHDAAWSQFGNWLQYYGKVFGKPVMKVPPAYTSQDCSACGNRVKKSLSERTHVCSNPSCGCILDRDENAAKNILRLGLASLEETYRWAIGNVEPSGSETLAEMAPLLSA

SEQ ID NO: 17897 - protein, 160 aa, Oscillatoriales sp.
HQRIADTRKDWHFKLAHKLCDSAGMIFVEDIDFRVWAKGMFCKHTLDAGFGQFISILQWVCWKRGVYFDKVNSYYTSQICPQCDTHTGKKDLSDRIHICHNCGYTTHRDVAAAQVIRNRGIVQLSEGGRLLDVKKNACGDGLAGTGNRLVKNRGSRKKKA

SEQ ID NO: 17898 - protein, 336 aa, Microcystis sp.
MPPYRTITSNEEPDNCQNKVKGKKGYPKFKKHSRSVEYKVSGWKLSANKRHITFTDKKGIGTLKLIGSRDINYYQPDQIKRVRILNRADGYYVQFCLKLDPRDRVKPLTPSQKATGIDVGLKFFLVDSEGHQIDCPNYYRKAEKQLNRLNRKKSKKYRKGKKQSRNYHKARKRYARKHLRLSRQREEFVKSVALRLVKSNDLIVYENLNIKGMVKNRHLAKSITDAGWSVFRQWLEYFGDKYGKLTIAVSPHNTSQNCSNCGQKVEKSLSTRTHVCPHCGYTDCRDRNAALNILQKGLSSVGRTQTLNASGEIPSWLVGEILLANGDSMNEESPSL

SEQ ID NO: 17899 - protein, 339 aa, Trichococcus sp.
MRTVKIKLKPIKSQAAELKRLSLVYIQQANVLVQQAISEERFPKVTSKDIEADIPSVLKNELIRYAKCKHKQFGKCVFKKPMLSYNNQNFSVDEKAIRFPLMMDGKTKKTAIKAVIPEELFRVLSRSKLGALRITKKGFHWMAQISVYTEAEEFVGDGILGVDLGILCPAVGVVASSGKTQFFGNGRQNKCLRRKYKELRRQLGKKKKLNAIKNINDKEARIMRDINHKLSRQIVTYAMENNCGTIHLEKLSGIRRTSRLRGKNKANLHSWTFYELSSFIEYKARELGIQAVYIDPGYTSQTCPTCGERNKVEDRNYNCGCGYHSHRDRVGALNIARTI

SEQ ID NO: 17900 - protein, 381 aa, Trichococcus sp.
MLRYKAYQFRLYPNQEQTILIAKTIGCSRFVFNHFLDLWNTTYAETGKGLSYNACSAMLPKMKREEETGWLKEVDSIALQSSLQHLADSFTRFFRKQNDKPNFKSKNNPVQSYTTKNVNNSIEVKDKHIKLPKLGLVTFAKSRQPKGRILSATLRKNASGKYFVSLLCEEEIYEWPKAESIIGIDLGITDFAIFSDGQKKDNDAFTSQMEKKLKREQRKLSRRALVAKKDGKELFQAKNYQKQKRKVARLHEKVANQRTNFLNKLSTELIKNHDLICIEDLNTKGLLRNHKLAKSISDVSWSSFVSKLQYKADWYGRDIIKVDRWFPSSKLCSTEGCGYKAPSMPLTVRDWVCPICHVHHDRDINASRNILTEGLRLHAMK

SEQ ID NO: 17901 - protein, 363 aa, unknown
  TnpB Polypeptide
MITVKLKLHTPTKRKEQILTKNQREFTRCAQWWLNRIQECKSTSRSKLHTQYYKQASQDFSLLSANIQAAMNKAIETARAFYAKKGKKSFPVFRHPFACFRQDTFSIRDLCVVLRFLGRVKIALPFKVCSPNHIQYLQQPPKRAQLIERKGKWFLNVSYETESPKTSRQNMIGVDLGVKKLATVSNPEKSVNVFFSGNKAIYTRNKYHKYRQQIQQAKDSGQAKCGYRALKRISDKETRWMKDTNHKISKEIVQLAKEIDANIAVENLKGIRERIKATKRVKRMLHSWSFRQLMEFIEYKSAMAGVQVVPVDPRYTSQKCSVCGHISKSNRKSQARFHCKSCGFQINADLNAARNIALSALNL

SEQ ID NO: 17902 - protein, 383 aa, Methylocaldum sp.
MKVKRAYKYRFYPDEEQAELLAKTFGCVRFVYNYILRYRTDAYYQAKEKVSYIGANAKLTEIKQKPEFAFLNEVSSVPLQQCLRNQQAAFKNFFEGRAKYPVFKSKKHKQSATFVQTAFNYKNGQLTLAKCKNPLNIKWSRPLPSDPTTVTVSKDKAGRYFVSCLCEFEPTLLPVNDKKVGIDVGIKDLFVTSDGFKSGNPRYTAKYAAKLAKYQRRLAKKKLGSKNRQKAKLKVARIHAKISDCRLDNLHKLSHKLVNENQVICVESLAVKNMIKNPKLAKHIADASWGEFTRQLEYKANWAGRVYVEIDRFFPSSKRCHCCGFVSESMPLDVRSWTCPECETEHDRDVNAACNIKAAGLAVLAFGDCVSGDSISVLSSCGL

SEQ ID NO: 17903 - protein, 421 aa, unknown
  TnpB Polypeptide
VKNVQLVEQHCINRDDPRYSVIDAAAFKSKNLYNAALYEMRQAFIRSGIHLSYQEMDKRLQPHEAYKALPAKVAQHVLKQVTDAWKAFREAKASYEEDPSRFTGRPKLPKYKHKTEGRNILIYTLQALQGGQSKKGIQGSIKPSGLPIEIKTQQKQINQVRIIPRNGYYVVEIVYTEAPVQAQVDPSFCVAIDLGVTNLAAITSNRVGFVPRLVNGRKLKSINQWYNKRMKELKLCLPKEDRERVTKQMERITNHRNRQINHYLHAASRAIIDFLVKEGVGTIIVGKNPFWKQEADMGRRNNQNFVQIPHACFIDMLTYKAELVGVKVEVQEESYTSKASFLDLDPIPTYKPHDETVHTFSGERFGRRNRLYRAKDGKIICADVNGSYNILRKSKPDAFALVDAKGIAAYVVQPARLAITV

SEQ ID NO: 17904 - protein, 419 aa, unknown
  TnpB Polypeptide
LGIVGDNPMRGSIRLVDGRIPEGAYHRALKAEAEVIEGSVNDLLWDLLLYRYAMQRVVDALWDLDKVPNRSQSHRMFYNVLRSYGFRAHVARNIYDLALALVKAVKENNGSKPTLRKLSARLDYQDARVELDRGIVRAIIRDKWHALKLKHRREYIERFKGLRWKEVHIKYENGRLLVSIVFEFRYEPYAPRGIVALDINLRTVTACDGSEIRRYRTRFIDALSKRKRGEELMKKYPKRWRYNEKILEKVKSLHRRAKNIIVDWSWKFAKQIILKALRHGYAVALEDLEGLRENVNSKSNEVAWKFTMFAYRRLQHSIISKALEYGVPIIIVDPRSTSSTCPRCGEKLVYIHRLAVCRRCGFKAYRDSVGAMNIWFRALQAYAGVPGSPLSAPAVKGEARRSRGTSYEGMKKVIRAIHN

SEQ ID NO: 17905 - protein, 412 aa, unknown
  TnpB Polypeptide
MKNWGLKRGGFRVWRIRVDRENIKKLRKLYIDIMLTIQGIQNNNMRKSLLLYKEAMIKMLENLANSKKRARLKLPPIILAVRFILPNKKRYGDNGAPCIIDLREGRGELRIPSYNIAVPLRKSIVKALIEENSLDRPTFVIQTSRGFVRIIASRAVYAELAIPIRIITIDENSVYGFTVAVWDVSANGTVVLSYFEKLRPPNHGFRRQLASLLQSYAAKPTEETKKQLSEFLPEKILKSLTTEGARELAKKARKKERRLNDEFIHKLTAKMRKLVREAKERGMTVLMLIEPIDPDSLKRTKLQGTLLRTRRFLRNLATYEGATLRLVRASGKLCPRCGSKGTEVIHTKRSRVYQCNKCGLKWERDKAVHLNMLINFFKSLNKEESDDYSTMAQRILSELEKWLDRYQNLLIY

SEQ ID NO: 17906 - protein, 425 aa, unknown
  TnpB Polypeptide
MTNITLVSESKLYLKDNTPLYDYFDGYSRLFNFLVRRCIHHLRHQLKGESESRYRTNLMREFNITNRMAKAVIRTAKKQLKLLTASARYQYNNLYKRRRSLFKKITKLKANLSSSSASLKQKKLAKLRLFWTQMKLNKTNQRISNGSKPHLTFGTKYLLKTNKQKFLAKRDNQVIYIGDKYETCGNQQFQICFNSKYNRFEYKLRLDNQWVSGSDKYIYGSFVLKNKEAKVHILKILSEKKSNPLTYRIIKRDDHLYLQIMYRKETTNTTRSNYGVLGIDFNKGFISVSEIDSAGKLTSLTRYHYLHHGKATKTKTSMLDLVSKLVSQAIHVGKDIVIEDLVSLDSNKKQDKTKSKNYNRMINSLKFGLFKRCLLSKAAKEGVAVHTVNPYNTSKIAKASYTDRMKLNVHDAASYVIARRFYQYD

SEQ ID NO: 17907 - protein, 431 aa, unknown
  TnpB Polypeptide
MTDKKPKKKRVFKDRSNLLSLTERHIISETERHIISETHPFFQECDALCFLSKNLYNATLYAQRQSFFREDFENYYRVNARFTKENQFDYRNLPAKVSKQVQMLVDASFKSFFALVEKKEKGEYDAQVRLPKYLKKDGRQVINYEKGALSIKDQGEFRNIKLSKTNIIVKSAIQKGQITNVRIVPNGNHYVIEVVYDVLKPSIIPSISRVAFADPGMNNLLTVTSNVFNPVLYNGRQAKAVNQLYNKEIANALSKLPEEQTWSKRASSITHKRNMRIHDMFHKITTDLVNYLVENDIDTFIMGHNVGQKQNINLGKKTNQNFVSIPFGKLRSMLTYKCARVGIHYVETEEAHTSKCSFTDRESIEHHETYLGRRAKRGLFVDASCKEINADVNGSLNIGRKHMESMGIYTDELHDDLLRYRHNPKVKTVRV

SEQ ID NO: 17908 - protein, 791 aa, unknown
  TnpB Polypeptide
MEENETEHRSPYVTRGYKHRINQFFRLDDATRIREATEYVHAVMGNATLLIKYRLIKFATDPNRDRDGPPMMLNEADVLNAVRAVQYLPPATKTKDGKKRALEAPVGTRARVRKVHRSDTAVDVPSTSTPEETTAEDKVAMEERIASQRDERQDRNDAWLSDYREMTADCLEPVLLGRRGWNLSVSHVFGNAAKQYVAAVVANVRYHFRSYVCRSLGIVLRSKICALEGVKRFKDLSSRSSRHWRAEMGKAYDDVLFHRTGQNMKTVPEMRVVVERHRSHLVPPLPPRKRCIDDDLDSSTRPFVYLGYMIRMTAFVEASGGTKGLFSPIPLKTSHIPAHYTFDTSSIAHLLMDGKRIDGFKRFFEHSVSGGYPLPGLKDKSSLLASLERQRGADKGGVTAVDEELYLDAIWTYLAYFKNRRTKVTNPLYPCGKNRKENGGLSFGHSISTDGYSVTLLATNQVTRGRKHVYQSGASSRKRVPEPTVRPGRDKDGFLKLSAFGGTDYVKEELQKTGFTDPNNALGGDPGKGVLLLLQDGKGNTLRYTCAQRRHETCQSNHADKVKMCTRRVHFYDVLLPSRRSGEGQQKWKNMNTKKLEGEQRVRRLSMKTCDQRRMRTYVAYREACRPTLEATYTANTFRALRFLAWCRRDESIQMFVEEIKKKYGTRPSHKPGTSDDNVVQSPPIVIFYGDWGRRPNLKNQAPSPGIGLRRLLEASEGIVTVTVHEAYTSSYCPNCEGPVSEGRGKHGLLKCDHTAVCGTYWSRDVLGALNIRTKGLHLWNHAKKHPLFGG

SEQ ID NO: 17909 - protein, 398 aa, unknown
  TnpB Polypeptide
MLIAHRIALDPNDVQATYLARAAGTARFAYNWALAEWKKQYEAWKADNHQPKPSQAALRRQLNAIKREQFPWMLEVTKNAPQMAIIQLGQAFQNFFAGRARYPQFRKKGVHDRFTITNDQFSLDASRIRIPNLGWVRMRETLRFAGKIMSATVSRVADKWFVSIVVDTPDDSHLPQAENQGAVGVDLGVSALATLSTGETITGPKPHKALLARLQRLSRSLSRKVKGSANRKKAKGKLARLHARIASIRGDALHKLSTDLTRRFHTIGIEDLNVSGMVKNRHLARSIADMGFFEFRRQLEYKAAMRGGQVQVADRFFASSKTCSGCAHKLESLPLAVREWTCPACGANHDRDVNAAINLKNMAVSSTVAACGEEGAGRARKSAVKPASVKQEVSFVPV

SEQ ID NO: 17910 - protein, 442 aa, unknown
  TnpB Polypeptide
MRTIEFKLDLNQSQQAKVDDWLNVQRWVWNRGLHLLEEFDSFTSWDKLSKSWVPCCPIPWEYYKLQAKTEWREGSEEEESLPLPPLLLLLLFPPILLQLQLYSPHNSAVLVPFTRLAQIKPYRMSCPIPQAYRQPELESPTHFGLLYYFAQKNHEDKPWFCSVPSKFVAGRLQALSDAWSEYKAGQRKRPRYKRYRHKITTLINNNSKKIKVSGKKITLPNLGKVTVKSLDKRWDASVPIATLKIVKEPSGYYLQLTGELPTKTVKPSNKAVSLSLGYRELFTTDGGKAVSPPANYRKMEKRLARLQRKLSRQQKLCPITTYNADLREHFLSCPLNPDKGANKTKNQQKISRLHEKIRRTRRAFNHKISTKLVQEYGGIATTKSELRKITRRPKPIVNKEGTGYDPNGALNKSQFNKLILASGLGQQEAGGRGKGAGRKPRT

SEQ ID NO: 17911 - protein, 400 aa, unknown
  TnpB Polypeptide
MQKAYKYRMYPTKSQQTLLRQYFGCVRFVYNHCLALRSDLYRHNGQSVNNVPLDKHINYLKKTDDYDWLKLPPSCVLQQALRDQDKAFTNFFQGRAKYPRFKKRSHKQTLRVTLDQRQISRLYKAGELLKVPKLGELKLRWSRLPVGVPKMATISQTPDGRYWVSFSCEEPQAKAKTKHGMVGIDVGIKDVAVTSNGFYSGAPRHTYQYARRLKLEQRKLSRKVKGSNRWHKQRKTVAKIHAKIGFSRQDFLHKLTCRLIAENHTVCIEDLNISGMVKNRKLSKAVSDVGMFELRRQLEYKADWYSSLVVPIDRWYPSTKTCSGCGQIHDMPLSKREMSCDCGLVIERDLNAAKNILAQGIASLQHVDGDTSRLPSVPASRHRMKRGPEICSGATHDAAA

SEQ ID NO: 17912 - protein, 405 aa, unknown
  TnpB Polypeptide
MILTYKYRIYPSSKQIEKIGHNFAVCKEVYNKLLDLNINNYKDQKKSLNKYNFNNYLSGNHKQVYSQVIQNVSDRVSKSFQNFYRRVKDKTCKKKGFPRFKQRVKSITYPQSGFKLNEKLYCSKIGNIPIKLHRDLKGKVKTLTIKQNKANQYFACFSVEINNKKIKYKSNKEIGIDLGLNSFIALSNGNKVNNPKYLRNSELRLKKLQRRLSRKKKGSKNRKKFILRVAKLHNKIQNQRIDFLHKLSYNLTKSYSLIAIENLNINGMVKNRHLSKSISDASWNTFIQMLSYKAVTCGGQLMKVNPGNTTKECSNCKNRIEMPLSKRTFSCDKCGLNLDRDVNAALNIYSRAGQARTHTPVDRPASIRTFLKKKTSLKKESIGKEISKLEETGTICIRNNLNDST

SEQ ID NO: 17913 - protein, 418 aa, Nostocaceae sp.
MQLVERRVIKSNHSAYSKIDEMCFASKSLYNSAIFNVRQAFFFGGKRQVPAYESLYHLMKDSEEYKALPAKLSQQVFKLVAQNWTAFFAALKEFYLDPSKFKKKPKPPGYLNKDGRFCLVFTEQATSKKQLGKSLIKLSSIDYCFETSVILGNVNKYCQSRIVPKLDHYVLEIIYEVANTEIKPGDSIAAIDFGVNNLMAITSNVPGFQPVLINGRPLKSTNQFYNSKRATIQSRSRLKTNMRLKKFTTSRNHIVKDYLHRASTFVINLLAEVGINKLVLGKNKGWKDSINIGRKNNQNFVQIPHAQLIDILTYKGAVKGIDVVIQEESYTSKSSFLNKDFIPTYNEKPQGWKPSGKRVKRGLYVTNNGIALNADVNGSYNILVKAFPKAFGIGDREVLVTPRKVNLEGHAPKVVSPF

SEQ ID NO: 17914 - protein, 480 aa, unknown
  TnpB Polypeptide
MAKKKSIRVDFVKSCITYNKLNKIAISGIENICKQLRLDSVYNVINGRFTIPSRRPSGKKSSSKRVAKCDTVFVAYRFCGHPTEEQASDLNQNIGASRFMWNRMLSDYKLMWKMYGISIPMTPADYKDVSGLEWLNDRDSLALANVQLNLEKARSDYFAGERGAPKRKKKHQCKDSYTTNRVGKNIRIEDGGLRLPKINGLIELSMHRPIKPDGTLKSVTVTHEPDGKWYFSILIEYPAEEVELSDGLQKFFASGDTNMISGIGLDMSVPFLYIDSSGNKPSYELNGREIKFVKQYRKLEKRIAKEQRRCSHMVKDSNNYNKQSEKIARLHAKAKHRREDFLHQIAVRLVRTYDVIAIEDLDITAMKKALSLGKSVSDIGWGRFTAILEELCLKYGKILVRASRWYPSSKTCHHCGYKNDDLQLSDRIYVCPVCGNVMPRDKNAAINILEEGLRILKENIFRPSIEGYSKPALITMIPRA

SEQ ID NO: 17915 - protein, 534 aa, unknown
  TnpB Polypeptide
MAYHAYQAKSPMNQGKVEALRALLPVWRDGLTLAMSCWTRPFVQSGVLPRWIDSKGFPDMLSQRQWDSVDRQARAALDSWIALREDEFRKTVNGSTLSPDLKHALHRINLRHAWWESVADDAHKMARRIIKHLRERVPFPDMRRCRTMSMDGKIARVGTPVNAFHFQYWAVVSTLDKGHPVRIPLTVDPRMNENTLHGDEQAANHLQARINRDGSIDLHLMTVKAKARKRSSGMVIGMDWGLKSLFATSQGQLHGLKLYTWLQQRDKELTALTRALAKSGIRYRQSRRYRNLNKRIRDYTRNEVNRILNLLSRQEIREIVVEELDFRNGGLSKKMNRIISRAGRNAVKAKLKDLEDNKGITVTKVNPAYTSQECPSCGYVNPRNRPTQEHFRCTCCGYRSQADINASHNILARRSREDGCVGSAADRSSPCSYGNTTNDSTPPVDTPRRVRLPHGSYPRHRGSRLPAVENTTRNHTLFNPRSKSYNFLVRRTSGIPNQGGKNVTYQAFEDGSGSNDSAGAPVDGSPGGICSRNH

SEQ ID NO: 17916 - protein, 297 aa, unknown
  TnpB Polypeptide
MGYRTAETNITVQLVHLRLNAAQMAHCQALRREAGRCWTALVQAHLASRAGLWLDEGALKTQFKGQFALHSQTVQALAEKLIANVETARELRKTDPDRLRNKRHTALNIRLKRCVPNSRRHKKLLRSKARASAKFYRQGRDVLHKASRQLVTFAVAEQVAHLAVGDVRDIADGTDKGRQQNQRLSQWAHGQFVGYIKIKARQCGISVEYIPEDYSTRTCSVCRYCHRAAPRGRVFTCSGCGAIVSRDGNGAANICSRYRYGEYGQVQVQALTYLRATAVVPRTRAKVAGLPPEATPR

SEQ ID NO: 17917 - protein, 293 aa, Synechococcales sp.
LPSDPSSVTVIRDASGRYFASFVVEVEPTPLPANGKAVGIDLGLASLAVTSAGEKIAPPKFLRSALKRLRRLQRNLKHKQKGSNRLAAARRQVAKLHATIADKRLDFLHQLSTRIIRENQTVVLEDLNVSGMLKNKQLARSIADAGWRQFRILLESKAVQYDRQVLVINRWLPTSQVCSTCGHHDGKKELSIREWQCPSCGAIHDRDVNAALNILAAGLAESHNGRGAGISPPLRWRQAVKRQPTRSLRHSHAQRRRNLRPSGRGGSQARPGAAQADRRRQADNGAAGPDVYR

SEQ ID NO: 17918 - protein, 301 aa, unknown
  TnpB Polypeptide
VYAETWEELSEIKNPQKRFNEAEHLVHETKKNHARFPFDRHFPKMPSYLRRAAIQHALGAVSSYQSRLSLWEKGELRGKPKLVCENHAMPVFYRDVMYREAEPGEDTAYLKLFDGREWKWFQVKLLHTDMEYLRKKWSGKEASAPTLERKHHKYFLRFSYTEEVTLSKTAVKEQVICSVDLGINTDAVCSIMRADGTILGRKFINFSSDKDHLYHVLGRIRRFQREHSSRQVQSRWGYAKRLNMELSRKIATEITKYAVEYQARRYALEGILGTVQLFLQSEKHLENLTTLCKNSPILSRW

SEQ ID NO: 17919 - protein, 380 aa, unknown
  TnpB Polypeptide
MIKSYKVRLEPTKEQMELMFRTAGCTRFVYNWCLAFQKERREQGEKFVSAMGMSKHLTALKKQDEYSWLKEVDSIALVGAYTDACTSFKNFFRGCKKGQKIGYPKFKSKKHSTPSFMPNYQAIRFNENQVKLPKIGIVKLSRKNYVPIVKKYSNPRVTFDGLNWYISVGVEEEDYVSLELNGTIGIDLGLKDTAILSTGKKYKNINKTAHVKRIEKRLKKLQRQVSRKYESNRQGKIYNKTNNIEKINKKINKLHKRLANIRNNYNHNITADIVNMNPAKIVIEDLNIKGMMKNKHLSDAIGKQGLYEITRQLDYKCKYKGIELVKADRWYPSSKTCSNCGHINKDLKLSDRTYICPECGTVIDRDLNAAINLANYKTEQ

SEQ ID NO: 17920 - protein, 406 aa, unknown
  TnpB Polypeptide
MATVLKGVKLRLYPNKEQEIALRQMCGNDRFLWNKLNDMLKSRYKNNKHLYNGDKSKEAKKKRRHVMLSAYDMDSLLPLMKQEYPFLEYSDSSALQVVTSNLSKAYSNFFKDSKQFGLPKFKKRGVCKLSYTGKSSGIAVLKKRYLKLPKIGCIKTSKTGCLKDVKIKRYTIEQDSTNRWYISFQVETVVNEFEKTNKTVGLDLGLTDMVIGSDGFKSGRFLVTELENEIKSKQKVYSKRRHYAKVKIAMDKNMKVINPRTLLDFINVEKARVTKAKSQKRLTNKRKDFLHKLSTNLVKTYDIIVIEDLKSKNMMKNHKLAKAIGNASWYEFRTMLEYKCKWYGKQLIIVPPHYTSQECSNCQHNSGKKTLDIREWTCENCGVYHDRDINAAKNILTKGLKTLQTM

SEQ ID NO: 17921 - protein, 402 aa, Spirochaetaceae sp.
LHIKSHFLFWRIKKLLKAYKTEINPTEEQKVLINNTIGTCRFIYNFYIAHNKEVYEKEKKFVSGMDFSKWLNNDFIPSNPNYSWIKEVSSKSVKKSIMDAECAFKKFFKKQAKFPRFKKKGKSNVKMYFVKTDSKVIIPCERHRIKIPTLGWVQLKEKGYIPTNPDTHIIKSGTVSVRAGRYYVSVLVEQSDFQKVKRTSDGIGIDLGLKDFAVLSDGRTFKNINKTHVVRKLNKQIKRKQRSLSRKYEALKERNKNGEATRHNIQKNLLEVQKLHQRINNIHSDYINQCVAEVVKTKPQFVTIEDLNIKGMMKNRHLSKVIAEQNFYTFRERLTAKCNQLGIEVRVAGRFFPSSKMCHKCGAIKFNLRLKDRWYKCDCGYENDRDFNASLNLRDLEVYKLA

SEQ ID NO: 17922 - protein, 182 aa, Aneurinibacillus sp.
MNGLFVDSEEGKTANYPRFYRQALEKLAKEQRILSRRKKGSNRWHKQRLKVAKLHERIANQRKDFLHKESHKLAKRYDCVVIEDLNMKGMSQALNFGKSVADNAWGMFTTLLRYKLEEQGKKFIKIDKGFPSSKTCSCCGQVKESLSLSERTFRCECGFVADRDWNASINIKHEGLRLLALA

SEQ ID NO: 17923 - protein, 493 aa, unknown
  TnpB Polypeptide
MLTGRKFAAKFRDATAREAYLTWSAGQMFIYNESVLEQRFFDSLSRLVAETERHKQPVRKECRIERPKPDQKYAHFINKAERPWLSQVPSAILGIGAFRFCQACRRAAAGLASRPKLRAIKDADRHLLLTRDYFTIEPSARSGWYELRFGSARIPGGTILFKAHREFIVPAMVSVTLTSKALFVSMSYKEAEEERFPETEKEMIDRLQQYSEEELIACGNGIDRGVVRPVQTSNDPEPYALTKDQLERIQRKERQRRHYQKRMARCEKGSRNRAKMRRKVSRTFDYRKNVINDFAHQTSHALVADAKVQFFVLEDLQVKNMTRRPHPKYDDSGKALPNGARAKAGLNRAILSSGWRKTEEYLKYKAVKTGKLVIKVDPAYTSQRCPKCGRVERKNRPTQSVFRCVSCGFESTNADYVAAGNILMAGVKMIREGRLEPKKVKATLRGKPARATTKKLGPGRADVMPVEPERCPGTPGCQTRHEAGSPSIEGSGH

SEQ ID NO: 17924 - protein, 378 aa, unknown
  TnpB Polypeptide
MKQTVLVKLAPTPEHHASLLRTLEAFNAACNAVAEVAFAHHLANKIELQKLVYYDIRQQFNLSAQMAIRAISKVAEAYKRDKRIKPSFRPHGAMVYDERICSFPAIDRVSLLTLDGRVIVPFRFGTYAEGMLSRKRGQADLLYRNGTFYLAVTVDAPEPTPDEASEYLGIDLGITTLAATSDGELLNRSTGPQAPKHAHVNEVRARFSRFRQKLQTRNTKSSKRLLKKRSGREHRFVRDVNHCLSKAIVSTAKGTTRGIALEDLQGIRERAGKTVKRRQRRVLHSWAFFQLRTFIAYKAALAGVPVVYVDPAYTSQTCSRCGHCERANRRSQAHFLCVACGFFAHADLNAAVNIGCRAALSCSRTSRPVDRLDNQVIA

SEQ ID NO: 17925 - protein, 577 aa, Halobacteriales sp.
MQLTEQFHIPGEYHDACDRLTTLVQTHTRRLLIDEYWHDDHLDALSDHAGQSYTYVRDDAYDAFEDVAEYLYSRFKRCVYHRVTQVLDAHNDEFDAFQFVTDTVTERKIRRIGWQRLRTRLFDDDDAPYIEWGVLESVVDQLNSYYDRHGCFPDSYTDLVECPEPNGTLPYAPDKGDYHIHELSVEDGELVMILNAPDSLSPESHHDWTDHELRFSVHSRFQQMLDSGDVKAPTLHASDHGYTLDVPVAVPETVCDTVDGRVLAVDLGVKKQVTAVSLDQNGEELTQIGPPQFLDHPAKAKLFRLKADAEGVNDRLSELRRQEKAHTDRFDHLVSEFRQTRRKERRLRQQIQHDIANELVWVAADSGCERIVFESLGQLDSGETSGVVAWSISSWARGELLDLVEYKAALFGIDVETVNPWGTSQYCPRCGERGRTVTAPDDHTECRHGGHFHCPECGYDCDRDVVGAVNVGRKHFAETKMDEANPVAYMEAGKHASFPSHSSERARSAGVQSTTDQQELASGRQTHLSRFRAMPLTAKRGERDPGGLSQNHGRKTGLRRPKGSITRHVLASATDCG

SEQ ID NO: 17926 - protein, 398 aa, unknown
  TnpB Polypeptide
MRQTVQKSEISVQAELGSAYARKTVVAKILTDRLTNKKREAIEREYNAFQRYVHGEEDVELYSAIRQDAFRHIDRDEIKDEREYPVPIRNQNFDVGLRRDDNDVADWWLKVPVATVYGGVNVPIKPHEPIPGEAELCDSKIVRDDGEFYAHLSIEQQVDVSESYDGVIGVDFGTRWAATSVALPSRNTSFYGEEIRRARRHYGELRTRLQEKGAYRSLRRIKDKERRVVEDRLHKISRSIVEEAKERNAFIVVGDLEGIDDGDKGAEMNRRLSQMPHYSLKQFIEYKARWEGIAVVEVDEYMTSQTCSRCGNQDTAREGQGRFLCDECGLDDNADKNGATNIAKRGLGKSIERPLSSLGASVDRLERCHDETTSGTVLRSGADTEAPTSRSEGVSPNE

SEQ ID NO: 17927 - protein, 339 aa, unknown
  TnpB Polypeptide
MKNGFIKAFDMCTEIKELYVEYPFLKEVDSCSLRCAVFNLEDAFKNCFSKRSNYPRFKSKYNKQSYRTTCIRSTYKNREYSNIELDLVNKKVKLPKLGLVNIRGYRNLKEISGRIINATIEKETTNKYYVSIVVEEKEFISSKVIPQSIVGIDLGIKDLVVTSDGEKYNNPKEVLKREKRLKRLQRKLSRQIKGSNNYYKTKKRIARIHSKIKNSRKHNIINIVNILVKEHDIVVSEKLKVQEMTQNHNLAKNILDASFNKICQILKWKCSMLGKYYYQVDTYFPSSKKCSHCDNITNKTNNLNVRNWICDKCGCENDRDINASINIMFEGLKIHYQSN

SEQ ID NO: 17928 - protein, 368 aa, Butyrivibrio sp.
VEKAYKYRIYPNKEQKNLIHKSFGCSRFVYNYYLAKRKGIYEKESRNMGFFECNKDLTRLKSELMWLKEPDKNSLQNALRDLDQAYKNFLRDKSVGYPKFKSKKTHAFSYRTAFTNNNIEFVNKKIKLPKLGWIKTKSTLIPQGRILNATISQEPSGKYYVSLCCTDVEINTLSTVNKNVGIDLGIKDFAITSDGEKVPNSQYLQKSLNKLAKLQRELSRKSKGGSNWNKARIKVARLQEHIANQRKDYLQKLSTKIIRENDIICLEDLQIKNMMQNDKLARNIADVSWSEFTRQLEYKANWYGRQIIKVDKWFASSQTCHCCGNQSNITKDLSIRVWICPKCHTELDRDVNAAINILNEGLRLLSVA

SEQ ID NO: 17929 - protein, 212 aa, unknown
  TnpB Polypeptide
LVENDETLPTPTTIEPNLTLGIDLGISHLLNLSDGSKFDNPKYLTRASKRLAVQQKIFARKQKQSKNYQKQKLAVARTHEKVRHSRLDLHHKITHSLICENQATSYALEDLAVKNMVKNRKLAKAIHDVGRGQFVTLLTYKANWYGKNILKVNRFFASSKICSHCHYKLDSLPLSVRNWTCPSCQTHHDRDINASNNIRNQALADVAGLATV

SEQ ID NO: 17930 - protein, 481 aa, unknown
  TnpB Polypeptide
MEVNAKQNDKIWMHIGACWRLRNILVADRIENRAANKRLKQQRVTEDLHYLSQSDQYADIIEYVSRDTALSKVHSQVRQNVAVRVDEGYKRFFDALKEGRANVHPPKFIERKKYRSITYSQYRPAAKIKNGKLHLSGLGEFRLFDYRKVKGKPKTVTVKFKQGRWHCIVTAEAQEKDILDLIRPDDPRQDAGFDTGLTALLTDSEGNEYDPPRAWYDYRARLRSAQKKMSRQFEARGKQYEILAAHAKAEGRPVSPIKDIPYSNRLKAQIKVVAKLHTKVDNIRDHHHKKNASVVESRYRKSAVEEHGVQFMIRNRRLAKVATDRAIHRQKLLLKSKLGKRYIATPNQTENGGNSQTCTCGAPVPKELKDRIHHCPVCGLTAGRDHVAANIVSIIAFGIASLTLGAGSHSPEAGQVFVRRGEDKALCGESRLCESECIPASESSGKRQPSQALRRGTTGAEATVGGKTRSSRIADRYGIAT

SEQ ID NO: 17931 - protein, 481 aa, unknown; identical to SEQ ID NO: 17930
  TnpB Polypeptide

SEQ ID NO: 17932 - protein, 398 aa, Caldicellulosiruptor sp.
LKIIVKRVEQIQINRNHELWTYCDKTCFAAKNLYNYANYLVRQEFINNGRWIRYRELDKVLKEHETYRNLPAQTSQQTLRLLDRNWKSFFKAIEEWNKDKSKFLGRPKLPKYKKKDGRSPAVFTNQQCKIKDGYLSFPRTDLKLKTRVENRLKEVRIVPKGSVYGVEIVYEKEVAETKKPSKRIAGIDLGLNNFVTLVNNIGIKPIVINGKVIKSINQYYNKKKAELMSYVGNRGISRRIEKLTLKRNNKIKDYMHKASRFIVNWCRQYEIDTLVIGYNPNWKQEIELGKVNNQNFVGVPFYQFINMLKYKCEEEGINLIITEESYTSGCSFLDGEEVSKENYDPSRRIRRGLFRSNRGILINADINSGYNIIKKVFPEAFAEGIEGVGLHPVRLNIA

SEQ ID NO: 17933 - protein, 374 aa, Caldicellulosiruptor sp.
MLKAYKCRIYPDKAQEEFFEKTFGCCRFVWNKMLQEKLEALSQGKKIPRITPARYKREYPFLKEVDSLALANVQLQQEKAFRDYFKNPKHFRIPKFKKKKDKQSYTTNNQYLKNGSETIRVDFERGFLYLPKIKSGIKAIFHRKFEGKIKSATIVKTKAGRYYVSILVDVQDLRNDIKEPKNFICGIDLGLKSFVTIVNDTKIFKVEYPKYLIRAEKRLKRLQRQLSRKKEGSKNWEKARKRLAKEHEYVKSAREDFLHKLSKTIIDESQVVVVESLNVKGLSKTRLSKHIMDSSWSKFLGYLSYKADWYGRKIIEVDRRFPSSKMCSNCGYIYSELRLNDRVWECPECGAVHDRDENAAKNLRKYGIAYIRSQ

SEQ ID NO: 17934 - protein, 459 aa, Caldicellulosiruptor sp.
MRYAYKRLLEGLGRNELKRQLQGVFNLNSRYVDDAIMKAQSIKKSCEQKGENPKKVIFGGRELFEKLQKRHINGRAYGELQRKWQEKRKGTLYSRGDRSKKGNLNTRIEINGFLTKLRINVGEREYVYATIQPGWKVKGGTYTDRNMLLQAIATSGEPYSVELKLKNGTVYAYFTIEEVFPQPTITRANGVIGIDTNAYPKHIAWVETDSSGQLLSYGEIQMPELESGNSDKREYYRWQYAHMIVAMAKEKQKAIVIEKLDIKNRGRRGDFSGRKSRRIRHYFGYRSLLEKVKLLAKREGVEVIEVDPAYTSVIGMLKYAPQFMVSKDVAAAYVIARRGLGLKERIPHNYMALLSSLDVNSLEELKGYVRKAVKNPYVRKRQLREIDWAIKILQSPGSEPGRLRPLPLDGTSKDSREGTRNLWRVLRVAVVTPLSPERILRDLSVLKQLLVSGQVGGPG

SEQ ID NO: 17935 - protein, 513 aa, Caldicellulosiruptor sp.
VITIQSKLIFDSSEDKQTVFDLMRRWSDCMRYAYKRLLEGHKRNELKKQLQGIFNLNSRYVDDAIMKANSVLKSCKERGENPRKVIFGGRELFEKLQKRHINGRAYRKLQCEWQEKRKGNLYSRGDKNKKGNLNTRIEIDGSLTKLRINVGERDYVYATIQPGWKVKGGTYTDRNMLLQAISTSGEPYSVELKLKNGAVYAYFTVEEVFPKPKITRANGVIGIDTNAYPRQVAWAVTDENGQLLSYGEIPMPELESGSSSKREYHRWQYAQMIVAIAKEKQKAIVIEKLDIQDRGRRGDFSGRKSRRIRHYFGYRSLLEKVRLLAKREGVEVIEVDPAYTSVIGMLKYAPQFMVSKDVAAAYVIARRGLDLKEKVPHNYMELLSRLDANSLEELKEHVKKTVKNPNVRKKQLREIDWAIKILQSSGSEPGRLSEPLDGTSEDGRRKDTCNLWRVLRAAVVTPLSPDRVLRDMSVLKSLLVSGQVGRPRFGASSCFLGQGLKASQIPPAGAGKS

SEQ ID NO: 17936 - protein, 363 aa, Caldicellulosiruptor sp.
MQKAFKFRIYPNKKQIELIKNTFGCVRFVYNYYLAKREEEYKTNGVTFNYNKCSADLTKQKQVNTWLKEVDKFALQNALKDLDKAFKNFFEGRANYPKFKSKKNKHQSFRTNFSNNNIKIEGNKIKLPKLGWVKFAKSREIEGKILNVTVSRTPTGKYFISICCSVDKIEEKPKTDRVIGIDLGINHFLIDSDGNKISNPKYLIKLEKRLIREQRKLSRKQIGSNNYKKQALKVAKIYEKIRNQREDFLHKLSSKIINENQVIILEDLKVKNMLKNDRLSKFISDSAWAKFVKMLEYKAFWYGRAIVKVDTFYPSSQICSVCGYRNEEVKDLKIREWRCPECGIVHDRDINASINILKEGKKF

SEQ ID NO: 17937 - protein, 478 aa, Caldicellulosiruptor sp.
MRYAYKRLLEGHERNELKKDLQGVFNLNSRYVDDAIMKAQSIKKSCEQKGENPKKVVFGGRELFEKLKKRHINGEAYRKLQREWQEKRKGNLYSRGDRSKKGNLNTRIEIDGSLTKLRINVGERKYVYATIQAGWKVKGGTYTDRNTLLQAISTSGEPYSVELKLKNGAVYAYFTVEEVFPQPKITKANGVIGIDTNAYPRHVAWVETDSSGQLLGYGEIPMPELESGSSNKREYYRWQYSHMIVQMAKEKQKAIVIENLSIQDRGRRGDFSGRKSRRIRHYFGYRLLLEKVKLLAKREGVEVIEVDPAYTSVIGMLKYAPQYMANKDVAAAYVIARRGLGLRERIPHNYMLLLSRLDVNELEELKEYVKKVVKNTYIRKRQLKEIDRAIKFLQSLGSEPGRLSEPLDGTSEDDCGKVRNLWRVLRVAVVTPLSPERVLRDLSVLKSLLVSGQVGRPVKGASSCFLGQGLLCSFAQFG

SEQ ID NO: 17938 - protein, 382 aa, unknown
  TnpB Polypeptide
MLKAVKVRLYPTVEQQTAIAQQIGAARYVYNRSLALRKFAYTKFGIKLGKFDLIKRITTLKERDKTSWLKDADSQALQQSIANMDKAYKHFFKGGWFPKFKSRHHSKQSYQYPQRVKIEDNKVYLPKVGWVKCKGLRSDINGKIKTVTVSYEAYQYHASILFDEGETSIEPNMNGQFVGIDVGVSLVVADSNGNSIKPLDLLCELSKLRKRAQQLSRKKKGSNNRAKAKAKIAKQNLRIANMRKDFLHKLSRSYSENQTVVVEDLKIKNMTKATKGTVEKPSNNAKAKRGLNRVITQQSWGMFFELLEYKLKENGGELIKVNPQYTSQTCNCCGHISKENRQSQSKFVCTSCGHTANADVNASKNILDRGIHGNNALHQIAS

SEQ ID NO: 17939 - protein, 578 aa, unknown
  TnpB Polypeptide
MKRRKEAMQEKIPDLKQFRKESNRHVLVLEAQVSEQDKYKLIHLSNNVLRTAGNDLNGVMKKNYDQLVRTKRYRHLRSLYGKAKKAGRDKEMKAVGAEMKQMQEEYHVTWEFCRQSMIKINKQYHLNSIFALTQAEDVWKGVEACLYREGKTLHFRKYGDHPEIRAKQAVRGIIVRLDGGSLNFRIGDITLFPIINKPRHTKTRCGHDTGVKEAHDLFAEEEIAAVCHYLENPEAADRAALELFRKKGELMDTYRPCYASLCFKEIRGRVRVFIHLTIEGLPKPKRRKDGSRRHQLGRGVVGCDIGPQTIACTSKKEVILKNLAERGMSIKNREQKEAAIQRKMDRSRRAMNPENYREDGTIRKGKKTWKKSRRYRKLQKKYRNLSRIAAENRHFAINEDVNHIRELGNVFVTEPGNAKKMQKRAKKTERQEELSEVKQKDGTVKMIHKYKRKKRHGRSIQNRCPGYFQAQVKAKFERSGGVYIEVPFDYRASQYDHTCGSYIKKLLSQRMYCLSDGTRVQRDWYSSFLLFCIGHSLDKISSYKCKTYFETMYRMYLALEQYIIENHIRVMNSGIKAA

SEQ ID NO: 17940 - protein, 380 aa, unknown
  TnpB Polypeptide
MKLKGIKIKLYPTQKQIEFIESNFHINRFVYNQLLAMQIERHKNGGDFIGKFGMNYLIKAMKLEFPFIKSAESTSLLYTSADLNDSFSRFFKKQTKFPRFKSKKNPKNSYKSNCVNNNISVVDDHVIRLPKLGLVKANGLHRINGKIKSAVIRKNSNGSFTATIQVEHEPSTLAKTNRCIGIDLGISYLAIQSNSVQLPNKNFERTLSKKRKLWERKLARRRIQAKKQISLAKEQGIELELSSFKNLEKARIMVAKINRKIINQREHYLQKYTTGLVKQFDTIVIEELKVSNMMKNHHLSRSIADASWAKIKPMLQYKCDWHDRELVIVSSHYTSQICSSCGENTRQKPLRIREFTCPHCRTRHDRDINASINILNKAFV

SEQ ID NO: 17941 - protein, 434 aa, unknown
  TnpB Polypeptide
MRQVERHWIKEGHALYPICDDLTFKAKNLYNAGLYQIRQSIFERNKCDNKEEKPSVLSWIELVSQFRKEKQSDMLALPSKVSTNILKNLGSSISSYYQLLKCFHDKSNTSVSSKPQLPRYLHKTKGRYIAEFTHQTFSKKRGLNGELILCPKDFSLVIPTKVKNPKCVRIVPKLKAFVIEVVYEVEPALLKHTGNYAAIDLGIDNLASVTFSNNVNPLVVKGSKLKSINQGYNRLIAKAKSKLPMSQKTSQHIHRLWKNRELRFQSELHKITSFLSLYFDEMAIETVFVGKNLGWKQGVSLRKKNKQTFTQIPFNAFISQLTYKCLIRGIKVLEQEESYTSKASFLDEDEIPIYEKNNQNQNFIFSGKRISRGLYKSKDGSLLNADVNGSYNILVKGLLTLNKSLNRKNLSFHTRSLKNDLTSVSNVDLLLQYM

SEQ ID NO: 17942 - protein, 285 aa, unknown
  TnpB Polypeptide
VCGAPKWDGEQGRLEIQYDETDDTFRAFQPVTVPDFRQDSPLASEEAALDVGANNLVACTTTTGQQYLYEGRDLFDRFRETTDEIARLQSKLREGRYSSQRIRRLYRKRTRRRDHAQDALVRDLVERLYAEGVDTVYVGDLTDVLSTHWCAEVNAKTHQFWAFRTFIDRLSHTAEEYGITVGVKSEADTTRTCPACGEQDNTDRDGDVFRCPCGHEAHADLCASRTFLEQQAGEIEVGSMARPVRLKWDDHHWSEIPYSPVRESSNEKRTNRSTSDGKLASVGAA

SEQ ID NO: 17943 - protein, 281 aa, unknown
  TnpB Polypeptide
MRYGFEAAHLRAQFSNTHVKLEGFSSSRKANKQKKNWVRLAEHGRIPTDVKYMNPRISFDGLNWWISVCVEFPDCKETLNDDGVGIDLGIKDLAVCSDAVKYKNINKSQKVKKLEKQKRRLQRSISRSYEKNKKGESYCKTNNVIKKEKLLLKRNHRLTNIRKNYLNQTISEIVNRKPRFICIEDLNVSGMMKNRHLSKAVQEQGFFWFRKQLEYKCNDKGIQLIVADRFYPSSKLCSCCGNIKKDLKLSDRVYRCECGNMIDRDFQASINLKAYGERFAS

SEQ ID NO: 17944 - protein, 416 aa, Microbacterium sp.
LARRRAGARPRCIGEERDRRVRQLLRVTDRQAQGASVGYPRMKRKAARQTARFDEYSHTIRGGWQNSLKGGGRLYLVKVGLVRVRWHRPLPSAPSAVTVTRETDGRWWATFTVQVPVEPARPPVHEGRAAGVDIGTEDIALVYSDKTRAKVMTLRAERDDTHEKRTGPQSYRQAEKRLAALDQELSRKTRGSNNRKRTQRKRALLHTRLKNLRTDFARQMAAQLTSENQVVVVETLGVREMVQDAHAKSVLDTAFATITREVALAAEKRGTTLIEAPRYFAGTRTCSHCGTKGPKRPTRVRDWRCASCGAVLDRDYNASVNHLMLAAGSAESLNGWTPEDRRQLASLPGEGNHVVLERPRAVRRGSVCEDPVLADVDSVREHSPRTTQVAARGLAPRPQGIPTGEDLRDLQKDAAR

SEQ ID NO: 17945 - protein, 398 aa, unknown
  TnpB Polypeptide
MSRYRLLLTPAQEAVLRDHCGHARYVWNLAVEQHSHWHPGRKSAPDYLEQCRQLTQARAEHPWLAVGSQTVQQQALRDFAQAMAAFFDPGNPAGRPSWRKAGRDEGFRITGRRGRQWDVRRVSRKAGQVWVPKAGWVRFRWSRAVPAGVKSYRVTMDRAGRWHVAFAAVPEPVPAPGNGQVVGIDRGVVVSAALSTGELLRCPGLTARERKRLRRLQRRLARAARGSNRRGRVRHAIARLRARESDRRKDWLEKASTDLARRFDVIRVENLQIGNMTRSARGTRENPGRNVRQKAGLNRGILRSGWGLLVRRLEQKAPGRVEKTKPHYTSQRCSACGQVDRDSRESQAVFRCTACGFAGHADVNAARNIAAGHAVTVRGGDGVTRPVNREPHLLLQSA

SEQ ID NO: 17946 - protein, 250 aa, Clostridium sp.
MIVKIIDNRIVINCPLKIKTRKNKSTNIIGIDKGYRYLFAVSSENFYGENLNNYLSKETERLNKVNTQRNRFWALYNQYIEQDNIEKANKIKENNLGKVKYNHNKLKHDQTVKSYINYSLNQLIKEEKPKEIVLENLDFVNWNDKYLKDVKRKLSRWIKGYIRERLEYKCDFYSIKYTYINPAYTSKACSVCGGFGKRDGDVFTCPKCGEFHADINASKNILNRKYDNDITLYTNYKKVKEILKNRLKVS

SEQ ID NO: 17947 - protein, 460 aa, Actinomadura sp.
LHARLRRLLRRGAGGGPVHRIPTAWRPRPSGRGGSAEQGSTVASGVLTVRVLSVVVGRLRSVSRYRLCPTPAQEAGLLEHCSHARFVWNLAVEQHAWWRPGRGPAPGYVVQARQLTEARAEFGWLAAGSQTVQQQALRDFAQAMVNFFAGTHRCPTWRKAGLHEGFRVVGVRGRSWDVRRLSRRTGEVRVPKVGWVRFRWSRPVPAGVKSFRVTRDRAGRWHVAFAAIPDPVPAPGNGEVVGVDRGVAVSAALSTGQTSSVPGLTPGEAERLKRLLRRLARARRGSNRRARVKAAIARLKAREADRRRDWVEKTSTDLARRFDVIAVEDLDVAAMTRSAKGTVDAPGRGVRQKAGLNRGILANGWGRLVTRLEHKAPGRLVQVDPAYTSQTCNVCGHRARDNRESQAVFRCVACGQRANADVNAARNIKDTAVGRTVAARGGTPLGGPVNREPQPALLPA

SEQ ID NO: 17948 - protein, 393 aa, unknown
  TnpB Polypeptide
MQSYKFRLEPNKEQQEQLNAMFGCSRFTWNYFLDLNNKIYLEAKEKELKKKHLNYYDCANQLTELKTKNEWLKDANSQSLQQTLKDLDISYNKFFQKKSGFPNFKSKRNKQSFRIPQFFRLEDEQSIFPKFKDGIKTIVHRKVEGKIRYATVSKTKTNKYFVSITTDFEVNKKRISDNQIGIDLGIKDFAVFSNGEKYGLKTKERNIKFLHKQVSKKKKGSNNRNKARLILAKQYEKIDNQKQDFQHKLSDKICKENKLIAIEDLNVKGMVKNHCLARAISNQSWYSFVTKLEYKAKRYGSEVVKTKRFYPSSKSCSNCGFINQELTLADREWQCPKCETKLDRDINASQNILAQVLRELNLKSRRDYDLKPVELSSVDEALKQEAFGSLAQR

SEQ ID NO: 17949 - protein, 399 aa, Spirulina sp.
MRNVVKVRIYPTTEQQVALSKAFGCARWWWNYALNLNNETYKATGKGLSRQGYNDRLPALKKEFPWLAQCYSQVLQSVSLNLSRAFISFFEGRAQYPNFKSKHGKQSIQYPQHVKLLDKAIKLPKIGDVKAKFHRVFDGKLKTVTVSMSRTGKYSASLLFDDGLPKPEISSQGKAVGIDLGLAHFAITSDGSKFDNPKPLKKREKNLKRKQQKLSRKQKGSKRRAKAKRIVARVHERIANTRKDFQHKLSRKLVNENQVIVVEDLAVKNMVKNHNLAKAISDCGWSEFTRQLKYKAEKDGKTYLEIGRFFPSSKTCHVCLNQIDSLPLDVRSWECPNCQTQQDRDVNAAINIRDEGLRILSLGTSDTAQGGNVRPKRGRKSSVEAVAVELGSPVPLWAG

SEQ ID NO: 17950 - protein, 383 aa, unknown
  TnpB Polypeptide
MSAVKRAYQYRFYPTAEQAQQLAQTLGCVRFVYNWALALKKTAYETDKTKLNYVALSAKLTELKKAGTHDWLKEVSSVPLQQALRHLDTAFLNFFKGTAKFPNFKKKHSRQSASFTAAAFQYRDRQLYLAKQQQPLNIRWSRPLPSSPSNITVSRDAAGRYFVSCLCECEVKLLPVSPKTTGIDLGIASLITDDAGWESGNPKYTKRYEAKLAKAQRALAKKKLGSQNRLKAKRKVAKIHAKIADSRRDFTHKLTSQLIHENQVISMETLRVKNMVKNPKLAKAISDSNWGELARQLNYKAAWYGRTIVQIDQWKPSSKTCSCCGFKLDILPLSVRAWDCPQCNTHHHRDQNAAKNIKAEGLSVLAFGECVSGSGKFSVSNAR

SEQ ID NO: 17951 - protein, 353 aa, unknown
  TnpB Polypeptide
MKTLKLRIKDKHIQKLNQLASEVNFVWNYVNDLCFTHLKRTGKFFSAYDVASYTAGASKELNLHSQTIQAVTEELITRRKQFKKAKLNWRVSNKQSARRSLGWIPFKKSAVKYGIGFVQYGKTQFKLWDSYGLDQYHVKTGCFVEDARCRWYVCLVVDNASKLESKGTQAVGIDLGLKDLATLSNGQKLVAPKHYRHYERQLGIAQRARKKNRVRAIHAKIKNTRHNQLHQFSTELVKAYAAIVIGNVSSKALAKTKLAKSVLDAGWSSFKTMLRYKCENAGVWFEEVNEKCTTQACSCCGCISPNSPKGRAGLGIREWTCPECGALHDRDVNAAKNILALGHERLAGGILAL

SEQ ID NO: 17952 - protein, 526 aa, Sphaerisporangium sp.
  misc_feature (3)..(37): Xaa can be any naturally occurring amino acid
  misc_feature (444)..(511): Xaa can be any naturally occurring amino acid
VGXXXXXXXXXXXXXXXXXXXXXXXXXXXXXXXXXXXKIDLVRRPDPGVRGGWRYEAHLMILGVGYAGPATRARRATMAGLARAGGVDGNVSNLAIVSVPADLSPTPAGPVPAGLIPAGSAMAGPVPGHRSWPVGGSHDAVMMGSGQGLGTSDARNGDAPRGSGSGAGLVRSTRLILTVGQQAALARDRKKAKGRKRALDRSRRAANPAQYQPSARQQARDQRRARAGLPAKQPSVRSGPRLAGAAGTPRQAYRKDTLTRGYRKLRTAVAADAARRAEARRARTYATAAALTSVHGANLTVEDCDISTWHRLWGRACAAFTPGLLITALARECAATGGALLRASTTKTAMSQHCLCGARVTKSLAARTHHCPACGLTADRDLVSAALAACVTLSDPADPQTARVDYTRARQLRTTQGLQEALTESTVISPATAPSDGAGTGDTXXXXXXXXXXXXXXXXXXXXXXXXXXXXXXXXXXXXXXXXXXXXXXXXXXXXXXXXXXXXXXXXXXXXARAGGGLCSAKFRPR

SEQ ID NO: 17953 - protein, 403 aa, unknown
  TnpB Polypeptide
MRNTKHKLFKDKTLRHLHDDLNISGVVRNHFIALCMRYYRRYGKGLSYRKLSSHLTKLKKLEKYKHWNIPYAWSLQNVLKRLAQSFHEMKTLGRGHPQFKSCKKHKGMTFSGEQVKIEYLLPKQKNERNHPTSRIRLNGRWYRFALHRPIAGDIKRVQVTRDALGDVYITLTEDYSEVKIEPKTGKAEGFDFGIKDFLTGSDGERYGSPMFYTQNADKLAKAQKAHSRKVKGSNNRERERKNVARIHKKTTNQRADHHWKLAIDLCRQFDILFFEDLNLEGMKRLWGKQVSDLAFGEFMQKLKHQSHKRIRSVLKINRWSPTSKCCSVCEHKNDNLTLADRNWTCPECHTHLDRDPNAAMNILKEGVASFGLGVVRPMVLFNRIVGISVEASSPLLKSTNASA

SEQ ID NO: 17954 - protein, 439 aa, Acidimicrobiaceae sp.
VTPAQRERCFALLRSGGDLWAAVLELNALRHRRGDAPVVGYQALCREVSAAGPGCAGELSSVGARSILRRYSDAWFNANAARRGGDAEARYPRRRRSLLPSRYYAGTFVIQDRHLSLPTARSCPPLILRLSRPVPYAPASVRSVTLLNVGPRLFVDVTAEVPVASCAPGAGPDPARVAGVDLGIIHPYAVVASGAALLVSGRAIRAEHRLHLAEKKARARALARSAPLRGQAGSRRWRNHRATTRRREARHRRRVAQATHEAARAVVDFAVEEGIGILVVGDPRGLLGHDAGKRQNLAVRNWRPGQMMSALMDKAAVAGIEVELVDERGTSSTGPRCRAKVAKPKGRTFHCPTCSLVAHRDLVGAANIAQRGSLGGDSFDLTRLEIMHRRAGRHLPGRTRRDPRRISMDNHRRERVDLWPAVARPETSGESLGRVASAA

SEQ ID NO: 17955 - protein, 414 aa, Pusillimonas sp.
MKRLQAFKYELRPAGQQMRQMRRFAGSCRFVFNWALAHQKALYEASSTARFSYTALANQLPALKKELPWLVECPSQALQQALKDLERAYTNFFARRADFPRFKKKGRRDSFRYPQGVKLDQANSRIFLPKLGWIRYRNSRAALGTVKNVTVSHACGKWFVSIQTEREVAQPVPHARRAVGIDMGVARFATLSDGAYLAPLNSFKRHELALRKAQQAMSRKVQFSSNWKRAKTRVQRIHARIGNARRDFLHKSSTTISQNHAMVCIEDLQVRNMSRSAVGSLTAPGKNVRAKSGLNKAILDQGWFEFRRQLDYKLAWNGGWLVAVPAHNTSCTCPDCGHVHADNRKTQARFECVACGFAENADVVGAMNVLRRGEAILSNKGQDNARFACEVNAEVVASAAGTRRSDFEAAHCRH

SEQ ID NO: 17956 - protein, 399 aa, unknown
  TnpB Polypeptide
MKRAILLQNVATNSKNNRLEKFMDETIDEYNRLLPEREGCNTFMQFHRKTFLVSKQNTSFNVQIICSIIRDAWRKKTNKVNGLTVKFNVPRNCKTFNTKSNFFVDLGVYPRNRIAVPIRQNRNYQRFQSLIKDGWVCKTFGLTKELQVVAYLSKEKNIPERKNVLGIDVNAKHFAVSIISPEGKVLYQTYLGKQIWVKRKKIMERRAKLQSLNAVRKLERIKNYERDFIETNLGQMIREIIKLAVRFNADISIEKLERFKSKGRRFNKIVMRIPFYKFRQILEQRCFDNNIQLNIVDSWHTSKWCSHCGALADGHSSNYSLFKCECGQIVNSDRKASLVIAVKSLLERNRHISNPDISTQISKWRGSVNNLVRPNAFGGLRSVNHISSTYGKPTSFSRG

SEQ ID NO: 17957 - protein, 437 aa, Thermococcus sp.
MKRAVTVKLQPSKEQEKALFELAHTTAVIWNKLNYQRLKQFKEFGKIDFSTTEKEAYHEFKNWIGGSTVQQLARKNAEAWRSFFTLNRKKKKGELPEWFKPKPPKFVKEKNGRKLFVIPLRNDQYKIKGNIIELRRLGKFRKLEIQFKGRIHLKGKQGRLEITYDSVKRKWHAHISFTAEEKLEGGEWIKLPRTPKGSLSAGIDLGVNNLMAVYVENGESFLVNGKPLKSIDFYWKRKIADYQSKLNKSGAKTSRKLKRMHEKAKLQAKHYINTAVRQTVRRLYDLGVSRIVVGYPKGIARNPEKGRKQNFILSHVWRFNYVIKRLKEVAEEYGIAIVVVNEAFTSQTCPLCGQRHSNARFVRGLFKCHREGVVMNADIVGAFNILKKVSKTITPSLSALAGGRGNGGKALPEGFEEPFSRVALMRTPRTSPPLARG

SEQ ID NO: 17958 - protein, 434 aa, Thermococcus sp.
MKRTVTLKLQPSKEQAKILSELADIGAKVWNRVNFLRRQQFFQDRIVDFNKTEKTVYEEFKQEIGSATVQQIARKNAEAWRSFFSLLRKKRNGELSNWLKPKPPNYLKEDGKRKPLIVLRNDQYKSEGNKLILKGLGKFKRLEIQFKGRIHLKSKQGRLEITYDNVKKRWYAHVSLTVEEKLEGGEWIELPRTPKGNLSAGIDLGINNLMAVYVENGESFLVNGKPLKSIDFYWRRKIADYQSKLNRSGAKTSRKLKRMHERAKLQAKHYINTAVRQMVRRLYDLGVSRIIVGYPKGIARSSDKGKKQNFLLSHVWRFNTVIKRLTEVAEEYGIQVLVVNEAFTSKLCPVCGKPHEGARFVRGLYLCPATGLIFNADLVGAFNILKKVVETITPNLSGLYAQRRGNWPKTGPEGSKTRFILGLNETPQTSPLIG

SEQ ID NO: 17959 - protein, 436 aa, Thermococcus sp.
MKRTVTVKLQPSKEQEKTLFELAHASAVIWNKLNYQRLKQFEEFGKIDFSTTEKEAYHELKNWIGGSTVQQLARKNAEAWRSFFSLNRKKKNGELPEWFKPKPPKFVREKNGRKLFVIPLRNDQYRIKGNVIELRRLGKFGKLEIQFKGRIHLKGKQGRLEITYDEVKGKWYAHISFTVEEKLEGNEWVCVPRQPKGSLSAGIDLGVNNLMAVYVENGQSFLVNGKPLKSIDFYWRRKIGNYQSKLNKSGAKTGRKLRKMHEKAKLQAKHYINTAVRQTVRRLYELGVSKIVVGYPKGIARNSDKGKKQNFILSHVWRFNYVIKRLKEVAEEYGIQVLVVDEAFTSKTCPLCGQRHESARFVRGLFKCHREGVVMNADLVGAFNILKKAVKTITPSLPILSGGRGNGGKTLPEGLKAHFLVGLNETPQTSLPLARG

SEQ ID NO: 17960 - protein, 437 aa, Thermococcus sp.
MKRTVTVKLQPSKEQEKVLSELADLGAKVWNRVNYLRKQQFFEGKIVDFNTTEKTIYEEFKREIGSATVQQICRKNAEAWRSFFSLLRKKRNGELPDRLKPKPPNYLKEDGRRKPLIVLRNDQYKIDENKLILKGLGKFKRLEIQFKGRIHLKGKMGRLEITYDDVKRKWYAHVSFTVGEKLENGEWVKLPRKPEGSLSAGIDLGVNNLMAVYVENGESFLVNGRPLKSIDFYWRKKIAGYQSKLNKSGAKTSRKLKRMHDKAKLQARHYINTAVRQTVRKLYDLGVSRIVVGYPKGIAQSPGKGKKQNFLISHVWRFNYVIKRLTEVAEEYGIKVVLVDEAFTSKTCPVCGKPHEGVRFVRGLYSCPATGLIFNADLVGAFNILKKIVKTITPNLSGLYAQRRGNWGETLPEGFEEPFSKVALMRTPQTSLPLARG

SEQ ID NO: 17961 - protein, 419 aa, Thermococcus sp.
MKRTVTLKLQPSKEQAKILHQLADAGAKAWNRVNYLRRQQFFEDKIVDFNSTEKTVYKEFKREIGSATVQQICRKNAEAWRSFFSLLRKKRNGELPDWLKPKPPNYLKEDGERKPLIVLRNDQYKIDGNKLLLKGLGKFKRLEVQFKGRIHLKGKQGRLEITYDPIKRKWYAYLSLTVEKKFEGGEWVSVPRQPKGSLSAGIDLGVNNLIAVYMENGESFLVNGRPLKSIDFYWRKKIADYQSKLNKSGVKTSRKLRRMHERAKLQAKHYINTAVKQTVKKLYDLGVSRIVVGYPKGIARNSDKGKKQKFLLSHVWRYNYVIKRLTEVAEEYGIRVVLVGEAFTSKTCPVCGEPHEGARFVRGLFKCPVTGLIFNADLVGAFNILEKVVKTITPNLGGLYAQGRGNWPEARPEGSKTTF

SEQ ID NO: 17962 - protein, 289 aa, Thermococcus sp.
IWNRLNYQRLKQFKEFGKIDFSTTEKEAYHEFKNWIGGSTVQQLARKNAEAWRSFFSLNKKKKKRELPEWFKPKPPKFVKEENGWKLFIIPLRNDQYRIDGNVIELRRLGKFGKLEVQFKGRIHLKGKQGRLEITYDPVKRKWYAYLSITVGEKLEGREWVKLPRTPKGSLSAGIDLGVNNLMAIYVENGESFLVNGRPLKSIDFYWRKKIAEYQSKLNKSGCKKSRKLKRMHEKAKLQAKHYINTVVRQTVKKLYWSFQNRRGLSERHCKKLRQGQKAKLPPLSRLAV

SEQ ID NO: 17963 - protein, 435 aa, Thermococcus sp.
MKREVTVKLQPSKEQEKILFELAHATAVIWNKLNYQRLKQFNEFGKIDFNGTEKEAYHEFKNWIGGSTVQQLARKNAEAWRSFFSLNRKKKKGELPEWFKPKPPKFVREKNGRKFFIIPLRNDQYWVKENILELRRLGKFGKLEIQFKGRIHLKGKQGRLEITFDPVKRKWYAHLSFTVEEKLEGGEWIKLPRTPKGSLSAGIDLGVNNLMAVYVENGESFLVNGRPLKSIDFYWRRRIAEYQSKLNKSGAKTGRKLKRMHERAKLQAKHYINTAVRQTVRRLYDLGVSRIVVGYPKGIARNSEKGSKQNFILSHVWRFNYVIKRLTEVAEEYGIAVEIVDEAFTSQSCPLCGQRHSDGRIFRGLFKCRREGVVMNADLVGAFNILKKAVKTITPNLSGLYAQRRGNWPKARPEGLKSPPLLGFSEAPQTSPPLG

SEQ ID NO: 17964 - protein, 436 aa, Thermococcus sp.
MKRTITVKLQPSKEQAKILFELADTGAKVWNRVNFLRRQQYFKEQIVDFNTTEKTVYEEFKREIGSATVQQIARKNAEAWRSFFSLLRKKRNGELSSWLKPKPPNYLKEEERRKPLIVLRNDQYKIEGNKLILKGLGKFKRLEIQFKGRIHLKGKQGRLEITYDPVKRKWYAHVSFTVEEKLENNEWVSVPRTPKGNLSAGIDLGVNNLMAVYVENGEGFLVNGRPLKSIDFYWRGRIAEYQSKLNKSGAETSRKLKRMHEKAKLQAKHYINTVVRQTVRRLYELGVSRIVVGYPKGIARNSDKGKKQNFLLSHVWRFNTVIKRLTEVAEEYGIRVLVVGEALTSKTCPVCGKPHEGARFVRGLFKCPATGLVFNADLVGAFNILRKVVETITPNLGGLYAQGRGNWPKTGPEGLKTHFLVGLNETPQTSPSMARG

SEQ ID NO: 17965 - protein, 436 aa, Thermococcus sp.
MKRSVTIKLQPSKEQEKVLFELADLGAKVWNRVNYLRRQQFFEGKIVDFNTTEKTVYEEFKREIGSATVQQICRKNAEAWRSFFSLLRKKRNGELSDQLKPKPPKYHKKNGKRKPLIILRNDQYKIEGNKLILKGLGKFKRLEVQFKGRIHLKGKQGRLEITYDEVKRKWYAHTSITVEEKLENNEWVSVPRTPKGNLSAGIDLGVNNLMAVYVENGESFLVNGRPVKAIDFYFQKRIARYQSKLNKSGGEKSRMLRKLHQQAKLQAKHYINTAVRQVVRKLYELGVSRIVVGYPKGIAQNPRKGKKQNFILSHVWRFNYVIKRLTEVAEEYGIVVEVVNEAFTSKLCPVCGKPHEGARFVRGLFKCPGTGLVFNADLVGAFNILKKVVKTITPNLPALSGGRGNGGKALPEGFEEPFSRVALMRTPRTSPPLARG

SEQ ID NO: 17966 - protein, 390 aa, Thermococcus sp.
ITSYRFRIYPSKTQQETMIQHMELCRWLYNQLLKAKRENPSLRKYDTQRLIVELKKENPELNNVYSKVLQMVNHQLWSNLKALNELKKRGHKVGKLRYKTSPNSWKILNYNQSGFKLDEERKRLHLSKIGEFPIKLHRRIKGKVKGVIIKRTRSGKWYAIFQVEEEPEPLPETGRTVGIDLGVRYFATDSDGNAFENPLFLEKSLERIKKLQRQLSRKQKGSKNLEKARVKLAKAYEKLYNQRRDFLHKLALYYVRNYDVIVLEELDAKNIVENGSSKGFKRRFLDSALKEFVRILSDKAGRAGRRVVFVEPAHTSRTCSRCGFVVEELGLSDRVFVCPRCGSELEMDRDLNASFYIWMKGWDGPDCLWREDLYPVSCPIRLSSRGKSSR

SEQ ID NO: 17967 - protein, 436 aa, Thermococcus sp.
MKRAVTVKLQPSKEQEKTLFELAHATAIIWNRLNYERLKQFKEFGKMDFSTTEKEAYHEFKNWIGGSTVQQLARKNAEAWRSFFSLNKKKKKRELPEWFKPKPPKFVKEENGWKLFIIPLRNDQYRIDGNVIELRRLGKFGKLEVQFKGRIHLKGKQGRLEVTYDPVKRKWYAHISFTIEEKLEGGEWVKLPRTPKGSLSAGIDLGINNLMAVYVENGESFLVNGRPLKSIDFYWWKKIAEYQSKLNKSGCKKSRKLKRMHEKAKLQAKHYINTVVRQTVKKLYELGVSKIVVGYPKGIARNSDKGKKQNFILSHVWRFNYVIKRLKEVAEEYGIIVEVVDEAFTSQVCPLCGQRHENARFVRGLFKCHREGVVMNADLVGAFNILKKAVKTITPNLSGLYAQGRGNGGKTLPEGLKAIFTGFGEAPQTSPPMARG

SEQ ID NO: 17968 - protein, 452 aa, Thermococcus sp.
MKRSVTVKLQPSKEQEKVLFELADLGAKVWNRINYLRRQQFFQGQIVDFNSTEKTVYKEFKREIGSATVQQIARKNAEAWRSFFSLLRKKRNGELPDWLKPKPPNYLKEDRKRKLVIVLRNDQYKIDGNKLILKGLGKFGRLEIQFKGRIHLKGKQGRLEITYDSIKRKWYAHLSLAVEEKLEGEEWIKLPRTPRGNLSAGIDLGVNNLMAVYVENGKSLLVNGRPVKSIDFYWRKKIAEYQSKLNKSGANTSRKLRKMHNKAKLQAKHYINTAIRQTVKKLYDLGVSRIVVGYPKGITRNSDKGSKQNFLLSHVWRFNYVIKRLTEVAEEYGICVVVVNEAFTSKLCPVCGKPHEGARFIRGLFKCPATGLIFNADLVGAFNILKKALKTITPNLSGLYAQRRGNWPETGPEGFEEPFSRVALMRTPKPPRQLGRGFLAGTLALQGGEEVR

SEQ ID NO: 17969 - protein, 434 aa, Thermococcus sp.
MKRTVTVKLQPSKEQTKILHQLADAGAKAWNRVNYLRRQQFFEGKIVDFNSTEKTVYKEFKREIGSATLQQIARKNAEAWRSFFSLLRKKQNGELPSWLKPKPPNYLKEDEKRRPLIVLRNDQYKIEGNKLILKGLGKFKRLEIQFKGRIHLKGKQGRLEITYDSVKRKWYAHLSLTVEEKLEGAEWVKLPRTLQGSLSAGIDLGVNNLMAVYVENGESFLVNGRPLKSIDFYWRRKIADYQSKLNKSGAKKSRKLRRMHEKVKLQAKHYINTAVRQTVKKLYDLGVSRIVVGYPKGIARNSKKGSKQNFILSHIWRFSTVIKRLTEVAEEYGIRVLVVNEAFTSKTCPVCGKPHQGARFVRGLFKCPATGLIFNADLVGAFNILKKVMKTITPNLSGLYAQRRGNGGKTLPEGLKAHFELGFNEAPQTSLPVG

SEQ ID NO: 17970 - protein, 416 aa, Thermococcus sp.
VKIVLTYKMNHNWSVEDLLTEYQKLLQRAIDEIWENTTWKEKKAKHRYPIGNGKYKYYETTRLIPYFPKSNEFKRELRNKLLKDWIFAKHYVDSVIKTTYSILESWRQNYLKGRRKRKKPVVKRKFVRVKITLMKVEGSKIRITVKPRKKYLELDYSNEWFYERIKDWKVGELIIREKDVYLTFSKEVEFDRRVKIGIDSNLMSLDVYHPEKGWIKVDLSELHRIAETYDGVIDKLKSVQRKAPKRIGRLLKKYYARRRNRIEDYLNKLAVQLSREFPDVVFIFEDLSKFKMLENGSRKFNRKLSRSTWGKIVQKLSYRAPVEFVNPAGTSSTCPVCGSRLESRNGLVECPNCGFKADRQFVGAFNVFVRGLGVALSGGEADDLLPDEPGGELRLMNPKSVVGVDLNGRTFAHVPP

SEQ ID NO: 17971 - protein, 454 aa, Thermococcus sp.
MRRAVTVKLQPSKEQREILFELAHATAVVWNKLNYRRLKQFKEFGKIDFSTTEKEAYYEFKNWIGGSTVQQLARKNAGAWRSFFSLNRKKKKGELPKWFKPKPPKFVKEENGRKLFIIPLRNDQYKVNGNVLELRRLGKFKKLEIQFKGGIHLKGKQGRLEITYDSIKRKWYAHISFTVEEKLEGKEWVNVPRTPKGNLSAGIDLGVNNLMAVYVENGESFLVNGRPLKSIDFYWRKKIAEYQSKLNKSGAKTSRKLRKMHNKAKLQAKHYVNTAVRQTVEKLYHLGVSRIVVGYPKGIARNSDKGKRQNFLLSHVWRFNYVVKRLTEVAEEYGIQVLVVGEAFTSQTCPLCGQRHSNGRIFRGLFKCHGEGVVMNADLVGAFNILRKAVKTITPSLSALAGGRGNGEKTLPGGSKIRFVVDLNETPQTSLPMARGLTPQNGEEVSKALNTLDG

SEQ ID NO: 17972 - protein, 437 aa, Thermococcus sp.
MKRTATVKLQPSRTQEELLFELADAGARAWNRVNYLRRQEYFQGKPIDFLKTQKIVYEEFKREIGSATVQTIARKNAEAWRSFFSLLRKKRNGELPEWYNKPSPPGYLKKNGKRTPFIVLRNTQYRIEGNKLILMGIGKFKRLEIQFKGKIHLKGKQGRLEVVYDDARRKWYAYINFTVGEKLRGEEWVEIPRQPKGNLSAGIDLGINNLMAVYVENGESFLVNGRPLKSITFYWQKKIADYQLRLNVSGYKTSRKFRRMHKKAKLQARHYINTAIRGTVERLHELGVSRIVVGYPKGIARNSDKGKKQNFLLSHVWRFNYVIKRLKEVAEEYGIIVEVVDEAFTSKTCPVCGKPHEGARFVRGLFKCPATGLIFNADLVGAFNILKKALKTIAPSLPALSGGRGNGGKALPEGFEEPVLTGSLMKTPQTSLSVARG

SEQ ID NO: 17973 - protein, 393 aa, Thermococcus sp.
MPSETIKLTARFKLKETPEGLGDLFSTYREIVNFLITYAFENNVTSFYRLKRETYKSLRREYPELPSHYLYTACQMATSIFKSFRKRKKKGKAKGKPVFKKEVIMLDDHLFKLDLESKTSKLSTPRGRVQLEFYPAKYHEKFKDWKVGQAWLVRTPKGIFLNVVFSREVEVGEPKTFVGVDLNENNVTLSLPNGEFVQIITHEREIRTGYFVKRRKIQKKLRAGGRRKELLEKYGGRERNRLNDLYHKLANKIVELAEKYGGLALEDLTEIRESIRYSTEMNGRLHRWSFRKLQSIIEYRAKLRGVRVVFVNPAFTSSLCPVCGGKLSPNGGRVLKCSKCGFEADRDVIGSWNIRLRALKMWGVPVPPESPTMKMGVGKVIRYDWFASSKSSG

SEQ ID NO: 17974 - protein, 436 aa, Thermococcus sp.
MKRTVTLKLQPSKEQAKILSELAGLGAKVWNRVNYLRRQQFFKEQIVDFNSTEKTVYEEFKQEIGSATVQQICRKNAEAWRSFFSLLRKKRNGELPSWMKPKPPNYLKEDGKRRPLIVLRNDQYKIEGNTLILKGLGKFKRLEIRFKGRIHLKGKQGRLEITYDDVKRKWYAHISFTVEEKLEGGEWVSVPRQPKGNLSAGIDLGVNNLMAVYVKNGESFLVNGRPLKSIDFYWRRRIAEYQSKLNKSGAKTSRKLERMHDKAKLQAKHYINTAVRQTVKKLYDLGVSRIVVGYPKGIARSSDKGKKQNFLLSHVWRFNYVIKRLTEVAGEYGIRVVVVNEAFTSKTCPVCGKPHEGARFVRGLFKCPATGLIFNADLVGAFNILKKAVKTITPNLGGLYAQERGNWPKTGPEGLKTRFLVGLSETPQTSPPMARG

SEQ ID NO: 17975 - protein, 365 aa, unknown
  TnpB Polypeptide
MNKSFKVRIYPTQEQQILLEKTFGASRFVYNHFLKLKQYLYQEFKIKITFNHTSKMLTELKRQKSWLKVPDKWALGNALRDLDSAYQNFFNGRGKYPKFKRKDGKNSYRTSYVKVDNSFIKIPKVGLLRYKDNYKFEDKNILKIYNATISKTTGGKYYAIISAEVYIPCFERTNQNIGIDLGLKDFAILNIGEKIHNPRVLKHLEKKYRQLSKSLSRKVKGSSNYRKSRIKLARFHEHVSNIRKDFLHKPTHRLVRDYDIICIENLNISGLMKNHKLAKSFQDVSLYEFIRMLEYKAKWYGKTISKIDRFYPSSQLCSNCGYKNKEVKNLTIREWTCPECGTHHDRDINSAINILNEGIRLLESI

SEQ ID NO: 17976 - protein, 449 aa, Clostridiales sp.
MEIGVCNMILSEEHRIKKHNNKKLLHEIDNYCYKVKNLSNSVNYLIKQCYRIHTKIKNGKTLEEWEDELIRAINSGIAEYNLGRSEVKRIRYIDADNGYIADAYFLSWYLKGTEVYKDVPYATCSQICIQEKCREWKSLYSATAEYRKDPKKFKEQPHVPGYLDPKKGRGSLVITSQNFKVDEDGKVTMPKFLSGIHIKARHDKVRQIRIKMYKSSVLISLMYEKKEKTVKGTKVMGIDLGVNNLIAAAWDSEDRPVLINGKPIKSINQYYNKARAHMQKEAKVYNGKNRTRRIDKLTAKRNRKIKDYMHKASRKLVNLAVSSNVGLIVIGANQGWKQKVHMGNVTNQNFVSIPYKTLINMIEYKARLEGIEVKTVRESYTSGTSYLDGEKPTREYYNKERREERGLFRSNNGILINADINAAYQMIKLGSTRAIPIKTGEQITKIKAA

SEQ ID NO: 17977 - protein, 395 aa, unknown
  TnpB Polypeptide
MMKAYSFRIYPNKNQEVKFNRTLSTCRHLYNDAIEERKKQAELNRLKRDFQVFPWGKPEWISYEDQQNALPKNKNSFQKEVHSQVLQNTLKRLDRSFQNFFRGYGYPRFQGKNRYNTFTYTQSGFEIIDNKLKLSKLGNLKIILHREMDGRIKTCTIKKDVNQWYAIFTCEIENNTKKVPIETKTGVDVGLESLLTLSSGEKIEPQKFYRKSEESLAREQRKLSRKRKGSKNRKKQVIKVARVHKKVRNQRKDSNHKTSRGLVKTFDYIVFEDLQIKNMVQNHHLAKSILDAGWGQIIRFTAYKAEYAGKTIELVDPYYTSQTCLCGHHVPKKLSVRVHVCPKCGLILNRDHVSAILIERKGKLNVPVVCREFTPVESTKTMDSTKQEATVLVRW

SEQ ID NO: 17978 - protein, 442 aa, unknown
  TnpB Polypeptide
MSIVVRRTNTFAVRPLSTQDEQLLRDLLDASASLWNELNYERRQQFFDGESVWDTADYRKRYVDVTGSGTAQQVIRKNKSAWKSFFAAQDEWHNGERDERPSPPGYWGNEDDGRELRTFIRNDLYTLETGERSRIQIPVGAELKDEYDHTGRLRLEVAGDPKWDGEQGRLEIQYDETDDTFRAFQPITVPDSRQDLSLASEEAALDVGANNLVACTTTTGQQYLYEGRDLFDRFRETTDEIARLQSKLEKGRYSSRRIRRLYRTRTRRRDHAQEALCRDLLERLYAEGVATVYVGDLTDVLSDHWSARVNEKTHQFWAYHSFINRLATTAEEYGITVEVESEAYTTVECPVCGERDETDRHGDVFRCSCGYEGHADLDASRTFLERQAGTNLEAGSMARPVRLKWDDHNWSESPGSPERARPNEERTHRSTGDGKLASVGTA

SEQ ID NO: 17979 - protein, 152 aa, Borreliella sp.
MSMRHFLVSSEGEKTNHPKYLLENERKLKKYQRKPSKKQKGSVNRVKSRLRVAKLHRKISNQIKDFLHKLFYYFLANYKNIAIKNLSIKGMQKGMFGKSVNDLGWHEFVRQLSYKSECSKSYLHKVDRYFPSSKLCSKCHIKNITLKLSDTR

SEQ ID NO: 17980 - protein, 426 aa, Streptomyces sp.
MSQGTLVTRQFGHRARLALSPTEVSKADAQAHAARTLWNLLHAWWQMMPKDQRTLAHADTAIRQARQDLDFLTVLPAQAAQAVLKTYVQAWKNCWEGRAAAPKFKARFRSVMSVDVPQGRDLHITRVHRRWGMVNLPKIGRVKFRWTKDLPVGKHADTGNRITGARLVRDALGWHIALRVTTLEAEPEPHPGPEAGIDVGVTVPLALSDGTTYEHGPWLTEQEQAKLLRLEQRAARRKAHRKSGERTSRRLRRTYDQIAQLRAKAKRRAADWQHRTTTTIARTYGTVVVEALTVTNMVASARGTAEVPGRNVAQKAGLNRSIAAEAWGRTVTMLAYKTARHGGALVKVPAPGTSRRCSACGRTTPGSRESQAVFVCKNPDCGWSGNADHNAAQNILHLYRIGHVAIPAAGRAVVRRARRVKLATAR

SEQ ID NO: 17981 - protein, 182 aa, unknown
  TnpB Polypeptide
MYRKICILRWLRGMIMRNYRKAEKKLAREQRRLSKMQKGSNNRSRQRIKVAKLHEKVSSQRKDFLHKLSRQTADAYDCVCIESLDMKAMSQMLNFGKSVSDNGWGMFTGFLKYKLEEQGKKLVKVDKFFASSQICSVCGYRNAETKNLAVREWDCPQCGTHHDRDVNAAVNIRNEGMRLVVA

SEQ ID NO: 17982 - protein, 387 aa, unknown
  TnpB Polypeptide
MAFRYRLDPSSAQAAAMVEHCAQARFVWNLGLEQRNAYRPAFGPTPGLAEQCRQLTEARAATWLGAGSTVVQQAALRDLDQAFRNWWGGSHRRPTWRKRGQHEGFAVRDVAVRKINRKWAETLVPKVGWVRFRLSRPLGKCGGARVTLDRAGRWHVSFAAVPPPIDGPGTGEVVGVDRGVVVPFCLSTGEMVAVPALTSGECRRKKRLQRKMARQVKGSNRRSVTKHDLAVLSAREADRRKDAVEKFTTDLARRFDRIQIEDLKVQAMSARGRGKRGLNRGIRSAGWAMFTTRLEHKAPGRVVKVRAAYTSQRCSACGEVDRNNRKNQASFRCMTCGYADNADVNAAKNIAAGHAVTGRGGDVRRPGLRPGVQPLRSVNHRDQAHVA

SEQ ID NO: 17983 - protein, 390 aa, Deltaproteobacteria sp.
MYTVRKLKIGRTAQLDALCLAAGELYTRTVVSFWRTVRKKDVWLKPSSLMRWHSSKDLHVHSADAVVQSFCSSLKSWRKRRKTDPQAKPPHNRRRYFRVQWKNSAIRLKEGTLVLSNGRGNAPVVIPWEREIPALVELGWNGREYELRVVYKAETQMSPIGDRVAGVDLGEVHMAASHDGENCYILNGRLLRSKRQYQNKVKARLSSIIDTKKKGSRRWKKAVRSKQRQLRKLGNQINDVLHKQTTQLVSTLYREGVQTVVVGDIRDIRQNLDYGRKANQKLHRMVSGKTRRLVSYKAQRPGMVVELQDEAYTSQECPACGRRHKPSGRQYTCACGFRYHRDGVGGFNIRKKYLGSGPVVGDMAPPTGMRYATHVHVALNEVLFRETAGF

SEQ ID NO: 17984 - protein, 395 aa, Thermococci sp.
MKRTVTVKLQPSKEQEKILFELAYATAVIWNRLNYQRLKQFKEFGKIDFNGTEKEAYHEFKDWIGGSTVQQLARKNAEAWRSFFSLNRKKKKGELSDWFKPEPPKFVREKNGRKLFVIPLRNDQYRIKGNIIELRRLGKFRRLEVQFKGRIHLKGKQGRLEITYDTVKRKWYAHISLTVEEKLEGGEWVKLPRSPRGNLSAGIDLGVNNLMAVYVENGESFLVNGRPLKSIDFYWRRKIAEYQSKLNKSGAKTSRMLRKMHEKAKLQAKHYINTAIRQTVRKLYELGVSRIIVGYPKGIAQDSDKEAKQNFILSHVWRFSYVIKRLTEVAEEYGIRVELVDEAFTSQACPLCGQRHSNGRIFRGLFKCRREGVIMNADLVGAFNILKKVKTITRI

SEQ ID NO: 17985 - protein, 137 aa, unknown
  TnpB Polypeptide
MRHEDLNVAGLVRNRRLARAIADCGWGEFRRQLEYKCERYGRRLVVIDRWYPSNKTCSACGHLLAQLSLSTRCWTCPCCDARHDRDINAAKNILAAGRAVTACGAGIRHRGTPPVRPAVKQEPRPVTAGIPVLRGGE

SEQ ID NO: 17986 - protein, 242 aa, Streptosporangium sp.
VKTISVKREGSRWYVIVSCDAVPAEALPATGATVGIDLGVASLVATSDGGLLDNPRHLAASADRIASAQRALARRKRGSTRRRKQVARIAALHAKVRRRRLDGAHKAALALVGAYDVIVCEDLRITNMTRRAASRPDGEGGYLPGGAAAKSGLNRSILDAGWGVFLTILSHKAESAGRELIAVNPANTSRTCACCGHCAKENRRTQAEFACTACGHSAHADVNAAINILRAGLALREAAEAA

SEQ ID NO: 17987 - protein, 437 aa, Halomicroarcula sp.
MSTVVRRTNTFVVRPLSDADERLLLNLLDASASLWNELNYERRQQFFDGESVWDTADYRKQYVGVLGSATAQQVIRKNKSAWRSFFAARENGDDTAPPGYWGNEEDGRELRTFIRNDLYTLETGERSRIEIPVGQTLKDEYGLGYHDRLRLEVCGAPKWGGEQGRLEIQYDEMDDTFRAFQPVTVPDSRQDSPLASEEAALDVGANNLVACTTTTGQQYLYEGRDLFTRFRETTEEIARLQSKLREGRYSSQRIRRLYRKRTRRRDHAQDALVRNLTERLYAEGVATVFVGNLTDVLSAHWCAEVNEKTHHFWAFRAFIDRLACTAEEYGISVEVRSEADTTRTCPECGEQDNTDRDGDVFRCPCGHEAHADLCASRTFLEQQAGELEVGSMARPVRLKWDGHCWSELSGSPERESPNEERTNRSTGDGKFASVGTA

SEQ ID NO: 17988 - protein, 373 aa, Selenomonas sp.
MDKYTMGFKFRIYPNHAQQELINRTLGCCRFVFNHFLAIRRDEWTANHKSVTYNQTSAMLTDLKKYEEYGWLKEVDSMALQESLKNLDIAYQNFFKHQSRYPRFKSKHNHSQSYRTRNQGNGIRIIRNRIKLPKIGAVKIKQSREFDGRILNATVSRAASGKYFVSLCVELDRGSLLKTNDGGEIGIDVGLKEFYSDSNGNTVANPRILRCLTRKLVREQRKLSRKMPRSANRGKARIRVARVHERISNIRRDFLHKTSTVLVRQNKTIAIEHLQIKNMLKNHKLARAISDVSWSEFFRQLEYKAELHGSDVLKVDTFYPSSQTCSECGYQNTETKNLGIRDWTCPACSSHHERDTNAAINILRKAIEQKQIA

SEQ ID NO: 17989 - protein, 434 aa, Psychrobacter sp.
MKISKAYKFRLEPNAEQEVILNNLVGSARFVWNQMLAISFEMFAKNEFINATNLVNKIMDIKANPDFAFLKTSSNAVSLQQKVRDLASAWSRFFDPKVHARLKENNRKPRKTKCLKLADGTEIQLRPLMPRFKRKSDGRDSIRLVQFDKYCRVNGNRVKLPNGIGLVKFKKSQEIIGVIKNITISKKSGQWYVSFGTEREVETPTHPSKTAIGIDLGITKFITTSNADIIQPKNSFKANQVKIARLQRQLSRKVLFSNNWKKQNRKIQKLHHHIANIRHDYLHKITTDISKNHAMIVCEDLKIANMSKSASGTLENKGRNVRAKSGLNKSILDQGWGMALTMLEYKQQWQGGLLIQVNPRFTSQTCFECKHVAKENRRTQAKFECVECGYIANADVNAARNILTVGHAVLSVEGGRGKGRPMKQKACDLREKVT

SEQ ID NO: 17990 - protein, 216 aa, unknown
  TnpB Polypeptide
MRSDGTVLGRKFIDFPSEKDRMYRVLGRIRRFQREHGPVQVKSRWAYAKRLNTELGRKIAGAVAGYAEENHADVIVFEYLETKGKISGRKKQKLHLWRKRDIQIRCEHQAHRRGMRISRICAWNTSRLACDGSGTVVRDPGNHSLCTFQNGKRYNCDLSASYNIGARYFIRELLKPLPATERSLLEAKVPSVKRRISCVYADLRELFSEMELLRAA

SEQ ID NO: 17991 - protein, 370 aa, Halomonas sp.
MKTERAYKYRFYPTPEQEALLARTFGCVRFVWNAVLRFRTDAFYQRQEKIGYNDASAFLTELKKHPDTAFLAEVSSVPLQQCLRHQQTAFKNFFSKRARYPRFKSKKHRQSATFASSAFSYRDGAIKLAKCSEPLNIRWSRALPAAPSSISISKDAAGRYFVSCLCKVDTEALPITPKMVGIDLGLKDLFVTSDGKKVNNPRHTARYARKLARAQRHLSRKQKGSNNRAKAKQKVARCHAKMADTRLDHLHKLTRQIVNENQVIAAESLQIKSMVKNRHLSKAISDVGWGELVRQLEYKAAWADRQFVQIDRWYPSSKRCHGCGYVMESLPLNVRTWDCPGCGTQRIDRDVNAAHNILKAGTALLAGAES

SEQ ID NO: 17992 - protein, 340 aa, unknown
  TnpB Polypeptide
VFRTHDLKQFSLNKALYPTLRAEFGLKSQMTQSVFKTVIARYRTILENQKEWIKPSFKKPQYDLVWNRDYSLTQDRFSINTLGGRVKLPYFAEWMSKYFDRSIYRFGTAKLVNKHGKYFLHIPVTYDVEESNLSDICNVVGIDRGINFVVATYDSKHKSGFVRGRSIKQRRAHYSVLRKELQMRHTPSSRRRLKRIGQRENRWMQDVNHCVSKALVVNNPEHTLFVLEDLSAIRNATERVKTKHRYVSVSWAFYDLEQKLIYKAKQNHSSVIKVDPRYTSQCCPVCGHTEQANRNKKIHLFTCKNCGYKSNDDRIGAMNLYRMGINYLYDSQVPDTVAAE

SEQ ID NO: 17993 - protein, 407 aa, Streptomyces sp.
MQLRYSFRLYPDTGQQRALARAFGCARVVFNDAVRAREEARAARRPFPKAAELSKRLITEAKQTVERSWLGEVSAVVLQQSLRDVETAYRNFFASLKGDRKGPRMGAPRFKSRKDKRQSIRFTANARWSITDKGRLNLPKIGAVKVTWSRTLPTTPSSVTVIKDAAGRFFASFVIDTDPAADATRMPDTGRTIGIDLGLTHFAVLSDGTKIDSPRFLRRAEKKLKKAQRELSRKQKGSRNREKARLKVARAHAKVTDARHEFHHQLSTRLISENQGVAVEDLSVAGLARTRLAKSVHDAGWASFVNMLQYKAARYGRTLVTIGRFEPTSQTCSTCGVKDGPKPLNVREWTCTACGSVHDRDHNAAINVKTAAGLAVSACAAPVRPGAIPAQREETGSHGFPTPARAA

SEQ ID NO: 17994 - protein, 404 aa, unknown
  TnpB Polypeptide
MVEVRRTVVVKLDVGDSDAALLHETIEEYLWACNYVVRDAWEDDDKPTSKTELHDRTYADVRDQTRLQANLVQSARNRAAEAIKGVVARWQNGKEASQPHFTTPSVRYDKRSATFHDDHVSLSTVNGRIKAEYILPPEGDNPQTEYLRNDDYEVTGATLQYRDETDTFFLHIGTKAEVESEIPDDSDAEHSTVLGVDLGIEQIAVTSTGQFWNGGYLNHRRREYERVRSDLQQTGTESAHRTITQMGGRETRWVEDYLHRLSKAIVQEAIAHGCDTIAFEELTDIRDRMPNAKKFHAWAFRRLYDYVAYKAKAEGIETTQVDPAYTSQRCSRCGTTLRENRPSQGKFCCQKCGYEVNADYNAAKNIGMKMLRAGQKSPHGGATRHLALKSGTLNVNGEYSPATQ

SEQ ID NO: 17995 - protein, 450 aa, Thermoanaerobacterium sp.
MECIKTVKFKIKVSDKSFNDTIAIYNEALSYIISIINDEWNTISTLATVEKQLNFIEKLIHNTKKNKSKYDFDSRFYKFPSYLRRAATAEALGAIKSYYSNLENYLKKKAQYEAKGKILKDKMPVLGTKRYSYPVFYKNNMFERTGSNTAKIKVYKNNDWVWHNIEFKTNSLNHRDMTNFKEMNPMLVKSGRKYYLHFTYEKTVKLNKTPLKDRTIIAVDLGLTNSAVCSAMKYDGTVIGRLFINQPVEKDRLYHKINKLAKAQKISGIGRKPNLWRKINNIKNQIINDTVHQIIKFAVYYKADAIVFEYLGKLKSKGNYARRMRIKLKYWAKRKIQEKVREIAHSYGIRVSWINPKNSSALAFDGTGKVIRNSKKDICEFTTGKIYHADLNASYNIGARYFIKEILNPLSEKERLQYQAKVPEIAARSQQTLSTLISLVKAGTQCGYIA

SEQ ID NO: 17996 - protein, 404 aa, Mastigocoleus sp.
MLVFELKAYGKESQYKAVEEAIRTAKFIRNSCIRLWMDKPKTGKNDLQKYCAVLASRFPFANELNSMARQASAERAWSSIFRFYDNCKKGKPGKKGYPRFQKDCRSVEYKTSGWKLADNRKYITFTDKKGIGRLKLKGTRDLHFYQIKQIKRVRLVKRVDGIYVQFCIDVKRSENIEATNCTIGLDVGIAYYYTNSHGEIVENPKFLRKGEKVLKRSQRRVSKKVKGSNNRRKARQILGKRHLKISRQRKDHAVKLARCVVQSNDLIAYEDLRIKNLVKNHCLAKSINDASWYQFRVWVEYFGRVFGRVTVAVPPQYTSQECSSCEQVVKKTLSTRTHVCACGCVMDRDENAARNILRRGLSTVGHTGTFALDASNAWGDETSTQSGVNLVEQVSSKNQESPSL

SEQ ID NO: 17997 - protein, 401 aa, Cuspidothrix sp.
MIVLEYKLKGKQHQYNAIDDAIRTTQFIRNKAIRYWMDAPRELKIDKFALNKYSTELRKEFPFTAELNSMAVQSAAERAWFAISRFYDNCKSNKSGKKGFPRFQKDCRSVEYKTSGWKLHKTKRRITFTDKKGIGELKLLGKWDIHSYNLKDIKRVRLIRRADGYYAQFCISIDVVDIQSKTGEEIGLDVGIESFYTDSNGHHEPNPKFYQKAEKSIKHSQRQIYKKRKGSSGRKKARKLYAKKHLKVSRQRNEHAKRIARNVCKSNDLVAYEDLRVVNMVKNHCLAKSISDASWYLFRQWIEYFAVKFDKVAIAVAPYYTSQKCSSCGVIVKKSLSTRTHKCSCGCELHRDTNAAINILNLAKARGGHPQSNATGVEASTLLGANLVEQVLTMNVESPRL

SEQ ID NO: 17998 - protein, 392 aa, unknown
  TnpB Polypeptide
MLNRTFGCVRVVWNRALAERQQRWQRDHRGTTYAETDAALTVLKKDPELAWLNEVSCVPLQQALRHQHQAFCAFFGKRARYPRFKSRRCRQSAHYTRSAFSMRDGALRLAKTPGLLVFVWSWPAVDPATLGPTMVIISREPDGRWYVTLAVDAQPQEPLPAVGRAVGVDLGVHDFVVTSDGDRVANPRHLERKARNLGRYQRRLARCQKGSANRAKARAKVARAHRKVGNARRDFLHRTTTGLVRGNDLIAIEDLAIKNMVRNRRLARAISDCGWGEFRRQLQYKCERAGRQLVVIGRWYPSSKMCSACGFVLAELSLSARTWRCPSCRTRHDRDLNAAKNILAAGLAVARGNPGDACGADVRHLETPSVQSAAKQEPQPVTAGIPVLQGEE

SEQ ID NO: 17999 - protein, 379 aa, unknown
  TnpB Polypeptide
MANKAIKYRVYPTTEQSIMFAKTFGCCRKVYNLMLSDKIEGYKTTGKFPMVTPAKYKNEYPYLREVDSLALANKQMDLQKAFRNRFSKSRKKNNGFPQYKSAKHSRKAYTTNNQKGTVAIINNKFIKLPKIGKVKAVIHRIPNSDWIIKSATVSQESDGKYYISVLFEFDNVTNPYVADKTNAIGLDYASDGLYVDSNGNIGTKHKYYRESHDKLAKEQRKLSRMQGSKKGEEKSNNYIKQLRKVNKIHRHIANQRLDNLHKISTEIANQYDVVCVESLNMQAMSNKEFGNGKATLDNGYGVFLSMLEYKLANRNKYLVKVDKWFPSSQICHCCGALHPEMKDLTVRIMKCDCGLTISRDRNAAINILQEGLRLLTEVA

SEQ ID NO: 18000 - protein, 327 aa, unknown
  TnpB Polypeptide
MLNLIYNNKDERLHRLLKETNVNLFKCAAIHLSSALTKNKPIDPKEYLKNNIINLSLFEDNFLIKDKMISFYNVKNIKIRSKIIYYPYCIPKTLLIKKETGERYFALVTCYFDDIKTKNIDINNSIGLDYSLKHFYIDSNGNYPDFPFDAIRPYERKISIYKNKLKKQTENSNNYERTKRKLKITSNKISNIRKFFQVNLANQLAEKYDIICVENISSKIIASVNNKDSNNSKYKFGFNVYRLAYDKFQGILKKKCEMNGKIFIKIEKFYKSSQTCSKCGNINRDTKDLSLRIYTCNKCGFTCDRDINAAINIKNKGIEEYKNSLKK

SEQ ID NO: 18001 - protein, 421 aa, Anabaena sp.
LYNASVYNRFTQYQKFNYSVSYFEQQNCLPAFKKVWTEYKIINSQALQATLKRVDFAFERWFKGLGKRPRYKSTRHYSGWTYPAKSGYSVESNGENGYINVAKIGRIQMRGKAKYWGTPTTCTIVYRNGKWYASITIDVLDQVLKPDVSPTGAIGIDLGCKLALSITDGENHQQIEAPKFLRNAEQKIKKASKEKRRKRTPNRNKKIKASRRYKKAQSKVTKLVRKIGNQRQNWVHQVAAEIVSGNSFVATEKLEVKNMTSIAKKGKRKKQKAGLNKSILDVGFGMLRSTIKYKVEQIGGVFVEVPTKKVKPSQTCPKCGHQHKKTLDIRVHECCFCGYVQDRDIAAAEVMLYWAKGILPGLGTSLVVAESPSSTSSTKARKQAGSMRQLGAKKRQKSVEVSANKEPWDVETHSSGEANCG

SEQ ID NO: 18002 - protein, 521 aa, unknown
  TnpB Polypeptide
MNPRMPKGEAPKLFLGVHARLVFPDPRDEAAVLDLMRRFSSATRFAYQRLLEGQDRKELKREDGPLCALFGLNTRYADGAIEKAQATLDSAKELGQDPRKVVFGGRKLFEQLKRKHLSGKALLALKRAWKERRQGLLYSRGDAAKKGNANLRLEPQGDALWLRVNLGNGAYVCARVRTSHPHLKTLLQRAYASLPYNVTLRLEDGKVYAHFTWSEALPPPVHTKANGVLGIDANGDPYHLALAVVSPDGNLKRHLTLSLEEVDRAPNKGAKELLLWKVAHQVVALAEEHGVAITTEKLKYLRKSWRGDGSGRAFRHKQHRFAYRSLLEKIHSLARKRGVEVLEVSPQDTSTIGMLKYAPGLSLSKDVAAAYVIGRRALGFEEKLPKGYEALLKDESFLREARGFYEARMAQLGAKCKAEKNPYLKRRWSRELKRAQSALASLSSPWGSPGSRKGVTKGRNPSGANPWRVLRVGLFLPLLGLEVPRDLSPLKPILHGLWKGWKIGSGPHPGGGPGCANVHFC

SEQ ID NO: 18003 - protein, 413 aa, Halophilic sp.
VITRLDVSPSDESLLRETVSEWKRGCQIAVDKSWDQYTSKTTVQQIAYDDIREQTELGSQHAILASHQAAENIKTCLSRREDGKSVSKPTYTSPTVTYDPRTLTLFREKEQVTLTTIESRIQADLVLPADENGYQYKYLDGEDWELTESTLHYRDGEWYLHIGVRKLAPETQQAEETTENGTVLGVDLGVNEIAVTSTARFFSASELNHKRREFDRVHFGLQACGTRNAHRTLETVTGRETEYVKHVLHSVSKELVAEALRYDCAGIVFEELAGIRERLPNADWHSKWAFDVLLTYVTYKAEAAGLFVETIPPNNTSKRCPECGFVADDNRPERDAFECQQCGNKNHADYNAAKNVADAYLRREQQSSRRRGVSQYALKSGTVTPNGVLLPTLMGLRQRTWTSLTHNKANSVV

SEQ ID NO: 18004 - protein, 441 aa, unknown
  TnpB Polypeptide
MATTMIKGHKIRLNPTPEQEDYLRRACGTRRFVYNWGLAEWNKQYKEYKEGKREKKPNANELKKHFQAIREKEFRWTFDVTKCVIEGAFDDLADAFSRFFKGQNEYPTFKKKNKSRESFYIANDKFSVGDHWIVVSVLGQFLLDKQQTDGTLPQKIRNKYKYKRGLGKVNMTESLRFVIPDPNQKPGKRRNERKKVPCSSVKIMGATIGMSGGYWCASIHVEVPAVAVVNTHPVVGVDVGIKEAAIVSDGRRFENQKPLARQIKKLKRLTRSFSRKQYDPETKRGSKNREKARVKLARLHGAIAQIREDAHHKLTTEIARTCSVVGLEDLHVKGMFKNRKLARALADAELGQLLRFFETKMQAVGGLALFVDRFFPSTKMCSGCGHRKKRMPLKYRTYCCLKCGLVMDRDLNAAINLERETRRILGEVLHVPVADSGSGPT

SEQ ID NO: 18005 - protein, 421 aa, unknown
  TnpB Polypeptide
MEQTTGFKTITYRFRLHCEQEEWLKNTKNIYNEVLQFYYSVLLQEPELESLGNMQLMRQLELLSVGSKAERETKYPVPFGKVPLYFRRAAINDAIRLFRSFSAGKEHGANQAGSFGASPVYYKGMYKEFTTESVCLKLFTGERWNWVTCQLDACGREFDGTEKFMSPILKVGTKKTMLHVPMQKPVQDVRTVKERLEDKESICAVAFPSNDCMAVLVLLSPEGEFLESRFIRGGKELSHRRKNLQKQIQENRRRMGAEQWKHSPEENKTLKEKMHRITDDAAHRVSREIVNFCKDKGAGIIVMPHYKSALDFTTMAYMSATNYDWLGRRIISYVKYKSFGEGIVSTTVNPGNISAKCYLCGENVKKYNGTSTPGVHYYGGKNFVCLNGHKGNSYFNSAMNIGLKFLRERAGAPAKETEKKS
